United States Patent Application Publication US 2022/0064737 A1 - sequence listing, part 2

SEQ ID NO: 22257 - DNA, 21 bp, Homo sapiens
  chr16:19040620-19040641
  hypo
ccggcacgagatttgcacttc

SEQ ID NO: 22258 - DNA, 31 bp, Homo sapiens
  chr16:19051021-19051052
  hypo
gatactttaaattgcccgtttatacagaata

SEQ ID NO: 22259 - DNA, 39 bp, Homo sapiens
  chr16:19051138-19051177
  hypo
ctgaagaaggagatggcggccgggcgaggtggctcatgc

SEQ ID NO: 22260 - DNA, 20 bp, Homo sapiens
  chr16:19075686-19075706
  hypo
gtgtgtgtgtttgagacgaa

SEQ ID NO: 22261 - DNA, 31 bp, Homo sapiens
  chr16:19252127-19252158
  hypo
ccctcctcagcctccccgtcatacttgctgg

SEQ ID NO: 22262 - DNA, 31 bp, Homo sapiens
  chr16:19252163-19252194
  hypo
aaagtctggaaggggccgaggcatcaggggg

SEQ ID NO: 22263 - DNA, 3 bp, Homo sapiens
  chr16:19252214-19252217
  hypo
caa

SEQ ID NO: 22264 - DNA, 31 bp, Homo sapiens
  chr16:19252578-19252609
  hypo
agttctgactttgctccgagttaggagtggg

SEQ ID NO: 22265 - DNA, 31 bp, Homo sapiens
  chr16:19456420-19456451
  hypo
agcctgggcagtagagcgagactctgttaaa

SEQ ID NO: 22266 - DNA, 31 bp, Homo sapiens
  chr16:19498384-19498415
  hypo
acctgtgacctggtggcgcttaaagctgggg

SEQ ID NO: 22267 - DNA, 58 bp, Homo sapiens
  chr16:19708503-19708561
  hypo
tgattgggctctttgccgtcggctctgctgcttctgtgactgtcgctgctctaggctg

SEQ ID NO: 22268 - DNA, 55 bp, Homo sapiens
  chr16:19743741-19743796
  hypo
tgaacaggcagagagtcggtattttgggattgggcggtggcggcaggagggtctc

SEQ ID NO: 22269 - DNA, 35 bp, Homo sapiens
  chr16:19845504-19845539
  hypo
aactaaggagtagctacgagcgatggagcttatgc

SEQ ID NO: 22270 - DNA, 31 bp, Homo sapiens
  chr16:19845561-19845592
  hypo
gcaccttatgtttccacgtagtcctcacaca

SEQ ID NO: 22271 - DNA, 48 bp, Homo sapiens
  chr16:19845607-19845655
  hypo
gtgagatcatctccatcgtacagatgaggaaaccggggctgggaggat

SEQ ID NO: 22272 - DNA, 31 bp, Homo sapiens
  chr16:19845659-19845690
  hypo
ggcttgcacaagtccacgcagccagtcaggc

SEQ ID NO: 22273 - DNA, 23 bp, Homo sapiens
  chr16:19848129-19848152
  hypo
ggctgatgcggaatgcttttgaa

SEQ ID NO: 22274 - DNA, 73 bp, Homo sapiens
  chr16:19883197-19883270
  hypo
cgtcctcctcgaaggccgtctcccgcatcctgggctgcgacgtgtcgaagtagttgggcgtgttctcctgcag

SEQ ID NO: 22275 - DNA, 55 bp, Homo sapiens
  chr16:19883289-19883344
  hypo
tggatctcagggatggcgtggaagatgacgaagacccagccgctggccgccagcg

SEQ ID NO: 22276 - DNA, 48 bp, Homo sapiens; identical to SEQ ID NO: 5563
  chr16:20817585-20817633
  hypo

SEQ ID NO: 22277 - DNA, 31 bp, Homo sapiens
  chr16:20822043-20822074
  hypo
ctaacaatgagaaacccgacacccaacatct

SEQ ID NO: 22278 - DNA, 31 bp, Homo sapiens
  chr16:20822088-20822119
  hypo
caatccttattgctgccgctgacccaccctc

SEQ ID NO: 22279 - DNA, 31 bp, Homo sapiens
  chr16:21541460-21541491
  hypo
ttgatccagacccgacgcggtgactcatgcc

SEQ ID NO: 22280 - DNA, 38 bp, Homo sapiens
  chr16:21566610-21566648
  hypo
ttaaaaactggaaagccgtgtttcgctgctcttcctgt

SEQ ID NO: 22281 - DNA, 24 bp, Homo sapiens
  chr16:21609382-21609406
  hypo
gctgttgggccaggtgcggtggct

SEQ ID NO: 22282 - DNA, 31 bp, Homo sapiens
  chr16:21633193-21633224
  hypo
ctttttttttgggagacggaatctctccctg

SEQ ID NO: 22283 - DNA, 31 bp, Homo sapiens
  chr16:22084168-22084199
  hypo
tatgccttctgtttgtcgattagcattagct

SEQ ID NO: 22284 - DNA, 31 bp, Homo sapiens
  chr16:23496846-23496877
  hypo
cataagaaatgaaaatcgatgttcacacaaa

SEQ ID NO: 22285 - DNA, 31 bp, Homo sapiens
  chr16:23606210-23606241
  hypo
ctatcctaccttaagacggttatttttattc

SEQ ID NO: 22286 - DNA, 23 bp, Homo sapiens
  chr16:23847030-23847053
  hypo
gggcacatctcctgaacgcagcc

SEQ ID NO: 22287 - DNA, 89 bp, Homo sapiens; identical to SEQ ID NO: 5570
  chr16:23847310-23847399
  hypo

SEQ ID NO: 22288 - DNA, 108 bp, Homo sapiens; identical to SEQ ID NO: 5571
  chr16:23847403-23847511
  hypo

SEQ ID NO: 22289 - DNA, 22 bp, Homo sapiens
  chr16:23847933-23847955
  hypo
cggcgtcgcgggagcctttgct

SEQ ID NO: 22290 - DNA, 127 bp, Homo sapiens; identical to SEQ ID NO: 5573
  chr16:23847956-23848083
  hypo

SEQ ID NO: 22291 - DNA, 31 bp, Homo sapiens; identical to SEQ ID NO: 5574
  chr16:23848113-23848144
  hypo

SEQ ID NO: 22292 - DNA, 111 bp, Homo sapiens; identical to SEQ ID NO: 5575
  chr16:23848150-23848261
  hypo

SEQ ID NO: 22293 - DNA, 98 bp, Homo sapiens; identical to SEQ ID NO: 5576
  chr16:23848309-23848407
  hypo

SEQ ID NO: 22294 - DNA, 45 bp, Homo sapiens; identical to SEQ ID NO: 5577
  chr16:24354627-24354672
  hypo

SEQ ID NO: 22295 - DNA, 31 bp, Homo sapiens
  chr16:24739329-24739360
  hypo
agtcataatcagttaacgttttggtgcatat

SEQ ID NO: 22296 - DNA, 31 bp, Homo sapiens
  chr16:24739386-24739417
  hypo
cactagcttaacctatcggagaggacaggaa

SEQ ID NO: 22297 - DNA, 56 bp, Homo sapiens
  chr16:24772208-24772264
  hypo
ccagtttttccattaacggctttccattctaggatccgatgcgaaatgctgccttg

SEQ ID NO: 22298 - DNA, 64 bp, Homo sapiens
  chr16:24837169-24837233
  hypo
ttttcttcccccttcacggccctcgcttctccctgcaggagctcgggggcgaaacctgtgtatg

SEQ ID NO: 22299 - DNA, 31 bp, Homo sapiens
  chr16:24837275-24837306
  hypo
tgtgagctaatgttgtcggacaccttactat

SEQ ID NO: 22300 - DNA, 31 bp, Homo sapiens
  chr16:24837309-24837340
  hypo
caaatgttattcagtgcgttcaatgtatatt

SEQ ID NO: 22301 - DNA, 31 bp, Homo sapiens
  chr16:24937029-24937060
  hypo
cattatcacatgagaacgagcatatgatgta

SEQ ID NO: 22302 - DNA, 31 bp, Homo sapiens
  chr16:25006929-25006960
  hypo
actgagtaggagccagcggcaatccaccacc

SEQ ID NO: 22303 - DNA, 76 bp, Homo sapiens
  chr16:25006995-25007071
  hypo
taggccatcaggtgtgcgaaccaaactgaaggactgcggaaaacacggaaaggaactctgccggactctgggcctt

SEQ ID NO: 22304 - DNA, 19 bp, Homo sapiens
  chr16:25018660-25018679
  hypo
agaaagtagttcattacga

SEQ ID NO: 22305 - DNA, 31 bp, Homo sapiens
  chr16:25266590-25266621
  hypo
gcttccaggttcctcccgagacaccgccctg

SEQ ID NO: 22306 - DNA, 31 bp, Homo sapiens
  chr16:27186525-27186556
  hypo
gttctcctgtctagcccgccactactggact

SEQ ID NO: 22307 - DNA, 33 bp, Homo sapiens
  chr16:27242668-27242701
  hypo
ggcctgtggccgggcacgctggctcacgcctgt

SEQ ID NO: 22308 - DNA, 31 bp, Homo sapiens
  chr16:27268603-27268634
  hypo
attagaaagatgggcccgtgtaagattgtga

SEQ ID NO: 22309 - DNA, 31 bp, Homo sapiens
  chr16:27268647-27268678
  hypo
ctcagctcaggagtaccggttaacaagttac

SEQ ID NO: 22310 - DNA, 59 bp, Homo sapiens
  chr16:27268710-27268769
  hypo
caacacagcaccagagcgccctgggaacagggaaacggtactcacggtcatggaccttg

SEQ ID NO: 22311 - DNA, 40 bp, Homo sapiens; identical to SEQ ID NO: 5578
  chr16:27280120-27280160
  hypo

SEQ ID NO: 22312 - DNA, 31 bp, Homo sapiens
  chr16:27284486-27284517
  hypo
cactcctgatgttttccgttttctccgtaag

SEQ ID NO: 22313 - DNA, 31 bp, Homo sapiens
  chr16:27356583-27356614
  hypo
taagtgcccaggaaggcgtattgagatgagg

SEQ ID NO: 22314 - DNA, 31 bp, Homo sapiens
  chr16:27356637-27356668
  hypo
gctgctgattgaaaaccgaactgggaacatt

SEQ ID NO: 22315 - DNA, 79 bp, Homo sapiens
  chr16:27356684-27356763
  hypo
cactggtcagctgctgcggctttggatggtcttgaccgtggaaggctgaccttcttctggtacccggagtccctgcagg

SEQ ID NO: 22316 - DNA, 31 bp, Homo sapiens
  chr16:27475835-27475866
  hypo
aatttgagtcctggagcgctggcctcttggc

SEQ ID NO: 22317 - DNA, 84 bp, Homo sapiens
  chr16:27475870-27475954
  hypo
gtcatctgggtgccctcggcgtcggtctccccattctcactggcccagctggcgcgcctcttggtgccccgggggctgtgagaa

SEQ ID NO: 22318 - DNA, 34 bp, Homo sapiens
  chr16:27476020-27476054
  hypo
tcttctctctggatgtcggcgtcttctctgtctt

SEQ ID NO: 22319 - DNA, 31 bp, Homo sapiens
  chr16:27560715-27560746
  hypo
tatccccaatcctgttcgccattaccccaaa

SEQ ID NO: 22320 - DNA, 73 bp, Homo sapiens
  chr16:27560748-27560821
  hypo
acacacagggacaaaacgggacatcactagattctccccctccccccgccaactccatcggactccagggccc

SEQ ID NO: 22321 - DNA, 61 bp, Homo sapiens
  chr16:27560838-27560899
  hypo
cccagattagccttaccgccgtgccccaactcaatcaacaggcctccggtacttgcacagc

SEQ ID NO: 22322 - DNA, 31 bp, Homo sapiens
  chr16:27735316-27735347
  hypo
ttctctgatttctgatcgttgaggttgtttg

SEQ ID NO: 22323 - DNA, 31 bp, Homo sapiens
  chr16:27786949-27786980
  hypo
cctcatggtgagaagacgtggttggttgtgg

SEQ ID NO: 22324 - DNA, 31 bp, Homo sapiens
  chr16:28229877-28229908
  hypo
acaagggaaccgggcacggtggctcacgcct

SEQ ID NO: 22325 - DNA, 30 bp, Homo sapiens
  chr16:28237436-28237466
  hypo
gtgagccactgcgcccgacctaaggttcta

SEQ ID NO: 22326 - DNA, 31 bp, Homo sapiens
  chr16:28585538-28585569
  hypo
gtgctgaggtccagtgcggtgtttaaccttg

SEQ ID NO: 22327 - DNA, 43 bp, Homo sapiens
  chr16:28585607-28585650
  hypo
catgattcttccctcacggcgagctgcccgcatgcacagtgtg

SEQ ID NO: 22328 - DNA, 41 bp, Homo sapiens
  chr16:28878713-28878754
  hypo
cctggagatgcctgaccgggagaacacgtttgtggttaagg

SEQ ID NO: 22329 - DNA, 34 bp, Homo sapiens
  chr16:28878758-28878792
  hypo
aattcaacttcccagccgccggcagtgcttgtgt

SEQ ID NO: 22330 - DNA, 31 bp, Homo sapiens
  chr16:28880885-28880916
  hypo
aataatcatgaccccacgcaggccccaagca

SEQ ID NO: 22331 - DNA, 31 bp, Homo sapiens
  chr16:28887786-28887817
  hypo
gcgccaaaagccttggcgggtgtgagcctga

SEQ ID NO: 22332 - DNA, 56 bp, Homo sapiens
  chr16:28914704-28914760
  hypo
tgccagtcattgggctcgacgaaatcctcaagttcgttgctcggaactacctagag

SEQ ID NO: 22333 - DNA, 31 bp, Homo sapiens
  chr16:28914905-28914936
  hypo
gcaggggccacatctccggggcagccccact

SEQ ID NO: 22334 - DNA, 20 bp, Homo sapiens
  chr16:28947335-28947355
  hypo
gccaccgcgcccgtccgcct

SEQ ID NO: 22335 - DNA, 35 bp, Homo sapiens
  chr16:29001661-29001696
  hypo
ttcggcctgtgtcccccgaacgctctgcaccttct

SEQ ID NO: 22336 - DNA, 31 bp, Homo sapiens
  chr16:29001744-29001775
  hypo
atagaataaaggcctgcgtgtgtctgtgttg

SEQ ID NO: 22337 - DNA, 41 bp, Homo sapiens
  chr16:29118828-29118869
  hypo
aacaccctggctgccacgccctggcccggcccccccgacct

SEQ ID NO: 22338 - DNA, 64 bp, Homo sapiens
  chr16:29231512-29231576
  hypo
gctgctgttcctggtccgtcttactgtggagtgtattagactgcgggggcgtccacaagggggg

SEQ ID NO: 22339 - DNA, 31 bp, Homo sapiens
  chr16:29231587-29231618
  hypo
ccggagacctttcttccgggaggccaagttt

SEQ ID NO: 22340 - DNA, 31 bp, Homo sapiens
  chr16:29262665-29262696
  hypo
ttattagttttccattcgcccaatcatttct

SEQ ID NO: 22341 - DNA, 31 bp, Homo sapiens
  chr16:29262712-29262743
  hypo
tttcaaatgataagagcgatgtttacttttc

SEQ ID NO: 22342 - DNA, 42 bp, Homo sapiens
  chr16:29324826-29324868
  hypo
gcgtgcggggggcatccgggatctcagcgtgtgggggctgct

SEQ ID NO: 22343 - DNA, 80 bp, Homo sapiens; identical to SEQ ID NO: 5579
  chr16:29606231-29606311
  hypo

SEQ ID NO: 22344 - DNA, 36 bp, Homo sapiens; identical to SEQ ID NO: 5582
  chr16:29691805-29691841
  hypo

SEQ ID NO: 22345 - DNA, 82 bp, Homo sapiens
  chr16:29755718-29755800
  hypo
gggctcccaaactggacgctggcctctggcctctgctcgggttcagcccagctcaccaggcctgtggcggggggcctcccct

SEQ ID NO: 22346 - DNA, 50 bp, Homo sapiens
  chr16:29755813-29755863
  hypo
cccccagaaggtgctccgggctgggacctccagtacggtctgggggccca

SEQ ID NO: 22347 - DNA, 31 bp, Homo sapiens
  chr16:29797108-29797139
  hypo
aggcaaagggtgtccacgtgggatagactgg

SEQ ID NO: 22348 - DNA, 31 bp, Homo sapiens
  chr16:29797162-29797193
  hypo
tgctccattatctcttcgaggaccccttctc

SEQ ID NO: 22349 - DNA, 31 bp, Homo sapiens; identical to SEQ ID NO: 5583
  chr16:29822267-29822298
  hypo

SEQ ID NO: 22350 - DNA, 50 bp, Homo sapiens; identical to SEQ ID NO: 5584
  chr16:29822622-29822672
  hypo

SEQ ID NO: 22351 - DNA, 31 bp, Homo sapiens
  chr16:29830870-29830901
  hypo
tccaggaagctcagcccggagccagaaacgg

SEQ ID NO: 22352 - DNA, 15 bp, Homo sapiens
  chr16:29836030-29836045
  hypo
cgagattgtgccact

SEQ ID NO: 22353 - DNA, 31 bp, Homo sapiens; identical to SEQ ID NO: 5586
  chr16:29836136-29836167
  hypo

SEQ ID NO: 22354 - DNA, 49 bp, Homo sapiens; identical to SEQ ID NO: 5587
  chr16:29910604-29910653
  hypo

SEQ ID NO: 22355 - DNA, 31 bp, Homo sapiens; identical to SEQ ID NO: 5588
  chr16:29910742-29910773
  hypo

SEQ ID NO: 22356 - DNA, 31 bp, Homo sapiens
  chr16:29911101-29911132
  hypo
cctcttcccagggtgccgaggggctgcatag

SEQ ID NO: 22357 - DNA, 31 bp, Homo sapiens
  chr16:29936459-29936490
  hypo
aagtctcacttgggcacgaagggtccatact

SEQ ID NO: 22358 - DNA, 66 bp, Homo sapiens
  chr16:30000934-30001000
  hypo
aagcagttccaggagacgtgtaagatccagactcggcagtacaaggctctgcgagcacacttgctg

SEQ ID NO: 22359 - DNA, 87 bp, Homo sapiens
  chr16:30017416-30017503
  hypo
gcccaccctgtgtaaacgtgcaacacactcgtgcgaaggttgggtactggacccggctcgatgggcctgtgccgggacactgctgtc

SEQ ID NO: 22360 - DNA, 35 bp, Homo sapiens
  chr16:30017510-30017545
  hypo
gctgaggacagagccccggccgcagggggcagctc

SEQ ID NO: 22361 - DNA, 113 bp, Homo sapiens
  chr16:30017548-30017661
  hypo
ggtcagggtgtgccagcgctccagggctgcgtccggctgctgcaggcagtcactccagtgcttccgagcctcgcctcgggcacctggccccagggacacgccacctggggagc

SEQ ID NO: 22362 - DNA, 31 bp, Homo sapiens
  chr16:30018178-30018209
  hypo
gcagtccccggcgccgcgagctgtagctgag

SEQ ID NO: 22363 - DNA, 31 bp, Homo sapiens
  chr16:30124538-30124569
  hypo
ccctgccctgccacttcgctctccttctctc

SEQ ID NO: 22364 - DNA, 85 bp, Homo sapiens
  chr16:30124636-30124721
  hypo
tgttctcacccctacccggctcacctcctcggtgggcccccaggcggatgcggaaggtgggagccctgggcgtgtgcagcagatg

SEQ ID NO: 22365 - DNA, 31 bp, Homo sapiens
  chr16:30124786-30124817
  hypo
gcaaaaggctcatgaccgtactcccacagaa

SEQ ID NO: 22366 - DNA, 36 bp, Homo sapiens
  chr16:30124824-30124860
  hypo
cagccacacgctcagccgtccgcgggactgtgctgc

SEQ ID NO: 22367 - DNA, 31 bp, Homo sapiens
  chr16:30124863-30124894
  hypo
cctagccagtgtgggccggctctactactgg

SEQ ID NO: 22368 - DNA, 31 bp, Homo sapiens
  chr16:30169971-30170002
  hypo
caagaaagtgaaaaaacgcctgcctgcccgc

SEQ ID NO: 22369 - DNA, 31 bp, Homo sapiens
  chr16:30362422-30362453
  hypo
cgggtcccttttgccacgcaaggtaacactt

SEQ ID NO: 22370 - DNA, 29 bp, Homo sapiens
  chr16:30476455-30476484
  hypo
atcatatagggccaggcgcagtggctcag

SEQ ID NO: 22371 - DNA, 68 bp, Homo sapiens
  chr16:30537608-30537676
  hypo
gcgcaagtccactcctcggacgggcgctccctcctcacctctgaggtacccttcggggctcctcattt

SEQ ID NO: 22372 - DNA, 31 bp, Homo sapiens
  chr16:30562563-30562594
  hypo
aaatggcctggacagacgagggatgggcatg

SEQ ID NO: 22373 - DNA, 31 bp, Homo sapiens
  chr16:30567445-30567476
  hypo
ggggagagttcaggctcggctcatcctggtc

SEQ ID NO: 22374 - DNA, 61 bp, Homo sapiens
  chr16:30567477-30567538
  hypo
ttgaatcccacagcccgcgtggacagggacaggcctgctggatccccggctgctcctggga

SEQ ID NO: 22375 - DNA, 77 bp, Homo sapiens
  chr16:30567546-30567623
  hypo
agtgacacctgttcctcggctgcagagccagacagagccgggagggagagaacagcccattccgcctcggggctggg

SEQ ID NO: 22376 - DNA, 31 bp, Homo sapiens
  chr16:30628279-30628310
  hypo
caagccaattgggcatcgtttacctggagtt

SEQ ID NO: 22377 - DNA, 31 bp, Homo sapiens
  chr16:30700819-30700850
  hypo
tcattttttcataacacgtatcagccattat

SEQ ID NO: 22378 - DNA, 57 bp, Homo sapiens
  chr16:30784031-30784088
  hypo
tgtggagaggttgggccgtgtcacctcctgaagagtgcggtacgccaggttgagacc

SEQ ID NO: 22379 - DNA, 31 bp, Homo sapiens
  chr16:30794734-30794765
  hypo
aggttgtggttctggccgaagcgcttcccgc

SEQ ID NO: 22380 - DNA, 5 bp, Homo sapiens
  chr16:30826378-30826383
  hypo
aggga

SEQ ID NO: 22381 - DNA, 48 bp, Homo sapiens
  chr16:30826427-30826475
  hypo
gagcatgaaatgcatacgttcaagaagctgagccgacaaagggcttac

SEQ ID NO: 22382 - DNA, 61 bp, Homo sapiens
  chr16:30826478-30826539
  hypo
aggtggactgaaaattcgatgtttccaattcaaaacatctgctctccgaggtgtgggtgaa

SEQ ID NO: 22383 - DNA, 31 bp, Homo sapiens
  chr16:30826546-30826577
  hypo
ggggtccaaaaatgtccgagtcccaccacct

SEQ ID NO: 22384 - DNA, 31 bp, Homo sapiens
  chr16:30831409-30831440
  hypo
tgtgagccattgtacccggcctagtttttaa

SEQ ID NO: 22385 - DNA, 57 bp, Homo sapiens
  chr16:30845546-30845603
  hypo
tctccacgcctccacccgaggcgggcgcctgggctgaaaggccgcttgtccacatgg

SEQ ID NO: 22386 - DNA, 185 bp, Homo sapiens
  chr16:30845812-30845997
  hypo
gccggcgggtcccctgcgcttgtccccgccacggcccttgcccgctgtggacccggaggctcagtgccggcaggactcgggactcggcgcctctcccggggtggcaggcgcctcgcatggcacactcagaccgctgggagggtggccgcatgggtgcgtgaggaggtgggcgaggcagcccagtg

SEQ ID NO: 22387 - DNA, 129 bp, Homo sapiens
  chr16:30846008-30846137
  hypo
taggcctctagcaaggcggcctcaggcactggatgtggtccgagttctgccctaagcccttcccatgcattcgggcgccagtggcgagccagatgggtgctgtggccttaggttcgggcaggtgtgggg

SEQ ID NO: 22388 - DNA, 37 bp, Homo sapiens
  chr16:30846170-30846207
  hypo
gctgggaagctctttccgccctcggggcacaggtagt

SEQ ID NO: 22389 - DNA, 25 bp, Homo sapiens
  chr16:30853903-30853928
  hypo
ttttaaaacagagtctcgctctgtc

SEQ ID NO: 22390 - DNA, 115 bp, Homo sapiens
  chr16:30906985-30907100
  hypo
ttccagcaattgctcacggcaatacacacacccactcacacgaacacacgcacacacatgcacgcgcacatgcacacacgcgcacacctgcacactcacacgcacacaaatccac

SEQ ID NO: 22391 - DNA, 51 bp, Homo sapiens
  chr16:30907219-30907270
  hypo
tgtctatgggcttcctcgacagaccgcgagcccctcgcgggggccagaaac

SEQ ID NO: 22392 - DNA, 31 bp, Homo sapiens; identical to SEQ ID NO: 5602
  chr16:30959909-30959940
  hypo

SEQ ID NO: 22393 - DNA, 31 bp, Homo sapiens; identical to SEQ ID NO: 5603
  chr16:30964524-30964555
  hypo

SEQ ID NO: 22394 - DNA, 82 bp, Homo sapiens
  chr16:30999437-30999519
  hypo
ctcgtgggaggatagccggacccgtaccattctctgggtacaggccgctacgggttcagcccagtgacggtggggctggggc

SEQ ID NO: 22395 - DNA, 50 bp, Homo sapiens
  chr16:30999538-30999588
  hypo
acatccacccaggtcccgagccctcacaccctggacgggaagggacagct

SEQ ID NO: 22396 - DNA, 31 bp, Homo sapiens
  chr16:31002040-31002071
  hypo
actgtcctttctcccacgcaccacctacctg

SEQ ID NO: 22397 - DNA, 47 bp, Homo sapiens
  chr16:31012747-31012794
  hypo
ggctggggctgggtgccggggctgaggctgggcggtgggactagggg

SEQ ID NO: 22398 - DNA, 38 bp, Homo sapiens
  chr16:31012864-31012902
  hypo
atccatgaagtggtcccgatccacgtggaccacctcct

SEQ ID NO: 22399 - DNA, 31 bp, Homo sapiens
  chr16:31012905-31012936
  hypo
catcatcactgtctttcgcctggggacaagg

SEQ ID NO: 22400 - DNA, 45 bp, Homo sapiens
  chr16:31073616-31073661
  hypo
ggacttggcatgaaggcgacagacccataacgtgaccccactgcc

SEQ ID NO: 22401 - DNA, 31 bp, Homo sapiens; identical to SEQ ID NO: 5604
  chr16:31075213-31075244
  hypo

SEQ ID NO: 22402 - DNA, 31 bp, Homo sapiens
  chr16:31138537-31138568
  hypo
tccacatcgggaactacgaaattgatgcctg

SEQ ID NO: 22403 - DNA, 31 bp, Homo sapiens
  chr16:31138570-31138601
  hypo
atttctcaccattccccgaagactatgggaa

SEQ ID NO: 22404 - DNA, 31 bp, Homo sapiens
  chr16:31138606-31138637
  hypo
ccaagctctggctctgcgagtactgcctcaa

SEQ ID NO: 22405 - DNA, 31 bp, Homo sapiens
  chr16:31138646-31138677
  hypo
atatgagaagagctaccgcttccacttggtg

SEQ ID NO: 22406 - DNA, 62 bp, Homo sapiens
  chr16:31142699-31142761
  hypo
aaggggaggccaagagcggatgttcttcatttcacttcacacatgcacggcaagttgtgctc

SEQ ID NO: 22407 - DNA, 45 bp, Homo sapiens
  chr16:31142792-31142837
  hypo
ccaccccagatccaagcgccagcccagttccggtgggggctcagt

SEQ ID NO: 22408 - DNA, 31 bp, Homo sapiens
  chr16:31143796-31143827
  hypo
cctcttggacaaagtgcggctcctcaggctt

SEQ ID NO: 22409 - DNA, 137 bp, Homo sapiens; identical to SEQ ID NO: 5605
  chr16:31153836-31153973
  hypo

SEQ ID NO: 22410 - DNA, 134 bp, Homo sapiens; identical to SEQ ID NO: 5606
  chr16:31153974-31154108
  hypo

SEQ ID NO: 22411 - DNA, 31 bp, Homo sapiens
  chr16:31381550-31381581
  hypo
acaggtgtgagccaccgcgtccagccattat

SEQ ID NO: 22412 - DNA, 31 bp, Homo sapiens
  chr16:31408992-31409023
  hypo
tgagtgtcttgggccacgggggggtggggtg

SEQ ID NO: 22413 - DNA, 7 bp, Homo sapiens
  chr16:31446853-31446860
  hypo
tcccacc

SEQ ID NO: 22414 - DNA, 86 bp, Homo sapiens
  chr16:31447097-31447183
  hypo
acccagggctgcagcacgctggttcttcagtgtcgggccaggttggacctccggctggaggccttccacaccggaaacactggtag

SEQ ID NO: 22415 - DNA, 119 bp, Homo sapiens
  chr16:31447188-31447307
  hypo
ctctccagtgtgggttcgagggcggtggaggagctcggcactgtcgctgaagcctggccctggcctcgccgagcggtccggccgctctgtgctgcgaggccttccgggctggctcaggg

SEQ ID NO: 22416 - DNA, 31 bp, Homo sapiens
  chr16:31447324-31447355
  hypo
cgcctcccgcgagtcccgtcccgcgctcgca

SEQ ID NO: 22417 - DNA, 67 bp, Homo sapiens
  chr16:31447356-31447423
  hypo
agcttctgggccccatcgccccctcctgctgagctgccggctgggtggctggcggaacctgggcaac

SEQ ID NO: 22418 - DNA, 41 bp, Homo sapiens
  chr16:31464578-31464619
  hypo
gcgctgggaatacaggcgtgagccaccgtaccaagacatcc

SEQ ID NO: 22419 - DNA, 31 bp, Homo sapiens
  chr16:31464627-31464658
  hypo
cagcctgtgtgtgtctcgccaggctcagagc

SEQ ID NO: 22420 - DNA, 31 bp, Homo sapiens
  chr16:31496889-31496920
  hypo
ttggtgcccagggccccggggccatcacctg

SEQ ID NO: 22421 - DNA, 74 bp, Homo sapiens
  chr16:31500521-31500595
  hypo
agctgtgtgcagccctcggcgtgcccagctttcctctgcggcgtgcactacctctacttcgccattgtgctgtt

SEQ ID NO: 22422 - DNA, 68 bp, Homo sapiens
  chr16:31500605-31500673
  hypo
ggcctcctcaccctcacggtctccctgtgcaccgcgcccatccccagaaagcacgtgagtggccaggt

SEQ ID NO: 22423 - DNA, 31 bp, Homo sapiens
  chr16:31500734-31500765
  hypo
gaggacctgaatttctcgactgagggttggg

SEQ ID NO: 22424 - DNA, 31 bp, Homo sapiens
  chr16:31548220-31548251
  hypo
gattgcaatgggtaggcgaagtcccaggatt

SEQ ID NO: 22425 - DNA, 23 bp, Homo sapiens
  chr16:46688038-46688061
  hypo
agggagaccgtggggagagggag

SEQ ID NO: 22426 - DNA, 31 bp, Homo sapiens
  chr16:46781777-46781808
  hypo
tggcaccgtgctgggccgcatcctgctgcat

SEQ ID NO: 22427 - DNA, 31 bp, Homo sapiens
  chr16:46920967-46920998
  hypo
aacagtgcccttcttgcgagagccacatttc

SEQ ID NO: 22428 - DNA, 31 bp, Homo sapiens
  chr16:47567943-47567974
  hypo
tcagctgtggcttgggcggctgcagtggcat

SEQ ID NO: 22429 - DNA, 74 bp, Homo sapiens
  chr16:48209331-48209405
  hypo
tggggcaagaaacaagcggggcctcagtttcctgcatctgcactagcggaagcacagatcgcacctggcgatca

SEQ ID NO: 22430 - DNA, 31 bp, Homo sapiens
  chr16:48209408-48209439
  hypo
ctgacccgctgccctccgtggcccattcttc

SEQ ID NO: 22431 - DNA, 31 bp, Homo sapiens
  chr16:48243649-48243680
  hypo
gcactctatcgggtcacgggtgcactaaaat

SEQ ID NO: 22432 - DNA, 87 bp, Homo sapiens
  chr16:48530909-48530996
  hypo
aagagatcctgaccctcgcctggctttttgtgaaggaaggcgtcgaaaagatctggctcatgggcggagagccgctcatccagccgg

SEQ ID NO: 22433 - DNA, 31 bp, Homo sapiens
  chr16:48577582-48577613
  hypo
gagtggcagtccccaccgactcagtctagat

SEQ ID NO: 22434 - DNA, 31 bp, Homo sapiens
  chr16:48577641-48577672
  hypo
tgcacatgggtatgtgcgagtatgtgtgtac

SEQ ID NO: 22435 - DNA, 66 bp, Homo sapiens
  chr16:48577673-48577739
  hypo
gggagggcatctgtatcgctcaaaagcctcccactggactcggcctgcaggcgagaaatgaggcta

SEQ ID NO: 22436 - DNA, 43 bp, Homo sapiens
  chr16:48641650-48641693
  hypo
agctggggagaatggacgaaggggaatgcgccttagaccagct

SEQ ID NO: 22437 - DNA, 88 bp, Homo sapiens
  chr16:48642041-48642129
  hypo
tctttctgacattctccgagcgttttattactattaatggtttttttccgattctcaagaacacggttttcaccgtgtgacacaggac

SEQ ID NO: 22438 - DNA, 16 bp, Homo sapiens
  chr16:48642132-48642148
  hypo
ctcaatctcctgatct

SEQ ID NO: 22439 - DNA, 31 bp, Homo sapiens
  chr16:49950450-49950481
  hypo
tcaaagaaaagaaggccgagtcccagagaag

SEQ ID NO: 22440 - DNA, 31 bp, Homo sapiens
  chr16:50218669-50218700
  hypo
cagtctcactctgttacgcaggctggagtgt

SEQ ID NO: 22441 - DNA, 52 bp, Homo sapiens
  chr16:50335766-50335818
  hypo
ctttcactctggtcctcgctatgccttggggctggcccgactgccagaccct

SEQ ID NO: 22442 - DNA, 91 bp, Homo sapiens
  chr16:50336502-50336593
  hypo
taacttcatttatccacgcagttgaaagttcaaaaggtgtgaagggcgtgttgtagaaagactccttgtccccagccggcacatctcagag

SEQ ID NO: 22443 - DNA, 31 bp, Homo sapiens
  chr16:50336746-50336777
  hypo
ctgtgtgcagggtgctcgtctgtagctcctg

SEQ ID NO: 22444 - DNA, 73 bp, Homo sapiens
  chr16:50666331-50666404
  hypo
agcaccctgcaatgggcgatgagggcagggcgtggctggacgggccaggcgggccgtgcgggtggtgttcact

SEQ ID NO: 22445 - DNA, 31 bp, Homo sapiens
  chr16:50667597-50667628
  hypo
tgtatgagagccaggccgggcagccggtcca

SEQ ID NO: 22446 - DNA, 31 bp, Homo sapiens
  chr16:52498847-52498878
  hypo
tagatttgatgctgttcgcttacttagagaa

SEQ ID NO: 22447 - DNA, 1 bp, Homo sapiens
  chr16:52498940-52498941
  hypo
t

SEQ ID NO: 22448 - DNA, 31 bp, Homo sapiens
  chr16:52860764-52860795
  hypo
tgcatgtttttcaaaccgtcaaaggactttc

SEQ ID NO: 22449 - DNA, 47 bp, Homo sapiens
  chr16:53467364-53467411
  hypo
aaaaaagtttaattcacgcagagccagctgaacggcagacaggagtt

SEQ ID NO: 22450 - DNA, 31 bp, Homo sapiens
  chr16:53467425-53467456
  hypo
agcctaccagaaaattcggagactggggttt

SEQ ID NO: 22451 - DNA, 31 bp, Homo sapiens
  chr16:53563622-53563653
  hypo
caagtgtcgagcagacgcggatgtgaatatg

SEQ ID NO: 22452 - DNA, 31 bp, Homo sapiens
  chr16:54201073-54201104
  hypo
catgagccaccgtgcccggtgtgtaatttta

SEQ ID NO: 22453 - DNA, 31 bp, Homo sapiens
  chr16:55052637-55052668
  hypo
gaaagaaaggcagcttcgaggagtgaaaagt

SEQ ID NO: 22454 - DNA, 31 bp, Homo sapiens
  chr16:55052819-55052850
  hypo
ggcactgcacccactccgggcccttttgaag

SEQ ID NO: 22455 - DNA, 47 bp, Homo sapiens
  chr16:55053596-55053643
  hypo
caccaaactcacacaccgcactcacatacatacgacacacagtcaca

SEQ ID NO: 22456 - DNA, 31 bp, Homo sapiens
  chr16:55189531-55189562
  hypo
tgctgaggacattgaacgcatcatctcattt

SEQ ID NO: 22457 - DNA, 31 bp, Homo sapiens
  chr16:55705894-55705925
  hypo
actacaacgtcatcatcgcctggtcactcta

SEQ ID NO: 22458 - DNA, 58 bp, Homo sapiens
  chr16:56368402-56368460
  hypo
tcccgggagctgcatgcgtagcccttttggctgtgaatgagtgcgtgaggccaagacc

SEQ ID NO: 22459 - DNA, 31 bp, Homo sapiens
  chr16:56370905-56370936
  hypo
tccatcatggacaggccgtgccggcactcca

SEQ ID NO: 22460 - DNA, 26 bp, Homo sapiens
  chr16:56605852-56605878
  hypo
tcacttgccccgcggcctggttccta

SEQ ID NO: 22461 - DNA, 105 bp, Homo sapiens; identical to SEQ ID NO: 5619
  chr16:56642230-56642335
  hypo

SEQ ID NO: 22462 - DNA, 77 bp, Homo sapiens; identical to SEQ ID NO: 5620
  chr16:56642344-56642421
  hypo

SEQ ID NO: 22463 - DNA, 28 bp, Homo sapiens
  chr16:56774934-56774962
  hypo
gggagagggagagcgctaaatttctttt

SEQ ID NO: 22464 - DNA, 23 bp, Homo sapiens
  chr16:56848400-56848423
  hypo
ctgcatttcgtttttttctaact

SEQ ID NO: 22465 - DNA, 41 bp, Homo sapiens
  chr16:56869745-56869786
  hypo
atgtcctgttaccagccgggcgcggtggctcacgcctgtaa

SEQ ID NO: 22466 - DNA, 31 bp, Homo sapiens
  chr16:57100435-57100466
  hypo
cactcctcagcatctccgagacccagcagca

SEQ ID NO: 22467 - DNA, 39 bp, Homo sapiens; identical to SEQ ID NO: 5621
  chr16:57126698-57126737
  hypo

SEQ ID NO: 22468 - DNA, 38 bp, Homo sapiens; identical to SEQ ID NO: 5622
  chr16:57126878-57126916
  hypo

SEQ ID NO: 22469 - DNA, 28 bp, Homo sapiens
  chr16:57138115-57138143
  hypo
caccacgcccggccggaaggcactcttg

SEQ ID NO: 22470 - DNA, 31 bp, Homo sapiens
  chr16:57148714-57148745
  hypo
aatagaaagaattggccgggctctatagctc

SEQ ID NO: 22471 - DNA, 31 bp, Homo sapiens
  chr16:57222225-57222256
  hypo
atggttttccaaatatcgggcaatcatttcc

SEQ ID NO: 22472 - DNA, 31 bp, Homo sapiens
  chr16:57298908-57298939
  hypo
cccagggaaggtgtcccgctctccagggctc

SEQ ID NO: 22473 - DNA, 49 bp, Homo sapiens
  chr16:57299004-57299053
  hypo
gccagcctctgctgcccgtcagcactctcaccgccgcaagcaggccagg

SEQ ID NO: 22474 - DNA, 31 bp, Homo sapiens
  chr16:57299065-57299096
  hypo
ggtgaggaagccagggcggagccacagggcc

SEQ ID NO: 22475 - DNA, 36 bp, Homo sapiens
  chr16:57304015-57304051
  hypo
aggtttttagaaacaacgtaacggccaaaggggcca

SEQ ID NO: 22476 - DNA, 50 bp, Homo sapiens
  chr16:57304060-57304110
  hypo
atccttccatggcccccgagtccaaacacagtccccgagtctatccacaa

SEQ ID NO: 22477 - DNA, 31 bp, Homo sapiens
  chr16:57304958-57304989
  hypo
ggctatggcaggaggacgatgctggaggtgg

SEQ ID NO: 22478 - DNA, 43 bp, Homo sapiens
  chr16:57305000-57305043
  hypo
tggtcctcctccaaggcgttcattgtatcgcttgttattcctg

SEQ ID NO: 22479 - DNA, 87 bp, Homo sapiens; identical to SEQ ID NO: 5626
  chr16:57318530-57318617
  hypo

SEQ ID NO: 22480 - DNA, 31 bp, Homo sapiens
  chr16:57442423-57442454
  hypo
ggtgatcctccctactcggcctccagagtag

SEQ ID NO: 22481 - DNA, 31 bp, Homo sapiens
  chr16:57653689-57653720
  hypo
caacagcctgggcggccgctgagacccagag

SEQ ID NO: 22482 - DNA, 58 bp, Homo sapiens
  chr16:57686682-57686740
  hypo
ggccgccttagtaggccgcccacgctacctgggcagaggggcccgagcctggagtcag

SEQ ID NO: 22483 - DNA, 61 bp, Homo sapiens
  chr16:57697545-57697606
  hypo
cactgcctgtggcccccgagcccggcccagccccaggccagtcagccgcagactttggaaa

SEQ ID NO: 22484 - DNA, 31 bp, Homo sapiens
  chr16:57716416-57716447
  hypo
cccatccccaacaagccgagtgtgacttgcc

SEQ ID NO: 22485 - DNA, 70 bp, Homo sapiens
  chr16:57734045-57734115
  hypo
tctccttgcagaagttcgtgagcacaaccctccggcccacactgatgccctaccccgagctctacaactg

SEQ ID NO: 22486 - DNA, 31 bp, Homo sapiens
  chr16:57734123-57734154
  hypo
gtgcccagtttgtctccgacttcctcaccat

SEQ ID NO: 22487 - DNA, 31 bp, Homo sapiens
  chr16:57734164-57734195
  hypo
cctgaccctctcaagccggtaagcaccactc

SEQ ID NO: 22488 - DNA, 5 bp, Homo sapiens
  chr16:57734265-57734270
  hypo
gaatg

SEQ ID NO: 22489 - DNA, 38 bp, Homo sapiens
  chr16:57737537-57737575
  hypo
aagagaagatggagcacgagctccgccatggcttttgg

SEQ ID NO: 22490 - DNA, 31 bp, Homo sapiens
  chr16:57737582-57737613
  hypo
agcctctggctgggcacggtggctcattttg

SEQ ID NO: 22491 - DNA, 31 bp, Homo sapiens
  chr16:57935622-57935653
  hypo
cacaccattgccctgccgcatggaaccactc

SEQ ID NO: 22492 - DNA, 109 bp, Homo sapiens; identical to SEQ ID NO: 5627
  chr16:58059828-58059937
  hypo

SEQ ID NO: 22493 - DNA, 31 bp, Homo sapiens; identical to SEQ ID NO: 5628
  chr16:58060039-58060070
  hypo

SEQ ID NO: 22494 - DNA, 271 bp, Homo sapiens; identical to SEQ ID NO: 5629
  chr16:58060089-58060360
  hypo

SEQ ID NO: 22495 - DNA, 198 bp, Homo sapiens; identical to SEQ ID NO: 5630
  chr16:58060366-58060564
  hypo

SEQ ID NO: 22496 - DNA, 3 bp, Homo sapiens
  chr16:58060574-58060577
  hypo
agc

SEQ ID NO: 22497 - DNA, 31 bp, Homo sapiens
  chr16:58075443-58075474
  hypo
cctgtgctgggggccccggggcccagggttc

SEQ ID NO: 22498 - DNA, 68 bp, Homo sapiens
  chr16:58076201-58076269
  hypo
tctggcgtggtctgcccggtgacatcagtgctgcctacgagcgccaagacggtcgttttgtctttttc

SEQ ID NO: 22499 - DNA, 45 bp, Homo sapiens
  chr16:58077137-58077182
  hypo
aagcgaacctggagcccggctacccacagccgctgaccagctatg

SEQ ID NO: 22500 - DNA, 41 bp, Homo sapiens
  chr16:58077186-58077227
  hypo
gggcatcccctatgaccgcattgacacggccatctggtggg

SEQ ID NO: 22501 - DNA, 31 bp, Homo sapiens
  chr16:58077258-58077289
  hypo
ggacaggtgagcagtgcgtccctcccctaag

SEQ ID NO: 22502 - DNA, 175 bp, Homo sapiens
  chr16:58078934-58079109
  hypo
ccaaatactggaaattcgacaatgagcgcctgcggatggagcccggctaccccaagtccatcctgcgggacttcatgggctgccaggagcacgtggagccaggcccccgatggcccgacgtggcccggccgcccttcaacccccacgggggtgcagagcccggggcggacagcgc

SEQ ID NO: 22503 - DNA, 31 bp, Homo sapiens; identical to SEQ ID NO: 5637
  chr16:58426353-58426384
  hypo

SEQ ID NO: 22504 - DNA, 96 bp, Homo sapiens; identical to SEQ ID NO: 5639
  chr16:58497784-58497880
  hypo

SEQ ID NO: 22505 - DNA, 31 bp, Homo sapiens
  chr16:58523213-58523244
  hypo
tcacttctctgcttaacgagccatctcagtc

SEQ ID NO: 22506 - DNA, 55 bp, Homo sapiens
  chr16:58534052-58534107
  hypo
ccgaccatctcccactcgagctgcccccgccctctggacccgagtgactcaggcc

SEQ ID NO: 22507 - DNA, 106 bp, Homo sapiens
  chr16:58534115-58534221
  hypo
tccttcctggtagaggcgggttccctccctcggcaagatgccggagtgctgggatggggtgagtgagggcgctgcgggcatcaaggtgggccgggaggatggtgca

SEQ ID NO: 22508 - DNA, 31 bp, Homo sapiens
  chr16:58548288-58548319
  hypo
ggtattatcttagtttcgcaggtgaggagac

SEQ ID NO: 22509 - DNA, 18 bp, Homo sapiens
  chr16:60581691-60581709
  hypo
caggcgctgtggctcacg

SEQ ID NO: 22510 - DNA, 31 bp, Homo sapiens; identical to SEQ ID NO: 5640
  chr16:61445875-61445906
  hypo

SEQ ID NO: 22511 - DNA, 31 bp, Homo sapiens
  chr16:61615417-61615448
  hypo
ttttcatgctaaggggcgcctgcaggtccac

SEQ ID NO: 22512 - DNA, 20 bp, Homo sapiens
  chr16:66179370-66179390
  hypo
ttgtttgtttttgagacgga

SEQ ID NO: 22513 - DNA, 31 bp, Homo sapiens
  chr16:66420812-66420843
  hypo
cattgagaggctggaccgggagaatatctca

SEQ ID NO: 22514 - DNA, 66 bp, Homo sapiens
  chr16:66440979-66441045
  hypo
gactctgggccaggaacggagctgcagtccctgagcgccctggtttcaaggcgcctcccaggtcaa

SEQ ID NO: 22515 - DNA, 31 bp, Homo sapiens
  chr16:66579298-66579329
  hypo
aagaaacttgcccaaacgtctaacaactggc

SEQ ID NO: 22516 - DNA, 31 bp, Homo sapiens
  chr16:66579342-66579373
  hypo
aagtgcactacagccacgccatgaatactat

SEQ ID NO: 22517 - DNA, 31 bp, Homo sapiens
  chr16:66579387-66579418
  hypo
aaatgacatactaatacgtgctacaaggcag

SEQ ID NO: 22518 - DNA, 21 bp, Homo sapiens
  chr16:66579437-66579458
  hypo
gctaagcaaccaggagcggtg

SEQ ID NO: 22519 - DNA, 28 bp, Homo sapiens
  chr16:66638193-66638221
  hypo
gggtggccaagaaagtcgcaagaaaact

SEQ ID NO: 22520 - DNA, 96 bp, Homo sapiens; identical to SEQ ID NO: 5643
  chr16:66638268-66638364
  hypo

SEQ ID NO: 22521 - DNA, 36 bp, Homo sapiens; identical to SEQ ID NO: 5644
  chr16:66638416-66638452
  hypo

SEQ ID NO: 22522 - DNA, 95 bp, Homo sapiens; identical to SEQ ID NO: 5645
  chr16:66730082-66730177
  hypo

SEQ ID NO: 22523 - DNA, 139 bp, Homo sapiens; identical to SEQ ID NO: 5646
  chr16:66730190-66730329
  hypo

SEQ ID NO: 22524 - DNA, 46 bp, Homo sapiens; identical to SEQ ID NO: 5647
  chr16:66730334-66730380
  hypo

SEQ ID NO: 22525 - DNA, 17 bp, Homo sapiens
  chr16:66769685-66769702
  hypo
ggcgtgagccaccgcaa

SEQ ID NO: 22526 - DNA, 31 bp, Homo sapiens
  chr16:66942965-66942996
  hypo
tgtgcaatcatgtgaccgtagatgctactat

SEQ ID NO: 22527 - DNA, 31 bp, Homo sapiens
  chr16:66943016-66943047
  hypo
atgatcaaagggcaggcgcataatgactagg

SEQ ID NO: 22528 - DNA, 31 bp, Homo sapiens
  chr16:67006194-67006225
  hypo
ctgccaaaggcagcatcgaatcaggccatga

SEQ ID NO: 22529 - DNA, 47 bp, Homo sapiens
  chr16:67006280-67006327
  hypo
ctatgagttccagcatcgacccagttcttttgcgaagatcaaacctg

SEQ ID NO: 22530 - DNA, 49 bp, Homo sapiens
  chr16:67006336-67006385
  hypo
aggctgatcatggggccgagggtgcttttgtgttcggaggtcccttcct

SEQ ID NO: 22531 - DNA, 71 bp, Homo sapiens; identical to SEQ ID NO: 5648
  chr16:67184511-67184582
  hypo

SEQ ID NO: 22532 - DNA, 31 bp, Homo sapiens
  chr16:67214547-67214578
  hypo
caactccccacactgtcgacctctggggaca

SEQ ID NO: 22533 - DNA, 31 bp, Homo sapiens
  chr16:67221090-67221121
  hypo
ctgatcccccatgtcccgctgccccaaaggc

SEQ ID NO: 22534 - DNA, 41 bp, Homo sapiens
  chr16:67221145-67221186
  hypo
gcccagtgcagcaaggcgaaggcatccgcagcttctagctc

SEQ ID NO: 22535 - DNA, 87 bp, Homo sapiens
  chr16:67221198-67221285
  hypo
gaggttctgcaggctgcggcgcaaaccactatgcagcgtgtgggcccatagctggaccacgttgtactgtggcgggcagcaaggcgc

SEQ ID NO: 22536 - DNA, 42 bp, Homo sapiens
  chr16:67235495-67235537
  hypo
tggggctgctggagccgcgcatgcggacgcccctggacccct

SEQ ID NO: 22537 - DNA, 64 bp, Homo sapiens
  chr16:67241602-67241666
  hypo
tgttgatgccagggcacgtggccacatccaacacccggagctgcctgcacgcctgcccaatagc

SEQ ID NO: 22538 - DNA, 85 bp, Homo sapiens
  chr16:67241692-67241777
  hypo
tgatgagtgcctggcccggtgtgggacccagcccagcccctgcaccgtggctccatctgcctggtgtcatcggacacacttactg

SEQ ID NO: 22539 - DNA, 31 bp, Homo sapiens; identical to SEQ ID NO: 5651
  chr16:67280007-67280038
  hypo

SEQ ID NO: 22540 - DNA, 38 bp, Homo sapiens; identical to SEQ ID NO: 5652
  chr16:67280107-67280145
  hypo

SEQ ID NO: 22541 - DNA, 31 bp, Homo sapiens; identical to SEQ ID NO: 5653
  chr16:67280156-67280187
  hypo

SEQ ID NO: 22542 - DNA, 31 bp, Homo sapiens
  chr16:67321789-67321820
  hypo
tctccacccagaggtgcgcatggctgagatg

SEQ ID NO: 22543 - DNA, 31 bp, Homo sapiens
  chr16:67446022-67446053
  hypo
aaacaaaaaaaggctgcggggatggatagat

SEQ ID NO: 22544 - DNA, 31 bp, Homo sapiens
  chr16:67456091-67456122
  hypo
gcacccaaagagtgctcgatgggtagtaatc

SEQ ID NO: 22545 - DNA, 231 bp, Homo sapiens; identical to SEQ ID NO: 5657
  chr16:67678708-67678939
  hypo

SEQ ID NO: 22546 - DNA, 151 bp, Homo sapiens; identical to SEQ ID NO: 5658
  chr16:67678975-67679126
  hypo

SEQ ID NO: 22547 - DNA, 114 bp, Homo sapiens
  chr16:67681426-67681540
  hypo
ctggcccaggcgctggcgggacactcaagctctgggctgcgggagctcagcctcgcggggaacctgctggatgaccgaggtatgactgagcctggggaccgcaggggtgggcag

SEQ ID NO: 22548 - DNA, 31 bp, Homo sapiens
  chr16:67681543-67681574
  hypo
gaggaggtgagacccacgtggctgttcccac

SEQ ID NO: 22549 - DNA, 35 bp, Homo sapiens
  chr16:67681591-67681626
  hypo
cactcagcagacacctcgagcgttgtccaggagcc

SEQ ID NO: 22550 - DNA, 31 bp, Homo sapiens
  chr16:67700331-67700362
  hypo
gggccctcgcacatgccgccggcgccgccca

SEQ ID NO: 22551 - DNA, 30 bp, Homo sapiens
  chr16:67825195-67825225
  hypo
gtgagccactatgcccggcccagttttacc

SEQ ID NO: 22552 - DNA, 41 bp, Homo sapiens
  chr16:67848820-67848861
  hypo
tctaccatgttcactccggatctctccgccattcctctttt

SEQ ID NO: 22553 - DNA, 31 bp, Homo sapiens
  chr16:67968862-67968893
  hypo
ggtgtgtgagacctaacgggctctctctgct

SEQ ID NO: 22554 - DNA, 42 bp, Homo sapiens
  chr16:67982232-67982274
  hypo
actgtggaggagtcctcggagccagatcgcagaggatgggca

SEQ ID NO: 22555 - DNA, 46 bp, Homo sapiens; identical to SEQ ID NO: 5662
  chr16:68118409-68118455
  hypo

SEQ ID NO: 22556 - DNA, 52 bp, Homo sapiens; identical to SEQ ID NO: 5663
  chr16:68118476-68118528
  hypo

SEQ ID NO: 22557 - DNA, 91 bp, Homo sapiens; identical to SEQ ID NO: 5664
  chr16:68118548-68118639
  hypo

SEQ ID NO: 22558 - DNA, 34 bp, Homo sapiens; identical to SEQ ID NO: 5665
  chr16:68118802-68118836
  hypo

SEQ ID NO: 22559 - DNA, 50 bp, Homo sapiens; identical to SEQ ID NO: 5666
  chr16:68118865-68118915
  hypo

SEQ ID NO: 22560 - DNA, 43 bp, Homo sapiens; identical to SEQ ID NO: 5667
  chr16:68118920-68118963
  hypo

SEQ ID NO: 22561 - DNA, 31 bp, Homo sapiens; identical to SEQ ID NO: 5668
  chr16:68118965-68118996
  hypo

SEQ ID NO: 22562 - DNA, 26 bp, Homo sapiens
  chr16:68126066-68126092
  hypo
atgtgtgaggctgggcgcggtggctc

SEQ ID NO: 22563 - DNA, 72 bp, Homo sapiens; identical to SEQ ID NO: 5670
  chr16:68269812-68269884
  hypo

SEQ ID NO: 22564 - DNA, 4 bp, Homo sapiens
  chr16:68269896-68269900
  hypo
cggc

SEQ ID NO: 22565 - DNA, 34 bp, Homo sapiens; identical to SEQ ID NO: 5672
  chr16:68269920-68269954
  hypo

SEQ ID NO: 22566 - DNA, 57 bp, Homo sapiens; identical to SEQ ID NO: 5673
  chr16:68270100-68270157
  hypo

SEQ ID NO: 22567 - DNA, 43 bp, Homo sapiens; identical to SEQ ID NO: 5674
  chr16:68271017-68271060
  hypo

SEQ ID NO: 22568 - DNA, 122 bp, Homo sapiens; identical to SEQ ID NO: 5675
  chr16:68271198-68271320
  hypo

SEQ ID NO: 22569 - DNA, 31 bp, Homo sapiens
  chr16:68362038-68362069
  hypo
gaatgctaatcctccacgctgacttctgacc

SEQ ID NO: 22570 - DNA, 40 bp, Homo sapiens
  chr16:68385560-68385600
  hypo
ggccgttcaggctcctcgctgtgcacgtgttcatttactc

SEQ ID NO: 22571 - DNA, 41 bp, Homo sapiens
  chr16:68386064-68386105
  hypo
agtggcctgttgcttccgtgttcctgttaacactcctggac

SEQ ID NO: 22572 - DNA, 71 bp, Homo sapiens
  chr16:68386174-68386245
  hypo
ttcttcactaccagcctgctgccgtggcacaacctctacttctggtacgtgcggaccgctgtggaccagca

SEQ ID NO: 22573 - DNA, 38 bp, Homo sapiens
  chr16:68386267-68386305
  hypo
atgccccaggcagcctcgctgcacgctgtggttgtgga

SEQ ID NO: 22574 - DNA, 31 bp, Homo sapiens
  chr16:68386337-68386368
  hypo
aaaaaagcagaggaggcgggtggggaacctt

SEQ ID NO: 22575 - DNA, 31 bp, Homo sapiens
  chr16:68397456-68397487
  hypo
gagtacctgggggggacgagggggtgacagt

SEQ ID NO: 22576 - DNA, 31 bp, Homo sapiens
  chr16:68560873-68560904
  hypo
tgcctgaacctccccccgccccaggctcctg

SEQ ID NO: 22577 - DNA, 92 bp, Homo sapiens; identical to SEQ ID NO: 5678
  chr16:68564223-68564315
  hypo

SEQ ID NO: 22578 - DNA, 31 bp, Homo sapiens
  chr16:68672309-68672340
  hypo
atcaagtggaaagctccgaagggcctagagg

SEQ ID NO: 22579 - DNA, 36 bp, Homo sapiens
  chr16:68697406-68697442
  hypo
gattacaggcgtgagccaccacgcctggccgaaagt

SEQ ID NO: 22580 - DNA, 31 bp, Homo sapiens
  chr16:68721866-68721897
  hypo
ggaaaaactgaggcctcgaggaatcgaacct

SEQ ID NO: 22581 - DNA, 45 bp, Homo sapiens
  chr16:68737003-68737048
  hypo
accatgccttttccctcgtcactgacccaacgatctttttttctt

SEQ ID NO: 22582 - DNA, 31 bp, Homo sapiens
  chr16:68737078-68737109
  hypo
ccctgtccccacagtgcgctttcccagtccc

SEQ ID NO: 22583 - DNA, 39 bp, Homo sapiens
  chr16:68737156-68737195
  hypo
tgaggagctggggccccgaattcccggccccccatttct

SEQ ID NO: 22584 - DNA, 35 bp, Homo sapiens
  chr16:68739593-68739628
  hypo
ggattacaggcgtgagccgccgtgcccagccccaa

SEQ ID NO: 22585 - DNA, 32 bp, Homo sapiens
  chr16:68743255-68743287
  hypo
cgagcccctgcacccggcgcagaagcactctt

SEQ ID NO: 22586 - DNA, 18 bp, Homo sapiens
  chr16:68761399-68761417
  hypo
atctgtaaaatggtcacg

SEQ ID NO: 22587 - DNA, 23 bp, Homo sapiens
  chr16:68769450-68769473
  hypo
caggactccgtctcaaaaaaaaa

SEQ ID NO: 22588 - DNA, 20 bp, Homo sapiens
  chr16:68770856-68770876
  hypo
caaaacgaacaaacaaaaaa

SEQ ID NO: 22589 - DNA, 21 bp, Homo sapiens
  chr16:68780831-68780852
  hypo
acagagcgatactccatctca

SEQ ID NO: 22590 - DNA, 60 bp, Homo sapiens
  chr16:68782355-68782415
  hypo
gtatatttatggggtacgttcttttattttctttttatagctatgcggtatggatgcacc

SEQ ID NO: 22591 - DNA, 30 bp, Homo sapiens
  chr16:68792435-68792465
  hypo
catgctgattgtgcccgtgaatagttactg

SEQ ID NO: 22592 - DNA, 19 bp, Homo sapiens
  chr16:68829771-68829790
  hypo
aaagctaaatgcaggccgg

SEQ ID NO: 22593 - DNA, 35 bp, Homo sapiens
  chr16:68838290-68838325
  hypo
caggtgtgagccactgcgcccggccctatctgcct

SEQ ID NO: 22594 - DNA, 31 bp, Homo sapiens
  chr16:68849365-68849396
  hypo
ctaacacaaaatgtttcgttttgtttttaac

SEQ ID NO: 22595 - DNA, 42 bp, Homo sapiens
  chr16:68849439-68849481
  hypo
agcagtacattctacacgtagcagtgacgaatgtggtacctt

SEQ ID NO: 22596 - DNA, 37 bp, Homo sapiens
  chr16:68849496-68849533
  hypo
ccacctccacagccaccgtcaccgtggatgtgctgga

SEQ ID NO: 22597 - DNA, 19 bp, Homo sapiens
  chr16:68849942-68849961
  hypo
tggagtctcactttgtcgc

SEQ ID NO: 22598 - DNA, 18 bp, Homo sapiens
  chr16:68850200-68850218
  hypo
caccgcacccagcccata

SEQ ID NO: 22599 - DNA, 36 bp, Homo sapiens
  chr16:68854967-68855003
  hypo
tctgttgttttgtatccgtatcgtatactaatattg

SEQ ID NO: 22600 - DNA, 31 bp, Homo sapiens
  chr16:68855031-68855062
  hypo
ctactaccatatgctccgtgttgtgtcaaga

SEQ ID NO: 22601 - DNA, 24 bp, Homo sapiens
  chr16:68855084-68855108
  hypo
gtgtggatgggctgggcgcagtgg

SEQ ID NO: 22602 - DNA, 31 bp, Homo sapiens
  chr16:68856756-68856787
  hypo
ggtaaaaccctgggtgcgatggaagtcactc

SEQ ID NO: 22603 - DNA, 30 bp, Homo sapiens
  chr16:68866427-68866457
  hypo
tatataaagaaaaggccgggtgcagtggct

SEQ ID NO: 22604 - DNA, 31 bp, Homo sapiens
  chr16:68876699-68876730
  hypo
aaaacagaacacagatcgaacttttactggg

SEQ ID NO: 22605 - DNA, 54 bp, Homo sapiens
  chr16:68876781-68876835
  hypo
tgtagctttacattcacgatggatatatatgcgtgtgtacgtctgtacttaggt

SEQ ID NO: 22606 - DNA, 21 bp, Homo sapiens
  chr16:68970520-68970541
  hypo
agccaccgcaccctgcctata

SEQ ID NO: 22607 - DNA, 27 bp, Homo sapiens
  chr16:69107558-69107585
  hypo
ggttagaaagggcactcgaagccaggc

SEQ ID NO: 22608 - DNA, 112 bp, Homo sapiens; identical to SEQ ID NO: 5684
  chr16:69139770-69139882
  hypo

SEQ ID NO: 22609 - DNA, 31 bp, Homo sapiens; identical to SEQ ID NO: 5685
  chr16:69139917-69139948
  hypo

SEQ ID NO: 22610 - DNA, 317 bp, Homo sapiens; identical to SEQ ID NO: 5686
  chr16:69139985-69140302
  hypo

SEQ ID NO: 22611 - DNA, 31 bp, Homo sapiens; identical to SEQ ID NO: 5687
  chr16:69140341-69140372
  hypo

SEQ ID NO: 22612 - DNA, 19 bp, Homo sapiens
  chr16:69298857-69298876
  hypo
aattacatctattggccgg

SEQ ID NO: 22613 - DNA, 34 bp, Homo sapiens
  chr16:69344403-69344437
  hypo
ttgtttcttaatttagcgacgaggtcttactatg

SEQ ID NO: 22614 - DNA, 31 bp, Homo sapiens
  chr16:69400784-69400815
  hypo
gaggagttgaggcctgcgctgggctcagtac

SEQ ID NO: 22615 - DNA, 31 bp, Homo sapiens
  chr16:69560242-69560273
  hypo
tctgtgccctctaggtcgctatctccacaat

SEQ ID NO: 22616 - DNA, 31 bp, Homo sapiens
  chr16:69641962-69641993
  hypo
aaactactttattggccggtcacggtggctc

SEQ ID NO: 22617 - DNA, 31 bp, Homo sapiens
  chr16:69746590-69746621
  hypo
aattcccctgaaggttcgttgaaaatgaggt

SEQ ID NO: 22618 - DNA, 31 bp, Homo sapiens
  chr16:69789089-69789120
  hypo
ccaggtgtagtggtgcgcgcctagagtccca

SEQ ID NO: 22619 - DNA, 50 bp, Homo sapiens
  chr16:69825949-69825999
  hypo
ataaccatttaaatagcgtaggtggttctttttcccgtgcatttcatgaa

SEQ ID NO: 22620 - DNA, 31 bp, Homo sapiens
  chr16:69826018-69826049
  hypo
tgtggggtgtgactgcgcggtttccagttcc

SEQ ID NO: 22621 - DNA, 44 bp, Homo sapiens
  chr16:69826088-69826132
  hypo
atatttttaaatgcatcgaggcccttaaacgtaggacagctatt

SEQ ID NO: 22622 - DNA, 31 bp, Homo sapiens
  chr16:69922554-69922585
  hypo
atgttattctcataatcgggacttaagttaa

SEQ ID NO: 22623 - DNA, 55 bp, Homo sapiens
  chr16:70399210-70399265
  hypo
cttaaaataagattttcggttgattaaaaaaaaaaatccacgcatggctcacaga

SEQ ID NO: 22624 - DNA, 45 bp, Homo sapiens
  chr16:70433886-70433931
  hypo
accgcccctcttctctcgactgtggattatcgatgaggtattgct

SEQ ID NO: 22625 - DNA, 34 bp, Homo sapiens
  chr16:70433953-70433987
  hypo
acagtcctgtcagctccgccgttgggggagaacc

SEQ ID NO: 22626 - DNA, 20 bp, Homo sapiens
  chr16:70439952-70439972
  hypo
gactccgtctcaaaaaaaaa

SEQ ID NO: 22627 - DNA, 31 bp, Homo sapiens
  chr16:70595196-70595227
  hypo
tacaggcatgagccaccgcacctggccttca

SEQ ID NO: 22628 - DNA, 31 bp, Homo sapiens
  chr16:70595266-70595297
  hypo
gttttcattttacacacgtggaagcaggctt

SEQ ID NO: 22629 - DNA, 31 bp, Homo sapiens
  chr16:70632022-70632053
  hypo
acaggcataaggcaccgcgcctggttgaagg

SEQ ID NO: 22630 - DNA, 31 bp, Homo sapiens
  chr16:70794491-70794522
  hypo
gtgcaggcccacaagacgtgccccaaaaccc

SEQ ID NO: 22631 - DNA, 101 bp, Homo sapiens
  chr16:70794532-70794633
  hypo
tggcacttcagcaaatcgagtttccacagccacagcctgaacagcgctgtttaatggactgcatctccgcctgctccctttcaatgcgcacacacaaaaac

SEQ ID NO: 22632 - DNA, 38 bp, Homo sapiens
  chr16:70796477-70796515
  hypo
tgggaaagaggctgtccgtgtgccggaacatctggagg

SEQ ID NO: 22633 - DNA, 31 bp, Homo sapiens
  chr16:70803217-70803248
  hypo
tggtgccttgggcaagcggcgcagctgaaga

SEQ ID NO: 22634 - DNA, 31 bp, Homo sapiens
  chr16:70825254-70825285
  hypo
ctaattccttctcatgcgtgattcctacctc

SEQ ID NO: 22635 - DNA, 35 bp, Homo sapiens
  chr16:71537484-71537519
  hypo
tccgtgttagggagcacgtacggatataggagtag

SEQ ID NO: 22636 - DNA, 41 bp, Homo sapiens
  chr16:71537550-71537591
  hypo
tggagattgccactcacggtgttctccgctttcctagagtc

SEQ ID NO: 22637 - DNA, 31 bp, Homo sapiens
  chr16:71537636-71537667
  hypo
aatccatttgcccacacgcttcctggttcct

SEQ ID NO: 22638 - DNA, 31 bp, Homo sapiens
  chr16:71715650-71715681
  hypo
tacttgtagagtgtatcgaggcctccgggtc

SEQ ID NO: 22639 - DNA, 35 bp, Homo sapiens
  chr16:71756039-71756074
  hypo
caaaactgtatgaggccgggcgtggtggctcatcc

SEQ ID NO: 22640 - DNA, 34 bp, Homo sapiens
  chr16:71948332-71948366
  hypo
gattacagatgtgagccgccgcacccagcaagga

SEQ ID NO: 22641 - DNA, 31 bp, Homo sapiens
  chr16:72060654-72060685
  hypo
ggggccatgtggtgtgcggatacctattttt

SEQ ID NO: 22642 - DNA, 31 bp, Homo sapiens
  chr16:72829265-72829296
  hypo
gtgcactgggagcttccgccagctttggttt

SEQ ID NO: 22643 - DNA, 31 bp, Homo sapiens
  chr16:72835834-72835865
  hypo
cccccacctcctttctcggttgtagctgcaa

SEQ ID NO: 22644 - DNA, 31 bp, Homo sapiens
  chr16:72893758-72893789
  hypo
tacagaaacaggactccgctccaaggtatca

SEQ ID NO: 22645 - DNA, 7 bp, Homo sapiens
  chr16:72906616-72906623
  hypo
caaagtg

SEQ ID NO: 22646 - DNA, 31 bp, Homo sapiens
  chr16:72906629-72906660
  hypo
ttagaggcatgggccacgtgcctggccatgt

SEQ ID NO: 22647 - DNA, 31 bp, Homo sapiens
  chr16:72906685-72906716
  hypo
ttcacactcacctacacgcctttcaaaagat

SEQ ID NO: 22648 - DNA, 31 bp, Homo sapiens
  chr16:72906734-72906765
  hypo
ggcaaaactagacttccgaaagatggaagaa

SEQ ID NO: 22649 - DNA, 40 bp, Homo sapiens
  chr16:72916140-72916180
  hypo
ttctcccagtgggcagcgttgggcacgtgctgccacccac

SEQ ID NO: 22650 - DNA, 53 bp, Homo sapiens
  chr16:72916246-72916299
  hypo
tgtacagctggtgccacgtgtcatatgctgaaacaacacgcacaaaaccctgg

SEQ ID NO: 22651 - DNA, 31 bp, Homo sapiens
  chr16:72916308-72916339
  hypo
catcccagaaaaataacgcaacgaatgaatg

SEQ ID NO: 22652 - DNA, 31 bp, Homo sapiens
  chr16:72919232-72919263
  hypo
gcctctcaaggagttacgtagccagtcatgg

SEQ ID NO: 22653 - DNA, 31 bp, Homo sapiens
  chr16:72945690-72945721
  hypo
agaaagttctagtggacggtgctgaattcta

SEQ ID NO: 22654 - DNA, 38 bp, Homo sapiens
  chr16:72945768-72945806
  hypo
cagggggagagggatgcgggagacgtcacactgccact

SEQ ID NO: 22655 - DNA, 31 bp, Homo sapiens
  chr16:72966921-72966952
  hypo
tgggtttcctttaagacgcatggacatccta

SEQ ID NO: 22656 - DNA, 102 bp, Homo sapiens
  chr16:72984702-72984804
  hypo
gcatgtccaggttgtccgtcgtgaacttgttgcagacggcgcactggaagagcttcagcgacgggtcgttggtctggatgaagctctcgcccaggttcatca

SEQ ID NO: 22657 - DNA, 31 bp, Homo sapiens
  chr16:72989875-72989906
  hypo
ctggtgacaaataagacgaccagtgcttgtg

SEQ ID NO: 22658 - DNA, 31 bp, Homo sapiens
  chr16:72991202-72991233
  hypo
ttacacaaaaaccactcgagaagaccagagt

SEQ ID NO: 22659 - DNA, 35 bp, Homo sapiens
  chr16:72992066-72992101
  hypo
tcatgtggccgcccagcgagcgggaggagcccagg

SEQ ID NO: 22660 - DNA, 112 bp, Homo sapiens
  chr16:72992110-72992222
  hypo
catttggggcactccacgccactccccgaggggcactccccaaccccaagctcgcagagggagccagcgtgctggtgatggggaacgaagcccccatcgtcaccctctgtgc

SEQ ID NO: 22661 - DNA, 31 bp, Homo sapiens
  chr16:72992396-72992427
  hypo
tagaagctgtgcccctcgacagggtctggag

SEQ ID NO: 22662 - DNA, 31 bp, Homo sapiens
  chr16:72993524-72993555
  hypo
gagagttcaggaaaagcgaggggagaggccc

SEQ ID NO: 22663 - DNA, 136 bp, Homo sapiens
  chr16:72993617-72993753
  hypo
tgtacgcggagccgtccggctggtagacgatctccccggccaggttctccacgtcactctcctcgtccccctcctcaccggtgtcgctggcgctctcctctctcaggggtggcggggggcgcgcgctggggcagtg

SEQ ID NO: 22664 - DNA, 107 bp, Homo sapiens
  chr16:72993773-72993880
  hypo
ggctggcaaaggaggccgaacattcgttgcaggtgacctccttgctggcgggctcggaggggggcccggccgacgcggtgctctccgcgaggcgctcattgaagggg

SEQ ID NO: 22665 - DNA, 40 bp, Homo sapiens
  chr16:72993886-72993926
  hypo
aggctgtccaagggcccgtggctctcgcctgtggactgct

SEQ ID NO: 22666 - DNA, 124 bp, Homo sapiens
  chr16:72993979-72994103
  hypo
tggtgctgagggataccgcacccattgtccttccccgagacgacgggcgagtcacagccttccatggtaaggcctgcgtggagctttcattgcacccagtacggaggctcggacctgaagggca

SEQ ID NO: 22667 - DNA, 36 bp, Homo sapiens
  chr16:72994171-72994207
  hypo
ctgaggtcctaccgcacggagcgctctaagaggctt

SEQ ID NO: 22668 - DNA, 31 bp, Homo sapiens
  chr16:72994368-72994399
  hypo
tgcccctgaagactagcgggaatttccattc

SEQ ID NO: 22669 - DNA, 31 bp, Homo sapiens
  chr16:72994507-72994538
  hypo
agtcagccccgactccgcgcactgtctgtgg

SEQ ID NO: 22670 - DNA, 31 bp, Homo sapiens
  chr16:72997029-72997060
  hypo
gaacccagtgggtccccgcacttttccaagc

SEQ ID NO: 22671 - DNA, 58 bp, Homo sapiens
  chr16:72997062-72997120
  hypo
ccctgccagcctgacacgcacacctctcttcaggctccctccacgttctgtgcccctt

SEQ ID NO: 22672 - DNA, 52 bp, Homo sapiens
  chr16:72997170-72997222
  hypo
ctcccttcctgcagcccgcttctctgctggtggcacccggaactccctctaa

SEQ ID NO: 22673 - DNA, 31 bp, Homo sapiens
  chr16:73000124-73000155
  hypo
caattaaaatgctcaacggtggaatcaagac

SEQ ID NO: 22674 - DNA, 8 bp, Homo sapiens
  chr16:73007795-73007803
  hypo
agaaaaaa

SEQ ID NO: 22675 - DNA, 57 bp, Homo sapiens
  chr16:73007825-73007882
  hypo
tgaacccctgggttcccgcttcctgggaagggctatcaaagccgggttcactagttt

SEQ ID NO: 22676 - DNA, 31 bp, Homo sapiens
  chr16:73026745-73026776
  hypo
tgcagaaaggccaggcgcgatggcccctgcc

SEQ ID NO: 22677 - DNA, 31 bp, Homo sapiens
  chr16:73063563-73063594
  hypo
ttgctcacaaggccatcgcccaagtgggaat

SEQ ID NO: 22678 - DNA, 31 bp, Homo sapiens; identical to SEQ ID NO: 5700
  chr16:73091556-73091587
  hypo

SEQ ID NO: 22679 - DNA, 31 bp, Homo sapiens; identical to SEQ ID NO: 5701
  chr16:73091687-73091718
  hypo

SEQ ID NO: 22680 - DNA, 133 bp, Homo sapiens; identical to SEQ ID NO: 5702
  chr16:73091751-73091884
  hypo

SEQ ID NO: 22681 - DNA, 9 bp, Homo sapiens
  chr16:73091900-73091909
  hypo
cgggggcac

SEQ ID NO: 22682 - DNA, 57 bp, Homo sapiens; identical to SEQ ID NO: 5704
  chr16:73092060-73092117
  hypo

SEQ ID NO: 22683 - DNA, 66 bp, Homo sapiens; identical to SEQ ID NO: 5705
  chr16:73092480-73092546
  hypo

SEQ ID NO: 22684 - DNA, 31 bp, Homo sapiens
  chr16:73162952-73162983
  hypo
actgaccccagatgaccggtggagaaactga

SEQ ID NO: 22685 - DNA, 45 bp, Homo sapiens
  chr16:73208570-73208615
  hypo
ctgccccattgcagtccgctcatcaatgagcgacccagagggatc

SEQ ID NO: 22686 - DNA, 31 bp, Homo sapiens
  chr16:73208621-73208652
  hypo
aaacccaaatcagggccgagcacagtggctt

SEQ ID NO: 22687 - DNA, 31 bp, Homo sapiens
  chr16:73222729-73222760
  hypo
tttacagggaggctagcgtctggatatttct

SEQ ID NO: 22688 - DNA, 31 bp, Homo sapiens
  chr16:74767604-74767635
  hypo
ccaatgagatgggaagcgatgcaagacacat

SEQ ID NO: 22689 - DNA, 4 bp, Homo sapiens
  chr16:74901399-74901403
  hypo
tccc

SEQ ID NO: 22690 - DNA, 31 bp, Homo sapiens
  chr16:74901815-74901846
  hypo
ttgctgagtagcattccgcaggacagaggct

SEQ ID NO: 22691 - DNA, 41 bp, Homo sapiens; identical to SEQ ID NO: 5708
  chr16:75018962-75019003
  hypo

SEQ ID NO: 22692 - DNA, 27 bp, Homo sapiens
  chr16:75022279-75022306
  hypo
tacaaagaacaacgtatagccaatcag

SEQ ID NO: 22693 - DNA, 20 bp, Homo sapiens
  chr16:75027319-75027339
  hypo
cagagcgaaactccatctca

SEQ ID NO: 22694 - DNA, 39 bp, Homo sapiens; identical to SEQ ID NO: 5709
  chr16:75033798-75033837
  hypo

SEQ ID NO: 22695 - DNA, 17 bp, Homo sapiens
  chr16:75041238-75041255
  hypo
gacgatgccagacccca

SEQ ID NO: 22696 - DNA, 44 bp, Homo sapiens
  chr16:75057286-75057330
  hypo
gaaagtcacaccaggccggacgcagtggctcacgcctgtaaacc

SEQ ID NO: 22697 - DNA, 29 bp, Homo sapiens
  chr16:75065306-75065335
  hypo
ggagccaccgtgcccggccatgtccaaat

SEQ ID NO: 22698 - DNA, 31 bp, Homo sapiens
  chr16:75075661-75075692
  hypo
aattctctcaggagttcgagaccagcctggc

SEQ ID NO: 22699 - DNA, 5 bp, Homo sapiens
  chr16:75113380-75113385
  hypo
acaaa

SEQ ID NO: 22700 - DNA, 31 bp, Homo sapiens
  chr16:75113394-75113425
  hypo
cctccttttgacccatcggtcaggccctcac

SEQ ID NO: 22701 - DNA, 31 bp, Homo sapiens
  chr16:75113749-75113780
  hypo
gcctgtagtgtagctgcgtgccaggacccca

SEQ ID NO: 22702 - DNA, 31 bp, Homo sapiens
  chr16:75122962-75122993
  hypo
catgtgatttcccactcgcataatagacacc

SEQ ID NO: 22703 - DNA, 62 bp, Homo sapiens
  chr16:75127913-75127975
  hypo
agccaggtgtcctccacggcttagcagaggggcccagagcaagcacccgccctccttgggga

SEQ ID NO: 22704 - DNA, 58 bp, Homo sapiens
  chr16:75128007-75128065
  hypo
gtgctgggaagctggtcgtctccttgtcacgttcgaactcggacgaacacctgattta

SEQ ID NO: 22705 - DNA, 31 bp, Homo sapiens
  chr16:75128078-75128109
  hypo
acaccagagagcttgacgggggactatgtgt

SEQ ID NO: 22706 - DNA, 56 bp, Homo sapiens
  chr16:75136325-75136381
  hypo
tgtcattggcagtgttcgggacagttaagttcctttagtgacggagaagggatcct

SEQ ID NO: 22707 - DNA, 47 bp, Homo sapiens
  chr16:75136442-75136489
  hypo
tggaggacttctgggtcgccttttgttcacgtcgcctcttttcacct

SEQ ID NO: 22708 - DNA, 31 bp, Homo sapiens
  chr16:75136492-75136523
  hypo
cttcaaatattcatgtcggcctgggtttgtc

SEQ ID NO: 22709 - DNA, 59 bp, Homo sapiens
  chr16:75136646-75136705
  hypo
gtctccatcagctggccgggcctcctcccacccaactcagaatccgtcccttccttctc

SEQ ID NO: 22710 - DNA, 31 bp, Homo sapiens
  chr16:75136946-75136977
  hypo
ctcagccctgggcctgcgcgtgagaagatgt

SEQ ID NO: 22711 - DNA, 31 bp, Homo sapiens
  chr16:75138820-75138851
  hypo
ccacctcccagaggggcggacccccatctcc

SEQ ID NO: 22712 - DNA, 48 bp, Homo sapiens
  chr16:75138875-75138923
  hypo
gggatgacctctcccccgacctctggctccgagcgggtaagggcagag

SEQ ID NO: 22713 - DNA, 44 bp, Homo sapiens
  chr16:75138932-75138976
  hypo
caggtgtccactgtgccggcgggaaggtgcgagcatcccaagtg

SEQ ID NO: 22714 - DNA, 86 bp, Homo sapiens
  chr16:75139032-75139118
  hypo
agctgatggggagacccgtagagcctcacaggttggaggagcttcggatcccactgggaaggttggttctccgtctgtctccctgc

SEQ ID NO: 22715 - DNA, 50 bp, Homo sapiens
  chr16:75148903-75148953
  hypo
gtctctgacctggccacgtccccggaccacaccccgcgggtgtcccccca

SEQ ID NO: 22716 - DNA, 40 bp, Homo sapiens
  chr16:75148996-75149036
  hypo
agcagacccaaggtgccgtgtgtggcgggggaggcagcca

SEQ ID NO: 22717 - DNA, 82 bp, Homo sapiens; identical to SEQ ID NO: 5718
  chr16:75299750-75299832
  hypo

SEQ ID NO: 22718 - DNA, 15 bp, Homo sapiens
  chr16:75469089-75469104
  hypo
cgtgagccaccgcgc

SEQ ID NO: 22719 - DNA, 31 bp, Homo sapiens; identical to SEQ ID NO: 5719
  chr16:75529303-75529334
  hypo

SEQ ID NO: 22720 - DNA, 19 bp, Homo sapiens
  chr16:75551610-75551629
  hypo
acgaacattctcaggccgg

SEQ ID NO: 22721 - DNA, 31 bp, Homo sapiens
  chr16:75606234-75606265
  hypo
aaggtccagtggaagcgcgtggactccaaag

SEQ ID NO: 22722 - DNA, 31 bp, Homo sapiens
  chr16:75606295-75606326
  hypo
cagccaattcatgagtcggtgtagaccccac

SEQ ID NO: 22723 - DNA, 35 bp, Homo sapiens
  chr16:75606338-75606373
  hypo
ctgcccttggttggggcgaacgtaggttctctagg

SEQ ID NO: 22724 - DNA, 41 bp, Homo sapiens
  chr16:77747178-77747219
  hypo
tactcatgctattctcgcgatctttccgctaatagcagtca

SEQ ID NO: 22725 - DNA, 52 bp, Homo sapiens
  chr16:77752652-77752704
  hypo
cacagtgtgtaaccaccggatattataaatattagagcgatatttctttaat

SEQ ID NO: 22726 - DNA, 39 bp, Homo sapiens
  chr16:77752740-77752779
  hypo
attataaatatcacagcgatatttcgctgatatcacagt

SEQ ID NO: 22727 - DNA, 31 bp, Homo sapiens
  chr16:77752816-77752847
  hypo
ttcaccaatatcacaacgtgttactagtgga

SEQ ID NO: 22728 - DNA, 31 bp, Homo sapiens
  chr16:77752848-77752879
  hypo
attggaaatatcacagcgatgttttgccaat

SEQ ID NO: 22729 - DNA, 34 bp, Homo sapiens
  chr16:77752910-77752944
  hypo
tatcacagtgatatttcgccgatatcacagtgtg

SEQ ID NO: 22730 - DNA, 31 bp, Homo sapiens
  chr16:77753838-77753869
  hypo
cactttgtgtaaacatcgggtattataaata

SEQ ID NO: 22731 - DNA, 31 bp, Homo sapiens
  chr16:77754040-77754071
  hypo
tattttattaatatcacggtgtgtacacact

SEQ ID NO: 22732 - DNA, 31 bp, Homo sapiens
  chr16:77762012-77762043
  hypo
cctcacacaagcagggcgctggtaggagatt

SEQ ID NO: 22733 - DNA, 31 bp, Homo sapiens
  chr16:79077924-79077955
  hypo
agccaggaagaggcttcggccctgcccagac

SEQ ID NO: 22734 - DNA, 104 bp, Homo sapiens; identical to SEQ ID NO: 5721
  chr16:79636190-79636294
  hypo

SEQ ID NO: 22735 - DNA, 31 bp, Homo sapiens; identical to SEQ ID NO: 5724
  chr16:80837427-80837458
  hypo

SEQ ID NO: 22736 - DNA, 37 bp, Homo sapiens
  chr16:80931967-80932004
  hypo
gaaaccaaggaacaaacgggaccgtggcaaggcagcg

SEQ ID NO: 22737 - DNA, 23 bp, Homo sapiens
  chr16:80964426-80964449
  hypo
aacaacggcctaaggccgggcgc

SEQ ID NO: 22738 - DNA, 31 bp, Homo sapiens
  chr16:81094193-81094224
  hypo
cgtaagccactgtgcccggcctggagttttt

SEQ ID NO: 22739 - DNA, 64 bp, Homo sapiens
  chr16:81315518-81315582
  hypo
ccccagaatataagcccgtgaggcgagaattgtgttgctgtgctcacagcgtatcagcagcaca

SEQ ID NO: 22740 - DNA, 31 bp, Homo sapiens
  chr16:81315604-81315635
  hypo
aggtctgtgttccatacgccaaagtgcagaa

SEQ ID NO: 22741 - DNA, 38 bp, Homo sapiens
  chr16:81315679-81315717
  hypo
gtgcatttcaactgagcgcattggctgggcacggtggc

SEQ ID NO: 22742 - DNA, 31 bp, Homo sapiens
  chr16:81335172-81335203
  hypo
actttctgtgtgcatgcgtgttctcaaggac

SEQ ID NO: 22743 - DNA, 31 bp, Homo sapiens
  chr16:81335262-81335293
  hypo
cccagctctgaggattcggtgattctgtgac

SEQ ID NO: 22744 - DNA, 59 bp, Homo sapiens
  chr16:81335305-81335364
  hypo
gctgaaattcacaggccgcacacagctcagaaaggaaaggcggtcgtgtgacaggtgtg

SEQ ID NO: 22745 - DNA, 96 bp, Homo sapiens
  chr16:81492929-81493025
  hypo
tcttcttgggtgtgcccgtggccctgtgctgtgaccctgcgctgtgaccccgtgccgtgaccctgctccgtgacctcgctccgtgacctcaggcac

SEQ ID NO: 22746 - DNA, 34 bp, Homo sapiens
  chr16:81493084-81493118
  hypo
aagcaagatggaaacccgccgttgggaggattaa

SEQ ID NO: 22747 - DNA, 31 bp, Homo sapiens
  chr16:81505738-81505769
  hypo
caggtacatcctcacccgccatctttgaaat

SEQ ID NO: 22748 - DNA, 31 bp, Homo sapiens
  chr16:81564417-81564448
  hypo
ttacatacattatcttcgatcagttcagctt

SEQ ID NO: 22749 - DNA, 31 bp, Homo sapiens
  chr16:81564460-81564491
  hypo
aaagaaatttctctaccgtcccagggagaat

SEQ ID NO: 22750 - DNA, 31 bp, Homo sapiens
  chr16:81564764-81564795
  hypo
atccagtgactgtgtccgtaaaagatgaggg

SEQ ID NO: 22751 - DNA, 32 bp, Homo sapiens
  chr16:81581958-81581990
  hypo
gaactcctgagctgaagcggtcctcttgtctc

SEQ ID NO: 22752 - DNA, 49 bp, Homo sapiens
  chr16:81620158-81620207
  hypo
gcactgtagcctgccacgcaaggctctctgtaatcgagatttaatcagt

SEQ ID NO: 22753 - DNA, 51 bp, Homo sapiens
  chr16:81620270-81620321
  hypo
agcccaactcaaacatcgcatactctctgaagtattcgtcccactttccct

SEQ ID NO: 22754 - DNA, 55 bp, Homo sapiens
  chr16:81627221-81627276
  hypo
gaggcttgaaagtaatcgcctccgtgtattgagtgcccgccgaccacctggcgcg

SEQ ID NO: 22755 - DNA, 31 bp, Homo sapiens
  chr16:81627311-81627342
  hypo
ggatcctcgcctcacccggtgcctgcctgta

SEQ ID NO: 22756 - DNA, 31 bp, Homo sapiens
  chr16:81694709-81694740
  hypo
cttagggctacacccacgtctctgccagaca

SEQ ID NO: 22757 - DNA, 97 bp, Homo sapiens; identical to SEQ ID NO: 5729
  chr16:81813401-81813498
  hypo

SEQ ID NO: 22758 - DNA, 31 bp, Homo sapiens
  chr16:83862941-83862972
  hypo
tacaggcctgagccaccgctcctggccctcg

SEQ ID NO: 22759 - DNA, 42 bp, Homo sapiens
  chr16:83999490-83999532
  hypo
gccaggagggcctgtacgccatggggccgctggccggggaca

SEQ ID NO: 22760 - DNA, 34 bp, Homo sapiens
  chr16:84004406-84004440
  hypo
gtgctggtgggcagggcgccgtggctcacgcctg

SEQ ID NO: 22761 - DNA, 31 bp, Homo sapiens
  chr16:84031862-84031893
  hypo
gtttctggactctctgcgccagtatctgcgg

SEQ ID NO: 22762 - DNA, 31 bp, Homo sapiens
  chr16:84129121-84129152
  hypo
catgtctggactttccgcgccttccctgggt

SEQ ID NO: 22763 - DNA, 58 bp, Homo sapiens
  chr16:84129336-84129394
  hypo
ggctcttcgcaggggacgtgatgattgccacttctggctccaccgggtttcattgcag

SEQ ID NO: 22764 - DNA, 40 bp, Homo sapiens
  chr16:84129435-84129475
  hypo
gaacagaagagcaaaacgaactacacgatacccgccaggc

SEQ ID NO: 22765 - DNA, 31 bp, Homo sapiens
  chr16:84229845-84229876
  hypo
ctgtttgcagggcccccggtggccccttccg

SEQ ID NO: 22766 - DNA, 31 bp, Homo sapiens
  chr16:84270490-84270521
  hypo
cccagcgcgaggagtgcgaggcggggcggcg

SEQ ID NO: 22767 - DNA, 31 bp, Homo sapiens
  chr16:84296329-84296360
  hypo
ctgggtctgtagcaagcggatcagtaaatgt

SEQ ID NO: 22768 - DNA, 31 bp, Homo sapiens
  chr16:84296374-84296405
  hypo
gttgccaagggtagagcgtcaaagggtgacc

SEQ ID NO: 22769 - DNA, 59 bp, Homo sapiens
  chr16:84296465-84296524
  hypo
aggcctgaccctgcttcgcttccgggatcagatgagattgggcacgttcagggtggtat

SEQ ID NO: 22770 - DNA, 31 bp, Homo sapiens
  chr16:84484209-84484240
  hypo
gcgccagcgtcattggcgcagtgtcatgact

SEQ ID NO: 22771 - DNA, 59 bp, Homo sapiens
  chr16:84813520-84813579
  hypo
ggtttaaaggtgtgtgcgtgtttctttgaatgcgaatgccttttcgggtaactgaaatt

SEQ ID NO: 22772 - DNA, 43 bp, Homo sapiens
  chr16:84813605-84813648
  hypo
attaaaatctgcccttcgatcagctcgacgtgtttgtggaagc

SEQ ID NO: 22773 - DNA, 31 bp, Homo sapiens
  chr16:84813693-84813724
  hypo
tagtgatttgggtacacgaagtttttgactc

SEQ ID NO: 22774 - DNA, 31 bp, Homo sapiens
  chr16:84886290-84886321
  hypo
agggggattcccaacccgacaaggggtgggg

SEQ ID NO: 22775 - DNA, 31 bp, Homo sapiens
  chr16:84886350-84886381
  hypo
gagggaaggtacttcacggtgctattcaaaa

SEQ ID NO: 22776 - DNA, 31 bp, Homo sapiens
  chr16:84886385-84886416
  hypo
aggagactggccagtgcggtggctcatgcct

SEQ ID NO: 22777 - DNA, 18 bp, Homo sapiens
  chr16:84886421-84886439
  hypo
cccagcctcctttggccg

SEQ ID NO: 22778 - DNA, 31 bp, Homo sapiens
  chr16:84904247-84904278
  hypo
ttccaaatattcttcacgcacttcatgctta

SEQ ID NO: 22779 - DNA, 31 bp, Homo sapiens
  chr16:84904286-84904317
  hypo
ctgatactctgacacacgactgtacatgaat

SEQ ID NO: 22780 - DNA, 41 bp, Homo sapiens
  chr16:84904365-84904406
  hypo
ccattataaacagttgcggccaggtacggtggctcaagcct

SEQ ID NO: 22781 - DNA, 31 bp, Homo sapiens
  chr16:84912366-84912397
  hypo
ccgcaggtctctgggacgtccccactttata

SEQ ID NO: 22782 - DNA, 46 bp, Homo sapiens
  chr16:84954214-84954260
  hypo
tgatccacatccacagcgagacctctgtgaccgaccatgtcatctg

SEQ ID NO: 22783 - DNA, 24 bp, Homo sapiens
  chr16:84955095-84955119
  hypo
gcgccattgcgaccaccctcagtt

SEQ ID NO: 22784 - DNA, 54 bp, Homo sapiens
  chr16:84965069-84965123
  hypo
gctggcctcccagccccgggccacctccctctgtgctatcggagagaaacaagc

SEQ ID NO: 22785 - DNA, 31 bp, Homo sapiens
  chr16:84965125-84965156
  hypo
ctatcttgtttaggatcgtgtactacagggc

SEQ ID NO: 22786 - DNA, 43 bp, Homo sapiens
  chr16:84965209-84965252
  hypo
gtctgagatgtgcctccggtgaactccccgggcctctgcctcc

SEQ ID NO: 22787 - DNA, 31 bp, Homo sapiens
  chr16:84974273-84974304
  hypo
ctggagagatggcctgcggcgaggccccatg

SEQ ID NO: 22788 - DNA, 45 bp, Homo sapiens
  chr16:84974427-84974472
  hypo
ccccggcccccgtgcccgccttgccagcctcggcctgtgggggct

SEQ ID NO: 22789 - DNA, 31 bp, Homo sapiens
  chr16:84974955-84974986
  hypo
tccccaaccttaccctcgggcctcagtgctg

SEQ ID NO: 22790 - DNA, 31 bp, Homo sapiens
  chr16:84987807-84987838
  hypo
catagggagggtaacccgggtcatccaggtg

SEQ ID NO: 22791 - DNA, 48 bp, Homo sapiens
  chr16:85007576-85007624
  hypo
gccccaaggcacagcacgtgcgaggcagggctgcggcacacactgacc

SEQ ID NO: 22792 - DNA, 44 bp, Homo sapiens
  chr16:85007629-85007673
  hypo
gcctctgaaaggtaagcgaggcagggctgcggcacacactgacc

SEQ ID NO: 22793 - DNA, 38 bp, Homo sapiens
  chr16:85007984-85008022
  hypo
cctggggctgggcccacgaagcacggaaaggcaccccc

SEQ ID NO: 22794 - DNA, 35 bp, Homo sapiens
  chr16:85008031-85008066
  hypo
caccatccaggaagaacgggcgctttggaagccat

SEQ ID NO: 22795 - DNA, 76 bp, Homo sapiens
  chr16:85033826-85033902
  hypo
ccagcacaggtatgtacggccggtgtgatagtgcaagggtgcggcacaaggcaagtcccagcgagcagtggagtca

SEQ ID NO: 22796 - DNA, 31 bp, Homo sapiens
  chr16:85033906-85033937
  hypo
tcttcctggataacccgcgttcctgagtcca

SEQ ID NO: 22797 - DNA, 31 bp, Homo sapiens
  chr16:85033977-85034008
  hypo
agtgtcttaagctcttcgcctttactttttt

SEQ ID NO: 22798 - DNA, 28 bp, Homo sapiens
  chr16:85043916-85043944
  hypo
gagccaccgcgtgcgtaccaggccacaa

SEQ ID NO: 22799 - DNA, 143 bp, Homo sapiens
  chr16:85083547-85083690
  hypo
gagtggaaggccaagtcggtctctgtccgagttgaattcagctgtcccggagtcagccgctgtgtccttttgtgaaagaagtacagcccgtcacccagggagggcgcgccttatggcgggttctaacacgcagttgcaatgga

SEQ ID NO: 22800 - DNA, 31 bp, Homo sapiens
  chr16:85083695-85083726
  hypo
ctcagtcaatggtgatcgctgatggtaaaca

SEQ ID NO: 22801 - DNA, 31 bp, Homo sapiens
  chr16:85083731-85083762
  hypo
tcaccctgcactgtctcggtgcctgaaactc

SEQ ID NO: 22802 - DNA, 66 bp, Homo sapiens
  chr16:85196864-85196930
  hypo
atgccgggtgccctcacggcacttctcggttgcacgctggttagtattgggcgccgactgcatgcc

SEQ ID NO: 22803 - DNA, 70 bp, Homo sapiens; identical to SEQ ID NO: 5737
  chr16:85202814-85202884
  hypo

SEQ ID NO: 22804 - DNA, 68 bp, Homo sapiens
  chr16:85214270-85214338
  hypo
cacagtggggaagtgccggcgccgggatccgcacccaggctgcctggctccagcgtctgcactctgcc

SEQ ID NO: 22805 - DNA, 31 bp, Homo sapiens
  chr16:85214413-85214444
  hypo
ctggagaaggggtatccgatgagttcttagg

SEQ ID NO: 22806 - DNA, 31 bp, Homo sapiens
  chr16:85236875-85236906
  hypo
gcttcgcagggcatagcgccaggctgggcag

SEQ ID NO: 22807 - DNA, 31 bp, Homo sapiens
  chr16:85238637-85238668
  hypo
tgggcatgtacacgtacgtcttggctcactg

SEQ ID NO: 22808 - DNA, 58 bp, Homo sapiens
  chr16:85241913-85241971
  hypo
atcagtgctccctgaacggtctgcggagttctcagccatcgcccgtggcatctcggct

SEQ ID NO: 22809 - DNA, 31 bp, Homo sapiens
  chr16:85245558-85245589
  hypo
gcatcacttgaaccatcgcccatcaaatggt

SEQ ID NO: 22810 - DNA, 31 bp, Homo sapiens
  chr16:85245654-85245685
  hypo
ctgacccccagttcctcggaatgtgcctgtg

SEQ ID NO: 22811 - DNA, 36 bp, Homo sapiens
  chr16:85245716-85245752
  hypo
taattgggctagaagccgggcgcggtggctcatgcc

SEQ ID NO: 22812 - DNA, 46 bp, Homo sapiens
  chr16:85283527-85283573
  hypo
agcgatgccagctgggcgcttctccatgcctcggtttccttgtctg

SEQ ID NO: 22813 - DNA, 31 bp, Homo sapiens
  chr16:85285189-85285220
  hypo
gggcaggggctgggcccggggcctgcctgcc

SEQ ID NO: 22814 - DNA, 31 bp, Homo sapiens
  chr16:85289023-85289054
  hypo
ttttttttttttgagacggagtcttgctctg

SEQ ID NO: 22815 - DNA, 31 bp, Homo sapiens
  chr16:85294922-85294953
  hypo
gtgtatgactctgcctcggtgcctcagtgtt

SEQ ID NO: 22816 - DNA, 31 bp, Homo sapiens
  chr16:85299459-85299490
  hypo
tgaggtcccaggtccacggtcacagggctgg

SEQ ID NO: 22817 - DNA, 30 bp, Homo sapiens
  chr16:85321550-85321580
  hypo
aataagcgctattggccgggcacggtggct

SEQ ID NO: 22818 - DNA, 36 bp, Homo sapiens
  chr16:85327231-85327267
  hypo
ggaatcagggtgtcagcgggacggcttccttctgct

SEQ ID NO: 22819 - DNA, 31 bp, Homo sapiens
  chr16:85327273-85327304
  hypo
agagtgggaatctgtccgggcctttcttcca

SEQ ID NO: 22820 - DNA, 57 bp, Homo sapiens
  chr16:85327344-85327401
  hypo
ctagaagccatctctccgatcactgaacttcatcgctgtgatcgctgcctctgccat

SEQ ID NO: 22821 - DNA, 45 bp, Homo sapiens
  chr16:85332744-85332789
  hypo
gtccgtatgtttgcaccgtcttgtctttttcggggaaaatacatt

SEQ ID NO: 22822 - DNA, 43 bp, Homo sapiens
  chr16:85351333-85351376
  hypo
cctgcgctggctcattcgctttcctgccgcgctgcccaccagt

SEQ ID NO: 22823 - DNA, 35 bp, Homo sapiens
  chr16:85351418-85351453
  hypo
gctcagctccttgcctcgtccgcttctgggagagc

SEQ ID NO: 22824 - DNA, 31 bp, Homo sapiens
  chr16:85351458-85351489
  hypo
ctaagagggaaactatcgtgtgaatcgtcag

SEQ ID NO: 22825 - DNA, 31 bp, Homo sapiens
  chr16:85351497-85351528
  hypo
gacatctgcctcagcccggggttcctggggg

SEQ ID NO: 22826 - DNA, 85 bp, Homo sapiens
  chr16:85364086-85364171
  hypo
tgttagagccattgttcgtggtcgcatgttacagcagccgcagaacacagagacagcccctcgcagcaggcgcctcacctggggc

SEQ ID NO: 22827 - DNA, 97 bp, Homo sapiens
  chr16:85364172-85364269
  hypo
ctgtgaggggctgcagcgccccactgccatgtcgtctgcctctgccgatccaggaagcgtgcaggtgggcaggggtgggcaccggagggcatgatgc

SEQ ID NO: 22828 - DNA, 31 bp, Homo sapiens
  chr16:85376257-85376288
  hypo
tcttcaggctgtctgacgtttggcagtctgt

SEQ ID NO: 22829 - DNA, 31 bp, Homo sapiens
  chr16:85407691-85407722
  hypo
gtgttggtgtgtgcacgcgtggccctcagtg

SEQ ID NO: 22830 - DNA, 50 bp, Homo sapiens
  chr16:85407731-85407781
  hypo
tgtcagtgtgcatgtgcgtggttgcatgtggccctcggtgtgcagtgtgt

SEQ ID NO: 22831 - DNA, 41 bp, Homo sapiens
  chr16:85407789-85407830
  hypo
gcctctgtgtgttcacgcgtggccctcggtgtgcagtgtgt

SEQ ID NO: 22832 - DNA, 93 bp, Homo sapiens
  chr16:85407835-85407928
  hypo
tgtgcctgtgcatggtcgtgcgtggtcctcggtgtgcagtgtgtgtcagtgtgtatgtgcgtggttgtgtgtggccctcggtgtgcagtgtgt

SEQ ID NO: 22833 - DNA, 31 bp, Homo sapiens
  chr16:85426316-85426347
  hypo
gaaactgagagccagccgcatatcacagcca

SEQ ID NO: 22834 - DNA, 31 bp, Homo sapiens
  chr16:85426386-85426417
  hypo
cttgacccttagggagcgttgcctcagtgaa

SEQ ID NO: 22835 - DNA, 64 bp, Homo sapiens
  chr16:85426424-85426488
  hypo
cctgaggctggagaggcggctggggccaggttggctgaccccgaatgtgcggggatgccctccg

SEQ ID NO: 22836 - DNA, 49 bp, Homo sapiens
  chr16:85432510-85432559
  hypo
catgtataatgcatgtcgagtgtgtatccacatgcgttgtatgtttgtg

SEQ ID NO: 22837 - DNA, 31 bp, Homo sapiens
  chr16:85446736-85446767
  hypo
gaagcctgtgtgtttccgcacaccctgcaac

SEQ ID NO: 22838 - DNA, 31 bp, Homo sapiens
  chr16:85498188-85498219
  hypo
ggggtgatggtcatgccggttgcacagggta

SEQ ID NO: 22839 - DNA, 31 bp, Homo sapiens
  chr16:85507602-85507633
  hypo
ctgaaaccagcacaggcgggcagggtgtgac

SEQ ID NO: 22840 - DNA, 42 bp, Homo sapiens
  chr16:85523183-85523225
  hypo
cacccaccccacaagccgtgcttcattcgtgaagttgctacg

SEQ ID NO: 22841 - DNA, 93 bp, Homo sapiens
  chr16:85529539-85529632
  hypo
acctggggtgattcatcgagcatccctcggtctcagactcctcatttgtcaaaagccgcggggggacctgcctcagagcgtcacagggaacct

SEQ ID NO: 22842 - DNA, 31 bp, Homo sapiens
  chr16:85529758-85529789
  hypo
gacagtgacttgacctcgctccccagaggtg

SEQ ID NO: 22843 - DNA, 31 bp, Homo sapiens
  chr16:85535587-85535618
  hypo
tcacaggaggctcagccggggagccagatgt

SEQ ID NO: 22844 - DNA, 62 bp, Homo sapiens
  chr16:85535633-85535695
  hypo
tcttgcaggaagatcccgggaggaggggagtgggtgtcaggggcactcgatgggggtccgtg

SEQ ID NO: 22845 - DNA, 61 bp, Homo sapiens
  chr16:85541367-85541428
  hypo
gtcacattctgaggcccgggggctgggatgtcagcgtgtcaattttcgcaggacacaaatc

SEQ ID NO: 22846 - DNA, 67 bp, Homo sapiens
  chr16:85541460-85541527
  hypo
caatttgaaatggatgcgtcatattcatcagaagagttgcgagcacacgcctcgtgtgtttctatgg

SEQ ID NO: 22847 - DNA, 98 bp, Homo sapiens
  chr16:85543125-85543223
  hypo
agctccgtttggccagcgacccctggccctcgctgtcatcagcttgcctggtgctttgcgggtgcctgatgactgtggagtgacgttgaatggaaagg

SEQ ID NO: 22848 - DNA, 60 bp, Homo sapiens
  chr16:85543251-85543311
  hypo
tggccctgaaggccagcgtggggaacaagagccgaatggccatgccgggtgggagacgtg

SEQ ID NO: 22849 - DNA, 25 bp, Homo sapiens
  chr16:85550409-85550434
  hypo
ttttttttttttgagacggagtctc

SEQ ID NO: 22850 - DNA, 31 bp, Homo sapiens
  chr16:85553675-85553706
  hypo
gtggcttaacaaccatcgaaatgtactgctt

SEQ ID NO: 22851 - DNA, 31 bp, Homo sapiens
  chr16:85564298-85564329
  hypo
tcacagagcacccagccggggaatccaagtt

SEQ ID NO: 22852 - DNA, 42 bp, Homo sapiens
  chr16:85586222-85586264
  hypo
ccaccgcgctcagtctcaggtggacctcgatggctgtctcca

SEQ ID NO: 22853 - DNA, 31 bp, Homo sapiens
  chr16:85617747-85617778
  hypo
tgcgtgcgtgccggtgcgtgggcccctgtct

SEQ ID NO: 22854 - DNA, 31 bp, Homo sapiens
  chr16:85617787-85617818
  hypo
ccttcctccccctctgcgtgttccccaagat

SEQ ID NO: 22855 - DNA, 48 bp, Homo sapiens
  chr16:85671082-85671130
  hypo
agcagtggctatgtatcgagtccccccttgatcgcggcagtggctatg

SEQ ID NO: 22856 - DNA, 31 bp, Homo sapiens
  chr16:85671134-85671165
  hypo
gagtccccccttgatcgcggcagtggctgtg

SEQ ID NO: 22857 - DNA, 31 bp, Homo sapiens
  chr16:85671744-85671775
  hypo
tttcgccatctgactgcgattgcctccgcgt

SEQ ID NO: 22858 - DNA, 31 bp, Homo sapiens
  chr16:85673047-85673078
  hypo
tgtgtcccaccccctgcgctggacagattct

SEQ ID NO: 22859 - DNA, 61 bp, Homo sapiens
  chr16:85673085-85673146
  hypo
ctctaagcctcctgggcgccaggcctagcctgccttgcgggtgtgtcgggatccccccatc

SEQ ID NO: 22860 - DNA, 48 bp, Homo sapiens
  chr16:85673183-85673231
  hypo
taagaggtgtttgccccgagggtgccccgggaacgcctgtgcgtggag

SEQ ID NO: 22861 - DNA, 49 bp, Homo sapiens
  chr16:85673837-85673886
  hypo
ttccctgcccacacttcgctcccttaacaccggccgggggctcatggta

SEQ ID NO: 22862 - DNA, 46 bp, Homo sapiens
  chr16:85674185-85674231
  hypo
gagtgagtggggactacgtgtgcggggaccacggagcagggaccac

SEQ ID NO: 22863 - DNA, 98 bp, Homo sapiens
  chr16:85674236-85674334
  hypo
catcctcatgagctgccgtgggaatgcttccaccgtggagccggcctgggcgggggagaggctccccctttctgccgctgcctcggaaatctgcctct

SEQ ID NO: 22864 - DNA, 71 bp, Homo sapiens
  chr16:85678357-85678428
  hypo
tagaaccgtggggccgcgcgctgggtgggtgaattacgcgggatggaatcatagctcggtgaagctataac

SEQ ID NO: 22865 - DNA, 31 bp, Homo sapiens
  chr16:85678804-85678835
  hypo
gtctggggttgggtcacgcctcaggggcagc

SEQ ID NO: 22866 - DNA, 31 bp, Homo sapiens
  chr16:85679145-85679176
  hypo
agttctgtttccacatcgggatgcctgtggg

SEQ ID NO: 22867 - DNA, 43 bp, Homo sapiens
  chr16:85679254-85679297
  hypo
tctttggtgaatgtgcgcgtgcccactccggacacagtgaagg

SEQ ID NO: 22868 - DNA, 55 bp, Homo sapiens
  chr16:85682502-85682557
  hypo
aacgtgagggtgacagcggcaccctcctggaggccctgtgcgggtgagtacatcg

SEQ ID NO: 22869 - DNA, 31 bp, Homo sapiens
  chr16:85683112-85683143
  hypo
atgtctgtgggcccctcgctctgcactgact

SEQ ID NO: 22870 - DNA, 96 bp, Homo sapiens
  chr16:85683175-85683271
  hypo
ggagctgctcttctgccgctgcctggggcctgtgcgccctcaggtgggtacctgcagctctcccggccccccacccctggcgcgcagcctggagtg

SEQ ID NO: 22871 - DNA, 31 bp, Homo sapiens
  chr16:85683274-85683305
  hypo
ccttcctaattaagagcgattctcaggggct

SEQ ID NO: 22872 - DNA, 140 bp, Homo sapiens
  chr16:85684062-85684202
  hypo
gccactgccttgaccccgaccagagctcctggcctagacccaggacgcctcgaggggattccagcgccttttccggcgactcctccgctctgagctggtccctcctcggagggtccttaccgcctcgggaacattgagct

SEQ ID NO: 22873 - DNA, 31 bp, Homo sapiens
  chr16:85685921-85685952
  hypo
ccccggttgctgacaccggctggagacccca

SEQ ID NO: 22874 - DNA, 31 bp, Homo sapiens
  chr16:85699737-85699768
  hypo
agaaggccaggctgagcgaggcccctggagg

SEQ ID NO: 22875 - DNA, 94 bp, Homo sapiens; identical to SEQ ID NO: 5738
  chr16:85932252-85932346
  hypo

SEQ ID NO: 22876 - DNA, 88 bp, Homo sapiens; identical to SEQ ID NO: 5739
  chr16:85932356-85932444
  hypo

SEQ ID NO: 22877 - DNA, 31 bp, Homo sapiens
  chr16:85959633-85959664
  hypo
gtgtgcttttgagttccggtgaacggggtgc

SEQ ID NO: 22878 - DNA, 31 bp, Homo sapiens
  chr16:86078363-86078394
  hypo
gtttaccgaggagcagcggagatgttatgag

SEQ ID NO: 22879 - DNA, 49 bp, Homo sapiens
  chr16:86561823-86561872
  hypo
tcaacccggaggggcccgtttccagttcagtgaccggccatctgagggc

SEQ ID NO: 22880 - DNA, 66 bp, Homo sapiens
  chr16:86878417-86878483
  hypo
gaaacctcacaaatggcgctttgtcgtcccgccgagagatctgggacatcccgtgagttggaatat

SEQ ID NO: 22881 - DNA, 63 bp, Homo sapiens
  chr16:87250178-87250241
  hypo
tttttcttggcctgtgcggatgaaggaggctgattgaaaccgggccggcgctggatggggaac

SEQ ID NO: 22882 - DNA, 38 bp, Homo sapiens
  chr16:87310541-87310579
  hypo
agagcaaaaacagctccgcaagtcgcctgcccaagcat

SEQ ID NO: 22883 - DNA, 61 bp, Homo sapiens
  chr16:87356768-87356829
  hypo
gctcaacctcccacaacgcatggagcggcccggcgcacgactcacccggccccaaacacca

SEQ ID NO: 22884 - DNA, 77 bp, Homo sapiens; identical to SEQ ID NO: 5740
  chr16:87417729-87417806
  hypo

SEQ ID NO: 22885 - DNA, 31 bp, Homo sapiens; identical to SEQ ID NO: 5741
  chr16:87417849-87417880
  hypo

SEQ ID NO: 22886 - DNA, 330 bp, Homo sapiens; identical to SEQ ID NO: 5742
  chr16:87417882-87418212
  hypo

SEQ ID NO: 22887 - DNA, 37 bp, Homo sapiens
  chr16:87420751-87420788
  hypo
gaaagaaaagaatgaccgtgagcgcttcagcaatacc

SEQ ID NO: 22888 - DNA, 44 bp, Homo sapiens
  chr16:87420849-87420893
  hypo
tcctgacagctgaatacgtccttggaacacgtttacaatccttt

SEQ ID NO: 22889 - DNA, 122 bp, Homo sapiens; identical to SEQ ID NO: 5744
  chr16:87525991-87526113
  hypo

SEQ ID NO: 22890 - DNA, 390 bp, Homo sapiens; identical to SEQ ID NO: 5745
  chr16:87526239-87526629
  hypo

SEQ ID NO: 22891 - DNA, 212 bp, Homo sapiens; identical to SEQ ID NO: 5746
  chr16:87526765-87526977
  hypo

SEQ ID NO: 22892 - DNA, 60 bp, Homo sapiens; identical to SEQ ID NO: 5747
  chr16:87527024-87527084
  hypo

SEQ ID NO: 22893 - DNA, 31 bp, Homo sapiens
  chr16:87584286-87584317
  hypo
ccattcccccagtccacgtgcttatggggcc

SEQ ID NO: 22894 - DNA, 31 bp, Homo sapiens
  chr16:87585846-87585877
  hypo
ggccaggtgggcagctcgggctgggagcaga

SEQ ID NO: 22895 - DNA, 20 bp, Homo sapiens
  chr16:87596283-87596303
  hypo
ttttttttttttgattcgga

SEQ ID NO: 22896 - DNA, 31 bp, Homo sapiens
  chr16:87597530-87597561
  hypo
tgtgctggggtgtgtgcgtgtgcacatttgt

SEQ ID NO: 22897 - DNA, 31 bp, Homo sapiens
  chr16:87678207-87678238
  hypo
tcctttcgcagcgaggcgggcatgagcaccg

SEQ ID NO: 22898 - DNA, 99 bp, Homo sapiens
  chr16:87723112-87723211
  hypo
cttgcctgcagcctttcggtgagtgggaagcgcctctgctgccctgaggttccctctggcgccctggcccggggaccgcggcctcgctgtggaatgtgc

SEQ ID NO: 22899 - DNA, 51 bp, Homo sapiens; identical to SEQ ID NO: 5748
  chr16:87723333-87723384
  hypo

SEQ ID NO: 22900 - DNA, 50 bp, Homo sapiens; identical to SEQ ID NO: 5749
  chr16:87723466-87723516
  hypo

SEQ ID NO: 22901 - DNA, 51 bp, Homo sapiens; identical to SEQ ID NO: 5750
  chr16:87723714-87723765
  hypo

SEQ ID NO: 22902 - DNA, 31 bp, Homo sapiens; identical to SEQ ID NO: 5751
  chr16:87723783-87723814
  hypo

SEQ ID NO: 22903 - DNA, 48 bp, Homo sapiens; identical to SEQ ID NO: 5752
  chr16:87723817-87723865
  hypo

SEQ ID NO: 22904 - DNA, 164 bp, Homo sapiens; identical to SEQ ID NO: 5753
  chr16:87723949-87724113
  hypo

SEQ ID NO: 22905 - DNA, 31 bp, Homo sapiens; identical to SEQ ID NO: 5754
  chr16:87724114-87724145
  hypo

SEQ ID NO: 22906 - DNA, 31 bp, Homo sapiens
  chr16:87774174-87774205
  hypo
caccaggacacaccttcgtcaaaggaaaatg

SEQ ID NO: 22907 - DNA, 31 bp, Homo sapiens
  chr16:87810850-87810881
  hypo
ggaaattgttgactaacgactttataagtca

SEQ ID NO: 22908 - DNA, 27 bp, Homo sapiens
  chr16:87905811-87905838
  hypo
cgtgagccaccacgcccagcgccctgc

SEQ ID NO: 22909 - DNA, 38 bp, Homo sapiens
  chr16:87983754-87983792
  hypo
ttacaggcgtgagccgccgcgcccggccagcattttct

SEQ ID NO: 22910 - DNA, 45 bp, Homo sapiens; identical to SEQ ID NO: 5755
  chr16:88061031-88061076
  hypo

SEQ ID NO: 22911 - DNA, 72 bp, Homo sapiens
  chr16:88073664-88073736
  hypo
gacctcaaatcaaagacggcttcaggagaggccggtgctgccactcagggtagcgggcggaatcttggtaca

SEQ ID NO: 22912 - DNA, 31 bp, Homo sapiens
  chr16:88073769-88073800
  hypo
tgtgatttaaagaaaccgctgtgttcatctg

SEQ ID NO: 22913 - DNA, 41 bp, Homo sapiens
  chr16:88073813-88073854
  hypo
tggtgaatctgtgtagcgaaccccctcgttttccatttgtg

SEQ ID NO: 22914 - DNA, 50 bp, Homo sapiens
  chr16:88078971-88079021
  hypo
cgtgcgtgcacttgagcgtttcttgcaggagaggccggggccaaaggaac

SEQ ID NO: 22915 - DNA, 51 bp, Homo sapiens
  chr16:88084705-88084756
  hypo
cagccaagctgttgaccgcagcacccgggtccctcccgtgtagtggcgggc

SEQ ID NO: 22916 - DNA, 31 bp, Homo sapiens
  chr16:88237695-88237726
  hypo
gcagccggaggtgccccgtaaccccacagag

SEQ ID NO: 22917 - DNA, 31 bp, Homo sapiens
  chr16:88356202-88356233
  hypo
tttgtgccagagcaggcggcaccaccactcc

SEQ ID NO: 22918 - DNA, 31 bp, Homo sapiens
  chr16:88375503-88375534
  hypo
ggccatctgggaaggccgtgagaaggagctg

SEQ ID NO: 22919 - DNA, 51 bp, Homo sapiens
  chr16:88495628-88495679
  hypo
tgggagcctcccccagcgagtccccactgccgtcaccggccaccaacacgg

SEQ ID NO: 22920 - DNA, 221 bp, Homo sapiens
  chr16:88504016-88504237
  hypo
tgctggcacacctgggcggggcgcacgggctgctggagcggccggagctgcagcacacgccgctgtatgcctgcgagctctgcgccacggttatgcgcatcatcaagaagtccttcgcctgcagctcctgcaactacaccttcgccaagaaggagcagttcgaccgccacatgaacaagcacctcaggggggggcggcagcccttcgcgttccgcggcgtg

SEQ ID NO: 22921 - DNA, 64 bp, Homo sapiens
  chr16:88504251-88504315
  hypo
gccgggacagaaggcccgggccctcgagggcacactgcccagcaaacggcgcagggtggccatg

SEQ ID NO: 22922 - DNA, 31 bp, Homo sapiens
  chr16:88597829-88597860
  hypo
gtcactgacatggagccgcccaggtgtgtgg

SEQ ID NO: 22923 - DNA, 31 bp, Homo sapiens
  chr16:88601648-88601679
  hypo
acaggccactgcggcccggagtggctgggcc

SEQ ID NO: 22924 - DNA, 31 bp, Homo sapiens
  chr16:88623968-88623999
  hypo
caaggcacgggagccacggatgcctgaggcc

SEQ ID NO: 22925 - DNA, 46 bp, Homo sapiens
  chr16:88624842-88624888
  hypo
gagtcgcgcatccccccgtcggggggtgagtcgcccgtccccccgt

SEQ ID NO: 22926 - DNA, 77 bp, Homo sapiens
  chr16:88645406-88645483
  hypo
tctccagtagcatgctggcgtgcgtgctctcaatgcacgtttggatatgactttccggccatcgctgctctctgtgg

SEQ ID NO: 22927 - DNA, 36 bp, Homo sapiens
  chr16:88645515-88645551
  hypo
tgctcatgtgactttacgggacgtgtgtgcacctgc

SEQ ID NO: 22928 - DNA, 62 bp, Homo sapiens
  chr16:88647917-88647979
  hypo
tatcttctggaagtgccgctggcctgcgtggtggggtggaaagtttccgtacagggctggga

SEQ ID NO: 22929 - DNA, 61 bp, Homo sapiens
  chr16:88648007-88648068
  hypo
gtggtgtgggtgagggcgtccctgacaccagctgaccttcagtcaccggtctcttacctgt

SEQ ID NO: 22930 - DNA, 31 bp, Homo sapiens
  chr16:88649039-88649070
  hypo
cttggaaaaagggccccgtagcatcagtagt

SEQ ID NO: 22931 - DNA, 31 bp, Homo sapiens
  chr16:88649082-88649113
  hypo
cttctgtgccccttagcgtggttagtgttcc

SEQ ID NO: 22932 - DNA, 41 bp, Homo sapiens
  chr16:88649116-88649157
  hypo
tagccacatgaaaaagcgcaggccaccgtccttacagctct

SEQ ID NO: 22933 - DNA, 31 bp, Homo sapiens
  chr16:88649207-88649238
  hypo
acctggcccaagctggcgtgaggctgctcat

SEQ ID NO: 22934 - DNA, 31 bp, Homo sapiens
  chr16:88683206-88683237
  hypo
gctaccaagcagaacacgaatgaggggctct

SEQ ID NO: 22935 - DNA, 65 bp, Homo sapiens
  chr16:88689148-88689213
  hypo
gttgcccctccacctacggtcctggtctcagcacacaggagcccggctcccgagtgagggatgat

SEQ ID NO: 22936 - DNA, 40 bp, Homo sapiens
  chr16:88712059-88712099
  hypo
gcagtcataaaccaaacgcaggtgtcggcagtttaagaaa

SEQ ID NO: 22937 - DNA, 58 bp, Homo sapiens
  chr16:88757465-88757523
  hypo
ggcaagggagagtgaccggtgctgaggggagcccttgggcctgcggcagatgaggtga

SEQ ID NO: 22938 - DNA, 108 bp, Homo sapiens
  chr16:88757526-88757634
  hypo
ttgagccatcaagcagcgaggcagcgtgcgtgtgagtctgcaggccacaggcgtgttcgtgcgtgtgtccatgggcgtatgcgtgtgggaagtcgcagtagctgctct

SEQ ID NO: 22939 - DNA, 39 bp, Homo sapiens
  chr16:88785879-88785918
  hypo
agggcctccagcaccacgggttctcgtggcagcagtgcc

SEQ ID NO: 22940 - DNA, 31 bp, Homo sapiens
  chr16:88800799-88800830
  hypo
gacacgtgctccatgtcggtgagctgcatga

SEQ ID NO: 22941 - DNA, 31 bp, Homo sapiens
  chr16:88827320-88827351
  hypo
gctcatctgacctacacggggcagggtcctg

SEQ ID NO: 22942 - DNA, 68 bp, Homo sapiens
  chr16:88831229-88831297
  hypo
ccgtgacctcccaaaacgaggactccgccctcggcaccaggggcagacactggcgaccactccaacca

SEQ ID NO: 22943 - DNA, 38 bp, Homo sapiens
  chr16:88831349-88831387
  hypo
gccattgaaaacctcccggtagccgcctctcaggagca

SEQ ID NO: 22944 - DNA, 46 bp, Homo sapiens; identical to SEQ ID NO: 5756
  chr16:88878526-88878572
  hypo

SEQ ID NO: 22945 - DNA, 213 bp, Homo sapiens; identical to SEQ ID NO: 5757
  chr16:88878579-88878792
  hypo

SEQ ID NO: 22946 - DNA, 79 bp, Homo sapiens
  chr16:88883317-88883396
  hypo
cgtgtaaacaggtgagcgacggcccaggggcctcgaggctgggctcggccatctccactgtgctcggtgggctctgggc

SEQ ID NO: 22947 - DNA, 31 bp, Homo sapiens
  chr16:88891674-88891705
  hypo
tgggtgtttgggcagccggggctggggtgcc

SEQ ID NO: 22948 - DNA, 52 bp, Homo sapiens
  chr16:88892783-88892835
  hypo
gggaacaggggtggggcgggcaggggcggcatgtgcccgggtacaggcaggg

SEQ ID NO: 22949 - DNA, 31 bp, Homo sapiens
  chr16:88927522-88927553
  hypo
tttggctttttccttccgtgtcagccaagga

SEQ ID NO: 22950 - DNA, 31 bp, Homo sapiens
  chr16:88931260-88931291
  hypo
cttgatgacccggccccggaagaggctctgg

SEQ ID NO: 22951 - DNA, 31 bp, Homo sapiens
  chr16:88935300-88935331
  hypo
ggtgagcggagggtaacgttagctctgtcct

SEQ ID NO: 22952 - DNA, 37 bp, Homo sapiens
  chr16:88935425-88935462
  hypo
gaatttccctgtaagcgcgatgcgaggaggcacaggc

SEQ ID NO: 22953 - DNA, 31 bp, Homo sapiens; identical to SEQ ID NO: 5760
  chr16:88938185-88938216
  hypo

SEQ ID NO: 22954 - DNA, 31 bp, Homo sapiens
  chr16:88941182-88941213
  hypo
ccaccagcaggcaaaccgctcctcccctcgg

SEQ ID NO: 22955 - DNA, 61 bp, Homo sapiens
  chr16:88943411-88943472
  hypo
ggtgggctgggggagccggggcgagaaggccccgcagagccggcttcgctggggctggcag

SEQ ID NO: 22956 - DNA, 183 bp, Homo sapiens
  chr16:88945691-88945874
  hypo
cctgctggttgatgaccgtcagggcgtcctcggaggcctgccgcttcgcctcggccagggcccgctccatcttggcacgctccgtggtgatgagctcgtgcgctttgcgctccgcgtccgacacggctttctgcagctccgacatggcctgccgcttcacctcattcacggcctcttctgcaa

SEQ ID NO: 22957 - DNA, 58 bp, Homo sapiens
  chr16:88946021-88946079
  hypo
taggcagctgaacacacgtagcatctgtgcacacacagacacacgttgatggccctca

SEQ ID NO: 22958 - DNA, 69 bp, Homo sapiens
  chr16:88948323-88948392
  hypo
ctgaggagcccagttccgggccgtccccgaacacgtcctgcctcaaagaggcctcggcactgcttttgc

SEQ ID NO: 22959 - DNA, 31 bp, Homo sapiens
  chr16:88948452-88948483
  hypo
ggagggaagcaaggcccgccatgagggtttt

SEQ ID NO: 22960 - DNA, 47 bp, Homo sapiens
  chr16:88948491-88948538
  hypo
tcctccctgggcctctcgagatgcctgggctgcgctgacagctggga

SEQ ID NO: 22961 - DNA, 47 bp, Homo sapiens
  chr16:88948550-88948597
  hypo
aggtgaaggacccagccgctgcgcagggacggcgcaggccacacagg

SEQ ID NO: 22962 - DNA, 31 bp, Homo sapiens
  chr16:88948600-88948631
  hypo
gcactgagctcaggggcgcccacacagccct

SEQ ID NO: 22963 - DNA, 35 bp, Homo sapiens
  chr16:88952173-88952208
  hypo
agcccactggggtgtccgcccgtgcagccaccaag

SEQ ID NO: 22964 - DNA, 157 bp, Homo sapiens
  chr16:88952305-88952462
  hypo
gggagcagggtgagccgcgtgtccacggcacccccagcccagatccccggagcccacaggtacctgtcgggcgtcctcctcttgccgttctcgttgacttccagtagcagctctgaggagtcgatgggggaggaggcgctggcgtccagcaggagct

SEQ ID NO: 22965 - DNA, 72 bp, Homo sapiens
  chr16:88952470-88952542
  hypo
tgggccaagtactgggcgggcgtctgcttggccaggcgtgcacagtgcaggagctcccgctgcagcaagggc

SEQ ID NO: 22966 - DNA, 31 bp, Homo sapiens
  chr16:88952594-88952625
  hypo
cagccctgctcaggtccgagcagagggggcc

SEQ ID NO: 22967 - DNA, 43 bp, Homo sapiens
  chr16:88955195-88955238
  hypo
cactggccccgggccccgggtgggggcacgaggtgggctggcc

SEQ ID NO: 22968 - DNA, 31 bp, Homo sapiens
  chr16:88955248-88955279
  hypo
gctaccccacacaggccgtgggatcccctgt

SEQ ID NO: 22969 - DNA, 79 bp, Homo sapiens
  chr16:88955289-88955368
  hypo
gagactgaggtggacacggccctcacgagagccgggccgcgggcggcacctgctggggcgtggccgggggacaccaggg

SEQ ID NO: 22970 - DNA, 31 bp, Homo sapiens
  chr16:88956229-88956260
  hypo
cctggacgatgccccgcgattcctcctcctc

SEQ ID NO: 22971 - DNA, 132 bp, Homo sapiens
  chr16:88956267-88956399
  hypo
acttcaaatccctggacgacgccccgcgattcctcctccttcagggacgacgccccgcgattcctcctcctccagggacgacgccgtgcgattcctcctcctccagggacgacgccccgtgattcctcctcc

SEQ ID NO: 22972 - DNA, 31 bp, Homo sapiens
  chr16:88956554-88956585
  hypo
acctccctgtagtccccgctacctgggaggc

SEQ ID NO: 22973 - DNA, 68 bp, Homo sapiens
  chr16:88956593-88956661
  hypo
aagattcccctgagcccgggagtgaggccccgttctttccgcgtgtccctccacgctgtctcctcaac

SEQ ID NO: 22974 - DNA, 31 bp, Homo sapiens
  chr16:88956681-88956712
  hypo
ttgcagatacagaaaccgaagcacagaggaa

SEQ ID NO: 22975 - DNA, 31 bp, Homo sapiens
  chr16:88956737-88956768
  hypo
tgctaagtggcaggctcgggctcaagccagg

SEQ ID NO: 22976 - DNA, 31 bp, Homo sapiens
  chr16:88956784-88956815
  hypo
ctgtcctctggacccccgaggggaggcctgg

SEQ ID NO: 22977 - DNA, 53 bp, Homo sapiens
  chr16:88956827-88956880
  hypo
ggagcccacagcagtacgggcagtgctcaggctgggcccgaaggtgtggccag

SEQ ID NO: 22978 - DNA, 12 bp, Homo sapiens
  chr16:88957368-88957380
  hypo
tcctcagactgg

SEQ ID NO: 22979 - DNA, 84 bp, Homo sapiens
  chr16:88957404-88957488
  hypo
ttcagcaggtttgggccgggccgagagcctgcaaagctgacaagccccgcgtgctgccaccctggtccacggttgatctgggtg

SEQ ID NO: 22980 - DNA, 112 bp, Homo sapiens
  chr16:88957513-88957625
  hypo
acacctcttcatccatcggcctgcgcagccacagaagccccttcccgcctgtctaccgccctcacctcccgccctcacctctgctctctccaccccacgtattctgttccag

SEQ ID NO: 22981 - DNA, 177 bp, Homo sapiens
  chr16:88957643-88957820
  hypo
tgttcctcaagcacagcgggcgccccatacctcagggcctctgcacgtgcagttactgctgtctggaaaaccctgcgctggctctgcacctagctccgccctcatcctcagccctcaccaacacgcctccaagcaaaggactttcggaatacttctccaccacgtgcagctgcagat

SEQ ID NO: 22982 - DNA, 35 bp, Homo sapiens
  chr16:88957822-88957857
  hypo
gagagtggctgtggaccgaacgccttcccacccca

SEQ ID NO: 22983 - DNA, 99 bp, Homo sapiens
  chr16:88957889-88957988
  hypo
tcctgggccctatccccgagccttgcccccacactggcacgtcgtcagtgctcaaaaatcacccgtggagtgagcgagcacattcggccaacggcaacc

SEQ ID NO: 22984 - DNA, 54 bp, Homo sapiens
  chr16:88958868-88958922
  hypo
ggtgagtggctgctgccgttcatcactgcaggagggaagcggacatgaggacac

SEQ ID NO: 22985 - DNA, 34 bp, Homo sapiens
  chr16:88958934-88958968
  hypo
gacaacacaacccagacggcggcgacagtgaggg

SEQ ID NO: 22986 - DNA, 37 bp, Homo sapiens
  chr16:88962812-88962849
  hypo
cgcgcggcaccgataacggcgtcgtattctggggctt

SEQ ID NO: 22987 - DNA, 31 bp, Homo sapiens
  chr16:88965556-88965587
  hypo
tcggccctcaagtctccgttcagactcagtc

SEQ ID NO: 22988 - DNA, 46 bp, Homo sapiens
  chr16:88965601-88965647
  hypo
ctcagaggccagtccccggggaggagcctcccggcagggctctgca

SEQ ID NO: 22989 - DNA, 43 bp, Homo sapiens
  chr16:88966386-88966429
  hypo
aagggtgatcccagcccggccacatcgccgtgtgacaaggaca

SEQ ID NO: 22990 - DNA, 156 bp, Homo sapiens
  chr16:88966449-88966605
  hypo
gcctctcactagaaaccgtggccagctccgcagagccaggacctgcacgctgggcccgccgtcccccaggacctgcaaaatcgtgagtgcggcgtcccgactctctgaggcagggccggccccgcgggtgcagggagtagccgttaggctgtttgg

SEQ ID NO: 22991 - DNA, 31 bp, Homo sapiens
  chr16:88966745-88966776
  hypo
aaatctgctgcctgaccgcacagccagtgct

SEQ ID NO: 22992 - DNA, 34 bp, Homo sapiens
  chr16:88966796-88966830
  hypo
tgatggccaaagccctcggcggagcaggccccca

SEQ ID NO: 22993 - DNA, 31 bp, Homo sapiens
  chr16:88976652-88976683
  hypo
caggctgcctccttcccggtgatgctgcagc

SEQ ID NO: 22994 - DNA, 97 bp, Homo sapiens
  chr16:88994358-88994455
  hypo
cctctgaagtgggagccgcagggagggcctcacggaggcctctgtccacaggcagcggctcccggcacccaccgctgctgaccgagcccctggcacc

SEQ ID NO: 22995 - DNA, 72 bp, Homo sapiens
  chr16:88997924-88997996
  hypo
gagaagggccgtgggccggccccgtggacgagccagaggtggagaagggccgtgggccggccccgtggatga

SEQ ID NO: 22996 - DNA, 31 bp, Homo sapiens
  chr16:88999616-88999647
  hypo
cctgggggctgttttgcgctcccccagtgca

SEQ ID NO: 22997 - DNA, 42 bp, Homo sapiens; identical to SEQ ID NO: 5761
  chr16:89007715-89007757
  hypo

SEQ ID NO: 22998 - DNA, 54 bp, Homo sapiens
  chr16:89010262-89010316
  hypo
atgtctgcagtctgtccgacaaggccagcgtcacctgtgcgggagacagaccac

SEQ ID NO: 22999 - DNA, 31 bp, Homo sapiens
  chr16:89016744-89016775
  hypo
tcccctggaccggcaccgccacagagggtca

SEQ ID NO: 23000 - DNA, 63 bp, Homo sapiens
  chr16:89016779-89016842
  hypo
gttggcacctgtcttccgggtcagttcacccgtcccctggaccggcaccggcacagagggtca

SEQ ID NO: 23001 - DNA, 63 bp, Homo sapiens
  chr16:89016846-89016909
  hypo
gttggcacctgtcttccggatctgttcacccctcccccggaccggcaccgccacagagggtca

SEQ ID NO: 23002 - DNA, 31 bp, Homo sapiens
  chr16:89017008-89017039
  hypo
cacccgtcccctggaccggcaccgccacaga

SEQ ID NO: 23003 - DNA, 108 bp, Homo sapiens
  chr16:89025781-89025889
  hypo
agaggtggagggaacacgcatgcacgcccagggctggaggcacgtgggtgttcagggcctgtgaggaggcccgggcaccaaggcagcacccagcgcttacagagcctg

SEQ ID NO: 23004 - DNA, 31 bp, Homo sapiens
  chr16:89025941-89025972
  hypo
acctgtaaaagccaggcgcagtagagaatgt

SEQ ID NO: 23005 - DNA, 31 bp, Homo sapiens
  chr16:89025978-89026009
  hypo
aataaatgtgatgctgcgattgcctgagagg

SEQ ID NO: 23006 - DNA, 31 bp, Homo sapiens
  chr16:89026021-89026052
  hypo
aggagagggaaggtcccggggaaaccctcct

SEQ ID NO: 23007 - DNA, 45 bp, Homo sapiens
  chr16:89026070-89026115
  hypo
cagcagctgggaaaggcgatggagagaaaacgggagcagggcaga

SEQ ID NO: 23008 - DNA, 31 bp, Homo sapiens
  chr16:89028918-89028949
  hypo
tgcctgtcgtgagtcccgaaggagaggccca

SEQ ID NO: 23009 - DNA, 52 bp, Homo sapiens
  chr16:89029033-89029085
  hypo
cgagtcccctggaccacgtttcggggggagacagccacgtagccggagccag

SEQ ID NO: 23010 - DNA, 46 bp, Homo sapiens
  chr16:89055409-89055455
  hypo
cacccactcagtgtctcgtgcatggcacacacgtgtcctgcgggcc

SEQ ID NO: 23011 - DNA, 31 bp, Homo sapiens
  chr16:89072627-89072658
  hypo
cctcccgggtgggccacgccttgaggtgctg

SEQ ID NO: 23012 - DNA, 31 bp, Homo sapiens
  chr16:89072796-89072827
  hypo
tggaccatttgcagggcgaccccaagggcag

SEQ ID NO: 23013 - DNA, 31 bp, Homo sapiens
  chr16:89100279-89100310
  hypo
gagggcacccagggagcgtgtgtgctgccat

SEQ ID NO: 23014 - DNA, 74 bp, Homo sapiens
  chr16:89120262-89120336
  hypo
cgggtgctggggggcccgtctccctgtgactcgtggacggtgcggtgcagggagaagggcgggcaggtgctgga

SEQ ID NO: 23015 - DNA, 42 bp, Homo sapiens
  chr16:89120364-89120406
  hypo
tccctgcccctccatgcgctgggtcctcgggccaggacaggt

SEQ ID NO: 23016 - DNA, 49 bp, Homo sapiens
  chr16:89120419-89120468
  hypo
ccagccccctcacacccgctcgcctgaaggcggccgaccctggccactg

SEQ ID NO: 23017 - DNA, 39 bp, Homo sapiens
  chr16:89120610-89120649
  hypo
ccctccgggacggaccgcgagactcggccctgagatgcc

SEQ ID NO: 23018 - DNA, 112 bp, Homo sapiens
  chr16:89120707-89120819
  hypo
ctgctccccagaacctcgtcgtcttcccggtgccctgcggcaggaacacagggctggagccgacccccagggcatggctgggagctgcgggagtgaacggggagttaacccc

SEQ ID NO: 23019 - DNA, 41 bp, Homo sapiens
  chr16:89120823-89120864
  hypo
gcatggctgggagctgcgggagtgaacggggagctgcctgt

SEQ ID NO: 23020 - DNA, 31 bp, Homo sapiens
  chr16:89162715-89162746
  hypo
gtgatggggagccccacggtagaaggggtcc

SEQ ID NO: 23021 - DNA, 31 bp, Homo sapiens
  chr16:89189484-89189515
  hypo
ctgctgacagcaggcccgggaacatttccag

SEQ ID NO: 23022 - DNA, 31 bp, Homo sapiens; identical to SEQ ID NO: 5762
  chr16:89189687-89189718
  hypo

SEQ ID NO: 23023 - DNA, 31 bp, Homo sapiens
  chr16:89198356-89198387
  hypo
gaggagcccaggctggcgggttggcagcccc

SEQ ID NO: 23024 - DNA, 31 bp, Homo sapiens
  chr16:89220538-89220569
  hypo
tggtggaggagatcccgcggaaccagatggg

SEQ ID NO: 23025 - DNA, 62 bp, Homo sapiens
  chr16:89220640-89220702
  hypo
ggtggggagcagcagacgtccccttcacaccgagaaccacgggggcccgtccaagacctggc

SEQ ID NO: 23026 - DNA, 31 bp, Homo sapiens
  chr16:89220719-89220750
  hypo
cccccaaatcaggtcacgtagaatcaagaac

SEQ ID NO: 23027 - DNA, 151 bp, Homo sapiens
  chr16:89220771-89220922
  hypo
gtggggtccccagcctcgggccagttgttgcagctcaaggagaccgtccctggtgtcacctctgcctggtcaccgccgacctcatctgtgcagcgcggtgcagccagcccctggccccacgtgctgaggcacctcccgccccacagtgccc

SEQ ID NO: 23028 - DNA, 42 bp, Homo sapiens
  chr16:89220992-89221034
  hypo
acaagcccctgtcccacgccgtctgcacgtgcctgtgcctca

SEQ ID NO: 23029 - DNA, 31 bp, Homo sapiens
  chr16:89225781-89225812
  hypo
ctctgagcaggaagcccgtaggtccccacag

SEQ ID NO: 23030 - DNA, 53 bp, Homo sapiens
  chr16:89254514-89254567
  hypo
tggaggccatagaggccgtcagcggagtggatgtgggacgcctggaagtggag

SEQ ID NO: 23031 - DNA, 306 bp, Homo sapiens
  chr16:89254607-89254913
  hypo
tcaccatcctggaaggcgaccccgatgggcagttcaccatccgcacggaccccaagaccaacgagggtgttctgtccattgtgaaggtgagcggcccccggctggcacacagatgccggcagacgcagatgccgacacacacagatgcccacacacagatgccggcacacacagatgcccacacacagatgccggcacacacacatgccggcacacacagatgcccacacacagatgccggcacacacacatgccggcacacacagatgcccacacacagatgccggcacacacagatgccggcac

SEQ ID NO: 23032 - DNA, 43 bp, Homo sapiens
  chr16:89347100-89347143
  hypo
cactcaacgggctcctcggtgatgacggcgctgaagggaccct

SEQ ID NO: 23033 - DNA, 31 bp, Homo sapiens
  chr16:89354779-89354810
  hypo
gacagagggcacagctcggccttgagggtgg

SEQ ID NO: 23034 - DNA, 62 bp, Homo sapiens
  chr16:89360244-89360306
  hypo
aaaggaccctaggaggcgtgtgtcagaggaacaggcagaggcaaaggcgttccttagaagtc

SEQ ID NO: 23035 - DNA, 42 bp, Homo sapiens
  chr16:89360319-89360361
  hypo
gcaggccaggagcccacgctgcgtccccgctctgaggggcag

SEQ ID NO: 23036 - DNA, 51 bp, Homo sapiens
  chr16:89409897-89409948
  hypo
tgtgtgagtgagtgagcgagcaaatgagacagagctcgaggtgggctggag

SEQ ID NO: 23037 - DNA, 31 bp, Homo sapiens
  chr16:89410312-89410343
  hypo
tggaaactacggatcacgggctgttttgggt

SEQ ID NO: 23038 - DNA, 31 bp, Homo sapiens
  chr16:89410367-89410398
  hypo
cacggccagctctgaccgactgaacccaggg

SEQ ID NO: 23039 - DNA, 31 bp, Homo sapiens
  chr16:89410650-89410681
  hypo
gtgctttactttcatacgttattttatttgg

SEQ ID NO: 23040 - DNA, 31 bp, Homo sapiens
  chr16:89437588-89437619
  hypo
ccagaaaaagatgcaacgactctcactacct

SEQ ID NO: 23041 - DNA, 23 bp, Homo sapiens
  chr16:89567124-89567147
  hypo
aaaacataaaacaggccgggcgc

SEQ ID NO: 23042 - DNA, 31 bp, Homo sapiens
  chr16:89576067-89576098
  hypo
gtgacagcaggagccccgtgtctgggcagcc

SEQ ID NO: 23043 - DNA, 31 bp, Homo sapiens
  chr16:89603136-89603167
  hypo
tcgtcctgtgagtctgcggccttcttctcca

SEQ ID NO: 23044 - DNA, 114 bp, Homo sapiens
  chr16:89649561-89649675
  hypo
tgctccttggcaccttcgaagaggagtgggcggtggggtcctgggccggcacctcgctcacaccctttctgccgcccgtggctacgtggacatgctgggcgtgagggtccgggg

SEQ ID NO: 23045 - DNA, 31 bp, Homo sapiens
  chr16:89656477-89656508
  hypo
ggattggggtgcaaagcgggaaccccagcct

SEQ ID NO: 23046 - DNA, 31 bp, Homo sapiens
  chr16:89688128-89688159
  hypo
cgtgtgtctgtgtgcacgtggaggtatctga

SEQ ID NO: 23047 - DNA, 49 bp, Homo sapiens
  chr16:89713530-89713579
  hypo
tgtgagccacccctcccgatgagctgcccacacacgctccttgtcccca

SEQ ID NO: 23048 - DNA, 66 bp, Homo sapiens
  chr16:89713594-89713660
  hypo
ggtaggggccacataccgatgtatggacgtccaggttctgcacctgctgctcgaacctgtccatca

SEQ ID NO: 23049 - DNA, 24 bp, Homo sapiens
  chr16:89720015-89720039
  hypo
gtgagacgccgtctcaaaaaaaaa

SEQ ID NO: 23050 - DNA, 66 bp, Homo sapiens; identical to SEQ ID NO: 5767
  chr16:89894506-89894572
  hypo

SEQ ID NO: 23051 - DNA, 63 bp, Homo sapiens
  chr16:89899999-89900062
  hypo
cttcgcctttgtgcctcggtttccttctccgtgaaatgggaggtgcagcgtggtgctaacgtc

SEQ ID NO: 23052 - DNA, 97 bp, Homo sapiens
  chr16:89900718-89900815
  hypo
ccccataagcatagcccgtgtgaatctgtgaacctgcctgtgctcacggttggccgtcgtagaagcctggataagcatagcccgtgtgaatctgtga

SEQ ID NO: 23053 - DNA, 273 bp, Homo sapiens
  chr16:89901202-89901475
  hypo
aatctgtgaacctgcccgcattcgcggttggccgtcgtagaaggccccataagcatagcccgtgtgaatctgtgaacctgcccgcactcgcagctggccgtcgtagaaggccccacaagcatagcccgtgtgaatctgtgaacctgcccgcactcgcggctggccgtcgtagaaggccccataagcatagcccgggtgaatctgtgaacctgcccgcactcgcggttggccgtcgtagaagcgtggataagcatagcccgtgtgaatctgtga

SEQ ID NO: 23054 - DNA, 56 bp, Homo sapiens
  chr16:89901551-89901607
  hypo
actcacggttggccgtcgtagaagcgtggataagcatagcccgtgtgaatctgtga

SEQ ID NO: 23055 - DNA, 141 bp, Homo sapiens
  chr16:89966752-89966893
  hypo
cagagaggagcctgggcggcaggtgggaccctcactccccacggtgtcctcgctccggctcagtctacttctcaggccctcccacgtcctctgtatcttctgcatgcggaaagccccccaggtggacgttttaagttatct

SEQ ID NO: 23056 - DNA, 31 bp, Homo sapiens
  chr16:89972204-89972235
  hypo
tactgctctccaagagcgatttccagcaggg

SEQ ID NO: 23057 - DNA, 31 bp, Homo sapiens
  chr16:89982537-89982568
  hypo
cagccaccggcataggcgaatctcagccaga

SEQ ID NO: 23058 - DNA, 31 bp, Homo sapiens
  chr16:89982576-89982607
  hypo
actgggacaccattcacgtgatgggccagat

SEQ ID NO: 23059 - DNA, 61 bp, Homo sapiens
  chr16:89985818-89985879
  hypo
gagcttggtggagaacgcgctggtggtggccaccatcgccaagaaccggaacctgcactca

SEQ ID NO: 23060 - DNA, 47 bp, Homo sapiens
  chr16:89985897-89985944
  hypo
tgctgcctggccttgtcggacctgctggtgagcgggagcaacgtgct

SEQ ID NO: 23061 - DNA, 31 bp, Homo sapiens
  chr16:90039697-90039728
  hypo
gagctaagggctttacgcggattatctaagt

SEQ ID NO: 23062 - DNA, 67 bp, Homo sapiens
  chr16:90044786-90044853
  hypo
gaggagggaaaactggcgtctctctcactttctctatatcgtcttgacagtacggttgcttttcttg

SEQ ID NO: 23063 - DNA, 31 bp, Homo sapiens
  chr16:90053465-90053496
  hypo
tgctggatggagctcccggatgtcatctggg

SEQ ID NO: 23064 - DNA, 31 bp, Homo sapiens
  chr16:90060755-90060786
  hypo
cttttcacccatgctccgcagctctttgctg

SEQ ID NO: 23065 - DNA, 46 bp, Homo sapiens
  chr16:90066610-90066656
  hypo
cccagctccttgatgacgaggtccggcacctcgtcagtgccaccta

SEQ ID NO: 23066 - DNA, 37 bp, Homo sapiens
  chr16:90066665-90066702
  hypo
cctggacctgctgacacggtgccgggagcatgtggag

SEQ ID NO: 23067 - DNA, 31 bp, Homo sapiens
  chr16:90072248-90072279
  hypo
tagccactaccaaacccgcctctggcttctg

SEQ ID NO: 23068 - DNA, 31 bp, Homo sapiens
  chr16:90072284-90072315
  hypo
ggcagcacaggaaaacgcggaggttggagca

SEQ ID NO: 23069 - DNA, 58 bp, Homo sapiens
  chr16:90072355-90072413
  hypo
cccttcaccccaaggccgccgtgggccactccattcctcagcacgttcctggcagtga

SEQ ID NO: 23070 - DNA, 53 bp, Homo sapiens
  chr16:90072421-90072474
  hypo
cgctgtcttcctgactcggggcccaggaacgagctggacgtaaggccactggg

SEQ ID NO: 23071 - DNA, 60 bp, Homo sapiens
  chr16:90072489-90072549
  hypo
ggctcccagaggcatccgggggccccgtgtgtcccccaggaaagccggctggtctccaag

SEQ ID NO: 23072 - DNA, 31 bp, Homo sapiens
  chr16:90072679-90072710
  hypo
tgcccagatctgccatcgtgttcggacccca

SEQ ID NO: 23073 - DNA, 31 bp, Homo sapiens
  chr16:90104654-90104685
  hypo
ctggtcctcacactggcgagttttatgggct

SEQ ID NO: 23074 - DNA, 31 bp, Homo sapiens
  chr16:90109400-90109431
  hypo
gacagcctctccctgtcgtgctacctgagcc

SEQ ID NO: 23075 - DNA, 31 bp, Homo sapiens
  chr17:512962-512993
  hypo
ataattccactagtgtcgtaagaaaatcatc

SEQ ID NO: 23076 - DNA, 31 bp, Homo sapiens
  chr17:513000-513031
  hypo
tttgggtaagagacagcgaagaggagagaag

SEQ ID NO: 23077 - DNA, 79 bp, Homo sapiens; identical to SEQ ID NO: 5777
  chr17:635475-635554
  hypo

SEQ ID NO: 23078 - DNA, 138 bp, Homo sapiens; identical to SEQ ID NO: 5778
  chr17:635797-635935
  hypo

SEQ ID NO: 23079 - DNA, 47 bp, Homo sapiens; identical to SEQ ID NO: 5779
  chr17:635959-636006
  hypo

SEQ ID NO: 23080 - DNA, 138 bp, Homo sapiens; identical to SEQ ID NO: 5780
  chr17:636120-636258
  hypo

SEQ ID NO: 23081 - DNA, 37 bp, Homo sapiens
  chr17:684165-684202
  hypo
ttttttttttttgagacggagttttgctttcgtcatc

SEQ ID NO: 23082 - DNA, 34 bp, Homo sapiens
  chr17:744616-744650
  hypo
acggtgcatctcacgccggcgagcaggtcccccc

SEQ ID NO: 23083 - DNA, 31 bp, Homo sapiens
  chr17:761089-761120
  hypo
ttttgtagttttctttcggtccttccaatta

SEQ ID NO: 23084 - DNA, 35 bp, Homo sapiens
  chr17:797965-798000
  hypo
ctggtgtccgcagggacgggcggagacatgacgga

SEQ ID NO: 23085 - DNA, 31 bp, Homo sapiens
  chr17:817715-817746
  hypo
aagattctttttaaggcgagaagtatgcaat

SEQ ID NO: 23086 - DNA, 50 bp, Homo sapiens
  chr17:817762-817812
  hypo
ggtcaaaggcaaacaccgaggtctgtaattggtagcgcaagcaaggttcc

SEQ ID NO: 23087 - DNA, 31 bp, Homo sapiens
  chr17:830915-830946
  hypo
agacagcgatggtttgcgggaggagcagaag

SEQ ID NO: 23088 - DNA, 85 bp, Homo sapiens; identical to SEQ ID NO: 5781
  chr17:883201-883286
  hypo

SEQ ID NO: 23089 - DNA, 31 bp, Homo sapiens
  chr17:926392-926423
  hypo
gcctctgccggccccacgtccactccagcgc

SEQ ID NO: 23090 - DNA, 31 bp, Homo sapiens
  chr17:930920-930951
  hypo
aggggcctccagctctcgggggaggcagcac

SEQ ID NO: 23091 - DNA, 67 bp, Homo sapiens
  chr17:952744-952811
  hypo
acccagagtccccacccgaagccacagactcccaacgcagctgagtaaggtccggccaccctaacaa

SEQ ID NO: 23092 - DNA, 66 bp, Homo sapiens
  chr17:1043598-1043664
  hypo
tgtggatctgggaggccggcaaccctgaaccagggaactggccagcggaagcgaggctgccacttc

SEQ ID NO: 23093 - DNA, 31 bp, Homo sapiens; identical to SEQ ID NO: 5785
  chr17:1132221-1132252
  hypo

SEQ ID NO: 23094 - DNA, 31 bp, Homo sapiens; identical to SEQ ID NO: 5786
  chr17:1132264-1132295
  hypo

SEQ ID NO: 23095 - DNA, 17 bp, Homo sapiens
  chr17:1331214-1331231
  hypo
ccgcgcccagcctatat

SEQ ID NO: 23096 - DNA, 31 bp, Homo sapiens
  chr17:1386689-1386720
  hypo
agtcatgggtgtgagtcggggtagggactga

SEQ ID NO: 23097 - DNA, 31 bp, Homo sapiens
  chr17:1386729-1386760
  hypo
acatggagctgagttgcgacattcatctctg

SEQ ID NO: 23098 - DNA, 37 bp, Homo sapiens
  chr17:1386788-1386825
  hypo
tcctcacagatgtggcgcgggacgccaggatcatttc

SEQ ID NO: 23099 - DNA, 172 bp, Homo sapiens
  chr17:1412389-1412561
  hypo
cagacccaggctcactcgtgggggttagtgggggttagcgtggggcagagggcggggaacggtctgccagacccaggctcactcgtggtccaggatgtttgggatgtctcgcccctcacaattctgcatctccaggatccggtcaaagtgctccagccgctggtaattgttg

SEQ ID NO: 23100 - DNA, 66 bp, Homo sapiens
  chr17:1451500-1451566
  hypo
tttccctggcctaatccggaacacgcaggtgggacccacagctctgctgcccgcccctgcctggcc

SEQ ID NO: 23101 - DNA, 31 bp, Homo sapiens
  chr17:1454143-1454174
  hypo
aacacttgaagcggtgcggagaactgaaagg

SEQ ID NO: 23102 - DNA, 49 bp, Homo sapiens
  chr17:1462628-1462677
  hypo
aacctattggagaagccgtggccggcaaagtctccgccagggccagaac

SEQ ID NO: 23103 - DNA, 31 bp, Homo sapiens
  chr17:1462701-1462732
  hypo
gcacttctccaggtgccgtgcatgtgaaatg

SEQ ID NO: 23104 - DNA, 31 bp, Homo sapiens
  chr17:1462752-1462783
  hypo
gttcaaagctgtgaggcgggagagctaagac

SEQ ID NO: 23105 - DNA, 27 bp, Homo sapiens
  chr17:1473751-1473778
  hypo
tcctgggcactgaaaacgatgctacca

SEQ ID NO: 23106 - DNA, 31 bp, Homo sapiens
  chr17:1494523-1494554
  hypo
ctccctgcccgtcgcccggctgcggtctcag

SEQ ID NO: 23107 - DNA, 19 bp, Homo sapiens
  chr17:1520966-1520985
  hypo
gagccgccacacccagccg

SEQ ID NO: 23108 - DNA, 31 bp, Homo sapiens
  chr17:1544502-1544533
  hypo
ctgaccgcctgagctccgctgccagccagat

SEQ ID NO: 23109 - DNA, 48 bp, Homo sapiens
  chr17:1544545-1544593
  hypo
cagattctcataggagcgccagtcctattgtgaactgcgcacgggagg

SEQ ID NO: 23110 - DNA, 28 bp, Homo sapiens
  chr17:1545292-1545320
  hypo
ggcgtgagccaccgcgcccagccaggga

SEQ ID NO: 23111 - DNA, 24 bp, Homo sapiens
  chr17:1545975-1545999
  hypo
acctggggcaacaaagcgttttta

SEQ ID NO: 23112 - DNA, 60 bp, Homo sapiens
  chr17:1546366-1546426
  hypo
ctcccggcgccccgccgcggccacctgtctccgctccgccccgcccgctcacaggtctcc

SEQ ID NO: 23113 - DNA, 84 bp, Homo sapiens; identical to SEQ ID NO: 5787
  chr17:1613423-1613507
  hypo

SEQ ID NO: 23114 - DNA, 31 bp, Homo sapiens; identical to SEQ ID NO: 5788
  chr17:1613564-1613595
  hypo

SEQ ID NO: 23115 - DNA, 95 bp, Homo sapiens; identical to SEQ ID NO: 5789
  chr17:1613634-1613729
  hypo

SEQ ID NO: 23116 - DNA, 18 bp, Homo sapiens
  chr17:1683761-1683779
  hypo
cagcgtctcaaagtactg

SEQ ID NO: 23117 - DNA, 31 bp, Homo sapiens
  chr17:1694899-1694930
  hypo
aaccttgctggtgggcgcgtcagtggaactt

SEQ ID NO: 23118 - DNA, 31 bp, Homo sapiens
  chr17:1756299-1756330
  hypo
tcatcacaatgatcatcggggaaagcatttt

SEQ ID NO: 23119 - DNA, 31 bp, Homo sapiens
  chr17:1775555-1775586
  hypo
cccctagcaaattcaccgagtgccatggaat

SEQ ID NO: 23120 - DNA, 85 bp, Homo sapiens
  chr17:1775687-1775772
  hypo
atcctttgcactaaaacggggtttcccttttgatcttcaggactcgggcagccgcaagtagctcctccagcgccagcagccagcc

SEQ ID NO: 23121 - DNA, 73 bp, Homo sapiens
  chr17:1775780-1775853
  hypo
agcagcaggccccagccgcagaatggaagctcgggaatgggtgagatgcctcacggggcgtgcgctgaccagg

SEQ ID NO: 23122 - DNA, 18 bp, Homo sapiens
  chr17:1809505-1809523
  hypo
aaagggattggctggccg

SEQ ID NO: 23123 - DNA, 31 bp, Homo sapiens
  chr17:1849980-1850011
  hypo
tgaatgtgtgtgtgcacggggtctgtgtgtg

SEQ ID NO: 23124 - DNA, 31 bp, Homo sapiens
  chr17:1890004-1890035
  hypo
tctggttttaaactaacgagtttgttgtaat

SEQ ID NO: 23125 - DNA, 31 bp, Homo sapiens
  chr17:1918318-1918349
  hypo
agggcactgtggaatccggccgctgtgtaag

SEQ ID NO: 23126 - DNA, 31 bp, Homo sapiens; identical to SEQ ID NO: 5799
  chr17:2014997-2015028
  hypo

SEQ ID NO: 23127 - DNA, 35 bp, Homo sapiens
  chr17:2146559-2146594
  hypo
acactttctagtccaccgcccgtggagcagagttt

SEQ ID NO: 23128 - DNA, 31 bp, Homo sapiens
  chr17:2146601-2146632
  hypo
tggaaccaagcctttccgcttctcaaaaaag

SEQ ID NO: 23129 - DNA, 51 bp, Homo sapiens
  chr17:2207916-2207967
  hypo
ttgggacctgtaatcccggcgactcggaacgctgagacgggcggatcgctt

SEQ ID NO: 23130 - DNA, 37 bp, Homo sapiens
  chr17:2208026-2208063
  hypo
agtctccaacagagcgagactccgcctcaaaaaaaaa

SEQ ID NO: 23131 - DNA, 15 bp, Homo sapiens
  chr17:2220982-2220997
  hypo
cggagactccatctc

SEQ ID NO: 23132 - DNA, 31 bp, Homo sapiens
  chr17:2221028-2221059
  hypo
tatttaagaggtaaatcgataagatttggtg

SEQ ID NO: 23133 - DNA, 51 bp, Homo sapiens; identical to SEQ ID NO: 5800
  chr17:2302238-2302289
  hypo

SEQ ID NO: 23134 - DNA, 22 bp, Homo sapiens
  chr17:2495604-2495626
  hypo
tcagaaccccaaatctcgcttt

SEQ ID NO: 23135 - DNA, 33 bp, Homo sapiens
  chr17:2529848-2529881
  hypo
cccccccccccccccccgaggcggagtcttgtt

SEQ ID NO: 23136 - DNA, 31 bp, Homo sapiens
  chr17:2624047-2624078
  hypo
cgaggtgtggtggggccgagtgcccaatgca

SEQ ID NO: 23137 - DNA, 302 bp, Homo sapiens; identical to SEQ ID NO: 5802
  chr17:2756746-2757048
  hypo

SEQ ID NO: 23138 - DNA, 31 bp, Homo sapiens
  chr17:3561589-3561620
  hypo
gagcccgggagcccagcgggagcggggcggt

SEQ ID NO: 23139 - DNA, 43 bp, Homo sapiens
  chr17:3585001-3585044
  hypo
ctcctcccactgctgccgaggccgaatccggttctgtagagca

SEQ ID NO: 23140 - DNA, 31 bp, Homo sapiens
  chr17:3653521-3653552
  hypo
cctgtgcccacaaccacggtgctggctccct

SEQ ID NO: 23141 - DNA, 83 bp, Homo sapiens
  chr17:3653629-3653712
  hypo
caggacagaaccctaccggaacacaaccgcctggcccagagtgcccacggtgatgtcggcaaggccgtcgccactaatatcaa

SEQ ID NO: 23142 - DNA, 49 bp, Homo sapiens
  chr17:3660205-3660254
  hypo
aagatgggacagaggccgggctggagcataggctcgggcctcctgcggt

SEQ ID NO: 23143 - DNA, 68 bp, Homo sapiens
  chr17:3664935-3665003
  hypo
ctggcccacccctcaccgggtgtaggagtcagtgttggcatcaaggccgaggccgacacctgcaggag

SEQ ID NO: 23144 - DNA, 31 bp, Homo sapiens
  chr17:3755003-3755034
  hypo
ttcctgagaccacacacgctctgctgtgatc

SEQ ID NO: 23145 - DNA, 31 bp, Homo sapiens
  chr17:3755048-3755079
  hypo
tttcttttttctccaccgctcctgccctacg

SEQ ID NO: 23146 - DNA, 28 bp, Homo sapiens
  chr17:3778890-3778918
  hypo
ctggatactcacacgtgtccaaatgcct

SEQ ID NO: 23147 - DNA, 39 bp, Homo sapiens; identical to SEQ ID NO: 5806
  chr17:3778975-3779014
  hypo

SEQ ID NO: 23148 - DNA, 31 bp, Homo sapiens; identical to SEQ ID NO: 5807
  chr17:3779015-3779046
  hypo

SEQ ID NO: 23149 - DNA, 31 bp, Homo sapiens
  chr17:3792165-3792196
  hypo
ggagggaatatgtgtgcgcaggctgtggacc

SEQ ID NO: 23150 - DNA, 41 bp, Homo sapiens
  chr17:3793475-3793516
  hypo
tgccctccgcagctcccgcccccacccgggatgactcagtc

SEQ ID NO: 23151 - DNA, 41 bp, Homo sapiens; identical to SEQ ID NO: 5808
  chr17:3867425-3867466
  hypo

SEQ ID NO: 23152 - DNA, 29 bp, Homo sapiens
  chr17:3921576-3921605
  hypo
ttttttttagagatgacgtgttggagcta

SEQ ID NO: 23153 - DNA, 28 bp, Homo sapiens
  chr17:3921664-3921692
  hypo
tccctagtagctgcgattacaggctcat

SEQ ID NO: 23154 - DNA, 31 bp, Homo sapiens
  chr17:3980581-3980612
  hypo
ctgtttacaatgagcccgtgcattaggtgta

SEQ ID NO: 23155 - DNA, 31 bp, Homo sapiens
  chr17:3980646-3980677
  hypo
ccaatataagtgttttcgtcacagctgctgg

SEQ ID NO: 23156 - DNA, 50 bp, Homo sapiens
  chr17:3980690-3980740
  hypo
ggaactacattttccacgtataatttgtcagcacccgttgggtttcatat

SEQ ID NO: 23157 - DNA, 31 bp, Homo sapiens
  chr17:3980764-3980795
  hypo
tgaatctaattattctcggtaatcagcaatg

SEQ ID NO: 23158 - DNA, 31 bp, Homo sapiens
  chr17:3982361-3982392
  hypo
ggtatatacaattatgcgaaattctcttggg

SEQ ID NO: 23159 - DNA, 25 bp, Homo sapiens
  chr17:4039621-4039646
  hypo
agtgagactccgtctcaaaaaaaaa

SEQ ID NO: 23160 - DNA, 31 bp, Homo sapiens
  chr17:4048958-4048989
  hypo
gcaacatgctccccaccgcccacacagtcta

SEQ ID NO: 23161 - DNA, 37 bp, Homo sapiens
  chr17:4048994-4049031
  hypo
gaagcagttatgtccacgtattcgttcattcagtatt

SEQ ID NO: 23162 - DNA, 52 bp, Homo sapiens
  chr17:4049040-4049092
  hypo
attgagatgtaattcacgtgatgtaaagtccttttaacgtatacaattcagt

SEQ ID NO: 23163 - DNA, 31 bp, Homo sapiens
  chr17:4215694-4215725
  hypo
aacaaaaaacaggaggcggcacaaggtaaac

SEQ ID NO: 23164 - DNA, 37 bp, Homo sapiens
  chr17:4273439-4273476
  hypo
agcttactggctttagcgttcacgccacacagctctt

SEQ ID NO: 23165 - DNA, 31 bp, Homo sapiens
  chr17:4289159-4289190
  hypo
acaggtgtgagacaccgcgcctggccattca

SEQ ID NO: 23166 - DNA, 31 bp, Homo sapiens
  chr17:4350841-4350872
  hypo
ggagccagcccagtgccggggagctggcgtg

SEQ ID NO: 23167 - DNA, 31 bp, Homo sapiens
  chr17:4446256-4446287
  hypo
tcctgtgtctcatgcacgcagccctcagcag

SEQ ID NO: 23168 - DNA, 50 bp, Homo sapiens
  chr17:4446288-4446338
  hypo
gttgcccttcaagacccggagcaggtagagagaggcgttgaagtggtaga

SEQ ID NO: 23169 - DNA, 45 bp, Homo sapiens
  chr17:4461985-4462030
  hypo
aggtctgaggtgggagcgagggctgcgctgcgaagcacagctgcc

SEQ ID NO: 23170 - DNA, 41 bp, Homo sapiens
  chr17:4462032-4462073
  hypo
ttgtgggttggtggctcgggccccagcgcccaggggtgtcc

SEQ ID NO: 23171 - DNA, 79 bp, Homo sapiens
  chr17:4500287-4500366
  hypo
cctccggctgctgggacgccccagctaaaagcttgaccaagcgtcgcccctgtccttgttctcccgcctgggcaggagc

SEQ ID NO: 23172 - DNA, 31 bp, Homo sapiens
  chr17:4500527-4500558
  hypo
tacactccttcttccccgatgcctttgacta

SEQ ID NO: 23173 - DNA, 31 bp, Homo sapiens; identical to SEQ ID NO: 5809
  chr17:4642753-4642784
  hypo

SEQ ID NO: 23174 - DNA, 43 bp, Homo sapiens; identical to SEQ ID NO: 5810
  chr17:4647511-4647554
  hypo

SEQ ID NO: 23175 - DNA, 24 bp, Homo sapiens
  chr17:4758211-4758235
  hypo
agagtccaggctgggcgcggtggc

SEQ ID NO: 23176 - DNA, 31 bp, Homo sapiens
  chr17:4880336-4880367
  hypo
agggctgggtactcaccgtccagtgacagcc

SEQ ID NO: 23177 - DNA, 80 bp, Homo sapiens; identical to SEQ ID NO: 5812
  chr17:4890400-4890480
  hypo

SEQ ID NO: 23178 - DNA, 37 bp, Homo sapiens; identical to SEQ ID NO: 5813
  chr17:4890483-4890520
  hypo

SEQ ID NO: 23179 - DNA, 80 bp, Homo sapiens; identical to SEQ ID NO: 5814
  chr17:4890522-4890602
  hypo

SEQ ID NO: 23180 - DNA, 31 bp, Homo sapiens; identical to SEQ ID NO: 5815
  chr17:4900808-4900839
  hypo

SEQ ID NO: 23181 - DNA, 31 bp, Homo sapiens; identical to SEQ ID NO: 5816
  chr17:4901560-4901591
  hypo

SEQ ID NO: 23182 - DNA, 35 bp, Homo sapiens; identical to SEQ ID NO: 5817
  chr17:4901644-4901679
  hypo

SEQ ID NO: 23183 - DNA, 31 bp, Homo sapiens
  chr17:4950114-4950145
  hypo
tgtagattggccaggcgcggtggctcacacc

SEQ ID NO: 23184 - DNA, 31 bp, Homo sapiens
  chr17:5033401-5033432
  hypo
ggcatatggggacaaccggattctctgtcca

SEQ ID NO: 23185 - DNA, 31 bp, Homo sapiens
  chr17:5033760-5033791
  hypo
gaggcctcttccagtgcgccctggtcaaagg

SEQ ID NO: 23186 - DNA, 31 bp, Homo sapiens
  chr17:5080633-5080664
  hypo
agacactaggagggttcggtgaaatacttag

SEQ ID NO: 23187 - DNA, 31 bp, Homo sapiens
  chr17:5131038-5131069
  hypo
tcccccattcccatggcgctttcttcacaat

SEQ ID NO: 23188 - DNA, 31 bp, Homo sapiens
  chr17:5392346-5392377
  hypo
tagcccagtgcagattcgcaaatgcacagag

SEQ ID NO: 23189 - DNA, 49 bp, Homo sapiens
  chr17:5404270-5404319
  hypo
agccatgggcaggatcgcgggtaggtgggtcagccgggtctgggtcaga

SEQ ID NO: 23190 - DNA, 31 bp, Homo sapiens
  chr17:6011472-6011503
  hypo
ggccctgcgtcatcttcgcttgcatgggaca

SEQ ID NO: 23191 - DNA, 34 bp, Homo sapiens
  chr17:6420001-6420035
  hypo
aaaacctactcagaaacgtcgcttgaaatttcag

SEQ ID NO: 23192 - DNA, 31 bp, Homo sapiens
  chr17:6456917-6456948
  hypo
ctctgccttttctctccgtgggtgatctact

SEQ ID NO: 23193 - DNA, 31 bp, Homo sapiens
  chr17:6456990-6457021
  hypo
cccctcattcacaggccgggtgccacagcct

SEQ ID NO: 23194 - DNA, 44 bp, Homo sapiens
  chr17:6457048-6457092
  hypo
ttcctgtgtcaccccccgccgccccaccccgccagagtgaaggc

SEQ ID NO: 23195 - DNA, 81 bp, Homo sapiens; identical to SEQ ID NO: 5823
  chr17:6459568-6459649
  hypo

SEQ ID NO: 23196 - DNA, 21 bp, Homo sapiens
  chr17:6811262-6811283
  hypo
agccaccgcccctggcctcaa

SEQ ID NO: 23197 - DNA, 19 bp, Homo sapiens
  chr17:6943486-6943505
  hypo
tcttttttctttttcccga

SEQ ID NO: 23198 - DNA, 31 bp, Homo sapiens
  chr17:7044663-7044694
  hypo
tgcacgtgactctcgtcgagcttgctgtctc

SEQ ID NO: 23199 - DNA, 40 bp, Homo sapiens
  chr17:7048538-7048578
  hypo
ggacaagaactccagtcgttagatctgtgaaaggaaaata

SEQ ID NO: 23200 - DNA, 31 bp, Homo sapiens
  chr17:7112808-7112839
  hypo
gtaaaaagagaaggcacggcaatcccagcac

SEQ ID NO: 23201 - DNA, 33 bp, Homo sapiens
  chr17:7136113-7136146
  hypo
aaagcagaggttgggccgggcgcggtggctcac

SEQ ID NO: 23202 - DNA, 15 bp, Homo sapiens
  chr17:7146549-7146564
  hypo
cgaagcccggtttct

SEQ ID NO: 23203 - DNA, 31 bp, Homo sapiens
  chr17:7192923-7192954
  hypo
ggggcggtttcgtgggcgctggggctcaggc

SEQ ID NO: 23204 - DNA, 57 bp, Homo sapiens; identical to SEQ ID NO: 5830
  chr17:7199819-7199876
  hypo

SEQ ID NO: 23205 - DNA, 31 bp, Homo sapiens
  chr17:7227438-7227469
  hypo
caatggtggcctgggccgcctggccatagag

SEQ ID NO: 23206 - DNA, 58 bp, Homo sapiens; identical to SEQ ID NO: 5831
  chr17:7254510-7254568
  hypo

SEQ ID NO: 23207 - DNA, 64 bp, Homo sapiens; identical to SEQ ID NO: 5832
  chr17:7254941-7255005
  hypo

SEQ ID NO: 23208 - DNA, 122 bp, Homo sapiens; identical to SEQ ID NO: 5833
  chr17:7255020-7255142
  hypo

SEQ ID NO: 23209 - DNA, 396 bp, Homo sapiens; identical to SEQ ID NO: 5834
  chr17:7255306-7255702
  hypo

SEQ ID NO: 23210 - DNA, 123 bp, Homo sapiens; identical to SEQ ID NO: 5835
  chr17:7255719-7255842
  hypo

SEQ ID NO: 23211 - DNA, 31 bp, Homo sapiens
  chr17:7285129-7285160
  hypo
acctttgtgtcttagccgtgtggggcagtgt

SEQ ID NO: 23212 - DNA, 31 bp, Homo sapiens
  chr17:7285192-7285223
  hypo
tcccatggatgtgacacgtatgtacaaggaa

SEQ ID NO: 23213 - DNA, 62 bp, Homo sapiens
  chr17:7285238-7285300
  hypo
cacagatgagcctgggcgttttgtggccgcatgctgaaatgtctcagcgttaagacgacata

SEQ ID NO: 23214 - DNA, 52 bp, Homo sapiens
  chr17:7292300-7292352
  hypo
cttccacctgagtagccggtccagagctgactgctggcgcatcctggagcat

SEQ ID NO: 23215 - DNA, 31 bp, Homo sapiens; identical to SEQ ID NO: 5839
  chr17:7307051-7307082
  hypo

SEQ ID NO: 23216 - DNA, 44 bp, Homo sapiens
  chr17:7318436-7318480
  hypo
agctggtggaccaggacgtgcagcctgcccggtatggggtggga

SEQ ID NO: 23217 - DNA, 34 bp, Homo sapiens
  chr17:7318915-7318949
  hypo
actacgacatgctcatcggcgtcaaccagggaga

SEQ ID NO: 23218 - DNA, 36 bp, Homo sapiens
  chr17:7320501-7320537
  hypo
ctcgtccccccgctggcgccccgggcacacgccggc

SEQ ID NO: 23219 - DNA, 31 bp, Homo sapiens
  chr17:7329116-7329147
  hypo
tcaacattggcatcaacgtggcaactatggt

SEQ ID NO: 23220 - DNA, 152 bp, Homo sapiens
  chr17:7368964-7369116
  hypo
cccttgttcctatgaccgctgagtgccagcctccagccgctcccccgccagcctggatcactcacctgcgctcccccgtgtgccacacttcatgcttcgtgcggtactccgccagagcaaacactttctcacaatagcggcaggggtacttc

SEQ ID NO: 23221 - DNA, 31 bp, Homo sapiens
  chr17:7460246-7460277
  hypo
cgcagtaagagagtggcgaagggtttgccag

SEQ ID NO: 23222 - DNA, 31 bp, Homo sapiens
  chr17:7494034-7494065
  hypo
tctgtgatgcgcatgccggagaaaaagcctg

SEQ ID NO: 23223 - DNA, 38 bp, Homo sapiens
  chr17:7494078-7494116
  hypo
acaccaccaagaaggccggaccccgggctccagaggct

SEQ ID NO: 23224 - DNA, 42 bp, Homo sapiens
  chr17:7536910-7536952
  hypo
aaacatggagactggccgggcgtggtggctcacgcctgtaat

SEQ ID NO: 23225 - DNA, 17 bp, Homo sapiens
  chr17:7548679-7548696
  hypo
tccgtataaaaaacaaa

SEQ ID NO: 23226 - DNA, 38 bp, Homo sapiens
  chr17:7662607-7662645
  hypo
ttcctccaggactcagcgtcctgcgtttccattaaacc

SEQ ID NO: 23227 - DNA, 61 bp, Homo sapiens
  chr17:7662753-7662814
  hypo
gatgctgtacatgattcggctggaccgcatgatggaggatgccctgcgcctgaatgtgaag

SEQ ID NO: 23228 - DNA, 31 bp, Homo sapiens
  chr17:7695958-7695989
  hypo
ccctgctcttccctagcgcccccttctataa

SEQ ID NO: 23229 - DNA, 31 bp, Homo sapiens
  chr17:7699939-7699970
  hypo
ttacctcttcaaccttcgagacatctccaag

SEQ ID NO: 23230 - DNA, 31 bp, Homo sapiens
  chr17:7710675-7710706
  hypo
caggcctgggggagtgcggatgcacagaccc

SEQ ID NO: 23231 - DNA, 31 bp, Homo sapiens
  chr17:7710740-7710771
  hypo
ttggtgggttggtgggcgactcccacagcct

SEQ ID NO: 23232 - DNA, 72 bp, Homo sapiens
  chr17:7710780-7710852
  hypo
cccacagctgtatgggcggctatatcgggtggtggagcccaagcgaatccgaatgaacgctgccttggctca

SEQ ID NO: 23233 - DNA, 31 bp, Homo sapiens
  chr17:7769320-7769351
  hypo
tttaatgggagactcacggaagtttgtgatt

SEQ ID NO: 23234 - DNA, 43 bp, Homo sapiens
  chr17:7797153-7797196
  hypo
ccgagtgcctgatggacgcaagaagcttcggggaaagaaaatg

SEQ ID NO: 23235 - DNA, 31 bp, Homo sapiens
  chr17:7798327-7798358
  hypo
cacatggagtactgccgcgtatgcaaggacg

SEQ ID NO: 23236 - DNA, 89 bp, Homo sapiens
  chr17:7798624-7798713
  hypo
tttcctcctccttgtacgtgtccatcccaaagtgccccgtgctgaagggtcgagtgcagaagatcctacattggcggtggggggagcca

SEQ ID NO: 23237 - DNA, 55 bp, Homo sapiens
  chr17:7798754-7798809
  hypo
agatgtcccacccccccgtcctcttcaaggcagatcagagcgagagttctttgtc

SEQ ID NO: 23238 - DNA, 31 bp, Homo sapiens
  chr17:7800249-7800280
  hypo
tacaggcatgagccaccgtgcctgggccaat

SEQ ID NO: 23239 - DNA, 42 bp, Homo sapiens
  chr17:7800308-7800350
  hypo
gtcccattcctcctgccggcctcttcccggttccttgttgtc

SEQ ID NO: 23240 - DNA, 31 bp, Homo sapiens
  chr17:7809784-7809815
  hypo
gtcctcagtcatcctcgcgcctccctcactg

SEQ ID NO: 23241 - DNA, 31 bp, Homo sapiens
  chr17:7810098-7810129
  hypo
ttgcgctggtgtgagacggaggagactggag

SEQ ID NO: 23242 - DNA, 50 bp, Homo sapiens
  chr17:7811071-7811121
  hypo
gtggagtctggggaaccgaatgcttgggtcctgggcgggtagctgtttga

SEQ ID NO: 23243 - DNA, 31 bp, Homo sapiens
  chr17:7813719-7813750
  hypo
ttctttctctgtggcccgggccccagttctg

SEQ ID NO: 23244 - DNA, 42 bp, Homo sapiens
  chr17:7813757-7813799
  hypo
tggaggagttgctgagcgacatgaaggcggacgtgacccgcc

SEQ ID NO: 23245 - DNA, 19 bp, Homo sapiens
  chr17:7856926-7856945
  hypo
acctcgtgctttgcagtcc

SEQ ID NO: 23246 - DNA, 31 bp, Homo sapiens
  chr17:7951706-7951737
  hypo
cccctgggcacctatccggatgagcacttca

SEQ ID NO: 23247 - DNA, 31 bp, Homo sapiens
  chr17:7951911-7951942
  hypo
atccctttgaccacatcgctctaggataact

SEQ ID NO: 23248 - DNA, 31 bp, Homo sapiens
  chr17:8012301-8012332
  hypo
caagcccctctctggacggcagctacctgcc

SEQ ID NO: 23249 - DNA, 40 bp, Homo sapiens
  chr17:8012397-8012437
  hypo
acctgaaatccccaggcgccatgagcgcagggaccacaat

SEQ ID NO: 23250 - DNA, 23 bp, Homo sapiens
  chr17:8104144-8104167
  hypo
aaaccttgcctttggccgggtgc

SEQ ID NO: 23251 - DNA, 3 bp, Homo sapiens
  chr17:8104406-8104409
  hypo
tcc

SEQ ID NO: 23252 - DNA, 31 bp, Homo sapiens
  chr17:8104417-8104448
  hypo
caacagagcaagattccgtcttgagaaaaag

SEQ ID NO: 23253 - DNA, 49 bp, Homo sapiens
  chr17:8104452-8104501
  hypo
aaccttgcctttatctcgtttgaattcttgccctcgagaaaacagagga

SEQ ID NO: 23254 - DNA, 89 bp, Homo sapiens
  chr17:8104511-8104600
  hypo
tgcagagttgcaactccggagtttcccggatagctgcaggcttacccgcaggtaacagtagaagtaggagtcagcgttaaggctgtggg

SEQ ID NO: 23255 - DNA, 31 bp, Homo sapiens
  chr17:8104608-8104639
  hypo
tgtccttcattattgccggtgggagtgtaaa

SEQ ID NO: 23256 - DNA, 41 bp, Homo sapiens
  chr17:8104666-8104707
  hypo
ggtgatatctatagaccgtttacctgcgtgtacccagcatt

SEQ ID NO: 23257 - DNA, 31 bp, Homo sapiens
  chr17:8138839-8138870
  hypo
ggctgaggcttctcaccgggtcgcctgagat

SEQ ID NO: 23258 - DNA, 45 bp, Homo sapiens
  chr17:8325970-8326015
  hypo
agtgaagaagtcccgtcgcctaattttcaacggaaaatgttttcc

SEQ ID NO: 23259 - DNA, 31 bp, Homo sapiens
  chr17:8384792-8384823
  hypo
gtgcctggagctacagcgaccttgctcctgt

SEQ ID NO: 23260 - DNA, 67 bp, Homo sapiens
  chr17:8409684-8409751
  hypo
tgagctcatcaatctgcgcctgcagctctgcgatctggtcctgcaggtcggtcgtctccccgtcgag

SEQ ID NO: 23261 - DNA, 51 bp, Homo sapiens
  chr17:8438421-8438472
  hypo
ggtggcctaagtcatacgtgtacgtctttgtggctccgggcctagaatgtt

SEQ ID NO: 23262 - DNA, 50 bp, Homo sapiens
  chr17:8438530-8438580
  hypo
ccaagtattgttaaaacggataaattccgatataacggcagccctgctct

SEQ ID NO: 23263 - DNA, 31 bp, Homo sapiens
  chr17:8471491-8471522
  hypo
tcaagtggcacgcagccgaacttgggttcag

SEQ ID NO: 23264 - DNA, 49 bp, Homo sapiens
  chr17:8700776-8700825
  hypo
cgagtacttgattttccgctctcggggcagcctccgctgtatggacagg

SEQ ID NO: 23265 - DNA, 31 bp, Homo sapiens; identical to SEQ ID NO: 5851
  chr17:8759639-8759670
  hypo

SEQ ID NO: 23266 - DNA, 39 bp, Homo sapiens
  chr17:8789812-8789851
  hypo
agcagcaccggtctggcggcaaagcggcagtagtagagt

SEQ ID NO: 23267 - DNA, 31 bp, Homo sapiens
  chr17:8794407-8794438
  hypo
ggtttccaggggaaagcgtggggttcactgc

SEQ ID NO: 23268 - DNA, 45 bp, Homo sapiens
  chr17:9041942-9041987
  hypo
gggtgtgctgacagccgcgtgccgggtaccgcgatgaggcagggg

SEQ ID NO: 23269 - DNA, 31 bp, Homo sapiens
  chr17:9115730-9115761
  hypo
atctggactctctggccgcggagattccatg

SEQ ID NO: 23270 - DNA, 34 bp, Homo sapiens
  chr17:9122495-9122529
  hypo
ctgatggtgctgatggcgccgttgacttgagtgt

SEQ ID NO: 23271 - DNA, 52 bp, Homo sapiens
  chr17:9124885-9124937
  hypo
tgtctgcatcatactgcggggatttgacccgagtccacgtggctcaaaggga

SEQ ID NO: 23272 - DNA, 31 bp, Homo sapiens
  chr17:9125130-9125161
  hypo
cctcaggctcccttcccgggaagggtgtgtc

SEQ ID NO: 23273 - DNA, 45 bp, Homo sapiens
  chr17:9127007-9127052
  hypo
ccctcttgtgagatgacgacttgagcaggacgcccaaggctcttg

SEQ ID NO: 23274 - DNA, 81 bp, Homo sapiens
  chr17:9127065-9127146
  hypo
ctttggacctgggcaccgcagcactgtcctcctagcaaagcggtgggcccagaggagttaatgggtcgcagagggaaagcc

SEQ ID NO: 23275 - DNA, 31 bp, Homo sapiens
  chr17:9127181-9127212
  hypo
ggcctaggggtaacctcggcaaggaggtagg

SEQ ID NO: 23276 - DNA, 31 bp, Homo sapiens
  chr17:9153887-9153918
  hypo
actgccatcagttggtcggccagactgcaac

SEQ ID NO: 23277 - DNA, 333 bp, Homo sapiens; identical to SEQ ID NO: 5856
  chr17:9548970-9549303
  hypo

SEQ ID NO: 23278 - DNA, 39 bp, Homo sapiens
  chr17:9576952-9576991
  hypo
acctcaccgacttctacgaaagaacgcaggaatgatatg

SEQ ID NO: 23279 - DNA, 24 bp, Homo sapiens
  chr17:9617703-9617727
  hypo
gaaaaagaatgaaggccgggcaca

SEQ ID NO: 23280 - DNA, 31 bp, Homo sapiens
  chr17:9631364-9631395
  hypo
caagaccatgcctctgcggtggtcctttgga

SEQ ID NO: 23281 - DNA, 34 bp, Homo sapiens
  chr17:9631405-9631439
  hypo
aaccaccaggtgcctccgtcgagttggtggagta

SEQ ID NO: 23282 - DNA, 31 bp, Homo sapiens; identical to SEQ ID NO: 5857
  chr17:13505134-13505165
  hypo

SEQ ID NO: 23283 - DNA, 30 bp, Homo sapiens; identical to SEQ ID NO: 12076
  chr17:15268977-15269007
  hypo

SEQ ID NO: 23284 - DNA, 11 bp, Homo sapiens
  chr17:15411142-15411153
  hypo
actccatctca

SEQ ID NO: 23285 - DNA, 31 bp, Homo sapiens
  chr17:15411201-15411232
  hypo
cctcttatgcctccatcgtatctgtaaagtg

SEQ ID NO: 23286 - DNA, 31 bp, Homo sapiens
  chr17:15500063-15500094
  hypo
agaagcaaagactcatcgagcccatcaagtc

SEQ ID NO: 23287 - DNA, 47 bp, Homo sapiens
  chr17:15500097-15500144
  hypo
ttctagaaggacttcccgtggcctagcacctccgaagagcaggctca

SEQ ID NO: 23288 - DNA, 60 bp, Homo sapiens
  chr17:15500157-15500217
  hypo
tgcccacagcacagagcgccctgaatacaggtggttgagggagcccgcaatccagaagac

SEQ ID NO: 23289 - DNA, 31 bp, Homo sapiens
  chr17:15500646-15500677
  hypo
atgaagaagttgatgccgggcccagtggctc

SEQ ID NO: 23290 - DNA, 25 bp, Homo sapiens
  chr17:15581232-15581257
  hypo
attataagaaaactatcggctgggt

SEQ ID NO: 23291 - DNA, 31 bp, Homo sapiens
  chr17:15721506-15721537
  hypo
atgtgagcgcatcccacggggcccaaggcac

SEQ ID NO: 23292 - DNA, 20 bp, Homo sapiens
  chr17:15723963-15723983
  hypo
ttttgagacagagtctcgct

SEQ ID NO: 23293 - DNA, 46 bp, Homo sapiens
  chr17:15843703-15843749
  hypo
acaagtccttggatgtcggagagaagtagaacgttgaggtacagta

SEQ ID NO: 23294 - DNA, 23 bp, Homo sapiens
  chr17:15858714-15858737
  hypo
ttttgtttttttttttcgagaca

SEQ ID NO: 23295 - DNA, 54 bp, Homo sapiens
  chr17:15873030-15873084
  hypo
tcaccctggcccaagccgacgttgtctcgagtcaactaccgaaatagtttccta

SEQ ID NO: 23296 - DNA, 31 bp, Homo sapiens
  chr17:15873113-15873144
  hypo
cctaaaattcagtctccgtactctggccagg

SEQ ID NO: 23297 - DNA, 31 bp, Homo sapiens
  chr17:15873186-15873217
  hypo
agtcttccatgggtcccggtgcctatgaact

SEQ ID NO: 23298 - DNA, 22 bp, Homo sapiens
  chr17:16138065-16138087
  hypo
aagactccgtctcaaaaataat

SEQ ID NO: 23299 - DNA, 31 bp, Homo sapiens
  chr17:16248028-16248059
  hypo
ggtgaaaacagacaaacggtattctttttta

SEQ ID NO: 23300 - DNA, 50 bp, Homo sapiens
  chr17:16282250-16282300
  hypo
cttgtaggtgaattcccgtttttgaagtggggtttcggctccctaatctg

SEQ ID NO: 23301 - DNA, 38 bp, Homo sapiens
  chr17:16282358-16282396
  hypo
attgctggagccagagcgaagcccggccactgtcacca

SEQ ID NO: 23302 - DNA, 31 bp, Homo sapiens
  chr17:16295226-16295257
  hypo
agaggctcctctcaaacgatcagggtttctg

SEQ ID NO: 23303 - DNA, 41 bp, Homo sapiens
  chr17:16305046-16305087
  hypo
aataattttggccaagcgtggccgggcgtggtggctcacgc

SEQ ID NO: 23304 - DNA, 31 bp, Homo sapiens
  chr17:16369822-16369853
  hypo
tcatgataggtctaaacggtaccacctctag

SEQ ID NO: 23305 - DNA, 46 bp, Homo sapiens
  chr17:16385290-16385336
  hypo
gggtactgccaggtgcgcggtgtctactgggcggtctaggtccagg

SEQ ID NO: 23306 - DNA, 31 bp, Homo sapiens
  chr17:16385339-16385370
  hypo
ggaattctgactgttacgcttggtgtggggc

SEQ ID NO: 23307 - DNA, 31 bp, Homo sapiens
  chr17:16385381-16385412
  hypo
ggcccttacctgcccccggtgccaatggaga

SEQ ID NO: 23308 - DNA, 41 bp, Homo sapiens
  chr17:16391198-16391239
  hypo
ctgcttaagaggtgtgcgccacacttcgagtaaaccaaccc

SEQ ID NO: 23309 - DNA, 31 bp, Homo sapiens
  chr17:16391265-16391296
  hypo
ggggtgctggtgaacacgaagacaggggcta

SEQ ID NO: 23310 - DNA, 61 bp, Homo sapiens
  chr17:16391310-16391371
  hypo
atcccagggaaacagacgcctttttctgctgctccatgacgcaggccgacagctcagtcta

SEQ ID NO: 23311 - DNA, 58 bp, Homo sapiens; identical to SEQ ID NO: 5858
  chr17:16395228-16395286
  hypo

SEQ ID NO: 23312 - DNA, 31 bp, Homo sapiens
  chr17:16434314-16434345
  hypo
tattttattactccttcgagctgccatttct

SEQ ID NO: 23313 - DNA, 31 bp, Homo sapiens
  chr17:16434352-16434383
  hypo
acataagaggaatccccggagcacagaaaat

SEQ ID NO: 23314 - DNA, 74 bp, Homo sapiens
  chr17:16434441-16434515
  hypo
ctcatggcacccaagacgcagcttcatgcgcaccttgttattgttgctcacaaacccaccggtcactctgcttc

SEQ ID NO: 23315 - DNA, 31 bp, Homo sapiens; identical to SEQ ID NO: 5861
  chr17:16570443-16570474
  hypo

SEQ ID NO: 23316 - DNA, 33 bp, Homo sapiens
  chr17:16927736-16927769
  hypo
cccctttttatgagggcacgggtcatgctggat

SEQ ID NO: 23317 - DNA, 31 bp, Homo sapiens
  chr17:16927903-16927934
  hypo
gaactgagagcgtccgcgacattgggatcca

SEQ ID NO: 23318 - DNA, 62 bp, Homo sapiens
  chr17:17045771-17045833
  hypo
gggtgcaggcagagctcgggtcagctgagcacgtgtctagacaacctcggtgctgtgcaagc

SEQ ID NO: 23319 - DNA, 57 bp, Homo sapiens
  chr17:17045834-17045891
  hypo
tgaggggaatcaggcccgggccaggccgggcatgggaggagtcggctcactgccacc

SEQ ID NO: 23320 - DNA, 85 bp, Homo sapiens
  chr17:17062601-17062686
  hypo
gcctagatggtttcctcgttctgactcccgatggcaggaggggcgcgagcagggcaaggcttttgcattacgcagccctggcttg

SEQ ID NO: 23321 - DNA, 31 bp, Homo sapiens
  chr17:17080459-17080490
  hypo
cagcaagcctccctaccgtgttcagtcccca

SEQ ID NO: 23322 - DNA, 31 bp, Homo sapiens
  chr17:17142227-17142258
  hypo
tcttgctgttggacagcgcaaacttaatttc

SEQ ID NO: 23323 - DNA, 31 bp, Homo sapiens
  chr17:17251262-17251293
  hypo
tcaagtgcctccttcccgcacctgccccagt

SEQ ID NO: 23324 - DNA, 46 bp, Homo sapiens
  chr17:17251296-17251342
  hypo
tcagagcagggtcccccgtccccctctcctccgctcttctcccaag

SEQ ID NO: 23325 - DNA, 31 bp, Homo sapiens
  chr17:17251344-17251375
  hypo
caagtttctgtgggatcgcaggagccctgtg

SEQ ID NO: 23326 - DNA, 31 bp, Homo sapiens
  chr17:17257801-17257832
  hypo
cgactcaatgcttccccgaaagagcctgagt

SEQ ID NO: 23327 - DNA, 19 bp, Homo sapiens
  chr17:17276195-17276214
  hypo
gcctcgagttgtccctgct

SEQ ID NO: 23328 - DNA, 37 bp, Homo sapiens
  chr17:17303347-17303384
  hypo
tctcagatgtgcctgccgctgacgaccattcccactc

SEQ ID NO: 23329 - DNA, 31 bp, Homo sapiens
  chr17:17325163-17325194
  hypo
tctgcctgccctggaacgcctgggtcctggg

SEQ ID NO: 23330 - DNA, 61 bp, Homo sapiens
  chr17:17325201-17325262
  hypo
tttgttctgtgatgaccgatattgccagacagttttcctacatggtcgtaccagttcatgt

SEQ ID NO: 23331 - DNA, 31 bp, Homo sapiens
  chr17:17325274-17325305
  hypo
actgatgagcagccatcgtattctctgttcc

SEQ ID NO: 23332 - DNA, 31 bp, Homo sapiens
  chr17:17325316-17325347
  hypo
tgctgctctttgtcatcgccattgggcctct

SEQ ID NO: 23333 - DNA, 31 bp, Homo sapiens
  chr17:17328456-17328487
  hypo
ccactgtgtcccctggcggcagctatggaag

SEQ ID NO: 23334 - DNA, 31 bp, Homo sapiens
  chr17:17352482-17352513
  hypo
gcccctctggctgcaacgcctgccacctttt

SEQ ID NO: 23335 - DNA, 53 bp, Homo sapiens
  chr17:17402428-17402481
  hypo
ttcccagcactcccgccgcctgggccctgtcagccatcgcggcatttgatgtc

SEQ ID NO: 23336 - DNA, 31 bp, Homo sapiens
  chr17:17413541-17413572
  hypo
gccacaaggcgtcccccggcagagctgctct

SEQ ID NO: 23337 - DNA, 37 bp, Homo sapiens
  chr17:17431919-17431956
  hypo
aaatgtctgagtgagacgtccccggggcagcagggag

SEQ ID NO: 23338 - DNA, 31 bp, Homo sapiens
  chr17:17447944-17447975
  hypo
gtgtcctcaagtgtgacgggcaggggctggc

SEQ ID NO: 23339 - DNA, 70 bp, Homo sapiens
  chr17:17448007-17448077
  hypo
gcttcctttagtcctccgaacagaaaagacgtttcaaaatggaggcagaacagggcggctttctccactt

SEQ ID NO: 23340 - DNA, 31 bp, Homo sapiens
  chr17:17492208-17492239
  hypo
gtcagtggggctgcagcgggcacactcctca

SEQ ID NO: 23341 - DNA, 62 bp, Homo sapiens
  chr17:17602524-17602586
  hypo
tcttcagtgctttttgcgctccctgccagggccctcaagacatctgtcggcaacatccttga

SEQ ID NO: 23342 - DNA, 53 bp, Homo sapiens
  chr17:17602602-17602655
  hypo
gcactgccccaggggacgcctggagccaagcacagcaccgctgcctcaggccc

SEQ ID NO: 23343 - DNA, 93 bp, Homo sapiens
  chr17:17618836-17618929
  hypo
tgggatgacaccagaccgggaggagaagtgcgaggagtggtgtggtcattggcgtctttcctctgcctctgcctcccccggccccttccattc

SEQ ID NO: 23344 - DNA, 55 bp, Homo sapiens
  chr17:17881579-17881634
  hypo
gtggctcaggaccaggcggaccctcactgcttcaatgtcccgtctgtggaatggg

SEQ ID NO: 23345 - DNA, 31 bp, Homo sapiens
  chr17:17881637-17881668
  hypo
gctgtcatccctgtctcgagcattgggtggg

SEQ ID NO: 23346 - DNA, 31 bp, Homo sapiens
  chr17:17881671-17881702
  hypo
acaaggtgagacagcacgtgcacagtgcctg

SEQ ID NO: 23347 - DNA, 31 bp, Homo sapiens
  chr17:17881731-17881762
  hypo
gaaggcagaggcagtacgagggcagtgagag

SEQ ID NO: 23348 - DNA, 54 bp, Homo sapiens
  chr17:17910432-17910486
  hypo
acgaggacctgcctaacgacctgcgcgcggtaggcggggcgggctgctcggagc

SEQ ID NO: 23349 - DNA, 31 bp, Homo sapiens
  chr17:18139365-18139396
  hypo
tctgggctttcaccaccgcctggggccctgc

SEQ ID NO: 23350 - DNA, 31 bp, Homo sapiens
  chr17:18139409-18139440
  hypo
ctgtgtcccaaggctgcgccctagatttgtc

SEQ ID NO: 23351 - DNA, 31 bp, Homo sapiens
  chr17:18139457-18139488
  hypo
cctccctgctttctcccggcctctgtagtct

SEQ ID NO: 23352 - DNA, 31 bp, Homo sapiens
  chr17:18139489-18139520
  hypo
cctgctcctccacctacgtggctgccttggg

SEQ ID NO: 23353 - DNA, 31 bp, Homo sapiens
  chr17:18139523-18139554
  hypo
catgcagctcctcccccgggatgccccatgc

SEQ ID NO: 23354 - DNA, 54 bp, Homo sapiens
  chr17:18150272-18150326
  hypo
cctcttccggcagccgcgcaaacttcttgccctccagcacgaaaccctccatgc

SEQ ID NO: 23355 - DNA, 62 bp, Homo sapiens
  chr17:18267502-18267564
  hypo
taagaatgataaaaaccggggccacatgtcaggaccacctgaggctgcgtcataaatttttt

SEQ ID NO: 23356 - DNA, 31 bp, Homo sapiens
  chr17:18278360-18278391
  hypo
ttttaattttttacatcgactaaatttaaca

SEQ ID NO: 23357 - DNA, 31 bp, Homo sapiens
  chr17:18399915-18399946
  hypo
aaaagccttccttggccgtctccaaacccag

SEQ ID NO: 23358 - DNA, 68 bp, Homo sapiens
  chr17:18399951-18400019
  hypo
tcttcagtcccttgggcgaggatgctgtggcccacactcgctttgacaccctgcgttcccagaggcca

SEQ ID NO: 23359 - DNA, 31 bp, Homo sapiens
  chr17:18400024-18400055
  hypo
gtactggccaaactcacgtgagacaggtggc

SEQ ID NO: 23360 - DNA, 31 bp, Homo sapiens
  chr17:18575701-18575732
  hypo
gagtgagccgtctgtccggggagctctcgat

SEQ ID NO: 23361 - DNA, 35 bp, Homo sapiens
  chr17:18760367-18760402
  hypo
tgggcgcgatggctcacgcctgtaaccccaggact

SEQ ID NO: 23362 - DNA, 31 bp, Homo sapiens
  chr17:18895944-18895975
  hypo
gtcggtccagcaccggcgcccaagctctagg

SEQ ID NO: 23363 - DNA, 31 bp, Homo sapiens
  chr17:18915678-18915709
  hypo
ctgagcctgggaaattcgtgagtcctttcat

SEQ ID NO: 23364 - DNA, 207 bp, Homo sapiens; identical to SEQ ID NO: 5863
  chr17:19140729-19140936
  hypo

SEQ ID NO: 23365 - DNA, 69 bp, Homo sapiens; identical to SEQ ID NO: 5864
  chr17:19140942-19141011
  hypo

SEQ ID NO: 23366 - DNA, 31 bp, Homo sapiens; identical to SEQ ID NO: 5869
  chr17:19282088-19282119
  hypo

SEQ ID NO: 23367 - DNA, 194 bp, Homo sapiens; identical to SEQ ID NO: 5870
  chr17:19282131-19282325
  hypo

SEQ ID NO: 23368 - DNA, 31 bp, Homo sapiens; identical to SEQ ID NO: 5871
  chr17:19391541-19391572
  hypo

SEQ ID NO: 23369 - DNA, 31 bp, Homo sapiens
  chr17:19616224-19616255
  hypo
tgccaggaggggcagccgaaacacccaaaca

SEQ ID NO: 23370 - DNA, 38 bp, Homo sapiens
  chr17:19616277-19616315
  hypo
cttaaattcagagtaacgtggttcgtaagaaaaaaagg

SEQ ID NO: 23371 - DNA, 78 bp, Homo sapiens
  chr17:19618656-19618734
  hypo
agccagggctggaggtcggatgacctagcccagctcccattctgcgttctgcagctgcagtcacgcctggcctccacg

SEQ ID NO: 23372 - DNA, 31 bp, Homo sapiens
  chr17:19623342-19623373
  hypo
tggagcgatctccccgcgcaccacaggcatc

SEQ ID NO: 23373 - DNA, 38 bp, Homo sapiens
  chr17:19623379-19623417
  hypo
tagagtgacctccccacgcaccacgggcatctcagcat

SEQ ID NO: 23374 - DNA, 68 bp, Homo sapiens
  chr17:19623423-19623491
  hypo
acctccccatgcaccacgggtatctcagcatggagcgacctccccgtgcaccacgggcatctcagcat

SEQ ID NO: 23375 - DNA, 66 bp, Homo sapiens
  chr17:19641467-19641533
  hypo
gccagtgagggtggtccgcactccgatgggacacagtatggccaggccaggcggagcaacccctcc

SEQ ID NO: 23376 - DNA, 59 bp, Homo sapiens
  chr17:19642883-19642942
  hypo
ggcctcctccaggctgcgcacgcacacgatgggcagcacaggcccgaagatctcctctt

SEQ ID NO: 23377 - DNA, 38 bp, Homo sapiens
  chr17:19643640-19643678
  hypo
tcacgcacctatgtagcgagtggcggcatccccggtgc

SEQ ID NO: 23378 - DNA, 31 bp, Homo sapiens
  chr17:19644759-19644790
  hypo
ccgtgctccctgatcacgcccttgtcctgca

SEQ ID NO: 23379 - DNA, 31 bp, Homo sapiens
  chr17:19644795-19644826
  hypo
aggtgtcactgctactcgggcccccctacat

SEQ ID NO: 23380 - DNA, 57 bp, Homo sapiens
  chr17:19644877-19644934
  hypo
tcaggaggtgcagatacgggttctgccccagaccccgagcagcggtggcccttctcc

SEQ ID NO: 23381 - DNA, 31 bp, Homo sapiens
  chr17:19645605-19645636
  hypo
ccaagaccagcagccccgaagctcagcaccc

SEQ ID NO: 23382 - DNA, 41 bp, Homo sapiens
  chr17:19646479-19646520
  hypo
tcctggcttggctccacgctgggggacggtgctcccccagc

SEQ ID NO: 23383 - DNA, 31 bp, Homo sapiens
  chr17:19680416-19680447
  hypo
cctacctacctaactacgtagaatggagtct

SEQ ID NO: 23384 - DNA, 31 bp, Homo sapiens
  chr17:19686486-19686517
  hypo
tgtactagaatgctcacgcctgtaatcctag

SEQ ID NO: 23385 - DNA, 40 bp, Homo sapiens
  chr17:19687002-19687042
  hypo
tttctacctccatcagcgtctcctccggcagttcaggggc

SEQ ID NO: 23386 - DNA, 40 bp, Homo sapiens
  chr17:19687067-19687107
  hypo
ctggggggtgaagcaccgtaaggcacgtatctcaggctgg

SEQ ID NO: 23387 - DNA, 31 bp, Homo sapiens
  chr17:19721310-19721341
  hypo
tgttaaaagagctttccggcagggtgtgaat

SEQ ID NO: 23388 - DNA, 31 bp, Homo sapiens
  chr17:19736606-19736637
  hypo
agtcaatagaaactgtcgtgagggggccaaa

SEQ ID NO: 23389 - DNA, 39 bp, Homo sapiens
  chr17:19736688-19736727
  hypo
ttttgagacagagtctcgctctgtcgcccatttttaaaa

SEQ ID NO: 23390 - DNA, 31 bp, Homo sapiens
  chr17:19769881-19769912
  hypo
cagcccacttttaacacgccccttgggcaac

SEQ ID NO: 23391 - DNA, 63 bp, Homo sapiens
  chr17:19771617-19771680
  hypo
ggaaaaccagagttcacgctgccaaactgccagccttcggacgcctctcggggtttactcgct

SEQ ID NO: 23392 - DNA, 46 bp, Homo sapiens
  chr17:19773272-19773318
  hypo
tgctgggattacaggcgtgagccactgcgcccggccacatgaaggt

SEQ ID NO: 23393 - DNA, 31 bp, Homo sapiens
  chr17:19890336-19890367
  hypo
aaaaggagaagaaaggcggggggtggtactt

SEQ ID NO: 23394 - DNA, 31 bp, Homo sapiens
  chr17:19890370-19890401
  hypo
attagagaataagaagcggatcagcctgttt

SEQ ID NO: 23395 - DNA, 31 bp, Homo sapiens
  chr17:20014223-20014254
  hypo
ccctgttgatcccttgcgaaggtgggtgtct

SEQ ID NO: 23396 - DNA, 154 bp, Homo sapiens
  chr17:20805560-20805714
  hypo
ccggcccccagtaaacgcggattcctgctcgtggccttctacgcccattactggagcagcagccatcagcgtagacgacgacgaagtctcccatgtaggaaaacgtgtctctgctaactggaggcgccggcttcaccctcggcttcatgtgctt

SEQ ID NO: 23397 - DNA, 31 bp, Homo sapiens
  chr17:20817538-20817569
  hypo
gagcccagcaatgaaccgagtcagtgacatt

SEQ ID NO: 23398 - DNA, 71 bp, Homo sapiens
  chr17:20841353-20841424
  hypo
tgcccagtgcgggtctcgcttcctgacgcaggtgcgccttgggctcccacaggaagcggtcacatccagac

SEQ ID NO: 23399 - DNA, 31 bp, Homo sapiens
  chr17:20841510-20841541
  hypo
gggacatccttctccacggctagtctacaat

SEQ ID NO: 23400 - DNA, 31 bp, Homo sapiens
  chr17:20908351-20908382
  hypo
agagacacaaggctctcgtgaaaccaacact

SEQ ID NO: 23401 - DNA, 31 bp, Homo sapiens
  chr17:20908396-20908427
  hypo
catgcagatgctgcaccgaggtgcactttat

SEQ ID NO: 23402 - DNA, 45 bp, Homo sapiens
  chr17:20908438-20908483
  hypo
aaatctccccatgtttcgtgaggacactgacgctcaagctgtgga

SEQ ID NO: 23403 - DNA, 52 bp, Homo sapiens
  chr17:20919059-20919111
  hypo
cccacctttgcagtgtcggtggagcacgtccagggccgcgatgaggaactcg

SEQ ID NO: 23404 - DNA, 60 bp, Homo sapiens
  chr17:20950608-20950668
  hypo
ttgccagcaacattagcgggatgttataggaatataaaactgcagcgataaaggaaagtc

SEQ ID NO: 23405 - DNA, 31 bp, Homo sapiens
  chr17:21104000-21104031
  hypo
catgtacctgaagctccgaatgtgcctgaca

SEQ ID NO: 23406 - DNA, 70 bp, Homo sapiens
  chr17:21104291-21104361
  hypo
gaaggatggtggaaatcggactgtcgggaaacttcaaggaaaaagaacaggcaatcgtagttcttcctac

SEQ ID NO: 23407 - DNA, 31 bp, Homo sapiens
  chr17:21196972-21197003
  hypo
ggtggccttgcacagccgggcagaggcaggg

SEQ ID NO: 23408 - DNA, 88 bp, Homo sapiens
  chr17:21204235-21204323
  hypo
cctggacatcaacatgcgcacggtcgactgtttctacactgtcaccttctacggggcactattcagagaggtgcgtccttgcatgatg

SEQ ID NO: 23409 - DNA, 31 bp, Homo sapiens
  chr17:25620313-25620344
  hypo
aattcccagtcttatacgccccaggcctttg

SEQ ID NO: 23410 - DNA, 68 bp, Homo sapiens
  chr17:25620346-25620414
  hypo
atgtttagggtccacacgagaagccattaaaatgcaaatacgtcatctgtgaccgggaaccaagctgg

SEQ ID NO: 23411 - DNA, 40 bp, Homo sapiens
  chr17:25620612-25620652
  hypo
gcccgagtctccttctcgttcccctcggcccttcctaaaa

SEQ ID NO: 23412 - DNA, 55 bp, Homo sapiens
  chr17:25620660-25620715
  hypo
ctcaggtctgaacaatcgcagctggacaggtggtgcacaacgatgttaattttca

SEQ ID NO: 23413 - DNA, 48 bp, Homo sapiens
  chr17:25676941-25676989
  hypo
actttggagaatttggcgatagctagttaaagccgaagatgtgcatgc

SEQ ID NO: 23414 - DNA, 22 bp, Homo sapiens
  chr17:25947018-25947040
  hypo
cggccttcgggccctgtcttga

SEQ ID NO: 23415 - DNA, 31 bp, Homo sapiens
  chr17:25948186-25948217
  hypo
cgcctggtggaatggtcgctgggcactccca

SEQ ID NO: 23416 - DNA, 31 bp, Homo sapiens
  chr17:26851172-26851203
  hypo
agaccagtcaccttaccgcccccagggacct

SEQ ID NO: 23417 - DNA, 36 bp, Homo sapiens
  chr17:26851872-26851908
  hypo
aggagatcccagtggacgtggcggaggccgaggcct

SEQ ID NO: 23418 - DNA, 31 bp, Homo sapiens
  chr17:26861031-26861062
  hypo
cagaaggcctctgtagcgcccaccagccctg

SEQ ID NO: 23419 - DNA, 31 bp, Homo sapiens; identical to SEQ ID NO: 5878
  chr17:26925397-26925428
  hypo

SEQ ID NO: 23420 - DNA, 68 bp, Homo sapiens
  chr17:26961802-26961870
  hypo
gagctcctcaattttgcgggcaggcaacaactccccatgctgcttccgaagggcggccactttagcat

SEQ ID NO: 23421 - DNA, 17 bp, Homo sapiens
  chr17:27056851-27056868
  hypo
ccgcgacaggccagaag

SEQ ID NO: 23422 - DNA, 31 bp, Homo sapiens
  chr17:27179809-27179840
  hypo
ctcatgcctgtaaactcgcacttggggaggc

SEQ ID NO: 23423 - DNA, 31 bp, Homo sapiens
  chr17:27301127-27301158
  hypo
gcacgtgccctaatggcgtaacccacagacg

SEQ ID NO: 23424 - DNA, 31 bp, Homo sapiens
  chr17:27419476-27419507
  hypo
ggacacagaccacccccgccccagggagaga

SEQ ID NO: 23425 - DNA, 37 bp, Homo sapiens
  chr17:27421182-27421219
  hypo
ccctaggctcaggggccgagaacgtccaccagccagt

SEQ ID NO: 23426 - DNA, 36 bp, Homo sapiens
  chr17:27421467-27421503
  hypo
tttgtggaaagttccacgagcgcgtcttcacactgt

SEQ ID NO: 23427 - DNA, 31 bp, Homo sapiens
  chr17:27421545-27421576
  hypo
gtgagtgagtgaatacgcgaatgaatggagg

SEQ ID NO: 23428 - DNA, 31 bp, Homo sapiens
  chr17:27716045-27716076
  hypo
acatacactgtatacacggattgcttaggtc

SEQ ID NO: 23429 - DNA, 13 bp, Homo sapiens
  chr17:27716113-27716126
  hypo
atggccagcctgg

SEQ ID NO: 23430 - DNA, 31 bp, Homo sapiens
  chr17:27716246-27716277
  hypo
gtttatttatttcagtcgttttgttggttaa

SEQ ID NO: 23431 - DNA, 67 bp, Homo sapiens
  chr17:27902813-27902880
  hypo
ggcatggaaacattaccgtgtggcggcttccctcctgggagcaggacagcagcggggaggagggagt

SEQ ID NO: 23432 - DNA, 52 bp, Homo sapiens
  chr17:27902895-27902947
  hypo
ggcagacacccctttccggatctgaaacccagggcagcgctggatggagtca

SEQ ID NO: 23433 - DNA, 48 bp, Homo sapiens
  chr17:27934685-27934733
  hypo
cagggctgtctggctccggagggctgcctccgacgtgactggggcttt

SEQ ID NO: 23434 - DNA, 36 bp, Homo sapiens
  chr17:27934863-27934899
  hypo
cgtgggcagggagaatcgcagcggctggacaggtgg

SEQ ID NO: 23435 - DNA, 31 bp, Homo sapiens
  chr17:27935137-27935168
  hypo
agcctctcagcctccacgggagcccttgagc

SEQ ID NO: 23436 - DNA, 31 bp, Homo sapiens
  chr17:27936394-27936425
  hypo
tggcgcagtgaaaagacggagatggtgaatg

SEQ ID NO: 23437 - DNA, 20 bp, Homo sapiens
  chr17:28925643-28925663
  hypo
gtatttatttttgatacgga

SEQ ID NO: 23438 - DNA, 3 bp, Homo sapiens
  chr17:29234394-29234397
  hypo
aac

SEQ ID NO: 23439 - DNA, 31 bp, Homo sapiens
  chr17:29234451-29234482
  hypo
ccagttttgtgaaaaacggggaattcaggag

SEQ ID NO: 23440 - DNA, 31 bp, Homo sapiens; identical to SEQ ID NO: 5883
  chr17:29815732-29815763
  hypo

SEQ ID NO: 23441 - DNA, 31 bp, Homo sapiens
  chr17:29841345-29841376
  hypo
cagtggccagaggccacgtcagacacctgag

SEQ ID NO: 23442 - DNA, 41 bp, Homo sapiens
  chr17:29855527-29855568
  hypo
tgagttccagaaggagcgggaggcgacgcaggaggtaggtc

SEQ ID NO: 23443 - DNA, 26 bp, Homo sapiens
  chr17:29917505-29917531
  hypo
atagggagttgggatgcgtggttaat

SEQ ID NO: 23444 - DNA, 26 bp, Homo sapiens
  chr17:29917650-29917676
  hypo
gccacggcgcccggctgtcaggtata

SEQ ID NO: 23445 - DNA, 31 bp, Homo sapiens
  chr17:30243767-30243798
  hypo
tacgatgtaactaaaacgccactctacagtt

SEQ ID NO: 23446 - DNA, 31 bp, Homo sapiens
  chr17:30243811-30243842
  hypo
ccttagatttcattcccggggtcacctcttt

SEQ ID NO: 23447 - DNA, 145 bp, Homo sapiens
  chr17:30243844-30243989
  hypo
cctaggtgcacacaccgcgggctccgctctaggtggggcacaggccttcgcccgccgcatgcaccctgggctgcgcagccccagccagcccgacccgggctcagcgacccctgcccccgggaccccgcaccggggctgagcgctc

SEQ ID NO: 23448 - DNA, 31 bp, Homo sapiens
  chr17:30333111-30333142
  hypo
tattaacatatgtttacgaaacctttctttt

SEQ ID NO: 23449 - DNA, 31 bp, Homo sapiens
  chr17:30632642-30632673
  hypo
ctattttctccagtcacggcttggcctagga

SEQ ID NO: 23450 - DNA, 40 bp, Homo sapiens
  chr17:30710916-30710956
  hypo
tcaaaaaacaacaacaaaaaaacatcgactagagcagtgg

SEQ ID NO: 23451 - DNA, 90 bp, Homo sapiens; identical to SEQ ID NO: 5884
  chr17:30813421-30813511
  hypo

SEQ ID NO: 23452 - DNA, 31 bp, Homo sapiens
  chr17:30844874-30844905
  hypo
agtgcctgtgaaggagcggctgagcccccaa

SEQ ID NO: 23453 - DNA, 59 bp, Homo sapiens
  chr17:30844941-30845000
  hypo
acccctcctgccaccccggctctccctctggacagcacctggcccgccactctgccatc

SEQ ID NO: 23454 - DNA, 31 bp, Homo sapiens
  chr17:30845006-30845037
  hypo
tggacagcacctggcccgccactctgccatc

SEQ ID NO: 23455 - DNA, 31 bp, Homo sapiens; identical to SEQ ID NO: 23454
  chr17:30845043-30845074
  hypo

SEQ ID NO: 23456 - DNA, 51 bp, Homo sapiens
  chr17:30954268-30954319
  hypo
aggattgagggagggccgagggagtgagtaggctagcgcacaccagcacag

SEQ ID NO: 23457 - DNA, 31 bp, Homo sapiens; identical to SEQ ID NO: 5885
  chr17:31203739-31203770
  hypo

SEQ ID NO: 23458 - DNA, 31 bp, Homo sapiens
  chr17:31214019-31214050
  hypo
ataaagccctggtttacgtccctcctggcac

SEQ ID NO: 23459 - DNA, 31 bp, Homo sapiens
  chr17:31214056-31214087
  hypo
tcccatttccccattccgtgtgaagagtgcc

SEQ ID NO: 23460 - DNA, 23 bp, Homo sapiens
  chr17:33327282-33327305
  hypo
tgttttgtttttgagacggagtt

SEQ ID NO: 23461 - DNA, 31 bp, Homo sapiens
  chr17:33521041-33521072
  hypo
cagaagggggtcgccacgcagtttaagtagc

SEQ ID NO: 23462 - DNA, 30 bp, Homo sapiens
  chr17:33896140-33896170
  hypo
caaagccaccgctcccggccttgagtaaag

SEQ ID NO: 23463 - DNA, 38 bp, Homo sapiens
  chr17:33917230-33917268
  hypo
ccggctgtaacttctaatgaagacgtcagtttttgcca

SEQ ID NO: 23464 - DNA, 31 bp, Homo sapiens
  chr17:35488970-35489001
  hypo
tgatacactgatctctcggtcactcagcttt

SEQ ID NO: 23465 - DNA, 36 bp, Homo sapiens
  chr17:35489020-35489056
  hypo
ttactaataacacctccgccacggccagtttacctc

SEQ ID NO: 23466 - DNA, 34 bp, Homo sapiens
  chr17:35489101-35489135
  hypo
cattctagcaaatacacgccgtttgttattttta

SEQ ID NO: 23467 - DNA, 31 bp, Homo sapiens
  chr17:35802039-35802070
  hypo
tacaggtgtgagccaccgtgcctggttgata

SEQ ID NO: 23468 - DNA, 31 bp, Homo sapiens; identical to SEQ ID NO: 5895
  chr17:35816364-35816395
  hypo

SEQ ID NO: 23469 - DNA, 27 bp, Homo sapiens
  chr17:35845351-35845378
  hypo
tgaagattaaatgagccgggtgtggtg

SEQ ID NO: 23470 - DNA, 31 bp, Homo sapiens
  chr17:35870345-35870376
  hypo
ctgcacctggcctgtccgtcctcccaccgcg

SEQ ID NO: 23471 - DNA, 31 bp, Homo sapiens
  chr17:36089510-36089541
  hypo
ataggatctattacaccgcagaaagatccac

SEQ ID NO: 23472 - DNA, 46 bp, Homo sapiens; identical to SEQ ID NO: 5901
  chr17:36762362-36762408
  hypo

SEQ ID NO: 23473 - DNA, 31 bp, Homo sapiens
  chr17:36790406-36790437
  hypo
ttaaagttagaatggtcggccaggcgtggtg

SEQ ID NO: 23474 - DNA, 43 bp, Homo sapiens
  chr17:36818502-36818545
  hypo
agcaggagtctgagcccgtttgggaacacgcttgtccatccct

SEQ ID NO: 23475 - DNA, 87 bp, Homo sapiens
  chr17:36875951-36876038
  hypo
aggagcctggagtggtcgggtcgactgaacccaggttccctctggccgcaggtcccccatcagcagcctccccgcactcttcgacca

SEQ ID NO: 23476 - DNA, 80 bp, Homo sapiens
  chr17:36876109-36876189
  hypo
ttctggagaagcagggcgacggggaggccggcgtcaacagtgaggaggggtggcgccggtcgggacgcctgccctagggc

SEQ ID NO: 23477 - DNA, 46 bp, Homo sapiens
  chr17:36876594-36876640
  hypo
cctccctcaggttcctcgctctctccgcagtcgtggagatgctgaa

SEQ ID NO: 23478 - DNA, 34 bp, Homo sapiens; identical to SEQ ID NO: 5903
  chr17:36886753-36886787
  hypo

SEQ ID NO: 23479 - DNA, 83 bp, Homo sapiens; identical to SEQ ID NO: 5904
  chr17:36886817-36886900
  hypo

SEQ ID NO: 23480 - DNA, 38 bp, Homo sapiens; identical to SEQ ID NO: 5907
  chr17:36904349-36904387
  hypo

SEQ ID NO: 23481 - DNA, 62 bp, Homo sapiens; identical to SEQ ID NO: 5908
  chr17:36905150-36905212
  hypo

SEQ ID NO: 23482 - DNA, 236 bp, Homo sapiens; identical to SEQ ID NO: 5909
  chr17:36905241-36905477
  hypo

SEQ ID NO: 23483 - DNA, 38 bp, Homo sapiens
  chr17:37011082-37011120
  hypo
aaaatataaatagtatcgcttctcggccttttggccaa

SEQ ID NO: 23484 - DNA, 9 bp, Homo sapiens
  chr17:37084533-37084542
  hypo
cacaaaaat

SEQ ID NO: 23485 - DNA, 78 bp, Homo sapiens
  chr17:37084607-37084685
  hypo
agtgttaggccaaggtcgcattatctctttggaaactacatcgagaacagaattcccatggaacgaactcttaatagt

SEQ ID NO: 23486 - DNA, 20 bp, Homo sapiens
  chr17:37169219-37169239
  hypo
gaactcgtgcaggtctgtgg

SEQ ID NO: 23487 - DNA, 31 bp, Homo sapiens
  chr17:37389382-37389413
  hypo
ataggaagagccacctcgcctggcccaatat

SEQ ID NO: 23488 - DNA, 40 bp, Homo sapiens
  chr17:37445219-37445259
  hypo
tgctgggattacaggcgtgagccaccgtgcctggcagaag

SEQ ID NO: 23489 - DNA, 31 bp, Homo sapiens
  chr17:37452477-37452508
  hypo
catctctcacagtaaacgtttccaaatcaat

SEQ ID NO: 23490 - DNA, 31 bp, Homo sapiens
  chr17:37483845-37483876
  hypo
acataagatgtacacacgcaccccccaaaaa

SEQ ID NO: 23491 - DNA, 18 bp, Homo sapiens
  chr17:37484110-37484128
  hypo
gcccgggtaaccaaacat

SEQ ID NO: 23492 - DNA, 31 bp, Homo sapiens; identical to SEQ ID NO: 5918
  chr17:37761503-37761534
  hypo

SEQ ID NO: 23493 - DNA, 56 bp, Homo sapiens; identical to SEQ ID NO: 5919
  chr17:37761543-37761599
  hypo

SEQ ID NO: 23494 - DNA, 31 bp, Homo sapiens; identical to SEQ ID NO: 5920
  chr17:37762909-37762940
  hypo

SEQ ID NO: 23495 - DNA, 56 bp, Homo sapiens; identical to SEQ ID NO: 5921
  chr17:37774744-37774800
  hypo

SEQ ID NO: 23496 - DNA, 75 bp, Homo sapiens; identical to SEQ ID NO: 5922
  chr17:37774835-37774910
  hypo

SEQ ID NO: 23497 - DNA, 31 bp, Homo sapiens; identical to SEQ ID NO: 5923
  chr17:37775053-37775084
  hypo

SEQ ID NO: 23498 - DNA, 31 bp, Homo sapiens; identical to SEQ ID NO: 5926
  chr17:37844562-37844593
  hypo

SEQ ID NO: 23499 - DNA, 31 bp, Homo sapiens
  chr17:37864743-37864774
  hypo
ctccccaggaggcctgcgggagctgcagctt

SEQ ID NO: 23500 - DNA, 1 bp, Homo sapiens
  chr17:38075038-38075039
  hypo
a

SEQ ID NO: 23501 - DNA, 31 bp, Homo sapiens
  chr17:38176410-38176441
  hypo
gggaagggaggggcaccgcaaggccccttcc

SEQ ID NO: 23502 - DNA, 31 bp, Homo sapiens
  chr17:38179252-38179283
  hypo
ctgaggcgaggcattccggggaggccacctg

SEQ ID NO: 23503 - DNA, 31 bp, Homo sapiens
  chr17:38179339-38179370
  hypo
gggacaggacccatgtcggcccacagccact

SEQ ID NO: 23504 - DNA, 34 bp, Homo sapiens
  chr17:38179396-38179430
  hypo
ttgcagaaccagtagacgccgcccatgtgcagca

SEQ ID NO: 23505 - DNA, 31 bp, Homo sapiens
  chr17:38179437-38179468
  hypo
aaagatgtggatggagcggctgtccacccag

SEQ ID NO: 23506 - DNA, 53 bp, Homo sapiens
  chr17:38179481-38179534
  hypo
ccttggcaaaaatgtccgtcagcacctctttgatgggccgcttggggggcagc

SEQ ID NO: 23507 - DNA, 31 bp, Homo sapiens
  chr17:38179546-38179577
  hypo
ggcattgtgtccaccccggtggagggaaact

SEQ ID NO: 23508 - DNA, 31 bp, Homo sapiens
  chr17:38183023-38183054
  hypo
acaggggagcaaggaacgggctcagggagcg

SEQ ID NO: 23509 - DNA, 40 bp, Homo sapiens; identical to SEQ ID NO: 5930
  chr17:38228512-38228552
  hypo

SEQ ID NO: 23510 - DNA, 31 bp, Homo sapiens
  chr17:38251852-38251883
  hypo
ggaggagggagcctggcgcagaccatttagg

SEQ ID NO: 23511 - DNA, 43 bp, Homo sapiens
  chr17:38276279-38276322
  hypo
aaagaaatataaattacggagctgtcagcgtagagatggtgca

SEQ ID NO: 23512 - DNA, 31 bp, Homo sapiens; identical to SEQ ID NO: 5936
  chr17:38498601-38498632
  hypo

SEQ ID NO: 23513 - DNA, 48 bp, Homo sapiens; identical to SEQ ID NO: 5937
  chr17:38498897-38498945
  hypo

SEQ ID NO: 23514 - DNA, 20 bp, Homo sapiens
  chr17:38575001-38575021
  hypo
cagagcgaggccacctcaag

SEQ ID NO: 23515 - DNA, 22 bp, Homo sapiens
  chr17:38669290-38669312
  hypo
cctggcccgctccaggcacttt

SEQ ID NO: 23516 - DNA, 31 bp, Homo sapiens
  chr17:38821260-38821291
  hypo
tccttgttgagagcaccgtctctatctgatt

SEQ ID NO: 23517 - DNA, 31 bp, Homo sapiens
  chr17:39651771-39651802
  hypo
gtacctcagtgtctagcgtccccttgattca

SEQ ID NO: 23518 - DNA, 31 bp, Homo sapiens
  chr17:39659225-39659256
  hypo
ctctctgccatggcctcgtactgctccctca

SEQ ID NO: 23519 - DNA, 31 bp, Homo sapiens
  chr17:39682614-39682645
  hypo
tgtgtgtgcatgtgcacgcacacacacacac

SEQ ID NO: 23520 - DNA, 47 bp, Homo sapiens; identical to SEQ ID NO: 5938
  chr17:39684386-39684433
  hypo

SEQ ID NO: 23521 - DNA, 31 bp, Homo sapiens
  chr17:39702524-39702555
  hypo
atgccacaggcactgacggttgccactaagc

SEQ ID NO: 23522 - DNA, 50 bp, Homo sapiens
  chr17:39803751-39803801
  hypo
cgcccgtaactctttacggcagaagaccaagggtgcgtctggtcctcaga

SEQ ID NO: 23523 - DNA, 157 bp, Homo sapiens; identical to SEQ ID NO: 5939
  chr17:40332917-40333074
  hypo

SEQ ID NO: 23524 - DNA, 133 bp, Homo sapiens; identical to SEQ ID NO: 5940
  chr17:40333076-40333209
  hypo

SEQ ID NO: 23525 - DNA, 31 bp, Homo sapiens
  chr17:40353779-40353810
  hypo
ctgactgtccattggccggcccaggagctcc

SEQ ID NO: 23526 - DNA, 22 bp, Homo sapiens
  chr17:40363503-40363525
  hypo
acaagagcgaaactctgtctca

SEQ ID NO: 23527 - DNA, 41 bp, Homo sapiens
  chr17:40370155-40370196
  hypo
gctgcacaattacttgcgggtgttctcgttcttgagcagag

SEQ ID NO: 23528 - DNA, 57 bp, Homo sapiens
  chr17:40370237-40370294
  hypo
ggggggttcatgtgcacgttcagcttcccgcccaccagcaggcgcacagtggctgca

SEQ ID NO: 23529 - DNA, 31 bp, Homo sapiens
  chr17:40371744-40371775
  hypo
cagtgtctgtgcctcacgctgcaaccaggcc

SEQ ID NO: 23530 - DNA, 73 bp, Homo sapiens
  chr17:40371788-40371861
  hypo
gcttctgctggagggccgtctcccggctcagacgctcctgggggctcagctgggccagcgggccaaactgagc

SEQ ID NO: 23531 - DNA, 41 bp, Homo sapiens
  chr17:40371918-40371959
  hypo
gagaagcccactcacccgttctggagcgagaccctcctggg

SEQ ID NO: 23532 - DNA, 31 bp, Homo sapiens
  chr17:40371968-40371999
  hypo
tgcattaagggcaagtcggggttcctgacag

SEQ ID NO: 23533 - DNA, 89 bp, Homo sapiens
  chr17:40372018-40372107
  hypo
tgggtgccccaggaggcgcctctgggccctgctcgccagcctcctgactctgagccgtcccctctgggggcacacgggtgctggggcag

SEQ ID NO: 23534 - DNA, 82 bp, Homo sapiens
  chr17:40372229-40372311
  hypo
gtgaacctgggcaaatcgctttcctttcctgtgccttggcttccccacgtgtaaaacgggagattctcggcacctgcctcag

SEQ ID NO: 23535 - DNA, 31 bp, Homo sapiens
  chr17:40372376-40372407
  hypo
agctctgtgtgaggttcgtgcttcttggtta

SEQ ID NO: 23536 - DNA, 31 bp, Homo sapiens
  chr17:40375374-40375405
  hypo
acaatgtgcctccaccgcgcctcaccttgga

SEQ ID NO: 23537 - DNA, 55 bp, Homo sapiens
  chr17:40375468-40375523
  hypo
cattctctgtgtcctgcgtgaccagtcgcagctcctcaaacgtctggttgatctg

SEQ ID NO: 23538 - DNA, 31 bp, Homo sapiens
  chr17:40376747-40376778
  hypo
gtaagaaaagacttcccgactgccctcccca

SEQ ID NO: 23539 - DNA, 22 bp, Homo sapiens
  chr17:40381601-40381623
  hypo
aagatttggctgggcccggtgg

SEQ ID NO: 23540 - DNA, 21 bp, Homo sapiens
  chr17:40381862-40381883
  hypo
acagagcgagactccatctca

SEQ ID NO: 23541 - DNA, 23 bp, Homo sapiens
  chr17:40387506-40387529
  hypo
ttttttttttttgagacggagtc

SEQ ID NO: 23542 - DNA, 82 bp, Homo sapiens
  chr17:40387768-40387850
  hypo
caggcgtgagccaccacgctcggccaggagcacatcttattcacgactgtgtccccagtgtctagtacggtggcttgcctat

SEQ ID NO: 23543 - DNA, 27 bp, Homo sapiens
  chr17:40408578-40408605
  hypo
taagatagactacattcggccaggcac

SEQ ID NO: 23544 - DNA, 31 bp, Homo sapiens; identical to SEQ ID NO: 5941
  chr17:40429066-40429097
  hypo

SEQ ID NO: 23545 - DNA, 30 bp, Homo sapiens
  chr17:40445941-40445971
  hypo
gatagagagggccaggcgtggtggctcaca

SEQ ID NO: 23546 - DNA, 31 bp, Homo sapiens
  chr17:40447591-40447622
  hypo
cccatcctctcttccccgagttatttccatt

SEQ ID NO: 23547 - DNA, 50 bp, Homo sapiens
  chr17:40447630-40447680
  hypo
ctccagtgcagctctccggctgggatcctggttgacgccatgtcccagaa

SEQ ID NO: 23548 - DNA, 41 bp, Homo sapiens
  chr17:40447698-40447739
  hypo
gacatttgaggagctgcgactggtcacgcaggacacagaga

SEQ ID NO: 23549 - DNA, 31 bp, Homo sapiens
  chr17:40453234-40453265
  hypo
agagccctttcccctgcgccaacccctcatc

SEQ ID NO: 23550 - DNA, 61 bp, Homo sapiens
  chr17:40453339-40453400
  hypo
ccaagtttgcagccaccgtacgcctgctggtgggcgggaagctgaacgtgcacatgaatcc

SEQ ID NO: 23551 - DNA, 31 bp, Homo sapiens
  chr17:40453898-40453929
  hypo
gtgctaggctagatgccgtggcttacccctg

SEQ ID NO: 23552 - DNA, 31 bp, Homo sapiens
  chr17:40456104-40456135
  hypo
acatcaatcttggtatcgaggaatttctaat

SEQ ID NO: 23553 - DNA, 56 bp, Homo sapiens
  chr17:40456201-40456257
  hypo
cagtaacccagaaagacgccaagaaacactcttaggggatacggggcaggggctgc

SEQ ID NO: 23554 - DNA, 45 bp, Homo sapiens
  chr17:40456259-40456304
  hypo
gcagggctgacctgagcgaagaccccagcccgaggtgtggacagg

SEQ ID NO: 23555 - DNA, 54 bp, Homo sapiens
  chr17:40456376-40456430
  hypo
tcctgaacaactgctgcgtgatggagtaccaccaagccacgggcaccctcagtg

SEQ ID NO: 23556 - DNA, 44 bp, Homo sapiens
  chr17:40456438-40456482
  hypo
aggaacatggtgaggacggggcccaccctcggagggcaggtctg

SEQ ID NO: 23557 - DNA, 31 bp, Homo sapiens
  chr17:40456492-40456523
  hypo
agtccttgtaagcagccgccatctccctgtt

SEQ ID NO: 23558 - DNA, 42 bp, Homo sapiens
  chr17:40458358-40458400
  hypo
tgaccaaggagaacctcgtgttcctggcgcagaaactgttca

SEQ ID NO: 23559 - DNA, 31 bp, Homo sapiens
  chr17:40458424-40458455
  hypo
actacagtggcctgtccgtgtcctggtccca

SEQ ID NO: 23560 - DNA, 48 bp, Homo sapiens
  chr17:40458470-40458518
  hypo
gggcccagctgccagccgcccaccagggcccaccggggtctgttgctc

SEQ ID NO: 23561 - DNA, 31 bp, Homo sapiens
  chr17:40459506-40459537
  hypo
aatgatgggtaaggaacgggggctgcagggt

SEQ ID NO: 23562 - DNA, 31 bp, Homo sapiens
  chr17:40459538-40459569
  hypo
aggggccagctgtgggcgcagagagactgtg

SEQ ID NO: 23563 - DNA, 43 bp, Homo sapiens
  chr17:40459571-40459614
  hypo
tgtggcccagtggtgacgctcaatgctccgtgcacccagggcc

SEQ ID NO: 23564 - DNA, 31 bp, Homo sapiens
  chr17:40461335-40461366
  hypo
cccaagtcagctgccccggcctccctggtgg

SEQ ID NO: 23565 - DNA, 36 bp, Homo sapiens
  chr17:40477853-40477889
  hypo
acaggcgtgagccaccgcgcccggccaatcaatttc

SEQ ID NO: 23566 - DNA, 21 bp, Homo sapiens
  chr17:40548835-40548856
  hypo
ccgcctcggcctcccaaacgt

SEQ ID NO: 23567 - DNA, 54 bp, Homo sapiens; identical to SEQ ID NO: 5947
  chr17:40575291-40575345
  hypo

SEQ ID NO: 23568 - DNA, 31 bp, Homo sapiens; identical to SEQ ID NO: 5948
  chr17:40575351-40575382
  hypo

SEQ ID NO: 23569 - DNA, 37 bp, Homo sapiens
  chr17:40699455-40699492
  hypo
ggtgagtggcagggaccgggcccggagctccagattc

SEQ ID NO: 23570 - DNA, 31 bp, Homo sapiens
  chr17:40705997-40706028
  hypo
cctggccctctctgcccggctcacattagct

SEQ ID NO: 23571 - DNA, 2 bp, Homo sapiens
  chr17:40743621-40743623
  hypo
tg

SEQ ID NO: 23572 - DNA, 31 bp, Homo sapiens
  chr17:40743624-40743655
  hypo
aggggttactaataggcgttagccactgcgc

SEQ ID NO: 23573 - DNA, 56 bp, Homo sapiens
  chr17:40897647-40897703
  hypo
cttcttctttttttgccggggggcgaggctggacggagtctcgctttgttacttac

SEQ ID NO: 23574 - DNA, 36 bp, Homo sapiens
  chr17:40939516-40939552
  hypo
ccagcccttccttttccgccacgccagctactcatc

SEQ ID NO: 23575 - DNA, 40 bp, Homo sapiens; identical to SEQ ID NO: 5949
  chr17:40950713-40950753
  hypo

SEQ ID NO: 23576 - DNA, 49 bp, Homo sapiens; identical to SEQ ID NO: 5950
  chr17:40950807-40950856
  hypo

SEQ ID NO: 23577 - DNA, 31 bp, Homo sapiens
  chr17:40975646-40975677
  hypo
ctttcctaggttcacacgatgagtttgtggc

SEQ ID NO: 23578 - DNA, 41 bp, Homo sapiens
  chr17:41131473-41131514
  hypo
tgaagctgaggagatgcggaatactccgtgtggggacatta

SEQ ID NO: 23579 - DNA, 30 bp, Homo sapiens
  chr17:41320635-41320665
  hypo
acaagagcgaagctccgtctcaaaaataaa

SEQ ID NO: 23580 - DNA, 31 bp, Homo sapiens
  chr17:41389668-41389699
  hypo
acagacagcaacagctcgtcatggaaagtgt

SEQ ID NO: 23581 - DNA, 29 bp, Homo sapiens
  chr17:41389787-41389816
  hypo
ttttttttttttgagacggagtctcgctc

SEQ ID NO: 23582 - DNA, 44 bp, Homo sapiens
  chr17:41399426-41399470
  hypo
gccgagatcgcgccattcgactccaacacgcgaatcaagagcaa

SEQ ID NO: 23583 - DNA, 31 bp, Homo sapiens
  chr17:41451802-41451833
  hypo
tattgtgggatcttagcggtcttacttcttc

SEQ ID NO: 23584 - DNA, 88 bp, Homo sapiens
  chr17:41456126-41456214
  hypo
caagacagtgaccaagcgaaatgggcgtgggcgtcacgaggtgtctgcggaaggaagttggaggagagtggtccgagctcttttgagg

SEQ ID NO: 23585 - DNA, 31 bp, Homo sapiens
  chr17:41456218-41456249
  hypo
ccattactgtgaagagcggagcttcagcggt

SEQ ID NO: 23586 - DNA, 43 bp, Homo sapiens
  chr17:41570141-41570184
  hypo
gcggagacaccgatcccgctctcgatcacgttccaggacccgg

SEQ ID NO: 23587 - DNA, 31 bp, Homo sapiens
  chr17:41634686-41634717
  hypo
aaggagcccgccatctcgtgatggcattata

SEQ ID NO: 23588 - DNA, 31 bp, Homo sapiens
  chr17:41646432-41646463
  hypo
tgggggcctgtgtgggcgcacgtgtgtagtg

SEQ ID NO: 23589 - DNA, 42 bp, Homo sapiens
  chr17:41692629-41692671
  hypo
aatcccagacctgtgtcgccgcatgatcgcaagggctctctg

SEQ ID NO: 23590 - DNA, 31 bp, Homo sapiens; identical to SEQ ID NO: 5951
  chr17:41723871-41723902
  hypo

SEQ ID NO: 23591 - DNA, 22 bp, Homo sapiens
  chr17:41728379-41728401
  hypo
ttctggaatgaaaatgcgtaat

SEQ ID NO: 23592 - DNA, 31 bp, Homo sapiens
  chr17:41729456-41729487
  hypo
gctctaatcaggaggccggggatgcccagag

SEQ ID NO: 23593 - DNA, 31 bp, Homo sapiens
  chr17:41824096-41824127
  hypo
cgtcaggagacaaattcgggcatcttcctta

SEQ ID NO: 23594 - DNA, 42 bp, Homo sapiens
  chr17:41895346-41895388
  hypo
agcctgaatcctccctcgccctaaccccgggccctccctgga

SEQ ID NO: 23595 - DNA, 31 bp, Homo sapiens
  chr17:41907276-41907307
  hypo
cactagtgctgaggatcgctccctcagtctc

SEQ ID NO: 23596 - DNA, 58 bp, Homo sapiens
  chr17:42019593-42019651
  hypo
cgagtgtgcacacacacgtgcagtcagcagacggctcttctagcgtgacaggtctgtc

SEQ ID NO: 23597 - DNA, 139 bp, Homo sapiens; identical to SEQ ID NO: 5961
  chr17:42092278-42092417
  hypo

SEQ ID NO: 23598 - DNA, 31 bp, Homo sapiens
  chr17:42142884-42142915
  hypo
acataaaaagggaagccgtggcacatttatc

SEQ ID NO: 23599 - DNA, 31 bp, Homo sapiens
  chr17:42222428-42222459
  hypo
ttagtcctttcccagccgtagcaaaaacaaa

SEQ ID NO: 23600 - DNA, 59 bp, Homo sapiens; identical to SEQ ID NO: 5963
  chr17:42287943-42288002
  hypo

SEQ ID NO: 23601 - DNA, 31 bp, Homo sapiens; identical to SEQ ID NO: 5964
  chr17:42288062-42288093
  hypo

SEQ ID NO: 23602 - DNA, 27 bp, Homo sapiens
  chr17:42301913-42301940
  hypo
agccactgcgcccggcctgtcccttgt

SEQ ID NO: 23603 - DNA, 31 bp, Homo sapiens
  chr17:42301998-42302029
  hypo
acttttttttttgagacggagctttgctctt

SEQ ID NO: 23604 - DNA, 31 bp, Homo sapiens
  chr17:42304494-42304525
  hypo
ggcctaggcagggctgcgcctgtaaaaggta

SEQ ID NO: 23605 - DNA, 23 bp, Homo sapiens
  chr17:42318151-42318174
  hypo
aaaataagaccaggcacggtggc

SEQ ID NO: 23606 - DNA, 31 bp, Homo sapiens
  chr17:42338003-42338034
  hypo
cttggtgaagactctacgcagctctaggagg

SEQ ID NO: 23607 - DNA, 31 bp, Homo sapiens
  chr17:42395127-42395158
  hypo
ccatgagggcagggaccgtgtcttgtccgtt

SEQ ID NO: 23608 - DNA, 53 bp, Homo sapiens
  chr17:42395459-42395512
  hypo
ccagggaaggaccccacgccctccatgctgggcctctgcggctccctggcctc

SEQ ID NO: 23609 - DNA, 71 bp, Homo sapiens
  chr17:42395519-42395590
  hypo
agctgcaagtccctggcgagcttcaaatccaacgagtgcctggtgagcgacagtcccgagggcagcccagc

SEQ ID NO: 23610 - DNA, 46 bp, Homo sapiens
  chr17:42401271-42401317
  hypo
cactgggattacaggcgtgagccaccgcacccggcccactgtgaga

SEQ ID NO: 23611 - DNA, 145 bp, Homo sapiens; identical to SEQ ID NO: 5965
  chr17:42402751-42402896
  hypo

SEQ ID NO: 23612 - DNA, 89 bp, Homo sapiens; identical to SEQ ID NO: 5966
  chr17:42402899-42402988
  hypo

SEQ ID NO: 23613 - DNA, 79 bp, Homo sapiens
  chr17:42427827-42427906
  hypo
agggtgcactgctgtccgcacggtgccttctgcgacctggttcacacccgctgcatcacacccacgggcacccaccccc

SEQ ID NO: 23614 - DNA, 31 bp, Homo sapiens
  chr17:42427966-42427997
  hypo
aggccaggggctggggcggggcctcattgac

SEQ ID NO: 23615 - DNA, 31 bp, Homo sapiens
  chr17:42662278-42662309
  hypo
taagaaaaatataggccgggcatggtggctc

SEQ ID NO: 23616 - DNA, 31 bp, Homo sapiens
  chr17:42848907-42848938
  hypo
cccggcctcatgccagcgttctgctcactgt

SEQ ID NO: 23617 - DNA, 74 bp, Homo sapiens; identical to SEQ ID NO: 5967
  chr17:42907095-42907169
  hypo

SEQ ID NO: 23618 - DNA, 78 bp, Homo sapiens; identical to SEQ ID NO: 5968
  chr17:42907237-42907315
  hypo

SEQ ID NO: 23619 - DNA, 42 bp, Homo sapiens; identical to SEQ ID NO: 5969
  chr17:42907748-42907790
  hypo

SEQ ID NO: 23620 - DNA, 31 bp, Homo sapiens
  chr17:42963909-42963940
  hypo
ggtttcaatttcactccgcacagcccatgtc

SEQ ID NO: 23621 - DNA, 64 bp, Homo sapiens
  chr17:42981555-42981619
  hypo
caggcctgtacttctgcggcacccgcaagggggactacttttacgcctacgatgtggacatcca

SEQ ID NO: 23622 - DNA, 31 bp, Homo sapiens
  chr17:42981928-42981959
  hypo
gaagacaaagaccatccgggagggcgtgctg

SEQ ID NO: 23623 - DNA, 31 bp, Homo sapiens
  chr17:42999485-42999516
  hypo
caggtgtgagccaccacgctggccctcacat

SEQ ID NO: 23624 - DNA, 31 bp, Homo sapiens
  chr17:43121670-43121701
  hypo
cccttctctgcccaatcgtccccccatcaga

SEQ ID NO: 23625 - DNA, 31 bp, Homo sapiens
  chr17:43180537-43180568
  hypo
cacccccctgagtggccgggttcccagggct

SEQ ID NO: 23626 - DNA, 48 bp, Homo sapiens
  chr17:43193913-43193961
  hypo
agccacagaggtggcacgagcagtgcggggaggcggactcccaccaga

SEQ ID NO: 23627 - DNA, 54 bp, Homo sapiens
  chr17:43196205-43196259
  hypo
gaatgagctgctgggcgcgggccagtgtggcgccctcctcgccctggtcctcca

SEQ ID NO: 23628 - DNA, 31 bp, Homo sapiens; identical to SEQ ID NO: 5970
  chr17:43209588-43209619
  hypo

SEQ ID NO: 23629 - DNA, 33 bp, Homo sapiens
  chr17:43296202-43296235
  hypo
ttacaggcgtgagccaccgcgcccggcctctcg

SEQ ID NO: 23630 - DNA, 163 bp, Homo sapiens; identical to SEQ ID NO: 5972
  chr17:43298738-43298901
  hypo

SEQ ID NO: 23631 - DNA, 121 bp, Homo sapiens
  chr17:43321226-43321347
  hypo
gcgcagcctcatcacccgctttgagcgggagcagcggccaatggaggagctgtcagaggaggaccgcttcatgctatgcttcagccgcatcccgcgcctgccggagcgcatgaccacactc

SEQ ID NO: 23632 - DNA, 434 bp, Homo sapiens; identical to SEQ ID NO: 5975
  chr17:43324812-43325246
  hypo

SEQ ID NO: 23633 - DNA, 31 bp, Homo sapiens
  chr17:44861962-44861993
  hypo
gaaaggtgggctctcccgaaacctcagcccc

SEQ ID NO: 23634 - DNA, 31 bp, Homo sapiens
  chr17:44949746-44949777
  hypo
gggacgggacctccagcgggtcagcctgctg

SEQ ID NO: 23635 - DNA, 37 bp, Homo sapiens
  chr17:45022238-45022275
  hypo
tactggcataagccaccgcagccggccttaattttta

SEQ ID NO: 23636 - DNA, 54 bp, Homo sapiens; identical to SEQ ID NO: 5979
  chr17:45810487-45810541
  hypo

SEQ ID NO: 23637 - DNA, 266 bp, Homo sapiens; identical to SEQ ID NO: 5980
  chr17:45810545-45810811
  hypo

SEQ ID NO: 23638 - DNA, 31 bp, Homo sapiens; identical to SEQ ID NO: 5981
  chr17:45810956-45810987
  hypo

SEQ ID NO: 23639 - DNA, 68 bp, Homo sapiens
  chr17:45970934-45971002
  hypo
ttcacaccctgtcctccgccccgtgtgcgcacactttttttttttcacctctgcggtcttcatgatgg

SEQ ID NO: 23640 - DNA, 31 bp, Homo sapiens
  chr17:45971017-45971048
  hypo
agaagcatagctaccccgtttttctcccaga

SEQ ID NO: 23641 - DNA, 45 bp, Homo sapiens; identical to SEQ ID NO: 5985
  chr17:46124900-46124945
  hypo

SEQ ID NO: 23642 - DNA, 15 bp, Homo sapiens
  chr17:46124954-46124969
  hypo
ctaccatgacaaaaa

SEQ ID NO: 23643 - DNA, 109 bp, Homo sapiens; identical to SEQ ID NO: 5987
  chr17:46125006-46125115
  hypo

SEQ ID NO: 23644 - DNA, 126 bp, Homo sapiens; identical to SEQ ID NO: 5988
  chr17:46125117-46125243
  hypo

SEQ ID NO: 23645 - DNA, 58 bp, Homo sapiens
  chr17:46176825-46176883
  hypo
tcaccacagggaaaaccgtaaacgacttcaggtcctccactcccgtgaagcttcatta

SEQ ID NO: 23646 - DNA, 31 bp, Homo sapiens
  chr17:46177139-46177170
  hypo
ttgcgttaaaccaacacgtctaaatgtaaca

SEQ ID NO: 23647 - DNA, 7 bp, Homo sapiens
  chr17:46177211-46177218
  hypo
gtaaaat

SEQ ID NO: 23648 - DNA, 38 bp, Homo sapiens
  chr17:46223565-46223603
  hypo
aaggagaggccggagacggtggctcacgcctgtaatcc

SEQ ID NO: 23649 - DNA, 31 bp, Homo sapiens
  chr17:46872246-46872277
  hypo
ctagcagtcacagctgcgggacctggggcaa

SEQ ID NO: 23650 - DNA, 31 bp, Homo sapiens
  chr17:47126022-47126053
  hypo
ggccacggactggtaccgggccacacagcag

SEQ ID NO: 23651 - DNA, 20 bp, Homo sapiens
  chr17:47162036-47162056
  hypo
ttttttttttttgagacgga

SEQ ID NO: 23652 - DNA, 31 bp, Homo sapiens; identical to SEQ ID NO: 6005
  chr17:47307938-47307969
  hypo

SEQ ID NO: 23653 - DNA, 18 bp, Homo sapiens
  chr17:47813624-47813642
  hypo
ttttttttttttgagacg

SEQ ID NO: 23654 - DNA, 31 bp, Homo sapiens
  chr17:48435304-48435335
  hypo
tgaacctcatccctgccgtattgtccccaat

SEQ ID NO: 23655 - DNA, 47 bp, Homo sapiens
  chr17:48539229-48539276
  hypo
tcagacacaaacctggcgtgagtgtgcagggacgggggcatgtgtgt

SEQ ID NO: 23656 - DNA, 31 bp, Homo sapiens
  chr17:48565302-48565333
  hypo
gacacctcataaggcccgtgcagaggagctg

SEQ ID NO: 23657 - DNA, 31 bp, Homo sapiens
  chr17:48565337-48565368
  hypo
ggagccagggccaagtcggggtggcacagat

SEQ ID NO: 23658 - DNA, 31 bp, Homo sapiens
  chr17:48612097-48612128
  hypo
aggcatgttttcaaagcgtggggctgctttg

SEQ ID NO: 23659 - DNA, 65 bp, Homo sapiens
  chr17:48612130-48612195
  hypo
ctgagcccagcactggcggggctggggtggaaggagcgtggaatcgggtgcgagaggacagtctc

SEQ ID NO: 23660 - DNA, 54 bp, Homo sapiens
  chr17:48612222-48612276
  hypo
gggaccagttggggcacgggctgggatggagggtggagccgaaaggtgtttggt

SEQ ID NO: 23661 - DNA, 31 bp, Homo sapiens
  chr17:48612277-48612308
  hypo
ggtgggggacagttcacgggtgaagtggagg

SEQ ID NO: 23662 - DNA, 37 bp, Homo sapiens
  chr17:48613865-48613902
  hypo
agccctccacctccggcgggggcgagggccacccacc

SEQ ID NO: 23663 - DNA, 48 bp, Homo sapiens
  chr17:48613905-48613953
  hypo
aagtctccagccatgacgacctccgcactccggcgccaggtgaagaac

SEQ ID NO: 23664 - DNA, 195 bp, Homo sapiens; identical to SEQ ID NO: 6015
  chr17:48619095-48619290
  hypo

SEQ ID NO: 23665 - DNA, 510 bp, Homo sapiens; identical to SEQ ID NO: 6016
  chr17:48619346-48619856
  hypo

SEQ ID NO: 23666 - DNA, 43 bp, Homo sapiens
  chr17:48620599-48620642
  hypo
gccctctcccttgcttcgccaaggctagcgagaaactcagtct

SEQ ID NO: 23667 - DNA, 31 bp, Homo sapiens
  chr17:48620644-48620675
  hypo
gccacacaggaggaatcggaccccttctggg

SEQ ID NO: 23668 - DNA, 31 bp, Homo sapiens
  chr17:48668917-48668948
  hypo
tgaagaccatggacaacgtggccaccttctg

SEQ ID NO: 23669 - DNA, 31 bp, Homo sapiens
  chr17:48690339-48690370
  hypo
tgcttgcctgcagagccgaggtccagagagc

SEQ ID NO: 23670 - DNA, 38 bp, Homo sapiens
  chr17:48890602-48890640
  hypo
ggtcaacaacccagtccgaaggtcgcagaagatttcct

SEQ ID NO: 23671 - DNA, 31 bp, Homo sapiens
  chr17:48970894-48970925
  hypo
gttgctttgttgcaggcgctggggcaacgaa

SEQ ID NO: 23672 - DNA, 31 bp, Homo sapiens
  chr17:49015437-49015468
  hypo
atttgaaattcttctgcgtgggtttttttgt

SEQ ID NO: 23673 - DNA, 31 bp, Homo sapiens; identical to SEQ ID NO: 6021
  chr17:49027999-49028030
  hypo

SEQ ID NO: 23674 - DNA, 31 bp, Homo sapiens; identical to SEQ ID NO: 6022
  chr17:49028084-49028115
  hypo

SEQ ID NO: 23675 - DNA, 31 bp, Homo sapiens
  chr17:49200570-49200601
  hypo
gcaataaaaagaaagtcgttggaggggaggg

SEQ ID NO: 23676 - DNA, 117 bp, Homo sapiens
  chr17:49229458-49229575
  hypo
gcgggaagctgagtcacgagaatcgcttgaacccggatggcggagtttgcaatgaaccgacatcgtgcaactgcgctccggcctgggcgccaaagcgatactcggtctcaaaaagaa

SEQ ID NO: 23677 - DNA, 12 bp, Homo sapiens
  chr17:49229627-49229639
  hypo
tttatttttttg

SEQ ID NO: 23678 - DNA, 21 bp, Homo sapiens
  chr17:53002975-53002996
  hypo
atcctgaggccagatgcgatg

SEQ ID NO: 23679 - DNA, 18 bp, Homo sapiens
  chr17:53021513-53021531
  hypo
gaattcaagaagtggccg

SEQ ID NO: 23680 - DNA, 31 bp, Homo sapiens; identical to SEQ ID NO: 6028
  chr17:53342251-53342282
  hypo

SEQ ID NO: 23681 - DNA, 38 bp, Homo sapiens; identical to SEQ ID NO: 6029
  chr17:53342388-53342426
  hypo

SEQ ID NO: 23682 - DNA, 39 bp, Homo sapiens
  chr17:53479135-53479174
  hypo
agaaaatgttttctgccggccgggcacggtggctcatgc

SEQ ID NO: 23683 - DNA, 19 bp, Homo sapiens
  chr17:55092693-55092712
  hypo
ttttttttttttgagacgg

SEQ ID NO: 23684 - DNA, 45 bp, Homo sapiens
  chr17:55184790-55184835
  hypo
cttcccaaggaactagcgccaagttgggctcgctgattaacatta

SEQ ID NO: 23685 - DNA, 20 bp, Homo sapiens
  chr17:55205466-55205486
  hypo
ggaactgtaattttatcgct

SEQ ID NO: 23686 - DNA, 31 bp, Homo sapiens
  chr17:55364198-55364229
  hypo
ttcttccaggagagagcgggcagtgtgggag

SEQ ID NO: 23687 - DNA, 31 bp, Homo sapiens
  chr17:55664888-55664919
  hypo
acctgagatcactccccgccccccacccaac

SEQ ID NO: 23688 - DNA, 31 bp, Homo sapiens
  chr17:55931430-55931461
  hypo
tctttgtgacaatgcccgtatttaaatagtg

SEQ ID NO: 23689 - DNA, 31 bp, Homo sapiens
  chr17:55962007-55962038
  hypo
ctgcacacccttcccccggcttcactcttcc

SEQ ID NO: 23690 - DNA, 31 bp, Homo sapiens
  chr17:55965542-55965573
  hypo
cgtgagccactgcgcccggcattattttttc

SEQ ID NO: 23691 - DNA, 29 bp, Homo sapiens
  chr17:56001755-56001784
  hypo
cgccgggcctcttccggcttctttacgtt

SEQ ID NO: 23692 - DNA, 31 bp, Homo sapiens
  chr17:56020028-56020059
  hypo
cgtgagccaccacacccggccaaattgtcta

SEQ ID NO: 23693 - DNA, 153 bp, Homo sapiens; identical to SEQ ID NO: 6030
  chr17:56032159-56032312
  hypo

SEQ ID NO: 23694 - DNA, 63 bp, Homo sapiens; identical to SEQ ID NO: 6031
  chr17:56032482-56032545
  hypo

SEQ ID NO: 23695 - DNA, 31 bp, Homo sapiens
  chr17:56037719-56037750
  hypo
aggaaacttgccacctcgaactcctgggctc

SEQ ID NO: 23696 - DNA, 87 bp, Homo sapiens; identical to SEQ ID NO: 6034
  chr17:56296472-56296559
  hypo

SEQ ID NO: 23697 - DNA, 34 bp, Homo sapiens; identical to SEQ ID NO: 6035
  chr17:56296611-56296645
  hypo

SEQ ID NO: 23698 - DNA, 31 bp, Homo sapiens
  chr17:56388456-56388487
  hypo
ccgactccccgtggggcgacatggtgcgcac

SEQ ID NO: 23699 - DNA, 31 bp, Homo sapiens
  chr17:56389452-56389483
  hypo
gccaagttgctattgccgggcacccaggtga

SEQ ID NO: 23700 - DNA, 40 bp, Homo sapiens
  chr17:56389490-56389530
  hypo
agatgtggctgtcaaccgatggacccgcagctggctgggc

SEQ ID NO: 23701 - DNA, 31 bp, Homo sapiens; identical to SEQ ID NO: 6036
  chr17:56401799-56401830
  hypo

SEQ ID NO: 23702 - DNA, 41 bp, Homo sapiens; identical to SEQ ID NO: 6037
  chr17:56402169-56402210
  hypo

SEQ ID NO: 23703 - DNA, 93 bp, Homo sapiens; identical to SEQ ID NO: 6038
  chr17:56402236-56402329
  hypo

SEQ ID NO: 23704 - DNA, 29 bp, Homo sapiens
  chr17:56795651-56795680
  hypo
cctgggctgtttctcggttttcttacata

SEQ ID NO: 23705 - DNA, 60 bp, Homo sapiens; identical to SEQ ID NO: 6039
  chr17:56833161-56833221
  hypo

SEQ ID NO: 23706 - DNA, 40 bp, Homo sapiens; identical to SEQ ID NO: 6040
  chr17:56833222-56833262
  hypo

SEQ ID NO: 23707 - DNA, 458 bp, Homo sapiens; identical to SEQ ID NO: 6041
  chr17:56833340-56833798
  hypo

SEQ ID NO: 23708 - DNA, 68 bp, Homo sapiens; identical to SEQ ID NO: 6042
  chr17:56833839-56833907
  hypo

SEQ ID NO: 23709 - DNA, 86 bp, Homo sapiens; identical to SEQ ID NO: 6043
  chr17:56833914-56834000
  hypo

SEQ ID NO: 23710 - DNA, 142 bp, Homo sapiens; identical to SEQ ID NO: 6044
  chr17:56834019-56834161
  hypo

SEQ ID NO: 23711 - DNA, 23 bp, Homo sapiens
  chr17:57297041-57297064
  hypo
accgcgcccggctgaatcaggat

SEQ ID NO: 23712 - DNA, 31 bp, Homo sapiens
  chr17:57297098-57297129
  hypo
gagatatggtcttctccgtaaaatttctccc

SEQ ID NO: 23713 - DNA, 31 bp, Homo sapiens
  chr17:57297160-57297191
  hypo
gaagtgtgtggcttttcgtgtgttagcagtt

SEQ ID NO: 23714 - DNA, 31 bp, Homo sapiens
  chr17:57398859-57398890
  hypo
atttactcagaagcaacgtagctaaaagagc

SEQ ID NO: 23715 - DNA, 19 bp, Homo sapiens
  chr17:57402605-57402624
  hypo
ttttgagacagagtctcgc

SEQ ID NO: 23716 - DNA, 19 bp, Homo sapiens
  chr17:57402743-57402762
  hypo
accacgccccaccattact

SEQ ID NO: 23717 - DNA, 40 bp, Homo sapiens
  chr17:57476110-57476150
  hypo
tctcctccaagtaggccgaccttctcggaaaattcaccct

SEQ ID NO: 23718 - DNA, 31 bp, Homo sapiens
  chr17:57476228-57476259
  hypo
gagcttttcagaatagcgtctgcagcagaac

SEQ ID NO: 23719 - DNA, 31 bp, Homo sapiens
  chr17:57476260-57476291
  hypo
agtttccattcagagcgcgtccttggtggaa

SEQ ID NO: 23720 - DNA, 31 bp, Homo sapiens
  chr17:57761794-57761825
  hypo
tttctttgaggctcagcgcatgcagatctgt

SEQ ID NO: 23721 - DNA, 31 bp, Homo sapiens
  chr17:57787535-57787566
  hypo
agacagagccagactccgtctcaaaaaaaaa

SEQ ID NO: 23722 - DNA, 42 bp, Homo sapiens
  chr17:57879948-57879990
  hypo
tttcatttttttatgtcgcccaggctgtagtgcagtggcacg

SEQ ID NO: 23723 - DNA, 31 bp, Homo sapiens
  chr17:58134321-58134352
  hypo
cttggttttacctgctcgctcctcacagtca

SEQ ID NO: 23724 - DNA, 42 bp, Homo sapiens
  chr17:59395454-59395496
  hypo
gctacatgccgctcctcggctcctccccgccaccatcacacc

SEQ ID NO: 23725 - DNA, 96 bp, Homo sapiens
  chr17:59434279-59434375
  hypo
caggctcacctgcccccggctgagtcaggaccgagcacaggacttgacagaggaggcatcgcagcaaggtcaggtgcctcccgtgcttcttatggg

SEQ ID NO: 23726 - DNA, 31 bp, Homo sapiens
  chr17:59434411-59434442
  hypo
gcatttttttgtctctcgactttttctttct

SEQ ID NO: 23727 - DNA, 31 bp, Homo sapiens
  chr17:59445736-59445767
  hypo
tgagggcttcgggctgcggcacatgtcctcc

SEQ ID NO: 23728 - DNA, 18 bp, Homo sapiens
  chr17:59568974-59568992
  hypo
atgacttctaccaaggcg

SEQ ID NO: 23729 - DNA, 31 bp, Homo sapiens
  chr17:59570612-59570643
  hypo
tgggtctgggaaatgacgcagctccatgagg

SEQ ID NO: 23730 - DNA, 32 bp, Homo sapiens
  chr17:60006123-60006155
  hypo
aaaataaagtcagagccgggcgtggtgtctca

SEQ ID NO: 23731 - DNA, 33 bp, Homo sapiens
  chr17:60084914-60084947
  hypo
tgagttagaccttggccgggcgtggtggttcac

SEQ ID NO: 23732 - DNA, 27 bp, Homo sapiens
  chr17:60263516-60263543
  hypo
cgtgagccaccacgcccagccaaaact

SEQ ID NO: 23733 - DNA, 3 bp, Homo sapiens
  chr17:60517094-60517097
  hypo
aaa

SEQ ID NO: 23734 - DNA, 31 bp, Homo sapiens
  chr17:60517103-60517134
  hypo
gctgtctctctccttacgaatgttttttttt

SEQ ID NO: 23735 - DNA, 22 bp, Homo sapiens
  chr17:60564375-60564397
  hypo
tgggcgcagtggcttacgcctg

SEQ ID NO: 23736 - DNA, 31 bp, Homo sapiens
  chr17:60750843-60750874
  hypo
caataatgtaaaaggacgcctttcctttttt

SEQ ID NO: 23737 - DNA, 31 bp, Homo sapiens
  chr17:60754816-60754847
  hypo
ctcggacaccaaactccggtattgctataag

SEQ ID NO: 23738 - DNA, 44 bp, Homo sapiens; identical to SEQ ID NO: 6053
  chr17:60781449-60781493
  hypo

SEQ ID NO: 23739 - DNA, 62 bp, Homo sapiens; identical to SEQ ID NO: 6054
  chr17:60781523-60781585
  hypo

SEQ ID NO: 23740 - DNA, 31 bp, Homo sapiens
  chr17:60793412-60793443
  hypo
ctcctctctttccttccgctgttaaacatct

SEQ ID NO: 23741 - DNA, 56 bp, Homo sapiens
  chr17:60793465-60793521
  hypo
ggttcagagagcaagtcggagtcccacagctgttcccgcagcggcctgcatggtcc

SEQ ID NO: 23742 - DNA, 31 bp, Homo sapiens
  chr17:60793547-60793578
  hypo
tgctggcttcagtcttcgctgctggtcggta

SEQ ID NO: 23743 - DNA, 83 bp, Homo sapiens
  chr17:61527569-61527652
  hypo
tgagggtcagggaaggcgtattgggtcatgacagaattatcgagccagaagatgctcaggtgttaacccggcagagatagtca

SEQ ID NO: 23744 - DNA, 31 bp, Homo sapiens
  chr17:61527715-61527746
  hypo
gctaacctgcaaccctcggggctcccaggct

SEQ ID NO: 23745 - DNA, 31 bp, Homo sapiens
  chr17:61527749-61527780
  hypo
tttcatgaggatttgccggagccagagtaat

SEQ ID NO: 23746 - DNA, 31 bp, Homo sapiens
  chr17:61529704-61529735
  hypo
gggcagaggttgaagacgtgaggtgtgtatc

SEQ ID NO: 23747 - DNA, 43 bp, Homo sapiens
  chr17:61677496-61677539
  hypo
tgggattacaggcgtgagccaccgcgcccggctgtcctgcttc

SEQ ID NO: 23748 - DNA, 31 bp, Homo sapiens
  chr17:61700817-61700848
  hypo
cattatttttttcttgcggtatccctgaaat

SEQ ID NO: 23749 - DNA, 43 bp, Homo sapiens; identical to SEQ ID NO: 6060
  chr17:61777944-61777987
  hypo

SEQ ID NO: 23750 - DNA, 31 bp, Homo sapiens; identical to SEQ ID NO: 6061
  chr17:61777988-61778019
  hypo

SEQ ID NO: 23751 - DNA, 5 bp, Homo sapiens
  chr17:61778068-61778073
  hypo
cgccc

SEQ ID NO: 23752 - DNA, 31 bp, Homo sapiens
  chr17:61780924-61780955
  hypo
ccctggctggagaatgcgcacagtttgcaga

SEQ ID NO: 23753 - DNA, 31 bp, Homo sapiens
  chr17:61864839-61864870
  hypo
tactcattcagtgttacgtcctactgggctg

SEQ ID NO: 23754 - DNA, 33 bp, Homo sapiens
  chr17:61864894-61864927
  hypo
attgaaacaggctgggcgtggtagctgggcgtg

SEQ ID NO: 23755 - DNA, 31 bp, Homo sapiens
  chr17:61908469-61908500
  hypo
gactccatcggctcctcgcggctggaggggg

SEQ ID NO: 23756 - DNA, 31 bp, Homo sapiens; identical to SEQ ID NO: 6063
  chr17:61921252-61921283
  hypo

SEQ ID NO: 23757 - DNA, 21 bp, Homo sapiens
  chr17:62222008-62222029
  hypo
ttttgagatggagtctcgctc

SEQ ID NO: 23758 - DNA, 56 bp, Homo sapiens
  chr17:62782503-62782559
  hypo
ccatgactgcccagggcgtgggctgccctgaacaactgcaccgccccttggcacgg

SEQ ID NO: 23759 - DNA, 47 bp, Homo sapiens
  chr17:62782737-62782784
  hypo
ctggcagatgaagctgcgctgggtgcacaggtcgcagtggtagacat

SEQ ID NO: 23760 - DNA, 38 bp, Homo sapiens
  chr17:62831162-62831200
  hypo
taaaactgcaatcagccgggcacggcagctcacgcctg

SEQ ID NO: 23761 - DNA, 18 bp, Homo sapiens
  chr17:62972670-62972688
  hypo
gtccggcctcagttcttt

SEQ ID NO: 23762 - DNA, 24 bp, Homo sapiens
  chr17:63089109-63089133
  hypo
gcgcccagccgttgtgtctctttt

SEQ ID NO: 23763 - DNA, 31 bp, Homo sapiens; identical to SEQ ID NO: 6064
  chr17:63555851-63555882
  hypo

SEQ ID NO: 23764 - DNA, 65 bp, Homo sapiens; identical to SEQ ID NO: 6065
  chr17:63555886-63555951
  hypo

SEQ ID NO: 23765 - DNA, 85 bp, Homo sapiens; identical to SEQ ID NO: 6066
  chr17:63556317-63556402
  hypo

SEQ ID NO: 23766 - DNA, 152 bp, Homo sapiens; identical to SEQ ID NO: 6068
  chr17:63556784-63556936
  hypo

SEQ ID NO: 23767 - DNA, 36 bp, Homo sapiens; identical to SEQ ID NO: 6069
  chr17:63556996-63557032
  hypo

SEQ ID NO: 23768 - DNA, 51 bp, Homo sapiens; identical to SEQ ID NO: 6070
  chr17:63557343-63557394
  hypo

SEQ ID NO: 23769 - DNA, 31 bp, Homo sapiens; identical to SEQ ID NO: 6071
  chr17:63557793-63557824
  hypo

SEQ ID NO: 23770 - DNA, 31 bp, Homo sapiens; identical to SEQ ID NO: 6072
  chr17:64298538-64298569
  hypo

SEQ ID NO: 23771 - DNA, 44 bp, Homo sapiens
  chr17:64751376-64751420
  hypo
cagacttggagaagcgcggcatggggtggcggtggggagaacac

SEQ ID NO: 23772 - DNA, 31 bp, Homo sapiens
  chr17:64935531-64935562
  hypo
cccttgaccatggtgacgaaggaaaccccgt

SEQ ID NO: 23773 - DNA, 31 bp, Homo sapiens
  chr17:65027609-65027640
  hypo
ccagaaatcagaccaccgaagctcactccct

SEQ ID NO: 23774 - DNA, 39 bp, Homo sapiens
  chr17:65027713-65027752
  hypo
ggtgctttggcctttgcgctgtcccggggccagcttccc

SEQ ID NO: 23775 - DNA, 57 bp, Homo sapiens; identical to SEQ ID NO: 6073
  chr17:65242141-65242198
  hypo

SEQ ID NO: 23776 - DNA, 17 bp, Homo sapiens
  chr17:65279482-65279499
  hypo
tccgtcaaaaagaataa

SEQ ID NO: 23777 - DNA, 31 bp, Homo sapiens
  chr17:65297603-65297634
  hypo
acacccggccactggacgtgattggatggag

SEQ ID NO: 23778 - DNA, 18 bp, Homo sapiens
  chr17:65339825-65339843
  hypo
tctgttttttttgagacg

SEQ ID NO: 23779 - DNA, 31 bp, Homo sapiens
  chr17:65363296-65363327
  hypo
tcttaagggccttacacgttttatgtgttat

SEQ ID NO: 23780 - DNA, 31 bp, Homo sapiens
  chr17:65593931-65593962
  hypo
ggtagacaggcaagatcgtgatgcagggaga

SEQ ID NO: 23781 - DNA, 39 bp, Homo sapiens
  chr17:66420528-66420567
  hypo
tcactagagggttccacggatctgcgggagaaagaagcc

SEQ ID NO: 23782 - DNA, 97 bp, Homo sapiens; identical to SEQ ID NO: 6074
  chr17:66434323-66434420
  hypo

SEQ ID NO: 23783 - DNA, 31 bp, Homo sapiens; identical to SEQ ID NO: 6075
  chr17:66434432-66434463
  hypo

SEQ ID NO: 23784 - DNA, 31 bp, Homo sapiens
  chr17:66440109-66440140
  hypo
aaatagtgttaaatcccgagaattcagtaag

SEQ ID NO: 23785 - DNA, 19 bp, Homo sapiens
  chr17:66449633-66449652
  hypo
ttttgagagggagtctcgc

SEQ ID NO: 23786 - DNA, 19 bp, Homo sapiens
  chr17:67410378-67410397
  hypo
agagcgagactccctctcg

SEQ ID NO: 23787 - DNA, 45 bp, Homo sapiens
  chr17:67468375-67468420
  hypo
ctccctgttacaaggccgcacatgtacccccgaatctaaaaaaaa

SEQ ID NO: 23788 - DNA, 31 bp, Homo sapiens
  chr17:67468445-67468476
  hypo
acaaataaatatgcatcgttataagcaagat

SEQ ID NO: 23789 - DNA, 48 bp, Homo sapiens
  chr17:67468537-67468585
  hypo
gatgagaaaacaaaatcggttcccaaccagggccgctgtcagtgtgga

SEQ ID NO: 23790 - DNA, 43 bp, Homo sapiens
  chr17:70380790-70380833
  hypo
caaaccagaagctctgcgagtaagacaccgccaggcatcacta

SEQ ID NO: 23791 - DNA, 31 bp, Homo sapiens
  chr17:70657361-70657392
  hypo
tgttctctgaccatggcgccccctggagttg

SEQ ID NO: 23792 - DNA, 31 bp, Homo sapiens
  chr17:70657400-70657431
  hypo
gacactcctgcttgagcgcagattgctgctc

SEQ ID NO: 23793 - DNA, 40 bp, Homo sapiens
  chr17:70657439-70657479
  hypo
gtgtagttctggggttcgaggtgcacgctctcaggagagg

SEQ ID NO: 23794 - DNA, 39 bp, Homo sapiens
  chr17:70657502-70657541
  hypo
tctgagaattggcaagcgaagggacggcaacctgcagcc

SEQ ID NO: 23795 - DNA, 31 bp, Homo sapiens
  chr17:70680596-70680627
  hypo
cccaggtttgggcaggcgtgccctgctagca

SEQ ID NO: 23796 - DNA, 31 bp, Homo sapiens; identical to SEQ ID NO: 6081
  chr17:71161117-71161148
  hypo

SEQ ID NO: 23797 - DNA, 72 bp, Homo sapiens; identical to SEQ ID NO: 6082
  chr17:71161833-71161905
  hypo

SEQ ID NO: 23798 - DNA, 31 bp, Homo sapiens
  chr17:71201619-71201650
  hypo
ttgaagctgtttattacgctcacataccaag

SEQ ID NO: 23799 - DNA, 58 bp, Homo sapiens
  chr17:71201705-71201763
  hypo
tccagtcacccagaaccgggcgctgcagctgctttatgatctgcgttacctcaacatt

SEQ ID NO: 23800 - DNA, 31 bp, Homo sapiens
  chr17:71201767-71201798
  hypo
tgacagccaagggtgacgaggtgaagagtgg

SEQ ID NO: 23801 - DNA, 39 bp, Homo sapiens
  chr17:71202330-71202369
  hypo
atccatttgacctggacgttttcacgccacacctcaaca

SEQ ID NO: 23802 - DNA, 31 bp, Homo sapiens
  chr17:71202510-71202541
  hypo
ataagacacaaatagccgagtgtagttataa

SEQ ID NO: 23803 - DNA, 31 bp, Homo sapiens
  chr17:71271188-71271219
  hypo
cccatccgggtgacttcggcaacagttcagt

SEQ ID NO: 23804 - DNA, 31 bp, Homo sapiens
  chr17:71272580-71272611
  hypo
ttgccattacttttaacgacaaaaaatgcaa

SEQ ID NO: 23805 - DNA, 31 bp, Homo sapiens
  chr17:71280548-71280579
  hypo
atagctatgggaggtgcgtagggaaaacaca

SEQ ID NO: 23806 - DNA, 314 bp, Homo sapiens; identical to SEQ ID NO: 6086
  chr17:71306966-71307280
  hypo

SEQ ID NO: 23807 - DNA, 55 bp, Homo sapiens; identical to SEQ ID NO: 6087
  chr17:71307339-71307394
  hypo

SEQ ID NO: 23808 - DNA, 31 bp, Homo sapiens; identical to SEQ ID NO: 6088
  chr17:71307397-71307428
  hypo

SEQ ID NO: 23809 - DNA, 212 bp, Homo sapiens; identical to SEQ ID NO: 6089
  chr17:71307437-71307649
  hypo

SEQ ID NO: 23810 - DNA, 189 bp, Homo sapiens; identical to SEQ ID NO: 6091
  chr17:71307781-71307970
  hypo

SEQ ID NO: 23811 - DNA, 38 bp, Homo sapiens; identical to SEQ ID NO: 6092
  chr17:71307971-71308009
  hypo

SEQ ID NO: 23812 - DNA, 76 bp, Homo sapiens; identical to SEQ ID NO: 6093
  chr17:71308017-71308093
  hypo

SEQ ID NO: 23813 - DNA, 51 bp, Homo sapiens
  chr17:71325319-71325370
  hypo
taggactgtaggcgtgagccgctgcgcccagtcccccgtcaaagacttctt

SEQ ID NO: 23814 - DNA, 31 bp, Homo sapiens
  chr17:71326304-71326335
  hypo
ccagctctcactaccccgggtccttacccac

SEQ ID NO: 23815 - DNA, 40 bp, Homo sapiens
  chr17:71326403-71326443
  hypo
gcttgactgatagactcggaaaggtcggttcagctctccc

SEQ ID NO: 23816 - DNA, 31 bp, Homo sapiens
  chr17:71328372-71328403
  hypo
agagtgggttagaggccgggcgcagtggtgc

SEQ ID NO: 23817 - DNA, 31 bp, Homo sapiens
  chr17:71345760-71345791
  hypo
agctgtgcttgcaccacgagccttgtcctgt

SEQ ID NO: 23818 - DNA, 58 bp, Homo sapiens
  chr17:71345902-71345960
  hypo
agacaggagggcatagcgataatgcgggtgctcaggcgtccttcgctaaggtgttttt

SEQ ID NO: 23819 - DNA, 31 bp, Homo sapiens
  chr17:71351037-71351068
  hypo
ttctcatagacccagccgtgtaagtcgagca

SEQ ID NO: 23820 - DNA, 38 bp, Homo sapiens
  chr17:71354306-71354344
  hypo
cgcacgatgatgggcacgccaggcggtcctggggcacc

SEQ ID NO: 23821 - DNA, 37 bp, Homo sapiens
  chr17:71364485-71364522
  hypo
tcctcttgcaaccccccgtggccgacctacccctccc

SEQ ID NO: 23822 - DNA, 59 bp, Homo sapiens
  chr17:71364564-71364623
  hypo
ttgggtgggggtgctccgaggcccatccccagcggcgttgaaggcggccacgctgacca

SEQ ID NO: 23823 - DNA, 31 bp, Homo sapiens
  chr17:71410786-71410817
  hypo
tagccctggttgatgccgttgatgaactggg

SEQ ID NO: 23824 - DNA, 35 bp, Homo sapiens
  chr17:72243966-72244001
  hypo
cttaagtgcgtgcgtgcgtgcgtgcatgcgtgtgt

SEQ ID NO: 23825 - DNA, 177 bp, Homo sapiens; identical to SEQ ID NO: 6104
  chr17:72449938-72450115
  hypo

SEQ ID NO: 23826 - DNA, 106 bp, Homo sapiens; identical to SEQ ID NO: 6105
  chr17:72450206-72450312
  hypo

SEQ ID NO: 23827 - DNA, 15 bp, Homo sapiens
  chr17:72450330-72450345
  hypo
cgaagccagctgtcc

SEQ ID NO: 23828 - DNA, 154 bp, Homo sapiens; identical to SEQ ID NO: 6107
  chr17:72450353-72450507
  hypo

SEQ ID NO: 23829 - DNA, 31 bp, Homo sapiens
  chr17:72848180-72848211
  hypo
gggcccagggtgaacacggcagtccccggcc

SEQ ID NO: 23830 - DNA, 43 bp, Homo sapiens; identical to SEQ ID NO: 6111
  chr17:72983605-72983648
  hypo

SEQ ID NO: 23831 - DNA, 37 bp, Homo sapiens; identical to SEQ ID NO: 6112
  chr17:72983650-72983687
  hypo

SEQ ID NO: 23832 - DNA, 76 bp, Homo sapiens; identical to SEQ ID NO: 6113
  chr17:72983764-72983840
  hypo

SEQ ID NO: 23833 - DNA, 63 bp, Homo sapiens; identical to SEQ ID NO: 6114
  chr17:72983858-72983921
  hypo

SEQ ID NO: 23834 - DNA, 417 bp, Homo sapiens; identical to SEQ ID NO: 6115
  chr17:72983946-72984363
  hypo

SEQ ID NO: 23835 - DNA, 30 bp, Homo sapiens
  chr17:73031636-73031666
  hypo
cgggcccaatggctcacgcctgtaatccca

SEQ ID NO: 23836 - DNA, 35 bp, Homo sapiens
  chr17:73067478-73067513
  hypo
tgagggtattttcaaccgtccgtctgtcagctctt

SEQ ID NO: 23837 - DNA, 31 bp, Homo sapiens
  chr17:73089935-73089966
  hypo
cggcctagggaggggccgatgagaaagtcct

SEQ ID NO: 23838 - DNA, 31 bp, Homo sapiens
  chr17:73095844-73095875
  hypo
tttaaaagataactctcgtgctacacctagg

SEQ ID NO: 23839 - DNA, 31 bp, Homo sapiens
  chr17:73096893-73096924
  hypo
tctccccaccactggccggtgaggagctggg

SEQ ID NO: 23840 - DNA, 31 bp, Homo sapiens
  chr17:73101011-73101042
  hypo
atgcactggaccttctcgtccagcctggatg

SEQ ID NO: 23841 - DNA, 16 bp, Homo sapiens
  chr17:73119991-73120007
  hypo
gcgaggctcatactca

SEQ ID NO: 23842 - DNA, 24 bp, Homo sapiens
  chr17:73138639-73138663
  hypo
gctaaactccgtcaaggggggagg

SEQ ID NO: 23843 - DNA, 51 bp, Homo sapiens
  chr17:73209660-73209711
  hypo
tacaggtgtaagccaccgtgctggccctgaatgttccgttcttatggaaca

SEQ ID NO: 23844 - DNA, 31 bp, Homo sapiens
  chr17:73209767-73209798
  hypo
ttgtgagatcactgctcggtctcataaacac

SEQ ID NO: 23845 - DNA, 63 bp, Homo sapiens
  chr17:73236200-73236263
  hypo
agaaagggtggtgagccgagggcgggtggggagggcctgccgctggaacggggcgcagccctc

SEQ ID NO: 23846 - DNA, 65 bp, Homo sapiens
  chr17:73236271-73236336
  hypo
gcacggaagacagccccggaggcactcattgttccccgctgcagctggcacgctctggagggaag

SEQ ID NO: 23847 - DNA, 31 bp, Homo sapiens
  chr17:73236349-73236380
  hypo
agcccaggagacatgacgctggaaagtggag

SEQ ID NO: 23848 - DNA, 31 bp, Homo sapiens
  chr17:73236389-73236420
  hypo
acagtagtgctgtcaccgatcctgtgcccct

SEQ ID NO: 23849 - DNA, 31 bp, Homo sapiens
  chr17:73241506-73241537
  hypo
aggaggacccccaccccgatgtgtgacaact

SEQ ID NO: 23850 - DNA, 62 bp, Homo sapiens
  chr17:73241588-73241650
  hypo
tcactgggttttgttacgttttttttttgttttttgacacagaatctcgctatgttggtcag

SEQ ID NO: 23851 - DNA, 41 bp, Homo sapiens
  chr17:73311871-73311912
  hypo
ggcgtgccctgaagagcgaggccatgcgcctacctccagct

SEQ ID NO: 23852 - DNA, 31 bp, Homo sapiens; identical to SEQ ID NO: 6117
  chr17:73422367-73422398
  hypo

SEQ ID NO: 23853 - DNA, 31 bp, Homo sapiens; identical to SEQ ID NO: 6118
  chr17:73422420-73422451
  hypo

SEQ ID NO: 23854 - DNA, 171 bp, Homo sapiens; identical to SEQ ID NO: 6119
  chr17:73511276-73511447
  hypo

SEQ ID NO: 23855 - DNA, 31 bp, Homo sapiens
  chr17:73545957-73545988
  hypo
cagagcccaggagagacgggccttctcccct

SEQ ID NO: 23856 - DNA, 31 bp, Homo sapiens
  chr17:73545997-73546028
  hypo
taacgttgcagtctggcggcttctgcaaatc

SEQ ID NO: 23857 - DNA, 31 bp, Homo sapiens
  chr17:73546109-73546140
  hypo
cagatgtgggcggggccgggtaggctggatg

SEQ ID NO: 23858 - DNA, 59 bp, Homo sapiens
  chr17:73546263-73546322
  hypo
cccaggggctatgccccgtcccgccctctgtcctgagtgcagccgcgattcagggttgc

SEQ ID NO: 23859 - DNA, 51 bp, Homo sapiens
  chr17:73569824-73569875
  hypo
ccaccctcccaggctccggctctccttgcctctttgcgtgccccttgcccc

SEQ ID NO: 23860 - DNA, 31 bp, Homo sapiens
  chr17:73581211-73581242
  hypo
tcaagaaactcctgaccgggtgaggtggctc

SEQ ID NO: 23861 - DNA, 172 bp, Homo sapiens; identical to SEQ ID NO: 6123
  chr17:73585893-73586065
  hypo

SEQ ID NO: 23862 - DNA, 49 bp, Homo sapiens; identical to SEQ ID NO: 6124
  chr17:73586090-73586139
  hypo

SEQ ID NO: 23863 - DNA, 31 bp, Homo sapiens
  chr17:73586232-73586263
  hypo
cggccgggcctggaggcgccacccttccccg

SEQ ID NO: 23864 - DNA, 37 bp, Homo sapiens
  chr17:73586266-73586303
  hypo
ccaagggcaggagcctcggagacggcctggaagacat

SEQ ID NO: 23865 - DNA, 31 bp, Homo sapiens
  chr17:73586470-73586501
  hypo
ggggcaacaggtgctacgtccccaggaccgc

SEQ ID NO: 23866 - DNA, 31 bp, Homo sapiens
  chr17:73596005-73596036
  hypo
aataaataaatacaagcgcatgtgattctgg

SEQ ID NO: 23867 - DNA, 31 bp, Homo sapiens
  chr17:73611622-73611653
  hypo
atgcagggcagctggccgtccagcagcagaa

SEQ ID NO: 23868 - DNA, 47 bp, Homo sapiens
  chr17:73611654-73611701
  hypo
tttatccagcagcaggcgctaatcctggtgagcgctggcagggccct

SEQ ID NO: 23869 - DNA, 31 bp, Homo sapiens
  chr17:73636031-73636062
  hypo
gtctcactgtcctcaccggcttcctccaccc

SEQ ID NO: 23870 - DNA, 89 bp, Homo sapiens
  chr17:73636136-73636225
  hypo
tgacaaacttgttctgcgggctgcggatgggtgcgagggtggaatctcggtgctgcgacgagtgtggggccagccgtggaggctccagg

SEQ ID NO: 23871 - DNA, 104 bp, Homo sapiens
  chr17:73636233-73636337
  hypo
ctgccccagcagagcccggcaggagccccaacaggaagccagcgcggcatggctgccaccgacttcgtgcaggagatgcgcgccgtgggcgagaggctgctgct

SEQ ID NO: 23872 - DNA, 40 bp, Homo sapiens
  chr17:73636351-73636391
  hypo
tgccccaggctgagcccgtggagatcgtggccttctcagt

SEQ ID NO: 23873 - DNA, 44 bp, Homo sapiens
  chr17:73638312-73638356
  hypo
tccagacagagcatcccgaggtgcctccccggggcttccccaga

SEQ ID NO: 23874 - DNA, 38 bp, Homo sapiens
  chr17:73638387-73638425
  hypo
ccatcatcttggcctgcgtgacccgtgctctggccacc

SEQ ID NO: 23875 - DNA, 31 bp, Homo sapiens
  chr17:73692187-73692218
  hypo
tctcaagtcctaagtgcggctgcctctgaga

SEQ ID NO: 23876 - DNA, 31 bp, Homo sapiens
  chr17:73692240-73692271
  hypo
gcagccacagacccagcgctgcttccaagag

SEQ ID NO: 23877 - DNA, 31 bp, Homo sapiens
  chr17:73693130-73693161
  hypo
acaggtgtgagccaccgcgcccggcccctcc

SEQ ID NO: 23878 - DNA, 36 bp, Homo sapiens
  chr17:73736027-73736063
  hypo
ggacacgcccatgctgcgcagcgggaacctcaaggg

SEQ ID NO: 23879 - DNA, 31 bp, Homo sapiens
  chr17:73800549-73800580
  hypo
aaaatccattaatctgcgcaactgagtttat

SEQ ID NO: 23880 - DNA, 49 bp, Homo sapiens
  chr17:73808745-73808794
  hypo
tactgcctgctctagccgaggccccgacctggcccgcatcccaccctac

SEQ ID NO: 23881 - DNA, 62 bp, Homo sapiens
  chr17:73811152-73811214
  hypo
gagatgactaagccagcgcactcatgctggaggaaggggagcctgcccggccttccctcagg

SEQ ID NO: 23882 - DNA, 45 bp, Homo sapiens
  chr17:73822057-73822102
  hypo
cagttcaagtgctctccgacctaggcctagcggttgatgacacag

SEQ ID NO: 23883 - DNA, 46 bp, Homo sapiens; identical to SEQ ID NO: 6125
  chr17:73874666-73874712
  hypo

SEQ ID NO: 23884 - DNA, 31 bp, Homo sapiens
  chr17:73921368-73921399
  hypo
ctgtcttcccagtggccgacctgtctcaaga

SEQ ID NO: 23885 - DNA, 21 bp, Homo sapiens
  chr17:73977821-73977842
  hypo
aaatataagctgggtgcggtg

SEQ ID NO: 23886 - DNA, 31 bp, Homo sapiens
  chr17:74008700-74008731
  hypo
agcacagtagtatctgcgagcatcacctggg

SEQ ID NO: 23887 - DNA, 31 bp, Homo sapiens
  chr17:74008772-74008803
  hypo
tcagatccagcaggtccgggtggccctgaga

SEQ ID NO: 23888 - DNA, 31 bp, Homo sapiens
  chr17:74013673-74013704
  hypo
ccagcttgtctgagcccgggtctgtccacac

SEQ ID NO: 23889 - DNA, 31 bp, Homo sapiens
  chr17:74013713-74013744
  hypo
tctccatcccagccaccgctcctgcacttgc

SEQ ID NO: 23890 - DNA, 92 bp, Homo sapiens
  chr17:74013758-74013850
  hypo
gtgtgagcaccagggccgggccgcttctcatcccagccgccccttcccgctgctcacccacctcatggctgtggatgcggccctccaagtcc

SEQ ID NO: 23891 - DNA, 81 bp, Homo sapiens
  chr17:74019374-74019455
  hypo
gtttctgctccagcacgcgtgcccagtcgaccctgggtcccacgtcggggggcagcaccatcttctcgtacagggcacggt

SEQ ID NO: 23892 - DNA, 31 bp, Homo sapiens
  chr17:74019499-74019530
  hypo
ctgtcaagaaggtggccggcaggtcagggct

SEQ ID NO: 23893 - DNA, 31 bp, Homo sapiens
  chr17:74028303-74028334
  hypo
gaggttagagatgaaacgatccctggggctg

SEQ ID NO: 23894 - DNA, 67 bp, Homo sapiens
  chr17:74028346-74028413
  hypo
ccagccatgactttgcgcggcagcttactcactccttgcgcctggagcgccacgctgatgtgggcag

SEQ ID NO: 23895 - DNA, 31 bp, Homo sapiens
  chr17:74028504-74028535
  hypo
gggcatatgtgcagcccggccacagggtggc

SEQ ID NO: 23896 - DNA, 31 bp, Homo sapiens
  chr17:74042047-74042078
  hypo
taagtcactttgtgtccgacacaggcaaagg

SEQ ID NO: 23897 - DNA, 31 bp, Homo sapiens
  chr17:74042085-74042116
  hypo
caggcccttgccttcccggtcctcaagggtc

SEQ ID NO: 23898 - DNA, 58 bp, Homo sapiens
  chr17:74042124-74042182
  hypo
gatgatgtcatagagtcggatcaggtcctggggccggggtgagcgcttgctgtcatcc

SEQ ID NO: 23899 - DNA, 42 bp, Homo sapiens
  chr17:74042220-74042262
  hypo
ggccatgttctcattacgcttgattgccgttgatagcttgat

SEQ ID NO: 23900 - DNA, 31 bp, Homo sapiens
  chr17:74047796-74047827
  hypo
ttcactaacttgggaacgaactggggctcat

SEQ ID NO: 23901 - DNA, 31 bp, Homo sapiens
  chr17:74047839-74047870
  hypo
tctagtaaagcaaacacggccaccattcact

SEQ ID NO: 23902 - DNA, 77 bp, Homo sapiens
  chr17:74047898-74047975
  hypo
atagaactctctgccacgggcaatgtcctctacgtgcaccgtccaatgaacacctgagcactcggaagttttattaa

SEQ ID NO: 23903 - DNA, 36 bp, Homo sapiens
  chr17:74050641-74050677
  hypo
ccaagcctgagctgggcgctgtggctcacgcctgta

SEQ ID NO: 23904 - DNA, 64 bp, Homo sapiens
  chr17:74275120-74275184
  hypo
cttgcggctatgctgccggacctgctccagttcaaacaccgtgtaggggcggatggaatggtgc

SEQ ID NO: 23905 - DNA, 31 bp, Homo sapiens
  chr17:74303839-74303870
  hypo
gggcacctccttgggcgcgggcaggtgcggg

SEQ ID NO: 23906 - DNA, 114 bp, Homo sapiens
  chr17:74390362-74390476
  hypo
agcatagtgcttggctcgatgcacaggcccagtaagggactgcggagtcaacaaggtggcaggcaaacgggcttgcctgttccggaaggatgcactcagcgctgcctcagtaaa

SEQ ID NO: 23907 - DNA, 31 bp, Homo sapiens
  chr17:74392166-74392197
  hypo
agaaggcgggggaaggcgaagaccaggcaag

SEQ ID NO: 23908 - DNA, 40 bp, Homo sapiens
  chr17:74397332-74397372
  hypo
agcccactcacacacacgccccacacgccctaaaacaagt

SEQ ID NO: 23909 - DNA, 31 bp, Homo sapiens
  chr17:74412535-74412566
  hypo
aatttgggggaaacagcggtgttcccctgta

SEQ ID NO: 23910 - DNA, 47 bp, Homo sapiens
  chr17:74435186-74435233
  hypo
ttccaggggcagctgacggcgtggtttggaggcgcttgcctggcttt

SEQ ID NO: 23911 - DNA, 31 bp, Homo sapiens
  chr17:74516485-74516516
  hypo
gtggagaccctgggggcgagtgagcagagac

SEQ ID NO: 23912 - DNA, 31 bp, Homo sapiens
  chr17:74527623-74527654
  hypo
tcatgcaggttctccacgacagtgttgaggg

SEQ ID NO: 23913 - DNA, 41 bp, Homo sapiens
  chr17:74529367-74529408
  hypo
tacacgggtgaggacacgtgaggcgacgggtctgaaaatac

SEQ ID NO: 23914 - DNA, 7 bp, Homo sapiens
  chr17:74529511-74529518
  hypo
aaaataa

SEQ ID NO: 23915 - DNA, 39 bp, Homo sapiens
  chr17:74531808-74531847
  hypo
gacatggccctggcctcggtgtttcgtttctcccttggc

SEQ ID NO: 23916 - DNA, 55 bp, Homo sapiens
  chr17:74531888-74531943
  hypo
tgttccatgatgtggacggtgagcacttcctccacgtatccgcacaggtacctgg

SEQ ID NO: 23917 - DNA, 31 bp, Homo sapiens
  chr17:74531972-74532003
  hypo
cctgaggaccctgcctcgcttcttcatggtg

SEQ ID NO: 23918 - DNA, 69 bp, Homo sapiens
  chr17:74533184-74533253
  hypo
gtctggggtggctggccgagcaaggagttctgaggccggggagaggagggggaccgaggtgctctcctg

SEQ ID NO: 23919 - DNA, 9 bp, Homo sapiens
  chr17:74551786-74551795
  hypo
acccagctc

SEQ ID NO: 23920 - DNA, 49 bp, Homo sapiens
  chr17:74551831-74551880
  hypo
gacagtagtacttcatcgcattgtgaggattaaacgagttcatacatgt

SEQ ID NO: 23921 - DNA, 31 bp, Homo sapiens
  chr17:74623751-74623782
  hypo
tcgcagtttggaaggcgcggcctctgctacc

SEQ ID NO: 23922 - DNA, 149 bp, Homo sapiens
  chr17:74625058-74625207
  hypo
ggagccagagggaaggcgtggtggcaaaaactcaccgtctgaaggcctcctatttcgaagctgtatttttcctcaaaatcccaccgaggctcagatttgaagttggcggccttcagtctttggtttctctgcgtcgtggggctctggaa

SEQ ID NO: 23923 - DNA, 31 bp, Homo sapiens
  chr17:74629628-74629659
  hypo
tatcatgaacaagaatcgcacaataaaagaa

SEQ ID NO: 23924 - DNA, 51 bp, Homo sapiens
  chr17:74629738-74629789
  hypo
gtctaggctggtggcacgttcacagctcattgcagcctcgacctcccgggc

SEQ ID NO: 23925 - DNA, 31 bp, Homo sapiens
  chr17:74645178-74645209
  hypo
gctatgagtatcactacgcctatgatgtctg

SEQ ID NO: 23926 - DNA, 31 bp, Homo sapiens
  chr17:74920518-74920549
  hypo
ggtcctgtgcggtgcccggggtgggaagcag

SEQ ID NO: 23927 - DNA, 31 bp, Homo sapiens
  chr17:75132864-75132895
  hypo
caacacagaaggggcccgtgttaggccattc

SEQ ID NO: 23928 - DNA, 31 bp, Homo sapiens
  chr17:75207701-75207732
  hypo
ctgaaccactcatgtacgagctcacagtgtt

SEQ ID NO: 23929 - DNA, 36 bp, Homo sapiens
  chr17:75207947-75207983
  hypo
gatcccctggagagcacgatgcgctcgcagcatgcc

SEQ ID NO: 23930 - DNA, 31 bp, Homo sapiens
  chr17:75208211-75208242
  hypo
gtctggcagctgggccgcgactacagcatgg

SEQ ID NO: 23931 - DNA, 31 bp, Homo sapiens
  chr17:75209401-75209432
  hypo
catgtgaccaggtggccgggcttctacatcc

SEQ ID NO: 23932 - DNA, 54 bp, Homo sapiens
  chr17:75209443-75209497
  hypo
ttccacagcatgcctgcgtgcgccgccagcagccttccccgggtggacgacgtg

SEQ ID NO: 23933 - DNA, 26 bp, Homo sapiens
  chr17:75211196-75211222
  hypo
tgctggggggacggggtgagtggaaa

SEQ ID NO: 23934 - DNA, 65 bp, Homo sapiens
  chr17:75306481-75306546
  hypo
ctgcctgtgcccacaacgtgacggcgtggagacttatccgtgtagatccacgaagccttggttca

SEQ ID NO: 23935 - DNA, 31 bp, Homo sapiens
  chr17:75306547-75306578
  hypo
ttattttggcagctagcgagtgttcctctgt

SEQ ID NO: 23936 - DNA, 58 bp, Homo sapiens
  chr17:75306582-75306640
  hypo
ggaggcagagtttgcccgtcccgtggcccactggtgacatcgccgaaggtcttctctg

SEQ ID NO: 23937 - DNA, 31 bp, Homo sapiens
  chr17:75354843-75354874
  hypo
tctgccaggggctcagcgtataaagatgaga

SEQ ID NO: 23938 - DNA, 83 bp, Homo sapiens
  chr17:75354962-75355045
  hypo
gaggctgagcagcactcggacccacgtcccagtccaagtgtcagtcgttatgggggcccaggacagcccggacctagttcatt

SEQ ID NO: 23939 - DNA, 120 bp, Homo sapiens; identical to SEQ ID NO: 6133
  chr17:75369154-75369274
  hypo

SEQ ID NO: 23940 - DNA, 54 bp, Homo sapiens; identical to SEQ ID NO: 6134
  chr17:75369344-75369398
  hypo

SEQ ID NO: 23941 - DNA, 31 bp, Homo sapiens; identical to SEQ ID NO: 6136
  chr17:75392295-75392326
  hypo

SEQ ID NO: 23942 - DNA, 42 bp, Homo sapiens
  chr17:75398355-75398397
  hypo
cccaaggcggccgagccggtgtcccggcgcactgagctgtcc

SEQ ID NO: 23943 - DNA, 36 bp, Homo sapiens
  chr17:75398427-75398463
  hypo
gccggggccatcggcccgtcccggttcgggctcaag

SEQ ID NO: 23944 - DNA, 93 bp, Homo sapiens
  chr17:75398472-75398565
  hypo
gtgttgggccacaagacgccagaaccggcccctcggaggacggagatcaccatcgtcaaaccccaggagtcagcccaccggaggatggagccc

SEQ ID NO: 23945 - DNA, 31 bp, Homo sapiens
  chr17:75398566-75398597
  hypo
ctgcctccaaggtccccgaggtgcccactgc

SEQ ID NO: 23946 - DNA, 31 bp, Homo sapiens
  chr17:75438182-75438213
  hypo
gggcccgtgactggtccgaaggtagtgagtt

SEQ ID NO: 23947 - DNA, 31 bp, Homo sapiens
  chr17:75452753-75452784
  hypo
tctcagggaccagcaccgggtacccacagcc

SEQ ID NO: 23948 - DNA, 31 bp, Homo sapiens
  chr17:75452870-75452901
  hypo
aggtctcagggaccagcgctgggtccccaca

SEQ ID NO: 23949 - DNA, 31 bp, Homo sapiens
  chr17:75477290-75477321
  hypo
ccaggagcagggccatcgaagggacctacag

SEQ ID NO: 23950 - DNA, 31 bp, Homo sapiens
  chr17:75875368-75875399
  hypo
tgagcttttatcttcacgcagacccagtagt

SEQ ID NO: 23951 - DNA, 31 bp, Homo sapiens
  chr17:75875422-75875453
  hypo
gggaaggggtgggggtcgcccacccaaccca

SEQ ID NO: 23952 - DNA, 39 bp, Homo sapiens
  chr17:75875465-75875504
  hypo
atcccatgtgaaactgcgcccacccgccatggctgcacc

SEQ ID NO: 23953 - DNA, 31 bp, Homo sapiens
  chr17:75875520-75875551
  hypo
gggacaacagtgcaggcgtggccttgctgta

SEQ ID NO: 23954 - DNA, 49 bp, Homo sapiens
  chr17:76046727-76046776
  hypo
aaagcgccaagtggcccgggggtttggggggactcgataagctctactg

SEQ ID NO: 23955 - DNA, 31 bp, Homo sapiens
  chr17:76076543-76076574
  hypo
ggaaaaaaggtcaaatcgaattaaggaaaag

SEQ ID NO: 23956 - DNA, 25 bp, Homo sapiens
  chr17:76085333-76085358
  hypo
ccaccgtgcccgaccacttatcttt

SEQ ID NO: 23957 - DNA, 31 bp, Homo sapiens
  chr17:76093764-76093795
  hypo
gttagagtcatgaacccggacaccgccacca

SEQ ID NO: 23958 - DNA, 42 bp, Homo sapiens
  chr17:76101036-76101078
  hypo
tgtccaggactgaagacgaaccttggccgcagtccttgcgaa

SEQ ID NO: 23959 - DNA, 54 bp, Homo sapiens
  chr17:76104280-76104334
  hypo
tgtgggtcaattccttcgaaaagatgggacccgcacccccgccacaggctggcc

SEQ ID NO: 23960 - DNA, 31 bp, Homo sapiens
  chr17:76109601-76109632
  hypo
gtccccaatccctccacggaccctcacctgc

SEQ ID NO: 23961 - DNA, 31 bp, Homo sapiens
  chr17:76114989-76115020
  hypo
gtcctgcccccactgccggccaccctgccag

SEQ ID NO: 23962 - DNA, 44 bp, Homo sapiens
  chr17:76115079-76115123
  hypo
ttgatgatctgcacggcggggaggaggggcgagaagagcacccc

SEQ ID NO: 23963 - DNA, 34 bp, Homo sapiens
  chr17:76129455-76129489
  hypo
ccgggctgggtatcttcgtcgctgtccccaggcc

SEQ ID NO: 23964 - DNA, 99 bp, Homo sapiens
  chr17:76129496-76129595
  hypo
acacctatctcttctacggtgcgtaccgagtggggccggagagcagctccgtgtacagcatccgcctggcctacctcctcagcccgctggcctgcctgc

SEQ ID NO: 23965 - DNA, 43 bp, Homo sapiens
  chr17:76129602-76129645
  hypo
cttctgtgggactctgcggcggtgagagcgaggtccacacctt

SEQ ID NO: 23966 - DNA, 31 bp, Homo sapiens
  chr17:76132636-76132667
  hypo
gtacatatgtgtggcacgtgtttatgacatg

SEQ ID NO: 23967 - DNA, 52 bp, Homo sapiens
  chr17:76132685-76132737
  hypo
cttcaatgtccataggcggcggaggaaaggaggagctcgcctgcagtcagga

SEQ ID NO: 23968 - DNA, 31 bp, Homo sapiens
  chr17:76132748-76132779
  hypo
ccacaggcttctccaccgcagggcttgctgc

SEQ ID NO: 23969 - DNA, 59 bp, Homo sapiens
  chr17:76137869-76137928
  hypo
tggcgggaatcctctccgtccagtcttctaacctagcagcctcacgtccacagagctgc

SEQ ID NO: 23970 - DNA, 31 bp, Homo sapiens
  chr17:76137950-76137981
  hypo
tggcttcctgcagagccgtgttctcccagcc

SEQ ID NO: 23971 - DNA, 31 bp, Homo sapiens
  chr17:76137997-76138028
  hypo
ggttgagccaagcttgcggatccgtggggtg

SEQ ID NO: 23972 - DNA, 31 bp, Homo sapiens
  chr17:76138116-76138147
  hypo
ccacaagggcagggcccggcccccctcccaa

SEQ ID NO: 23973 - DNA, 31 bp, Homo sapiens
  chr17:76138159-76138190
  hypo
tattcttgagcctgttcgagtttccttttcc

SEQ ID NO: 23974 - DNA, 47 bp, Homo sapiens
  chr17:76145562-76145609
  hypo
gagggatcaggatattcgaaagatgatctctgcgtaggttggctttt

SEQ ID NO: 23975 - DNA, 14 bp, Homo sapiens
  chr17:76145628-76145642
  hypo
tttagacacagggt

SEQ ID NO: 23976 - DNA, 89 bp, Homo sapiens
  chr17:76152519-76152608
  hypo
aaacagagaagtcactcgcaagcagaaagcagatacctggcgtaggtgggtgaaggcctgctggaatgcgctgacgggctggttttgat

SEQ ID NO: 23977 - DNA, 31 bp, Homo sapiens
  chr17:76152623-76152654
  hypo
agagcactttgggtgccgtgagcaggctggt

SEQ ID NO: 23978 - DNA, 56 bp, Homo sapiens
  chr17:76153509-76153565
  hypo
cagatgatttggacttcgagacaggagatgcagggcctcagcgaccttcccaatgc

SEQ ID NO: 23979 - DNA, 31 bp, Homo sapiens
  chr17:76167731-76167762
  hypo
taggatggccaggggccggttcttgggtcaa

SEQ ID NO: 23980 - DNA, 50 bp, Homo sapiens
  chr17:76187458-76187508
  hypo
aggaacgttccccatccgctgctgaatgtggaatgcggtcactattccta

SEQ ID NO: 23981 - DNA, 5 bp, Homo sapiens
  chr17:76187513-76187518
  hypo
caata

SEQ ID NO: 23982 - DNA, 31 bp, Homo sapiens
  chr17:76204092-76204123
  hypo
aagcttcctctgcacccgagagtggtgtgca

SEQ ID NO: 23983 - DNA, 90 bp, Homo sapiens
  chr17:76232493-76232583
  hypo
ccacccatccactgacgcggctccagctctgactacatgccgagtgctggccaagtgctcctccgaaggctcctccgagggccccccagt

SEQ ID NO: 23984 - DNA, 31 bp, Homo sapiens
  chr17:76232605-76232636
  hypo
gaggcctggagagggccgagggcctgggctc

SEQ ID NO: 23985 - DNA, 31 bp, Homo sapiens
  chr17:76232658-76232689
  hypo
tctcctcagtttccaccgactgcccagcact

SEQ ID NO: 23986 - DNA, 31 bp, Homo sapiens
  chr17:76260378-76260409
  hypo
acaactgagacagacccggcatggtggctca

SEQ ID NO: 23987 - DNA, 41 bp, Homo sapiens
  chr17:76275113-76275154
  hypo
cgagttctgtgacccgctccggggagcggggcatctcatgt

SEQ ID NO: 23988 - DNA, 74 bp, Homo sapiens; identical to SEQ ID NO: 6137
  chr17:76349230-76349304
  hypo

SEQ ID NO: 23989 - DNA, 31 bp, Homo sapiens
  chr17:76364857-76364888
  hypo
taagaagaccccacttcgccaggaggagtgc

SEQ ID NO: 23990 - DNA, 61 bp, Homo sapiens
  chr17:76395587-76395648
  hypo
acctcttcgacaacagcgtcatcttgagcgggtgagtgcttcccaccgtcagtgcttttgc

SEQ ID NO: 23991 - DNA, 31 bp, Homo sapiens
  chr17:76395682-76395713
  hypo
ggaacagtgggaaacccgttcccctcagtct

SEQ ID NO: 23992 - DNA, 56 bp, Homo sapiens
  chr17:76396816-76396872
  hypo
actgtgcggagattgccgacttcttcacggagctggtggacgcggtgggggatgtg

SEQ ID NO: 23993 - DNA, 36 bp, Homo sapiens
  chr17:76396876-76396912
  hypo
tgcagctgcagggggacgacacggtgcaggtggtgg

SEQ ID NO: 23994 - DNA, 45 bp, Homo sapiens
  chr17:76404758-76404803
  hypo
gaaggtgctgccaggccgcttcacctgcatcgccttggctttggg

SEQ ID NO: 23995 - DNA, 31 bp, Homo sapiens
  chr17:76449723-76449754
  hypo
ctttgtaaactgcccccgtgctcttatggga

SEQ ID NO: 23996 - DNA, 42 bp, Homo sapiens
  chr17:76456116-76456158
  hypo
gtttggaccgggtcctcggtgatgccccgaagaagccgccat

SEQ ID NO: 23997 - DNA, 79 bp, Homo sapiens
  chr17:76670739-76670818
  hypo
tgcctcctcagggctgcgccctgcaccgccctggtccagggtcctgtggaggggcggggcgagacggccagacagccag

SEQ ID NO: 23998 - DNA, 31 bp, Homo sapiens
  chr17:76690198-76690229
  hypo
aaaagaaaatgtccagcgtaggtcctggcag

SEQ ID NO: 23999 - DNA, 39 bp, Homo sapiens
  chr17:76690280-76690319
  hypo
gatgctgaaccctaggcgggcttacgtgactgatcatta

SEQ ID NO: 24000 - DNA, 56 bp, Homo sapiens
  chr17:76690340-76690396
  hypo
acagatctaggttatgcgagggaatttgctgtaagcaagcacgtgccctccacctg

SEQ ID NO: 24001 - DNA, 31 bp, Homo sapiens
  chr17:76722779-76722810
  hypo
cctttgaatttgacaccgagacaggtggatt

SEQ ID NO: 24002 - DNA, 31 bp, Homo sapiens
  chr17:76722815-76722846
  hypo
ctgctgttgagttgggcgagagataaagaag

SEQ ID NO: 24003 - DNA, 42 bp, Homo sapiens
  chr17:76722851-76722893
  hypo
ctggaagagcaagaagcggcagccaggcgccatgagaaagaa

SEQ ID NO: 24004 - DNA, 73 bp, Homo sapiens
  chr17:76722895-76722968
  hypo
gggactggaagctttgcgtagtcttcactgcaccgcggtctgcactcctgttcagaagcggtagcaaagaaat

SEQ ID NO: 24005 - DNA, 12 bp, Homo sapiens
  chr17:76766752-76766764
  hypo
cctgggattaca

SEQ ID NO: 24006 - DNA, 31 bp, Homo sapiens
  chr17:76766766-76766797
  hypo
tgtgagccacagagcccgactgaaaataggt

SEQ ID NO: 24007 - DNA, 36 bp, Homo sapiens
  chr17:76818659-76818695
  hypo
cctcattcatgtcccccgcaccgctcactaactggg

SEQ ID NO: 24008 - DNA, 69 bp, Homo sapiens; identical to SEQ ID NO: 6142
  chr17:76921483-76921552
  hypo

SEQ ID NO: 24009 - DNA, 40 bp, Homo sapiens
  chr17:76963989-76964029
  hypo
ccaaggctgatgggagcggacctggcgctcctgggccttc

SEQ ID NO: 24010 - DNA, 73 bp, Homo sapiens
  chr17:76977963-76978036
  hypo
ctaccccaaacctctccgcaaattgaggaacgctccctataatagctaatatggatttcgccaggcattacta

SEQ ID NO: 24011 - DNA, 31 bp, Homo sapiens
  chr17:76991521-76991552
  hypo
ctgatccccaactccccgctcctcaagctgt

SEQ ID NO: 24012 - DNA, 109 bp, Homo sapiens
  chr17:76991603-76991712
  hypo
gcactctgaaggggcacgtgtgtcccaggggagtgcgggtgctgccctcggccacacctgaggtctcaccgagcatcactctaactccagtggccggagaggggcttgg

SEQ ID NO: 24013 - DNA, 42 bp, Homo sapiens
  chr17:76993489-76993531
  hypo
tgggtggggggcctgccgggggccgggcggtgggagcagagc

SEQ ID NO: 24014 - DNA, 31 bp, Homo sapiens
  chr17:76993544-76993575
  hypo
cagcacccacaaagaacgtcaggatcacctt

SEQ ID NO: 24015 - DNA, 31 bp, Homo sapiens
  chr17:76995120-76995151
  hypo
acccccttctccacgccgcagcctgctgggc

SEQ ID NO: 24016 - DNA, 31 bp, Homo sapiens
  chr17:76995178-76995209
  hypo
ttccacatggaactttcggacagtcctaggt

SEQ ID NO: 24017 - DNA, 31 bp, Homo sapiens
  chr17:76996978-76997009
  hypo
cagccccagcacctgacgcactgccaggcag

SEQ ID NO: 24018 - DNA, 31 bp, Homo sapiens
  chr17:76997236-76997267
  hypo
gactgctgtcagacatcgtgaggtgtcgtcg

SEQ ID NO: 24019 - DNA, 31 bp, Homo sapiens
  chr17:76998746-76998777
  hypo
ctgactccctgtccctcgacagatccctggt

SEQ ID NO: 24020 - DNA, 31 bp, Homo sapiens
  chr17:76999157-76999188
  hypo
agactttgaacagtcccgtgtggtcagtgtt

SEQ ID NO: 24021 - DNA, 31 bp, Homo sapiens
  chr17:77002843-77002874
  hypo
aacgggatgggatcatcgccccatggacctg

SEQ ID NO: 24022 - DNA, 31 bp, Homo sapiens
  chr17:77002880-77002911
  hypo
ggctgccttccacaccgcggtggcacctgca

SEQ ID NO: 24023 - DNA, 31 bp, Homo sapiens
  chr17:77002993-77003024
  hypo
ggactttcactcaacccggcaacaccctcag

SEQ ID NO: 24024 - DNA, 31 bp, Homo sapiens
  chr17:77004087-77004118
  hypo
ggtccccacactgctgcggtggcctcatgac

SEQ ID NO: 24025 - DNA, 61 bp, Homo sapiens
  chr17:77043871-77043932
  hypo
gcaagttctactgctacgtgcccggcctctacttcttcagcctcaacgtgcacacctggaa

SEQ ID NO: 24026 - DNA, 31 bp, Homo sapiens
  chr17:77070098-77070129
  hypo
cactccaggccctgcacgcttaggggtagag

SEQ ID NO: 24027 - DNA, 81 bp, Homo sapiens; identical to SEQ ID NO: 6144
  chr17:77070948-77071029
  hypo

SEQ ID NO: 24028 - DNA, 63 bp, Homo sapiens; identical to SEQ ID NO: 6145
  chr17:77071239-77071302
  hypo

SEQ ID NO: 24029 - DNA, 165 bp, Homo sapiens; identical to SEQ ID NO: 6146
  chr17:77071338-77071503
  hypo

SEQ ID NO: 24030 - DNA, 61 bp, Homo sapiens
  chr17:77086020-77086081
  hypo
tcgcgatgcagccgggcgctggcccgtccctggccctgggcgcccacggtggactgggctc

SEQ ID NO: 24031 - DNA, 31 bp, Homo sapiens
  chr17:77151474-77151505
  hypo
agtgggcagggaggtccggggcggcaggctc

SEQ ID NO: 24032 - DNA, 76 bp, Homo sapiens; identical to SEQ ID NO: 6147
  chr17:77771455-77771531
  hypo

SEQ ID NO: 24033 - DNA, 38 bp, Homo sapiens; identical to SEQ ID NO: 6148
  chr17:77771550-77771588
  hypo

SEQ ID NO: 24034 - DNA, 38 bp, Homo sapiens; identical to SEQ ID NO: 6149
  chr17:77771592-77771630
  hypo

SEQ ID NO: 24035 - DNA, 46 bp, Homo sapiens; identical to SEQ ID NO: 6150
  chr17:77774930-77774976
  hypo

SEQ ID NO: 24036 - DNA, 110 bp, Homo sapiens
  chr17:77807458-77807568
  hypo
actagaactctgaggccgggcgcagagctgccctgtccgttccgggggtccatctccagcggggaagggcaggagagggcgagccccgccggcaccgcgtggaaggggcc

SEQ ID NO: 24037 - DNA, 97 bp, Homo sapiens
  chr17:77807728-77807825
  hypo
atggcgcttccccttccgacgccctccggctacaccgtcacgtactccttgaaagtaacggtgaggcagttcgcggtgacgtcggtgataattatat

SEQ ID NO: 24038 - DNA, 164 bp, Homo sapiens
  chr17:77807830-77807994
  hypo
aagaagggcttgaactcgctcagcgactctgcaggttcgtcctgggcctcggctggaggcttctccgccgtcgtggtgggtgccgctgccgccgccaccgccaccgccgccgacgccggtgtctcgggcttcacctggagggagctgggcggctccccggcctc

SEQ ID NO: 24039 - DNA, 38 bp, Homo sapiens
  chr17:77808043-77808081
  hypo
tctagcaggatgacctcgggctgcgggagggcggcggc

SEQ ID NO: 24040 - DNA, 162 bp, Homo sapiens
  chr17:77808374-77808536
  hypo
caaaggcctccttggtcggggacagcttgcgggagccggcatcctggggctgcggatcgctaaccccggacacctcctcctccctcctcttgggcggcgcctccaccttcttctcctctgcgcccgccgcctttttaaaagtcctgtcggcaggagggtggc

SEQ ID NO: 24041 - DNA, 154 bp, Homo sapiens; identical to SEQ ID NO: 6154
  chr17:77813599-77813753
  hypo

SEQ ID NO: 24042 - DNA, 31 bp, Homo sapiens; identical to SEQ ID NO: 6155
  chr17:77813829-77813860
  hypo

SEQ ID NO: 24043 - DNA, 50 bp, Homo sapiens
  chr17:77825516-77825566
  hypo
atgaagctggtccacccgtacgggctggcaagagccgttggccacattct

SEQ ID NO: 24044 - DNA, 31 bp, Homo sapiens
  chr17:77825848-77825879
  hypo
cagaaattggtaaacacgacaaatcgtgact

SEQ ID NO: 24045 - DNA, 31 bp, Homo sapiens
  chr17:77908724-77908755
  hypo
cccgccccccgtgctccgggaggaccaggag

SEQ ID NO: 24046 - DNA, 31 bp, Homo sapiens
  chr17:77911917-77911948
  hypo
ccggggcaacagctgccgcggggtttttggc

SEQ ID NO: 24047 - DNA, 31 bp, Homo sapiens
  chr17:77912318-77912349
  hypo
cagcggttcaaaggcacgaggtatctagtga

SEQ ID NO: 24048 - DNA, 51 bp, Homo sapiens
  chr17:77912350-77912401
  hypo
atgctaggaccagggacgctattcccctggagcaggcgggtggggaaggag

SEQ ID NO: 24049 - DNA, 44 bp, Homo sapiens
  chr17:77912468-77912512
  hypo
tcagcctactgccacccgactgtgcagagcggacaataaagtgg

SEQ ID NO: 24050 - DNA, 31 bp, Homo sapiens
  chr17:77913050-77913081
  hypo
tgatggggctccaggacggtctcctcaaaag

SEQ ID NO: 24051 - DNA, 95 bp, Homo sapiens
  chr17:77913109-77913204
  hypo
ggaagtacctgctggacgacctgggttcatggagaaaagagaagccgagaaggtggaggaggccggtaagtggtgacctccgctttcctgctgag

SEQ ID NO: 24052 - DNA, 65 bp, Homo sapiens
  chr17:77914637-77914702
  hypo
tccggtgtcgggggcccgacctatctgcggaagccgaagccgtcctgcggcgtctttgggccctt

SEQ ID NO: 24053 - DNA, 158 bp, Homo sapiens
  chr17:77914725-77914883
  hypo
gggaaggcatctccaccgtgcccccgtagggacagctctccgagccgggatggtggccggtgcactccaccgcgggcatggagccgctgtcccacatgcctgacccgcacagcttacacagatcgtgcaggctgcaggggatccggggcaggaggcgg

SEQ ID NO: 24054 - DNA, 31 bp, Homo sapiens
  chr17:77914922-77914953
  hypo
gggggtgaggaggggccgggggacagcctgg

SEQ ID NO: 24055 - DNA, 31 bp, Homo sapiens
  chr17:77915952-77915983
  hypo
tccccgtagatggccacgatggccacgcaga

SEQ ID NO: 24056 - DNA, 82 bp, Homo sapiens
  chr17:77917678-77917760
  hypo
acgattttttttaattcgggagtggtgggaatgaagcctctcagaccgtccatgccgtgcttcccttcgttaatgcagatcg

SEQ ID NO: 24057 - DNA, 53 bp, Homo sapiens
  chr17:77918539-77918592
  hypo
ggtctgaagccagccacgtgggacgggaaggcagtcgccgtatggggggctaa

SEQ ID NO: 24058 - DNA, 67 bp, Homo sapiens
  chr17:77918597-77918664
  hypo
ggctgtgggtggggggcggcgaggcggacaggggcagcaggcagggtggccacggtggttcaggggc

SEQ ID NO: 24059 - DNA, 57 bp, Homo sapiens
  chr17:77918832-77918889
  hypo
caggtgctggtagaagcgcacgtgcgtcagccgcagcagctcgcgcaggtacagctg

SEQ ID NO: 24060 - DNA, 10 bp, Homo sapiens
  chr17:77921814-77921824
  hypo
aaggtaatgg

SEQ ID NO: 24061 - DNA, 31 bp, Homo sapiens
  chr17:77928736-77928767
  hypo
ctcgctttggcagtcacggatggagggcccc

SEQ ID NO: 24062 - DNA, 64 bp, Homo sapiens
  chr17:77930368-77930432
  hypo
ttgctgagtttgagggcggtttgtttcacagcaacggatcactgacacacgcaggacaagccag

SEQ ID NO: 24063 - DNA, 31 bp, Homo sapiens
  chr17:77932289-77932320
  hypo
cacaggcgtgagccaccgcgcccagccctga

SEQ ID NO: 24064 - DNA, 27 bp, Homo sapiens
  chr17:77937608-77937635
  hypo
tttgcatttccccgatgattaatgata

SEQ ID NO: 24065 - DNA, 60 bp, Homo sapiens
  chr17:77937641-77937701
  hypo
accttcatgtgcttatcgggcattcgtgtctcttctttggagacacgtcttttcaaatcc

SEQ ID NO: 24066 - DNA, 8 bp, Homo sapiens
  chr17:77946277-77946285
  hypo
ctaaaaag

SEQ ID NO: 24067 - DNA, 50 bp, Homo sapiens
  chr17:77946311-77946361
  hypo
catgaatgacacctgacgttacgctaagtgaaagacgccagacacagaag

SEQ ID NO: 24068 - DNA, 31 bp, Homo sapiens
  chr17:77949673-77949704
  hypo
atggcagcagcagctccggcaggcggctctc

SEQ ID NO: 24069 - DNA, 34 bp, Homo sapiens
  chr17:77951520-77951554
  hypo
cacacacatgtgcacacggcggtactggactcat

SEQ ID NO: 24070 - DNA, 62 bp, Homo sapiens
  chr17:77954475-77954537
  hypo
ccacatggcttggtcccgcctttcagccccccagggttcactcgaaccgcctccgcgcaccc

SEQ ID NO: 24071 - DNA, 62 bp, Homo sapiens
  chr17:77956293-77956355
  hypo
tctgcacacaatacaccgaacctgtgtgtgcacgtgtgtacaggtaccgtgcatctctttaa

SEQ ID NO: 24072 - DNA, 31 bp, Homo sapiens
  chr17:77956357-77956388
  hypo
attccctgaggcttggcgtggtggtggctca

SEQ ID NO: 24073 - DNA, 38 bp, Homo sapiens
  chr17:77980959-77980997
  hypo
gaggtgcgagccacaccgagcccgcggccatgtggcca

SEQ ID NO: 24074 - DNA, 74 bp, Homo sapiens
  chr17:77981016-77981090
  hypo
tcatcaggagcagggccgggctgtggtaagcaccccccagcacggtctccgggtggggacgagtcccaggccag

SEQ ID NO: 24075 - DNA, 31 bp, Homo sapiens
  chr17:77984226-77984257
  hypo
ccacccccaagccctgcgccagcttctcctc

SEQ ID NO: 24076 - DNA, 39 bp, Homo sapiens
  chr17:77984261-77984300
  hypo
tctggcgcagggctggcgagcatgcggtctggaacactc

SEQ ID NO: 24077 - DNA, 94 bp, Homo sapiens
  chr17:77984329-77984423
  hypo
gggggtcagggtaggccgcagctccgtcggggagggctggtgggaggctcctgagctccgggtgcgccggccccgagggcggggtgccttgcga

SEQ ID NO: 24078 - DNA, 31 bp, Homo sapiens
  chr17:77987118-77987149
  hypo
aataacctgggctgtgcgaccctggagcctc

SEQ ID NO: 24079 - DNA, 68 bp, Homo sapiens
  chr17:77987435-77987503
  hypo
caaggttgtggacttgcgttctgtctcacagcagtacgtgtcgcctcggcacccggtgggttctggtt

SEQ ID NO: 24080 - DNA, 31 bp, Homo sapiens
  chr17:77989974-77990005
  hypo
actgtaggattctactcgtgtgaggtcccta

SEQ ID NO: 24081 - DNA, 32 bp, Homo sapiens
  chr17:77991172-77991204
  hypo
caacccccttaaaaaacgtaaaaaccggccag

SEQ ID NO: 24082 - DNA, 31 bp, Homo sapiens
  chr17:78007923-78007954
  hypo
aattaggaactactaacgcaatcaccaaaat

SEQ ID NO: 24083 - DNA, 31 bp, Homo sapiens; identical to SEQ ID NO: 6158
  chr17:78009417-78009448
  hypo

SEQ ID NO: 24084 - DNA, 47 bp, Homo sapiens; identical to SEQ ID NO: 6159
  chr17:78009471-78009518
  hypo

SEQ ID NO: 24085 - DNA, 31 bp, Homo sapiens; identical to SEQ ID NO: 6160
  chr17:78009923-78009954
  hypo

SEQ ID NO: 24086 - DNA, 61 bp, Homo sapiens; identical to SEQ ID NO: 6161
  chr17:78010155-78010216
  hypo

SEQ ID NO: 24087 - DNA, 268 bp, Homo sapiens; identical to SEQ ID NO: 6162
  chr17:78010235-78010503
  hypo

SEQ ID NO: 24088 - DNA, 21 bp, Homo sapiens
  chr17:78021779-78021800
  hypo
aaaaaacaagccgggcgcggt

SEQ ID NO: 24089 - DNA, 31 bp, Homo sapiens
  chr17:78022347-78022378
  hypo
agctcctcaatggtgtcgctgtctctccccc

SEQ ID NO: 24090 - DNA, 31 bp, Homo sapiens
  chr17:78022384-78022415
  hypo
tccccccaggggtgcccgatgcccaccccag

SEQ ID NO: 24091 - DNA, 31 bp, Homo sapiens
  chr17:78022447-78022478
  hypo
tccagcagcccagcaccgaggagggggccat

SEQ ID NO: 24092 - DNA, 43 bp, Homo sapiens
  chr17:78022480-78022523
  hypo
cagagagagtggagtccgaggggagtgacgaggaagcagaaga

SEQ ID NO: 24093 - DNA, 79 bp, Homo sapiens
  chr17:78024049-78024128
  hypo
cctgcgcagccgccaacgaggagcgcaaaaagtgtaaggcaacccggcagccccacacgccatccggtcctggagggtt

SEQ ID NO: 24094 - DNA, 47 bp, Homo sapiens
  chr17:78024750-78024797
  hypo
tggcccagggcctgaccgccgtaggatgtgtgcggcaggtcagtggg

SEQ ID NO: 24095 - DNA, 60 bp, Homo sapiens
  chr17:78024818-78024878
  hypo
agtgggggctacagcacgtgctatgcaacattaccgataaagcaacgtccttgcacagag

SEQ ID NO: 24096 - DNA, 59 bp, Homo sapiens
  chr17:78024879-78024938
  hypo
tggtcatgtaggtgaccggggacagtggcttcctcttgtgactacggagtatttcagtc

SEQ ID NO: 24097 - DNA, 20 bp, Homo sapiens
  chr17:78031663-78031683
  hypo
gatttcgtctcaaaaaaaaa

SEQ ID NO: 24098 - DNA, 40 bp, Homo sapiens
  chr17:78055252-78055292
  hypo
ccttagtgagctccctcgtgtggggcgcagctctgtgcac

SEQ ID NO: 24099 - DNA, 31 bp, Homo sapiens
  chr17:78055312-78055343
  hypo
cgtaactggctctccccgctgcatttctaca

SEQ ID NO: 24100 - DNA, 37 bp, Homo sapiens
  chr17:78055355-78055392
  hypo
atcaagccaaatccaccgacggcgagattgaggccta

SEQ ID NO: 24101 - DNA, 56 bp, Homo sapiens
  chr17:78055409-78055465
  hypo
aggaggaagaaaagaacgagaagctggcgagcatcctgaaccggacagagacggaa

SEQ ID NO: 24102 - DNA, 41 bp, Homo sapiens
  chr17:78083746-78083787
  hypo
cctgccatcagcagctcgggccctgccgggagctacaggcc

SEQ ID NO: 24103 - DNA, 31 bp, Homo sapiens
  chr17:78096141-78096172
  hypo
aacgctctgccaggctcgccaggtctgcagt

SEQ ID NO: 24104 - DNA, 7 bp, Homo sapiens
  chr17:78122142-78122149
  hypo
cctccag

SEQ ID NO: 24105 - DNA, 31 bp, Homo sapiens
  chr17:78135900-78135931
  hypo
gaagacctccaaccaacggtgagtggcatct

SEQ ID NO: 24106 - DNA, 31 bp, Homo sapiens
  chr17:78143962-78143993
  hypo
ggggagtgggaggggccggcatcttcctcat

SEQ ID NO: 24107 - DNA, 31 bp, Homo sapiens
  chr17:78155471-78155502
  hypo
acctcttccagcttcccgtggcccacatggc

SEQ ID NO: 24108 - DNA, 61 bp, Homo sapiens
  chr17:78158228-78158289
  hypo
tgtgtagcctgcatggcgacgaggtgtgccttgtccagtagctgcccgtggcctggctggc

SEQ ID NO: 24109 - DNA, 31 bp, Homo sapiens
  chr17:78158300-78158331
  hypo
ctgcccatcctgctgacgcctgggcaggtct

SEQ ID NO: 24110 - DNA, 55 bp, Homo sapiens
  chr17:78158346-78158401
  hypo
tgcatatttgtagggccgcctacgtcccactgcccagctgcggcagtgacatggg

SEQ ID NO: 24111 - DNA, 2 bp, Homo sapiens
  chr17:78159114-78159116
  hypo
gc

SEQ ID NO: 24112 - DNA, 31 bp, Homo sapiens
  chr17:78159124-78159155
  hypo
caggtgtgagcccctgcgctggccagcgctt

SEQ ID NO: 24113 - DNA, 31 bp, Homo sapiens
  chr17:78165106-78165137
  hypo
cgtcgtggcccacaggcgtactccgcgaggg

SEQ ID NO: 24114 - DNA, 34 bp, Homo sapiens
  chr17:78179549-78179583
  hypo
acctgggtgaccttgtcgccgacctctgggtccc

SEQ ID NO: 24115 - DNA, 85 bp, Homo sapiens
  chr17:78182031-78182116
  hypo
gcagcctggctcctgacggctggagcgacctggacggcctgctcagctgtgtccgccaggccatcgccgacgagcagaagaaggt

SEQ ID NO: 24116 - DNA, 31 bp, Homo sapiens
  chr17:78217103-78217134
  hypo
aggctgagaaaatccacggcctcctcaaaga

SEQ ID NO: 24117 - DNA, 31 bp, Homo sapiens
  chr17:78222247-78222278
  hypo
cttagcacccctctcccggtcccctgcagca

SEQ ID NO: 24118 - DNA, 32 bp, Homo sapiens
  chr17:78280675-78280707
  hypo
tctcatgtgatgcacttcgtagctgccattct

SEQ ID NO: 24119 - DNA, 34 bp, Homo sapiens; identical to SEQ ID NO: 6166
  chr17:78388648-78388682
  hypo

SEQ ID NO: 24120 - DNA, 91 bp, Homo sapiens; identical to SEQ ID NO: 6167
  chr17:78389460-78389551
  hypo

SEQ ID NO: 24121 - DNA, 190 bp, Homo sapiens; identical to SEQ ID NO: 6168
  chr17:78428376-78428566
  hypo

SEQ ID NO: 24122 - DNA, 50 bp, Homo sapiens; identical to SEQ ID NO: 6169
  chr17:78428637-78428687
  hypo

SEQ ID NO: 24123 - DNA, 34 bp, Homo sapiens
  chr17:78517568-78517602
  hypo
ggattataggcgtgagccacggtgccctgcctac

SEQ ID NO: 24124 - DNA, 105 bp, Homo sapiens
  chr17:78529318-78529423
  hypo
caaggtggacagctcacgggaagtgtcctgtctctccagggcgctgctgcctagacagactgacagacacggtagcaccaaattacaatacgcaagtataggtat

SEQ ID NO: 24125 - DNA, 31 bp, Homo sapiens
  chr17:78529443-78529474
  hypo
gagaatgacattattacggggagcatcttga

SEQ ID NO: 24126 - DNA, 67 bp, Homo sapiens
  chr17:78599635-78599702
  hypo
ccggctctggcctgggcggggctcgccaagcctgtggtctggtccaggggcccgtctccagctgtgc

SEQ ID NO: 24127 - DNA, 36 bp, Homo sapiens
  chr17:78599736-78599772
  hypo
acctttgagtaatttccgatgcgctcacctgtgatt

SEQ ID NO: 24128 - DNA, 31 bp, Homo sapiens
  chr17:78611007-78611038
  hypo
gatgagggagagcagacgtcatgtctgtgag

SEQ ID NO: 24129 - DNA, 31 bp, Homo sapiens
  chr17:78725780-78725811
  hypo
taggtatttgtagacacgtgaatgaaggagt

SEQ ID NO: 24130 - DNA, 31 bp, Homo sapiens
  chr17:78829655-78829686
  hypo
ctgcggaggagcagggcgcccctgagcctga

SEQ ID NO: 24131 - DNA, 31 bp, Homo sapiens
  chr17:78867125-78867156
  hypo
gcgccaggtgtgtgtgcgccagggtgtgtgt

SEQ ID NO: 24132 - DNA, 31 bp, Homo sapiens
  chr17:78898616-78898647
  hypo
ctctgacagccctggccgccacaggttccac

SEQ ID NO: 24133 - DNA, 38 bp, Homo sapiens
  chr17:78975916-78975954
  hypo
aagaaatgcgtgggacagaatggcgggtccatcctgga

SEQ ID NO: 24134 - DNA, 52 bp, Homo sapiens
  chr17:79001012-79001064
  hypo
agggaagccatctgcgcggcgcccagcagcatggagacgtctgggtcctccc

SEQ ID NO: 24135 - DNA, 90 bp, Homo sapiens
  chr17:79001564-79001654
  hypo
cctgcccagctccagacgtgtggctgaagcggccagctcggccagttcgtcccggcgccacatgtgtccttcctccggccccagacccca

SEQ ID NO: 24136 - DNA, 256 bp, Homo sapiens; identical to SEQ ID NO: 6172
  chr17:79008305-79008561
  hypo

SEQ ID NO: 24137 - DNA, 266 bp, Homo sapiens; identical to SEQ ID NO: 6173
  chr17:79008840-79009106
  hypo

SEQ ID NO: 24138 - DNA, 138 bp, Homo sapiens; identical to SEQ ID NO: 6175
  chr17:79009227-79009365
  hypo

SEQ ID NO: 24139 - DNA, 101 bp, Homo sapiens; identical to SEQ ID NO: 6176
  chr17:79009389-79009490
  hypo

SEQ ID NO: 24140 - DNA, 31 bp, Homo sapiens
  chr17:79020691-79020722
  hypo
ggctgtggtggcacagcgggctgggggaagc

SEQ ID NO: 24141 - DNA, 4 bp, Homo sapiens
  chr17:79027367-79027371
  hypo
aggg

SEQ ID NO: 24142 - DNA, 42 bp, Homo sapiens
  chr17:79027536-79027578
  hypo
ctggcaggtggaactgcgcccgggccccgtggggtgggagct

SEQ ID NO: 24143 - DNA, 31 bp, Homo sapiens
  chr17:79040987-79041018
  hypo
ccctacagtaggactccggcaggggtgctcc

SEQ ID NO: 24144 - DNA, 31 bp, Homo sapiens
  chr17:79041934-79041965
  hypo
cctggcagacactggtcgcagccacgcaggg

SEQ ID NO: 24145 - DNA, 94 bp, Homo sapiens
  chr17:79042374-79042468
  hypo
ccccgcagtcagcagccgcacagacggagccagcactggagcccgtctcaggtggctccgctcttgtgtcccctgtccccgcttccctgccctg

SEQ ID NO: 24146 - DNA, 31 bp, Homo sapiens
  chr17:79042494-79042525
  hypo
gcagagaaggccacctcggtggctccttggt

SEQ ID NO: 24147 - DNA, 31 bp, Homo sapiens
  chr17:79042526-79042557
  hypo
gtgacatgaagtcctgcgggagggcctgggg

SEQ ID NO: 24148 - DNA, 31 bp, Homo sapiens
  chr17:79044176-79044207
  hypo
attgaatgtgctctgccgggcaaccttggtc

SEQ ID NO: 24149 - DNA, 55 bp, Homo sapiens
  chr17:79047313-79047368
  hypo
tgctccatttgggattcggagtcaagcatttggggaccctcgggcagggtctgag

SEQ ID NO: 24150 - DNA, 175 bp, Homo sapiens
  chr17:79051452-79051627
  hypo
gcttgggcttcccgcccgtcctgaggctggtggtgctgagtatgcgggtggctgtgggagcgggtgccgtctcaggtgcgagccagacaccgtgggtgcgggtgcaggtgtgggtaccgttttgggtgggagccgggcgctgtgggtgcaggttccacctcggagctgggtgctg

SEQ ID NO: 24151 - DNA, 85 bp, Homo sapiens
  chr17:79051750-79051835
  hypo
cgtattgggtgggagccggacgctgtgggtgcaggttccacctcggagctgggtgctgtgggcacaggtgcgggtgccatcttgg

SEQ ID NO: 24152 - DNA, 43 bp, Homo sapiens
  chr17:79051876-79051919
  hypo
tgggcactctgggtgccggtgcgggtgtcgtcttgggtgggag

SEQ ID NO: 24153 - DNA, 35 bp, Homo sapiens
  chr17:79052329-79052364
  hypo
cgtattgggtgggagccgggcgctgtgggtgcagg

SEQ ID NO: 24154 - DNA, 31 bp, Homo sapiens
  chr17:79060230-79060261
  hypo
tttgaatctcaggctgcgctgaagaaatacc

SEQ ID NO: 24155 - DNA, 31 bp, Homo sapiens
  chr17:79062264-79062295
  hypo
tgtccatcactcagtccgttttagagcattt

SEQ ID NO: 24156 - DNA, 106 bp, Homo sapiens
  chr17:79062368-79062474
  hypo
tgttatggacattctgcgtagctggaatcccacagtgtccggcctttggtgcctggtggctcacgtggcacggagggttcttaaagctcatcgtgccgtagcctgc

SEQ ID NO: 24157 - DNA, 51 bp, Homo sapiens
  chr17:79062727-79062778
  hypo
aggcctgaggcccccacgcagtcactgtggccctgccgcaccagctccctg

SEQ ID NO: 24158 - DNA, 70 bp, Homo sapiens
  chr17:79062814-79062884
  hypo
tcaggagggccctgaccgcacacctggcctctgcctgccctccgcgctgctctgccgtgggccccgggtg

SEQ ID NO: 24159 - DNA, 31 bp, Homo sapiens
  chr17:79065508-79065539
  hypo
agtggaagtgaccccacgcaagggtggcctg

SEQ ID NO: 24160 - DNA, 62 bp, Homo sapiens
  chr17:79065544-79065606
  hypo
agtgtccagccaggggcgtgagtagcagagaagcagatgcctccctgcggttcccaagctgc

SEQ ID NO: 24161 - DNA, 56 bp, Homo sapiens
  chr17:79067465-79067521
  hypo
cccaggatcccccctccggctgccccccatctctgggtgtgcgaggcctatagcct

SEQ ID NO: 24162 - DNA, 31 bp, Homo sapiens
  chr17:79069908-79069939
  hypo
gcaccttctcttcccccgagtcctattcaga

SEQ ID NO: 24163 - DNA, 75 bp, Homo sapiens
  chr17:79072578-79072653
  hypo
gagccagggccacagacgcaagggctgccgagcggctgaccgccgggtcagggtggggaccgcctgctggctgcc

SEQ ID NO: 24164 - DNA, 187 bp, Homo sapiens
  chr17:79072975-79073162
  hypo
ctgggctcccagtctccgctcggtgacctcttgtctgatcctccccacgaacttccttctcacgttctcccttggtgcacgcttatccggaaaccaggcagccaggtgtcttagcgtcccgctccccgtcattcagagccggagccgggtgggagaggagatgaggtgcgcccggagtcccctctgc

SEQ ID NO: 24165 - DNA, 31 bp, Homo sapiens
  chr17:79073975-79074006
  hypo
gggcagtgtccaggctcgaactctcgtttat

SEQ ID NO: 24166 - DNA, 181 bp, Homo sapiens
  chr17:79074738-79074919
  hypo
cacatgctgctgccctcgtgacctctgagagacccctctgcccgtcatctgttgagggcccctccttgggccggtagactcttggccctgtgtttcccgctaggcgtcccccggcacagtcctgcggccctgtgtctcccgctaggtgtcccccggcacagtcctgcggccctgtgtctcc

SEQ ID NO: 24167 - DNA, 78 bp, Homo sapiens
  chr17:79077410-79077488
  hypo
gcgccaccctccccagcgccctgtcggcctccaagtccaacctggtcatttccgaccccattccgggggccaagcccc

SEQ ID NO: 24168 - DNA, 60 bp, Homo sapiens
  chr17:79077902-79077962
  hypo
ccaccagtaagggctccgctggggtgttgggctggggtccctggacgtgcctcctcagac

SEQ ID NO: 24169 - DNA, 31 bp, Homo sapiens
  chr17:79078010-79078041
  hypo
ctcacaattatgtgaccgtgtgtacctacat

SEQ ID NO: 24170 - DNA, 37 bp, Homo sapiens
  chr17:79078511-79078548
  hypo
agatgtgagtgtttctcgggggcgggctccaggcagc

SEQ ID NO: 24171 - DNA, 41 bp, Homo sapiens
  chr17:79079545-79079586
  hypo
caatcttggtgccatccgtggcttagcgtgacactggggct

SEQ ID NO: 24172 - DNA, 31 bp, Homo sapiens
  chr17:79080045-79080076
  hypo
gctccttgtctgctaccgcagggccatcccc

SEQ ID NO: 24173 - DNA, 31 bp, Homo sapiens
  chr17:79082609-79082640
  hypo
gccccaatctgtgctccgcccttgtcctggg

SEQ ID NO: 24174 - DNA, 95 bp, Homo sapiens
  chr17:79082649-79082744
  hypo
agggtcaggaggccaacgggagctgctgaaaggggcattgctcggtgctggcggactcgccgcctgtggctgggcagcgtcgtgcagccaggcag

SEQ ID NO: 24175 - DNA, 54 bp, Homo sapiens
  chr17:79082967-79083021
  hypo
atggtgctgctccatccgccccccctcccctgtgtttacgcgccccatcctgtg

SEQ ID NO: 24176 - DNA, 46 bp, Homo sapiens
  chr17:79083051-79083097
  hypo
gcaggacctgctgggccgtgcggggcaccctcggcctcaccctgca

SEQ ID NO: 24177 - DNA, 34 bp, Homo sapiens
  chr17:79083113-79083147
  hypo
ctgcttttctaaggctcgccgtgagccaggtcta

SEQ ID NO: 24178 - DNA, 91 bp, Homo sapiens
  chr17:79083369-79083460
  hypo
acagagaaagggggctcgtgccaagctcgaggggcctcctgaggaagccggccgctcctgtgagggaggccgggcccgggcacctgagggc

SEQ ID NO: 24179 - DNA, 31 bp, Homo sapiens
  chr17:79083462-79083493
  hypo
ctccctctggacactgcgggccaggtgtaca

SEQ ID NO: 24180 - DNA, 31 bp, Homo sapiens
  chr17:79084534-79084565
  hypo
caagtgaggcaggctccgcaggcgccgtcca

SEQ ID NO: 24181 - DNA, 40 bp, Homo sapiens
  chr17:79086356-79086396
  hypo
gaggcccaagcgcccacgctggacccgattccagaagggc

SEQ ID NO: 24182 - DNA, 31 bp, Homo sapiens
  chr17:79086874-79086905
  hypo
aaattagaaaagccaccggtctcccctgcgg

SEQ ID NO: 24183 - DNA, 129 bp, Homo sapiens
  chr17:79093966-79094095
  hypo
agccccgggcagaccccgggtggcggcggcccacctggtcaaagaggtagacggtgacgtcgtcgaagaaggacacggccttcttcttgcgttccaggtcctcgcagaaggtctcggacagcaggctgg

SEQ ID NO: 24184 - DNA, 41 bp, Homo sapiens
  chr17:79094096-79094137
  hypo
catcttgagcaggctgcgcaggttgcgcgcgctctggctct

SEQ ID NO: 24185 - DNA, 117 bp, Homo sapiens
  chr17:79094202-79094319
  hypo
tagcagcggagctcctcgtcagactcgtcgctgtcctcactgtcctcctcctcctcctccggccggccctccaaggccgcagggaggccgggcagagccaggcggagtggggctctg

SEQ ID NO: 24186 - DNA, 31 bp, Homo sapiens
  chr17:79102269-79102300
  hypo
cttcccgaaccagccacggccgatttccttc

SEQ ID NO: 24187 - DNA, 31 bp, Homo sapiens
  chr17:79113512-79113543
  hypo
ccccagccctccactgcgctgctgaggctgt

SEQ ID NO: 24188 - DNA, 55 bp, Homo sapiens
  chr17:79114514-79114569
  hypo
ccgtggggctgtgagccgtggggccgggagaccgtggggccgtgagccgtggggc

SEQ ID NO: 24189 - DNA, 31 bp, Homo sapiens
  chr17:79164758-79164789
  hypo
cgcagattctcgccctcggcctccccaagct

SEQ ID NO: 24190 - DNA, 37 bp, Homo sapiens
  chr17:79168719-79168756
  hypo
tcccggcgggctttctcggtggcgctcattaattctt

SEQ ID NO: 24191 - DNA, 31 bp, Homo sapiens; identical to SEQ ID NO: 6177
  chr17:79197096-79197127
  hypo

SEQ ID NO: 24192 - DNA, 52 bp, Homo sapiens; identical to SEQ ID NO: 6180
  chr17:79319252-79319304
  hypo

SEQ ID NO: 24193 - DNA, 31 bp, Homo sapiens
  chr17:79543262-79543293
  hypo
ttaaatcctaaaagcacggaaagagtatgta

SEQ ID NO: 24194 - DNA, 21 bp, Homo sapiens
  chr17:79566025-79566046
  hypo
tattttaggccaggcacggtg

SEQ ID NO: 24195 - DNA, 31 bp, Homo sapiens
  chr17:79608475-79608506
  hypo
ctcccacccccatctccgcttgccccacaca

SEQ ID NO: 24196 - DNA, 56 bp, Homo sapiens
  chr17:79611881-79611937
  hypo
ctccagtgctgccctccgccatccggcatcctcccatccctcgaaggctctgccac

SEQ ID NO: 24197 - DNA, 31 bp, Homo sapiens
  chr17:79612315-79612346
  hypo
tgggggggcccctgcccgcagaccccatgct

SEQ ID NO: 24198 - DNA, 70 bp, Homo sapiens
  chr17:79612549-79612619
  hypo
tcgcccactaccaggacgacccagacctgcgcttcctcctcgaccaagtccagctcgggctgaggtgctg

SEQ ID NO: 24199 - DNA, 53 bp, Homo sapiens
  chr17:79612799-79612852
  hypo
catatccacactggcacgtctcgtgctcacaggtttcacgtgtgtggacacac

SEQ ID NO: 24200 - DNA, 37 bp, Homo sapiens
  chr17:79619167-79619204
  hypo
gcgcggtgcctgtgtgcgcacacgagtgagtggacac

SEQ ID NO: 24201 - DNA, 43 bp, Homo sapiens
  chr17:79637466-79637509
  hypo
aaaaaagcaaaaaaagcgtgagtggaggcgggagggggagggg

SEQ ID NO: 24202 - DNA, 43 bp, Homo sapiens
  chr17:79655903-79655946
  hypo
gggcagtcaggctcaacgggcacagtggcgaggggcctgggaa

SEQ ID NO: 24203 - DNA, 58 bp, Homo sapiens
  chr17:79705355-79705413
  hypo
aatgcctgctcttctacggcactgagtgtcgggtgatttgttacgggcagtagacagc

SEQ ID NO: 24204 - DNA, 31 bp, Homo sapiens
  chr17:79705427-79705458
  hypo
taggacaccaagtcctcgcctcctggaggcc

SEQ ID NO: 24205 - DNA, 31 bp, Homo sapiens
  chr17:79769629-79769660
  hypo
gcctggccaccctccccgagaggagcttctt

SEQ ID NO: 24206 - DNA, 38 bp, Homo sapiens
  chr17:79772551-79772589
  hypo
gccacacagagaggtccggcctacgccagtcctcgtgc

SEQ ID NO: 24207 - DNA, 31 bp, Homo sapiens
  chr17:79772623-79772654
  hypo
gccacacagagaggtccggcctacgccagtc

SEQ ID NO: 24208 - DNA, 31 bp, Homo sapiens
  chr17:79772781-79772812
  hypo
aaagagctgcctcctgcgtgctggacacagg

SEQ ID NO: 24209 - DNA, 31 bp, Homo sapiens
  chr17:79781434-79781465
  hypo
ggtggcatccacgtcacgagagtgcctgccc

SEQ ID NO: 24210 - DNA, 40 bp, Homo sapiens
  chr17:79851769-79851809
  hypo
ttgctgctggggcttgctgttctcccgtagctcccctgca

SEQ ID NO: 24211 - DNA, 44 bp, Homo sapiens
  chr17:79851846-79851890
  hypo
tttgttttaatagaaacggggctcatagcagggcataggggttc

SEQ ID NO: 24212 - DNA, 31 bp, Homo sapiens
  chr17:79863960-79863991
  hypo
ctggcccccactcacccggcaggccagcacg

SEQ ID NO: 24213 - DNA, 42 bp, Homo sapiens
  chr17:79870435-79870477
  hypo
gccttcttcaccagcacgcaggggagtcgccagtgagaaaat

SEQ ID NO: 24214 - DNA, 31 bp, Homo sapiens
  chr17:79870491-79870522
  hypo
tgccaaaaagggaaagcggcatcaggcgggc

SEQ ID NO: 24215 - DNA, 37 bp, Homo sapiens; identical to SEQ ID NO: 6183
  chr17:79886040-79886077
  hypo

SEQ ID NO: 24216 - DNA, 56 bp, Homo sapiens
  chr17:79887686-79887742
  hypo
gctggatgcctcctcccgcaggcacctcccgggcatcctcccgccccaggctgcac

SEQ ID NO: 24217 - DNA, 56 bp, Homo sapiens
  chr17:79887745-79887801
  hypo
ctgtgggactggcccccgcaggcacctcccgggcaccctcccgccccaggctgcag

SEQ ID NO: 24218 - DNA, 104 bp, Homo sapiens
  chr17:79899263-79899367
  hypo
ctcgggggaacactcccgccgggcaaagtacagcggatacaggaccgcagccgtcgcgcatagcagggtggccagcatggcgaaggcggcggtgaagttgcccc

SEQ ID NO: 24219 - DNA, 31 bp, Homo sapiens
  chr17:79906752-79906783
  hypo
agccccctctccctcccgagctctgtccttg

SEQ ID NO: 24220 - DNA, 107 bp, Homo sapiens
  chr17:79906816-79906923
  hypo
ctggctctggaggccccgagaaggaggccaccagactcccccggaccccttctctcacctccagccctcggtctccacatctctgaccttgtcgtctccattggctg

SEQ ID NO: 24221 - DNA, 31 bp, Homo sapiens
  chr17:79914599-79914630
  hypo
cgctccgggaccaccccgttccagtacctgg

SEQ ID NO: 24222 - DNA, 31 bp, Homo sapiens
  chr17:79914638-79914669
  hypo
ccacaggttaggctgccgtgggtctcgtccc

SEQ ID NO: 24223 - DNA, 41 bp, Homo sapiens
  chr17:79942954-79942995
  hypo
cacacctacacatctgcgcacatacccgcacacacctgcat

SEQ ID NO: 24224 - DNA, 43 bp, Homo sapiens
  chr17:79942996-79943039
  hypo
taaacatgcacacacacgcacatctgcacgcacatgcgcacac

SEQ ID NO: 24225 - DNA, 31 bp, Homo sapiens
  chr17:79982079-79982110
  hypo
cctgaaaaggggcccacggggagggccttgg

SEQ ID NO: 24226 - DNA, 31 bp, Homo sapiens
  chr17:79986711-79986742
  hypo
aacctcctattgggggcggcggggggacccc

SEQ ID NO: 24227 - DNA, 49 bp, Homo sapiens
  chr17:80005326-80005375
  hypo
caagtgcacacacccacgcacgcagacactgccacgcacacacccactg

SEQ ID NO: 24228 - DNA, 31 bp, Homo sapiens; identical to SEQ ID NO: 6186
  chr17:80010342-80010373
  hypo

SEQ ID NO: 24229 - DNA, 31 bp, Homo sapiens
  chr17:80077689-80077720
  hypo
gaggctgtcataaaaacgcaggtgagagagg

SEQ ID NO: 24230 - DNA, 57 bp, Homo sapiens
  chr17:80077737-80077794
  hypo
gggtcctccaaagagccgcatccagggtgtatgggggagccccgactccagccagct

SEQ ID NO: 24231 - DNA, 55 bp, Homo sapiens
  chr17:80085171-80085226
  hypo
tccccaggagcagggccgtctaaagtgcaccaatgcccacgcgtctcacctgggc

SEQ ID NO: 24232 - DNA, 35 bp, Homo sapiens
  chr17:80085229-80085264
  hypo
attctaagtcagcctgcgcccgggtgtacagtgct

SEQ ID NO: 24233 - DNA, 19 bp, Homo sapiens
  chr17:80085266-80085285
  hypo
attctaagtcagcctgcgc

SEQ ID NO: 24234 - DNA, 23 bp, Homo sapiens
  chr17:80085323-80085346
  hypo
cgggtgtacggtgctgcactagg

SEQ ID NO: 24235 - DNA, 31 bp, Homo sapiens
  chr17:80085372-80085403
  hypo
gctttgcaccataacccgggaaacactcagg

SEQ ID NO: 24236 - DNA, 31 bp, Homo sapiens
  chr17:80085459-80085490
  hypo
cagggtgcaggaggcacgcagggtgctgact

SEQ ID NO: 24237 - DNA, 161 bp, Homo sapiens
  chr17:80144202-80144363
  hypo
tagcttaagactgcaacggggggccaaggttaggcgcacaggagtggtgacgcccagtcacctcggccgcactacatggaaaatggaagcacctgcggcccctctcaccccgtataccgaccacagaggtcgccccgcacaccgaccgcagaggctttagg

SEQ ID NO: 24238 - DNA, 31 bp, Homo sapiens
  chr17:80172375-80172406
  hypo
gaacccatgtgtgggccgggcacagtgctca

SEQ ID NO: 24239 - DNA, 31 bp, Homo sapiens
  chr17:80176132-80176163
  hypo
tcactgggggggtggacggccaaggggagcc

SEQ ID NO: 24240 - DNA, 31 bp, Homo sapiens; identical to SEQ ID NO: 24239
  chr17:80176211-80176242
  hypo

SEQ ID NO: 24241 - DNA, 31 bp, Homo sapiens
  chr17:80201900-80201931
  hypo
gtccctaactgctctccgagggcctcaagag

SEQ ID NO: 24242 - DNA, 58 bp, Homo sapiens
  chr17:80202409-80202467
  hypo
cttttcttcccagccccgttacaaccgagttcacgtggggggccgcagtgcagcccca

SEQ ID NO: 24243 - DNA, 31 bp, Homo sapiens
  chr17:80222099-80222130
  hypo
cacctacaaatgtgccgcggagccttctcac

SEQ ID NO: 24244 - DNA, 60 bp, Homo sapiens
  chr17:80229869-80229929
  hypo
ggatcttggaataactcgtgcattgcacaatcccactaacaagtgcggaaaattaagtta

SEQ ID NO: 24245 - DNA, 21 bp, Homo sapiens
  chr17:80229940-80229961
  hypo
caaacttgggccaggcgcggt

SEQ ID NO: 24246 - DNA, 61 bp, Homo sapiens
  chr17:80251904-80251965
  hypo
atgacttaggtatatacgcatggggggaatcctcgtaaggcaagaacgtgctgcacattct

SEQ ID NO: 24247 - DNA, 31 bp, Homo sapiens
  chr17:80251973-80252004
  hypo
ggacaggataagcacacgagtagatctaagt

SEQ ID NO: 24248 - DNA, 79 bp, Homo sapiens; identical to SEQ ID NO: 6187
  chr17:80277697-80277776
  hypo

SEQ ID NO: 24249 - DNA, 38 bp, Homo sapiens
  chr17:80289413-80289451
  hypo
cacttatattaaaacacgattaacgatctcaaactcag

SEQ ID NO: 24250 - DNA, 31 bp, Homo sapiens
  chr17:80294543-80294574
  hypo
cttcctcctaatgtcccgaagataactcgtc

SEQ ID NO: 24251 - DNA, 31 bp, Homo sapiens
  chr17:80303789-80303820
  hypo
aagataactgttttcccgaaattaatataat

SEQ ID NO: 24252 - DNA, 25 bp, Homo sapiens
  chr17:80303854-80303879
  hypo
ggttctaaaattcatacgaaggccg

SEQ ID NO: 24253 - DNA, 44 bp, Homo sapiens; identical to SEQ ID NO: 6188
  chr17:80332248-80332292
  hypo

SEQ ID NO: 24254 - DNA, 31 bp, Homo sapiens
  chr17:80338862-80338893
  hypo
accaaatgcagaaaccgcgcaggatggagcc

SEQ ID NO: 24255 - DNA, 15 bp, Homo sapiens
  chr17:80479372-80479387
  hypo
cggttgttggagatg

SEQ ID NO: 24256 - DNA, 52 bp, Homo sapiens
  chr17:80479404-80479456
  hypo
ttttcttcttgacttgcgtgttgtgtgtgtgtgcatgcgctgttctgtttct

SEQ ID NO: 24257 - DNA, 41 bp, Homo sapiens
  chr17:80479512-80479553
  hypo
aatgttattttcaggccgggcgcggtggctcacgcctgtaa

SEQ ID NO: 24258 - DNA, 48 bp, Homo sapiens
  chr17:80535333-80535381
  hypo
ggccgggttaaggtctcgcagccaaagctgcggcgtgctcactgccca

SEQ ID NO: 24259 - DNA, 40 bp, Homo sapiens
  chr17:80571674-80571714
  hypo
gttctgaggctgttcacgtgcactgcgagaaaacccaccc

SEQ ID NO: 24260 - DNA, 31 bp, Homo sapiens
  chr17:80571745-80571776
  hypo
tatcaactggtaattacgctcctactccccc

SEQ ID NO: 24261 - DNA, 34 bp, Homo sapiens
  chr17:80571800-80571834
  hypo
agacaagccagggtgacgccggctcacttgaagc

SEQ ID NO: 24262 - DNA, 337 bp, Homo sapiens; identical to SEQ ID NO: 6190
  chr17:80655901-80656238
  hypo

SEQ ID NO: 24263 - DNA, 140 bp, Homo sapiens; identical to SEQ ID NO: 6191
  chr17:80656360-80656500
  hypo

SEQ ID NO: 24264 - DNA, 139 bp, Homo sapiens; identical to SEQ ID NO: 6192
  chr17:80656563-80656702
  hypo

SEQ ID NO: 24265 - DNA, 250 bp, Homo sapiens; identical to SEQ ID NO: 6193
  chr17:80656731-80656981
  hypo

SEQ ID NO: 24266 - DNA, 60 bp, Homo sapiens; identical to SEQ ID NO: 6194
  chr17:80657001-80657061
  hypo

SEQ ID NO: 24267 - DNA, 31 bp, Homo sapiens
  chr17:80673405-80673436
  hypo
tacacacagaaaagtgcgtgaacacacacat

SEQ ID NO: 24268 - DNA, 43 bp, Homo sapiens
  chr17:80692469-80692512
  hypo
ctcatgcatggccgggcgtggtggttcacggctgtaatcccag

SEQ ID NO: 24269 - DNA, 84 bp, Homo sapiens
  chr17:80692895-80692979
  hypo
caataaaaaaacctcacgtcaaatgacttcagcacggactgggctcaggtgcgcacctgctcgtgtgcacgcgtgtgtacccac

SEQ ID NO: 24270 - DNA, 36 bp, Homo sapiens; identical to SEQ ID NO: 6196
  chr17:80693227-80693263
  hypo

SEQ ID NO: 24271 - DNA, 58 bp, Homo sapiens; identical to SEQ ID NO: 6197
  chr17:80693276-80693334
  hypo

SEQ ID NO: 24272 - DNA, 38 bp, Homo sapiens; identical to SEQ ID NO: 6198
  chr17:80693416-80693454
  hypo

SEQ ID NO: 24273 - DNA, 27 bp, Homo sapiens
  chr17:80712865-80712892
  hypo
atgtccccaaggaagtcgggctacagc

SEQ ID NO: 24274 - DNA, 46 bp, Homo sapiens
  chr17:80732635-80732681
  hypo
tattgcaaacagtccacgtaaaattgtgtaccgttctgactgattt

SEQ ID NO: 24275 - DNA, 49 bp, Homo sapiens
  chr17:80747261-80747310
  hypo
tcacaggcagcccgtcgcggggtcatgtgctagacggggagggggcttg

SEQ ID NO: 24276 - DNA, 31 bp, Homo sapiens
  chr17:80749613-80749644
  hypo
tcatgaaacagtcatgcgtcccctaacaatg

SEQ ID NO: 24277 - DNA, 70 bp, Homo sapiens
  chr17:80772871-80772941
  hypo
cctgttgctgccatctcgactcgtggatggtgagtagctgaagcacggtcagctgcgtcaccaggctgtc

SEQ ID NO: 24278 - DNA, 96 bp, Homo sapiens
  chr17:80797663-80797759
  hypo
ggtcctgagtaatcctcggagcccagagcaaggcagagcagacacggagcaaacgctgcgttcagctgggtattttagatacgtctgagaagagtt

SEQ ID NO: 24279 - DNA, 82 bp, Homo sapiens
  chr17:80797813-80797895
  hypo
agtgctgggatgtggccggtcttggtgccggtggctggcggtgctcaggaagcagtacctgttctcacgcttgctgggtgaa

SEQ ID NO: 24280 - DNA, 106 bp, Homo sapiens
  chr17:80797931-80798037
  hypo
gtaggagttgagccctcggggcgtagagatgcacctgatattcctcctgcccgcagctacgattcatgtgtttgcacccaccgagctgctgcgggcagcctcccca

SEQ ID NO: 24281 - DNA, 126 bp, Homo sapiens
  chr17:80798048-80798174
  hypo
agcaagcaagttatctcgccgactcccagcgctgtctccagactcaactgtctgtgagtgcggcgtcggtgctgcctggacggccatatgtcagagggctttcgatgtgtccgcagttagaataga

SEQ ID NO: 24282 - DNA, 45 bp, Homo sapiens
  chr17:80798185-80798230
  hypo
tcatcagaatcacacccgatgaatatttggcgtcatgataaagac

SEQ ID NO: 24283 - DNA, 31 bp, Homo sapiens
  chr17:80798249-80798280
  hypo
aacttgagcatgtgtacgcaggaggcaaaca

SEQ ID NO: 24284 - DNA, 62 bp, Homo sapiens
  chr17:80798283-80798345
  hypo
ggattgattctcaagcgcgcataccctgggaggcacagtattcatggcgtccttgccatgag

SEQ ID NO: 24285 - DNA, 31 bp, Homo sapiens
  chr17:80798419-80798450
  hypo
tcctcaggagctgagccggcagggagggagc

SEQ ID NO: 24286 - DNA, 31 bp, Homo sapiens
  chr17:80798464-80798495
  hypo
ggctgcagggacctgccggagcttgcccgac

SEQ ID NO: 24287 - DNA, 58 bp, Homo sapiens
  chr17:80798519-80798577
  hypo
gcagggtgtgtgggtgcgggggagggggccagctgtgcactcccgcaaaccaccctcc

SEQ ID NO: 24288 - DNA, 74 bp, Homo sapiens
  chr17:80798646-80798720
  hypo
tgcttgcttgcttaatcggaggccgcaccccagttgtagcgaaggctggcatgtggtgtcggtttgaggactgg

SEQ ID NO: 24289 - DNA, 31 bp, Homo sapiens
  chr17:80821581-80821612
  hypo
agactgtaagcctcctcgggaagcagcagtt

SEQ ID NO: 24290 - DNA, 79 bp, Homo sapiens
  chr17:80830875-80830954
  hypo
gcttctgagccaggcccgtctgggcagcagctcccaggccctggcccggggctcagcgctgcctcgtggctgagaagct

SEQ ID NO: 24291 - DNA, 31 bp, Homo sapiens
  chr17:80832118-80832149
  hypo
ctgaaggactgtaggacgcactgtgggctgc

SEQ ID NO: 24292 - DNA, 119 bp, Homo sapiens
  chr17:80832304-80832423
  hypo
ctcccgggttcccttgcgcacaccgagccagcagctgctggggcctcagggctcgcagctcacaggcttctgacgcctcagcctggagctggcgttgtgcccctcgcccctttacctgt

SEQ ID NO: 24293 - DNA, 65 bp, Homo sapiens
  chr17:80832444-80832509
  hypo
agggtgcccttggagccgtgcccgccggcctgggtgtcaggcttgtccaacgggttcttagagaa

SEQ ID NO: 24294 - DNA, 56 bp, Homo sapiens
  chr17:80832519-80832575
  hypo
atccctccttggcccacgcagactccaggcatccggccgggcgggctgtgagtcag

SEQ ID NO: 24295 - DNA, 45 bp, Homo sapiens
  chr17:80832711-80832756
  hypo
taccagcttttatgcccgtcaatttgggaacgtgatacaatcttg

SEQ ID NO: 24296 - DNA, 31 bp, Homo sapiens
  chr17:80832765-80832796
  hypo
actttcacaagttcttcggtgggtcctgtaa

SEQ ID NO: 24297 - DNA, 64 bp, Homo sapiens
  chr17:80847830-80847894
  hypo
gctctgcagggtggggcgggtccctgggaccagcctggccttgcggggacgcagacctgacccc

SEQ ID NO: 24298 - DNA, 31 bp, Homo sapiens
  chr17:80873199-80873230
  hypo
ctcaacccttgggagtcgtctgcgtccccat

SEQ ID NO: 24299 - DNA, 31 bp, Homo sapiens
  chr17:80879645-80879676
  hypo
tacagccattggaatccgaatgtttaatttt

SEQ ID NO: 24300 - DNA, 59 bp, Homo sapiens
  chr17:80899169-80899228
  hypo
ctcctttccctgactgcggccatggaagcttgacgcgggacctccgcacacctgaggtt

SEQ ID NO: 24301 - DNA, 37 bp, Homo sapiens
  chr17:80918441-80918478
  hypo
cccagacccgggcccacgtggccgctcctcacagtga

SEQ ID NO: 24302 - DNA, 62 bp, Homo sapiens
  chr17:80918497-80918559
  hypo
ccccgcagcactgggcgcgtcctcactgggtgctgcgattccctggccgtgcctctgccacc

SEQ ID NO: 24303 - DNA, 121 bp, Homo sapiens
  chr17:80918684-80918805
  hypo
actagggaaggacgttcggccttcaccctggcgctccctggcgcccttgggaaatgccccttcgtggacgccgaatccccgccaccctcgggatgtgctgttgccccgtgtcccaccagac

SEQ ID NO: 24304 - DNA, 31 bp, Homo sapiens
  chr17:80963751-80963782
  hypo
agcctgacctctgccccggagtgggctccca

SEQ ID NO: 24305 - DNA, 83 bp, Homo sapiens
  chr17:80982743-80982826
  hypo
ctcctgccagacacatcggccggcacagagggcagcaaacggctactgctggccaggatcaaagcagccggcagctgcaagac

SEQ ID NO: 24306 - DNA, 31 bp, Homo sapiens
  chr17:80983791-80983822
  hypo
ctcggggtgacatgcacgatgctggtggcct

SEQ ID NO: 24307 - DNA, 43 bp, Homo sapiens
  chr17:80995218-80995261
  hypo
tctcccaccctctctgcgttctccaacccggagcagtgcccct

SEQ ID NO: 24308 - DNA, 31 bp, Homo sapiens
  chr17:80997107-80997138
  hypo
tagacacactgctgggcgcccgccgcccgcc

SEQ ID NO: 24309 - DNA, 35 bp, Homo sapiens
  chr17:80997454-80997489
  hypo
actgctgggcgcccaccgcccgcccctgttctaga

SEQ ID NO: 24310 - DNA, 31 bp, Homo sapiens
  chr17:81008617-81008648
  hypo
gcaggtttttagggcacgtgtttggggtaag

SEQ ID NO: 24311 - DNA, 31 bp, Homo sapiens
  chr17:81008663-81008694
  hypo
ggcaggtgtgtgggcacggaggaggtgtgca

SEQ ID NO: 24312 - DNA, 62 bp, Homo sapiens
  chr17:81008823-81008885
  hypo
gcatgggcaagtgtgccgggaatgtgtgacggcagacgtgtggggtgcgaggttgtgtgggg

SEQ ID NO: 24313 - DNA, 37 bp, Homo sapiens; identical to SEQ ID NO: 6199
  chr17:81009161-81009198
  hypo

SEQ ID NO: 24314 - DNA, 63 bp, Homo sapiens
  chr17:81014243-81014306
  hypo
acagtagacttaagtgcggatgtggtccctcgagttccatttttcagccgcccacattcctgg

SEQ ID NO: 24315 - DNA, 31 bp, Homo sapiens; identical to SEQ ID NO: 6202
  chr17:81037127-81037158
  hypo

SEQ ID NO: 24316 - DNA, 50 bp, Homo sapiens; identical to SEQ ID NO: 6203
  chr17:81038241-81038291
  hypo

SEQ ID NO: 24317 - DNA, 31 bp, Homo sapiens
  chr17:81048958-81048989
  hypo
cagtgccaggctggaccggcctcaaggtgct

SEQ ID NO: 24318 - DNA, 31 bp, Homo sapiens
  chr17:81068741-81068772
  hypo
gttctcctgtctgtgcgcgcagggcagccag

SEQ ID NO: 24319 - DNA, 31 bp, Homo sapiens
  chr17:81102240-81102271
  hypo
ctcctgggcttttctccgctgctcccacaga

SEQ ID NO: 24320 - DNA, 44 bp, Homo sapiens
  chr17:81102307-81102351
  hypo
ggacaattctgggccccgggatgcccccccgctctggggacaag

SEQ ID NO: 24321 - DNA, 31 bp, Homo sapiens
  chr17:81102361-81102392
  hypo
gttaaaatcccactcccgctctgttgtgaaa

SEQ ID NO: 24322 - DNA, 31 bp, Homo sapiens
  chr17:81102402-81102433
  hypo
gtcttcctgcaccactcggcctgtcctgagg

SEQ ID NO: 24323 - DNA, 22 bp, Homo sapiens
  chr18:597424-597446
  hypo
actggcaaaaactaagcggagc

SEQ ID NO: 24324 - DNA, 31 bp, Homo sapiens
  chr18:698125-698156
  hypo
tcacacaagtagaacacgtgttaatccatat

SEQ ID NO: 24325 - DNA, 36 bp, Homo sapiens; identical to SEQ ID NO: 6205
  chr18:712306-712342
  hypo

SEQ ID NO: 24326 - DNA, 72 bp, Homo sapiens; identical to SEQ ID NO: 6206
  chr18:712366-712438
  hypo

SEQ ID NO: 24327 - DNA, 31 bp, Homo sapiens; identical to SEQ ID NO: 6207
  chr18:811589-811620
  hypo

SEQ ID NO: 24328 - DNA, 80 bp, Homo sapiens; identical to SEQ ID NO: 6208
  chr18:811633-811713
  hypo

SEQ ID NO: 24329 - DNA, 31 bp, Homo sapiens; identical to SEQ ID NO: 6209
  chr18:811720-811751
  hypo

SEQ ID NO: 24330 - DNA, 110 bp, Homo sapiens; identical to SEQ ID NO: 6210
  chr18:811862-811972
  hypo

SEQ ID NO: 24331 - DNA, 199 bp, Homo sapiens; identical to SEQ ID NO: 6211
  chr18:811973-812172
  hypo

SEQ ID NO: 24332 - DNA, 31 bp, Homo sapiens; identical to SEQ ID NO: 6212
  chr18:812283-812314
  hypo

SEQ ID NO: 24333 - DNA, 234 bp, Homo sapiens; identical to SEQ ID NO: 6213
  chr18:812346-812580
  hypo

SEQ ID NO: 24334 - DNA, 88 bp, Homo sapiens; identical to SEQ ID NO: 6214
  chr18:812611-812699
  hypo

SEQ ID NO: 24335 - DNA, 35 bp, Homo sapiens
  chr18:1928648-1928683
  hypo
aactctagcgggaaaagaatcgggagaccctgctc

SEQ ID NO: 24336 - DNA, 39 bp, Homo sapiens
  chr18:2565717-2565756
  hypo
atagaaagagctcaaacgtttgttcggtgagtaatgaat

SEQ ID NO: 24337 - DNA, 35 bp, Homo sapiens
  chr18:2565775-2565810
  hypo
aagaaaatgttgaggccgggtgcagtggctcaagc

SEQ ID NO: 24338 - DNA, 51 bp, Homo sapiens; identical to SEQ ID NO: 6215
  chr18:2571377-2571428
  hypo

SEQ ID NO: 24339 - DNA, 23 bp, Homo sapiens
  chr18:2755855-2755878
  hypo
ccctcggccgtgtattttctttt

SEQ ID NO: 24340 - DNA, 31 bp, Homo sapiens; identical to SEQ ID NO: 6216
  chr18:2846817-2846848
  hypo

SEQ ID NO: 24341 - DNA, 151 bp, Homo sapiens; identical to SEQ ID NO: 6217
  chr18:2847044-2847195
  hypo

SEQ ID NO: 24342 - DNA, 87 bp, Homo sapiens; identical to SEQ ID NO: 6218
  chr18:2847587-2847674
  hypo

SEQ ID NO: 24343 - DNA, 42 bp, Homo sapiens; identical to SEQ ID NO: 6219
  chr18:2847691-2847733
  hypo

SEQ ID NO: 24344 - DNA, 82 bp, Homo sapiens; identical to SEQ ID NO: 6220
  chr18:2847984-2848066
  hypo

SEQ ID NO: 24345 - DNA, 31 bp, Homo sapiens
  chr18:2851483-2851514
  hypo
catagagagagtgctccgagactgagggtga

SEQ ID NO: 24346 - DNA, 31 bp, Homo sapiens
  chr18:2851559-2851590
  hypo
aggaggagggcttctgcgcccagccatgtca

SEQ ID NO: 24347 - DNA, 58 bp, Homo sapiens
  chr18:2851618-2851676
  hypo
gagactgactacaggccgcaggtgccttgtcagaaggattagacggtgccctgtttac

SEQ ID NO: 24348 - DNA, 41 bp, Homo sapiens
  chr18:2910111-2910152
  hypo
gttatgagggctgtgccggcacagcccgccatgccctggcc

SEQ ID NO: 24349 - DNA, 31 bp, Homo sapiens
  chr18:2910174-2910205
  hypo
cccctctctcaggctccgacagtcatcctga

SEQ ID NO: 24350 - DNA, 31 bp, Homo sapiens
  chr18:2910208-2910239
  hypo
cctgggccaggacaagcgggaggctccctca

SEQ ID NO: 24351 - DNA, 35 bp, Homo sapiens
  chr18:2910451-2910486
  hypo
gctgggctgctctgcccggacggagggcagctcca

SEQ ID NO: 24352 - DNA, 31 bp, Homo sapiens
  chr18:3061642-3061673
  hypo
tgagcaaagagggttccgagaactggttagc

SEQ ID NO: 24353 - DNA, 36 bp, Homo sapiens; identical to SEQ ID NO: 6221
  chr18:3262088-3262124
  hypo

SEQ ID NO: 24354 - DNA, 31 bp, Homo sapiens
  chr18:3330572-3330603
  hypo
tgtcacaggggaatgacggcagctgtgccaa

SEQ ID NO: 24355 - DNA, 31 bp, Homo sapiens
  chr18:3415133-3415164
  hypo
gcaggcaccatgatcccggctctgccttccg

SEQ ID NO: 24356 - DNA, 46 bp, Homo sapiens
  chr18:3415326-3415372
  hypo
ctggaatcttatgatgcgcaaaagcctattgcgaaatggtcagagg

SEQ ID NO: 24357 - DNA, 31 bp, Homo sapiens
  chr18:3417142-3417173
  hypo
tgttgttgttgttgttcgttgtttgtttgtt

SEQ ID NO: 24358 - DNA, 31 bp, Homo sapiens
  chr18:3421798-3421829
  hypo
gaggtattgcaaaagacggcattgttaccat

SEQ ID NO: 24359 - DNA, 31 bp, Homo sapiens
  chr18:3443524-3443555
  hypo
ctacaggtgtataccacgaagcccagccaat

SEQ ID NO: 24360 - DNA, 23 bp, Homo sapiens
  chr18:3443588-3443611
  hypo
ttttgagatgtaatttcgttctg

SEQ ID NO: 24361 - DNA, 31 bp, Homo sapiens
  chr18:3445348-3445379
  hypo
ggggcagttaccaggtcggccatgtctcact

SEQ ID NO: 24362 - DNA, 16 bp, Homo sapiens
  chr18:3445427-3445443
  hypo
aaaatgagaagaaggc

SEQ ID NO: 24363 - DNA, 43 bp, Homo sapiens; identical to SEQ ID NO: 6222
  chr18:3447897-3447940
  hypo

SEQ ID NO: 24364 - DNA, 235 bp, Homo sapiens; identical to SEQ ID NO: 6223
  chr18:3448077-3448312
  hypo

SEQ ID NO: 24365 - DNA, 70 bp, Homo sapiens; identical to SEQ ID NO: 6224
  chr18:3448323-3448393
  hypo

SEQ ID NO: 24366 - DNA, 127 bp, Homo sapiens; identical to SEQ ID NO: 6225
  chr18:3448402-3448529
  hypo

SEQ ID NO: 24367 - DNA, 36 bp, Homo sapiens; identical to SEQ ID NO: 6226
  chr18:3448759-3448795
  hypo

SEQ ID NO: 24368 - DNA, 31 bp, Homo sapiens; identical to SEQ ID NO: 6227
  chr18:3449164-3449195
  hypo

SEQ ID NO: 24369 - DNA, 571 bp, Homo sapiens; identical to SEQ ID NO: 6228
  chr18:3449232-3449803
  hypo

SEQ ID NO: 24370 - DNA, 57 bp, Homo sapiens; identical to SEQ ID NO: 6229
  chr18:3449827-3449884
  hypo

SEQ ID NO: 24371 - DNA, 411 bp, Homo sapiens; identical to SEQ ID NO: 6230
  chr18:3449885-3450296
  hypo

SEQ ID NO: 24372 - DNA, 174 bp, Homo sapiens; identical to SEQ ID NO: 6231
  chr18:3450306-3450480
  hypo

SEQ ID NO: 24373 - DNA, 452 bp, Homo sapiens; identical to SEQ ID NO: 6232
  chr18:3450493-3450945
  hypo

SEQ ID NO: 24374 - DNA, 64 bp, Homo sapiens; identical to SEQ ID NO: 6233
  chr18:3450951-3451015
  hypo

SEQ ID NO: 24375 - DNA, 70 bp, Homo sapiens; identical to SEQ ID NO: 6234
  chr18:3451023-3451093
  hypo

SEQ ID NO: 24376 - DNA, 40 bp, Homo sapiens; identical to SEQ ID NO: 6237
  chr18:3451458-3451498
  hypo

SEQ ID NO: 24377 - DNA, 77 bp, Homo sapiens; identical to SEQ ID NO: 6238
  chr18:3451508-3451585
  hypo

SEQ ID NO: 24378 - DNA, 116 bp, Homo sapiens; identical to SEQ ID NO: 6239
  chr18:3451589-3451705
  hypo

SEQ ID NO: 24379 - DNA, 193 bp, Homo sapiens; identical to SEQ ID NO: 6240
  chr18:3451708-3451901
  hypo

SEQ ID NO: 24380 - DNA, 56 bp, Homo sapiens; identical to SEQ ID NO: 6241
  chr18:3451904-3451960
  hypo

SEQ ID NO: 24381 - DNA, 64 bp, Homo sapiens; identical to SEQ ID NO: 6242
  chr18:3451971-3452035
  hypo

SEQ ID NO: 24382 - DNA, 43 bp, Homo sapiens; identical to SEQ ID NO: 6243
  chr18:3452053-3452096
  hypo

SEQ ID NO: 24383 - DNA, 161 bp, Homo sapiens; identical to SEQ ID NO: 6244
  chr18:3452103-3452264
  hypo

SEQ ID NO: 24384 - DNA, 43 bp, Homo sapiens
  chr18:3534579-3534622
  hypo
cgtcacactgttggatcgagtgaacctgcggaagcttgggaga

SEQ ID NO: 24385 - DNA, 39 bp, Homo sapiens
  chr18:3535410-3535449
  hypo
aatagggaaaaagggccgggcgtggtggctcacgcccgt

SEQ ID NO: 24386 - DNA, 27 bp, Homo sapiens
  chr18:3553809-3553836
  hypo
cgtgagccaccacgcccggcccacaca

SEQ ID NO: 24387 - DNA, 18 bp, Homo sapiens
  chr18:3567918-3567936
  hypo
tagagtttccctctgtcg

SEQ ID NO: 24388 - DNA, 33 bp, Homo sapiens
  chr18:3570504-3570537
  hypo
aacctcagctgatctgcccgcctcagcctctca

SEQ ID NO: 24389 - DNA, 24 bp, Homo sapiens
  chr18:3588162-3588186
  hypo
tatatatttttggggccgggcgct

SEQ ID NO: 24390 - DNA, 31 bp, Homo sapiens
  chr18:3599046-3599077
  hypo
caggcgtgagccactgcgcccagcaaagact

SEQ ID NO: 24391 - DNA, 31 bp, Homo sapiens
  chr18:3600254-3600285
  hypo
ttgtttttttatgagacggagtttctctctt

SEQ ID NO: 24392 - DNA, 36 bp, Homo sapiens
  chr18:3600530-3600566
  hypo
gccagaaacattctttttattcgtttttattataat

SEQ ID NO: 24393 - DNA, 31 bp, Homo sapiens
  chr18:3608038-3608069
  hypo
gaccagctcagctgggcgtggtggcctgtaa

SEQ ID NO: 24394 - DNA, 41 bp, Homo sapiens
  chr18:3608074-3608115
  hypo
gcattttgggaggatgcgggcagatcatgtgaagtcgggag

SEQ ID NO: 24395 - DNA, 61 bp, Homo sapiens
  chr18:3610086-3610147
  hypo
taaaaattcatctcatcgctgttctcaattcatatgtcctctccttcgagagggctttaaa

SEQ ID NO: 24396 - DNA, 28 bp, Homo sapiens
  chr18:3613114-3613142
  hypo
gcatgagccaccacgcctggccttttag

SEQ ID NO: 24397 - DNA, 31 bp, Homo sapiens
  chr18:3614529-3614560
  hypo
tattctttcattatagcgtagggtgaagcta

SEQ ID NO: 24398 - DNA, 18 bp, Homo sapiens
  chr18:3636418-3636436
  hypo
ggtttgttttttgagacg

SEQ ID NO: 24399 - DNA, 31 bp, Homo sapiens
  chr18:3637283-3637314
  hypo
gtaatataaaatgatacgtgcaaatccctag

SEQ ID NO: 24400 - DNA, 31 bp, Homo sapiens
  chr18:3637344-3637375
  hypo
ttgccttctagaaacacgtttagtttatttg

SEQ ID NO: 24401 - DNA, 59 bp, Homo sapiens
  chr18:3637376-3637435
  hypo
taaaggagacacacttcgctcctggtagcactttcctatatctacgattttgctctttt

SEQ ID NO: 24402 - DNA, 23 bp, Homo sapiens
  chr18:3647472-3647495
  hypo
ttttttttttttaaaccgagact

SEQ ID NO: 24403 - DNA, 25 bp, Homo sapiens
  chr18:3657608-3657633
  hypo
ttttttttttttgagacggagtctt

SEQ ID NO: 24404 - DNA, 25 bp, Homo sapiens
  chr18:3662972-3662997
  hypo
gtaagaacctgaatctcggctgggt

SEQ ID NO: 24405 - DNA, 31 bp, Homo sapiens
  chr18:3669034-3669065
  hypo
ttgacatgttaatattcgtacagcatctttg

SEQ ID NO: 24406 - DNA, 80 bp, Homo sapiens
  chr18:3669444-3669524
  hypo
accctagtaaggaaagagacacaagcggctggacgtgttgggaaacacatcggcagaagaagacacgagtggttatgtgt

SEQ ID NO: 24407 - DNA, 19 bp, Homo sapiens
  chr18:3702319-3702338
  hypo
ctgacgtctaccttgaatt

SEQ ID NO: 24408 - DNA, 44 bp, Homo sapiens
  chr18:3729157-3729201
  hypo
acggtggtggtggtgcgcggcggcgaggacgacctcagggacac

SEQ ID NO: 24409 - DNA, 31 bp, Homo sapiens
  chr18:3986861-3986892
  hypo
attgtcctgagctccccggatactggaccct

SEQ ID NO: 24410 - DNA, 55 bp, Homo sapiens
  chr18:3986940-3986995
  hypo
ctgaaaagttaatgctcgacacaggacgaggctctgactacgcagagccattttg

SEQ ID NO: 24411 - DNA, 35 bp, Homo sapiens
  chr18:3987022-3987057
  hypo
atcaccctgcaaatagcgctcgtttccaggtatgt

SEQ ID NO: 24412 - DNA, 31 bp, Homo sapiens; identical to SEQ ID NO: 6245
  chr18:6414307-6414338
  hypo

SEQ ID NO: 24413 - DNA, 37 bp, Homo sapiens
  chr18:6929828-6929865
  hypo
cttatatgactgaccccgcccccgagtcccaggccgc

SEQ ID NO: 24414 - DNA, 70 bp, Homo sapiens
  chr18:6953008-6953078
  hypo
gtgtccagtggatccacgccatgggagccatgtctgcctgtgtccggcggatccacgccatgggagccat

SEQ ID NO: 24415 - DNA, 34 bp, Homo sapiens
  chr18:8400563-8400597
  hypo
tccctgcagtgccatgcggcggtgttcacagctc

SEQ ID NO: 24416 - DNA, 31 bp, Homo sapiens
  chr18:8612251-8612282
  hypo
tcagagaaggcttcctcgtcattggaatgtt

SEQ ID NO: 24417 - DNA, 20 bp, Homo sapiens
  chr18:8699668-8699688
  hypo
taggacgacccttctctggg

SEQ ID NO: 24418 - DNA, 44 bp, Homo sapiens; identical to SEQ ID NO: 6248
  chr18:8748271-8748315
  hypo

SEQ ID NO: 24419 - DNA, 45 bp, Homo sapiens
  chr18:8783991-8784036
  hypo
gatcgaagaccacaaccggcaactgacccacgagctcagcaagtt

SEQ ID NO: 24420 - DNA, 31 bp, Homo sapiens
  chr18:8787324-8787355
  hypo
gaagtctctcattctgcggatgagaaaagtg

SEQ ID NO: 24421 - DNA, 31 bp, Homo sapiens
  chr18:8787356-8787387
  hypo
ggcctgagaagtgaagcggcttgccagtaag

SEQ ID NO: 24422 - DNA, 31 bp, Homo sapiens
  chr18:8826026-8826057
  hypo
gaagggggagagggcacgccagtgaagcagg

SEQ ID NO: 24423 - DNA, 43 bp, Homo sapiens
  chr18:8829962-8830005
  hypo
ttcagcaccagccaggcggaacgggatacggtggtgtcagata

SEQ ID NO: 24424 - DNA, 62 bp, Homo sapiens
  chr18:8830078-8830140
  hypo
tctataacaaggggagcgcagacacaaaacacacagatttcccaaaccgtgtgtcccagtca

SEQ ID NO: 24425 - DNA, 65 bp, Homo sapiens
  chr18:9333562-9333627
  hypo
acacctgtcatcccaacgatttaggagaccgcggtgggaggatcgcttgagccccgaaatttgaa

SEQ ID NO: 24426 - DNA, 73 bp, Homo sapiens
  chr18:9417591-9417664
  hypo
cagatggaggagtgtccgtgaaggagggcccttcgcaccccatggagctcctgatgtccgtgcctttatcaga

SEQ ID NO: 24427 - DNA, 39 bp, Homo sapiens
  chr18:9417720-9417759
  hypo
ttaagagacagagtctcgctctgtcgcccaagcagctgg

SEQ ID NO: 24428 - DNA, 52 bp, Homo sapiens
  chr18:9615429-9615481
  hypo
atgtctaggaggtgctcggtgaagggtgcctatgattcgctttgtcttctaa

SEQ ID NO: 24429 - DNA, 31 bp, Homo sapiens
  chr18:9659944-9659975
  hypo
gcatggaggagctttgcggacaccaaagtct

SEQ ID NO: 24430 - DNA, 19 bp, Homo sapiens
  chr18:9791400-9791419
  hypo
ttttttttttttgagacgg

SEQ ID NO: 24431 - DNA, 35 bp, Homo sapiens
  chr18:9797365-9797400
  hypo
ctgcttctcctgctggcggacgttccctgatgact

SEQ ID NO: 24432 - DNA, 59 bp, Homo sapiens
  chr18:9797442-9797501
  hypo
tgcattcagccctcctcgcaaaagcactttgaggttgaaactgtcgttattcccatttg

SEQ ID NO: 24433 - DNA, 31 bp, Homo sapiens
  chr18:9797531-9797562
  hypo
gtaacttgcacaatgtcgcagagctaataag

SEQ ID NO: 24434 - DNA, 94 bp, Homo sapiens
  chr18:9800801-9800895
  hypo
cagctttactgagatccgattcacgtaccatacaatttatccatctaaagtacgcaccttggtgggttctgatgtgttccgaattgttcaacca

SEQ ID NO: 24435 - DNA, 31 bp, Homo sapiens
  chr18:9800924-9800955
  hypo
tcagtccagaaagaaacgcttatgaattagc

SEQ ID NO: 24436 - DNA, 31 bp, Homo sapiens
  chr18:9805773-9805804
  hypo
atatcaactgaagcaacgtttcatttcagag

SEQ ID NO: 24437 - DNA, 31 bp, Homo sapiens
  chr18:9833345-9833376
  hypo
cagggggaccatgggacgacagggcccccag

SEQ ID NO: 24438 - DNA, 31 bp, Homo sapiens
  chr18:9833443-9833474
  hypo
gtaaccaggtcctgaacgcccagagcctcag

SEQ ID NO: 24439 - DNA, 31 bp, Homo sapiens
  chr18:9883099-9883130
  hypo
tgaggagcagggaaaccgaattaagtttgcc

SEQ ID NO: 24440 - DNA, 31 bp, Homo sapiens
  chr18:9883158-9883189
  hypo
cttttccatggtgtagcggtgcaatctttca

SEQ ID NO: 24441 - DNA, 31 bp, Homo sapiens
  chr18:9887793-9887824
  hypo
gaaacaatggagttcccggagggggacaagg

SEQ ID NO: 24442 - DNA, 31 bp, Homo sapiens
  chr18:9912766-9912797
  hypo
accctaatacctggatcgcacatgaaaactt

SEQ ID NO: 24443 - DNA, 31 bp, Homo sapiens
  chr18:9962363-9962394
  hypo
cactgtccaaacttaacggtcttggacaagt

SEQ ID NO: 24444 - DNA, 31 bp, Homo sapiens
  chr18:9962432-9962463
  hypo
aagggggtgggaatgacggtgaaattgatct

SEQ ID NO: 24445 - DNA, 31 bp, Homo sapiens
  chr18:10460166-10460197
  hypo
tcggcaggtgaaaaaccgtggaatatattca

SEQ ID NO: 24446 - DNA, 31 bp, Homo sapiens
  chr18:10589202-10589233
  hypo
gccccgggccgggaggcgatggccccgggcc

SEQ ID NO: 24447 - DNA, 69 bp, Homo sapiens
  chr18:10589279-10589348
  hypo
gccagcactggggcagcggaggaggcagcggtggtggtggcaccgggtagaaggcggtggcactgggta

SEQ ID NO: 24448 - DNA, 31 bp, Homo sapiens
  chr18:10696517-10696548
  hypo
gcacatagatctccagcgtcctgcaaaatgg

SEQ ID NO: 24449 - DNA, 31 bp, Homo sapiens
  chr18:11971653-11971684
  hypo
cctgggaaacatatggcgactctgtctccaa

SEQ ID NO: 24450 - DNA, 31 bp, Homo sapiens
  chr18:12291393-12291424
  hypo
caggaaggtgccctcccgatccccccacagc

SEQ ID NO: 24451 - DNA, 31 bp, Homo sapiens
  chr18:12380135-12380166
  hypo
aatttgtagttaaaaacgtttccatgggttg

SEQ ID NO: 24452 - DNA, 31 bp, Homo sapiens
  chr18:12460293-12460324
  hypo
gaaggtactgccaacacgaggtgcctttaga

SEQ ID NO: 24453 - DNA, 31 bp, Homo sapiens
  chr18:12460327-12460358
  hypo
gatgggcatttgccctcggttatttgaccaa

SEQ ID NO: 24454 - DNA, 39 bp, Homo sapiens
  chr18:12460416-12460455
  hypo
aataaaaattatcagccgggcacagtggctcacgcctgt

SEQ ID NO: 24455 - DNA, 31 bp, Homo sapiens
  chr18:12749282-12749313
  hypo
tcactctcacctcgggcgtggtggctgcttc

SEQ ID NO: 24456 - DNA, 25 bp, Homo sapiens
  chr18:12849278-12849303
  hypo
cgggtgcagaagctcacgcctgtaa

SEQ ID NO: 24457 - DNA, 17 bp, Homo sapiens
  chr18:12849542-12849559
  hypo
agcgaaaccctgtctca

SEQ ID NO: 24458 - DNA, 38 bp, Homo sapiens
  chr18:13135169-13135207
  hypo
gccgaggaggcgccaagagtgagcgagggctgccagca

SEQ ID NO: 24459 - DNA, 82 bp, Homo sapiens
  chr18:13135236-13135318
  hypo
gctgctgtccagcacccgctcttgcttggatactttcggtggtgtggctgctggttactgtattgcacgacaaatgtttttc

SEQ ID NO: 24460 - DNA, 21 bp, Homo sapiens
  chr18:18693552-18693573
  hypo
cttttttttttttctccgagg

SEQ ID NO: 24461 - DNA, 31 bp, Homo sapiens
  chr18:18997519-18997550
  hypo
taaagacactttaagacgtacaaaatatgga

SEQ ID NO: 24462 - DNA, 31 bp, Homo sapiens
  chr18:19079791-19079822
  hypo
tggatgaaggggtctccgccagctcagctgg

SEQ ID NO: 24463 - DNA, 24 bp, Homo sapiens
  chr18:19596546-19596570
  hypo
accgcaccccgctggcactggatt

SEQ ID NO: 24464 - DNA, 31 bp, Homo sapiens
  chr18:19775129-19775160
  hypo
ttgagagctgaagttacgctgatgcatggag

SEQ ID NO: 24465 - DNA, 35 bp, Homo sapiens
  chr18:19778301-19778336
  hypo
ggattaaaggcacgagccaccgtgcccagcctgct

SEQ ID NO: 24466 - DNA, 31 bp, Homo sapiens
  chr18:20668996-20669027
  hypo
cctgttcataaaaatgcgtcttcaccctatt

SEQ ID NO: 24467 - DNA, 75 bp, Homo sapiens; identical to SEQ ID NO: 6260
  chr18:20715562-20715637
  hypo

SEQ ID NO: 24468 - DNA, 31 bp, Homo sapiens
  chr18:21164542-21164573
  hypo
gtgaagcctggctgggcgaggtggctcacac

SEQ ID NO: 24469 - DNA, 36 bp, Homo sapiens
  chr18:21164580-21164616
  hypo
ccccaaaagaggagggcggatcgctagaggtcagga

SEQ ID NO: 24470 - DNA, 88 bp, Homo sapiens; identical to SEQ ID NO: 6264
  chr18:21242502-21242590
  hypo

SEQ ID NO: 24471 - DNA, 89 bp, Homo sapiens; identical to SEQ ID NO: 6265
  chr18:21242592-21242681
  hypo

SEQ ID NO: 24472 - DNA, 31 bp, Homo sapiens
  chr18:21314132-21314163
  hypo
tggtatgcagtggggtcgcctaaacatcatt

SEQ ID NO: 24473 - DNA, 31 bp, Homo sapiens
  chr18:21338239-21338270
  hypo
cctcaatgaatggtgccgtggatgaccgtga

SEQ ID NO: 24474 - DNA, 31 bp, Homo sapiens
  chr18:21388619-21388650
  hypo
aagtgagtaaactagccgagttcccctccat

SEQ ID NO: 24475 - DNA, 62 bp, Homo sapiens
  chr18:21388652-21388714
  hypo
gtgagagtttcttttacgtttctgatgacaacacaggtaaattctgtcgttcaccatcattt

SEQ ID NO: 24476 - DNA, 52 bp, Homo sapiens
  chr18:21388771-21388823
  hypo
gaaaataacatggtctcgtccctgtgggggccccatgcgccaaggcttagat

SEQ ID NO: 24477 - DNA, 31 bp, Homo sapiens; identical to SEQ ID NO: 6272
  chr18:21393784-21393815
  hypo

SEQ ID NO: 24478 - DNA, 31 bp, Homo sapiens
  chr18:21422658-21422689
  hypo
cagagcctgaagtggccgcaactgtgaaggt

SEQ ID NO: 24479 - DNA, 31 bp, Homo sapiens
  chr18:21422701-21422732
  hypo
gtccttggttttggtgcgttccactcgttcc

SEQ ID NO: 24480 - DNA, 43 bp, Homo sapiens
  chr18:21426404-21426447
  hypo
gcccaacgtcatcgggcggcagtgcacccgctgtgcaacaggc

SEQ ID NO: 24481 - DNA, 31 bp, Homo sapiens
  chr18:21441717-21441748
  hypo
gcaaccatccacagcgcgtcctgggtcgcac

SEQ ID NO: 24482 - DNA, 31 bp, Homo sapiens
  chr18:21459202-21459233
  hypo
ctttctagctgcatcccgcccccttgcactt

SEQ ID NO: 24483 - DNA, 31 bp, Homo sapiens
  chr18:21520175-21520206
  hypo
tactgtgaggggagggcgcagggaggacaga

SEQ ID NO: 24484 - DNA, 31 bp, Homo sapiens
  chr18:21536808-21536839
  hypo
aacactgaccagttcacgatgggtccaccat

SEQ ID NO: 24485 - DNA, 23 bp, Homo sapiens
  chr18:21546285-21546308
  hypo
gatgaccaggccaggcgcggtgg

SEQ ID NO: 24486 - DNA, 248 bp, Homo sapiens; identical to SEQ ID NO: 6273
  chr18:21594466-21594714
  hypo

SEQ ID NO: 24487 - DNA, 31 bp, Homo sapiens
  chr18:21702094-21702125
  hypo
tatcctggtacgtgcacgcctgggataggtg

SEQ ID NO: 24488 - DNA, 37 bp, Homo sapiens
  chr18:21702131-21702168
  hypo
tgaccatgcccaaatgcgagtacgggaccaacctact

SEQ ID NO: 24489 - DNA, 31 bp, Homo sapiens
  chr18:21702171-21702202
  hypo
aggggtgctcaggtaacgaagggggaactag

SEQ ID NO: 24490 - DNA, 31 bp, Homo sapiens
  chr18:21730971-21731002
  hypo
ttcttatacagcctctcgtatctcttgttag

SEQ ID NO: 24491 - DNA, 31 bp, Homo sapiens
  chr18:21779334-21779365
  hypo
ttgcccccagctcccccggctcccccagctg

SEQ ID NO: 24492 - DNA, 30 bp, Homo sapiens
  chr18:21839134-21839164
  hypo
tgctgggattataggcgagagccaccacgc

SEQ ID NO: 24493 - DNA, 31 bp, Homo sapiens
  chr18:22596097-22596128
  hypo
gtgtagggagaagctacgagagtgaaatggg

SEQ ID NO: 24494 - DNA, 31 bp, Homo sapiens; identical to SEQ ID NO: 6282
  chr18:22653838-22653869
  hypo

SEQ ID NO: 24495 - DNA, 31 bp, Homo sapiens
  chr18:23652340-23652371
  hypo
atcctactcataatatcgttatctctaacac

SEQ ID NO: 24496 - DNA, 13 bp, Homo sapiens
  chr18:23841151-23841164
  hypo
ttttttttttttg

SEQ ID NO: 24497 - DNA, 31 bp, Homo sapiens
  chr18:24409813-24409844
  hypo
agacacacctaaaccacgtgggggagacaaa

SEQ ID NO: 24498 - DNA, 31 bp, Homo sapiens
  chr18:27426191-27426222
  hypo
cgtgagccaccgcacccgcccatgccttcaa

SEQ ID NO: 24499 - DNA, 61 bp, Homo sapiens
  chr18:28934935-28934996
  hypo
taatccaaccaacttccggcatgataggtagtctgagtatgcaccccgagttagccaatgc

SEQ ID NO: 24500 - DNA, 31 bp, Homo sapiens
  chr18:28935022-28935053
  hypo
ttgtttctggtgctggcgtaactggaattag

SEQ ID NO: 24501 - DNA, 31 bp, Homo sapiens
  chr18:28935055-28935086
  hypo
gcaccactgggatcagcggtggcataggcag

SEQ ID NO: 24502 - DNA, 31 bp, Homo sapiens
  chr18:29114802-29114833
  hypo
ttgtaaatgttgctaacgcccccaataaaca

SEQ ID NO: 24503 - DNA, 31 bp, Homo sapiens
  chr18:29199776-29199807
  hypo
cttcatcatcacaaaacgttctgttggacac

SEQ ID NO: 24504 - DNA, 31 bp, Homo sapiens
  chr18:29200393-29200424
  hypo
agccactgtgcccaggcgacaaatttcaatt

SEQ ID NO: 24505 - DNA, 18 bp, Homo sapiens
  chr18:29248668-29248686
  hypo
aaagttgtaatctggccg

SEQ ID NO: 24506 - DNA, 37 bp, Homo sapiens; identical to SEQ ID NO: 6292
  chr18:29265159-29265196
  hypo

SEQ ID NO: 24507 - DNA, 35 bp, Homo sapiens
  chr18:29269412-29269447
  hypo
atagaagaggctgggccgggcgcaatggttcatgc

SEQ ID NO: 24508 - DNA, 53 bp, Homo sapiens
  chr18:29325110-29325163
  hypo
gtaatctggaagcccccgactaccttgcttcaagtgccgcgcctttccagatt

SEQ ID NO: 24509 - DNA, 62 bp, Homo sapiens
  chr18:29366853-29366915
  hypo
aataatattttatatccgattagagcagggtttctcaatcttattgccgttggagctagata

SEQ ID NO: 24510 - DNA, 31 bp, Homo sapiens
  chr18:29391614-29391645
  hypo
cccggatgcaaaatggcgtgctaggtccaca

SEQ ID NO: 24511 - DNA, 22 bp, Homo sapiens
  chr18:29549642-29549664
  hypo
atgaatatttttgggccgggcg

SEQ ID NO: 24512 - DNA, 31 bp, Homo sapiens
  chr18:29593107-29593138
  hypo
ttacaggcatgagccacggtgcctggcgaga

SEQ ID NO: 24513 - DNA, 43 bp, Homo sapiens
  chr18:29610272-29610315
  hypo
tgggattacaggcgtgagccaccctacccggcagtgaatgtac

SEQ ID NO: 24514 - DNA, 31 bp, Homo sapiens
  chr18:29610366-29610397
  hypo
ggtaaatggattgaaacgttcaatttgtggt

SEQ ID NO: 24515 - DNA, 31 bp, Homo sapiens
  chr18:29610399-29610430
  hypo
agtatgagcagtaaagcgtacatcaaattgg

SEQ ID NO: 24516 - DNA, 20 bp, Homo sapiens
  chr18:29668748-29668768
  hypo
caccacgcctggtcttgact

SEQ ID NO: 24517 - DNA, 31 bp, Homo sapiens
  chr18:29670903-29670934
  hypo
gtggatcccatcttatcgatttatccttttt

SEQ ID NO: 24518 - DNA, 20 bp, Homo sapiens
  chr18:29864726-29864746
  hypo
ttttttgagacagtctcgct

SEQ ID NO: 24519 - DNA, 132 bp, Homo sapiens; identical to SEQ ID NO: 6293
  chr18:30050220-30050352
  hypo

SEQ ID NO: 24520 - DNA, 357 bp, Homo sapiens; identical to SEQ ID NO: 6294
  chr18:30050357-30050714
  hypo

SEQ ID NO: 24521 - DNA, 46 bp, Homo sapiens; identical to SEQ ID NO: 6295
  chr18:30050715-30050761
  hypo

SEQ ID NO: 24522 - DNA, 40 bp, Homo sapiens; identical to SEQ ID NO: 6296
  chr18:30050762-30050802
  hypo

SEQ ID NO: 24523 - DNA, 99 bp, Homo sapiens; identical to SEQ ID NO: 6297
  chr18:30050987-30051086
  hypo

SEQ ID NO: 24524 - DNA, 31 bp, Homo sapiens; identical to SEQ ID NO: 6298
  chr18:30051112-30051143
  hypo

SEQ ID NO: 24525 - DNA, 35 bp, Homo sapiens; identical to SEQ ID NO: 6299
  chr18:30051166-30051201
  hypo

SEQ ID NO: 24526 - DNA, 20 bp, Homo sapiens
  chr18:32971688-32971708
  hypo
ttctgtttttttgagacgga

SEQ ID NO: 24527 - DNA, 31 bp, Homo sapiens
  chr18:33036599-33036630
  hypo
ttatggctgggtgcagcggtgactcatgcct

SEQ ID NO: 24528 - DNA, 31 bp, Homo sapiens
  chr18:33041504-33041535
  hypo
gagaaggagtgctgggcgtggatgcaggggc

SEQ ID NO: 24529 - DNA, 40 bp, Homo sapiens
  chr18:33041583-33041623
  hypo
ttccttaggtgtagagcgagcccgccgctacacttgcctc

SEQ ID NO: 24530 - DNA, 31 bp, Homo sapiens; identical to SEQ ID NO: 6305
  chr18:33077969-33078000
  hypo

SEQ ID NO: 24531 - DNA, 35 bp, Homo sapiens; identical to SEQ ID NO: 6306
  chr18:33078013-33078048
  hypo

SEQ ID NO: 24532 - DNA, 6 bp, Homo sapiens
  chr18:33596484-33596490
  hypo
ctgttt

SEQ ID NO: 24533 - DNA, 31 bp, Homo sapiens; identical to SEQ ID NO: 6310
  chr18:33766964-33766995
  hypo

SEQ ID NO: 24534 - DNA, 183 bp, Homo sapiens; identical to SEQ ID NO: 6311
  chr18:33767006-33767189
  hypo

SEQ ID NO: 24535 - DNA, 31 bp, Homo sapiens
  chr18:33793348-33793379
  hypo
ttacaacatccacctgcgaactggctgcttc

SEQ ID NO: 24536 - DNA, 31 bp, Homo sapiens
  chr18:34297788-34297819
  hypo
tttcaggtttgtggcccgcaggtgtccagga

SEQ ID NO: 24537 - DNA, 50 bp, Homo sapiens
  chr18:34297827-34297877
  hypo
taaatggacagtgtggcgacatcctcaccaacaaacggttcatgcttgac

SEQ ID NO: 24538 - DNA, 31 bp, Homo sapiens
  chr18:34297889-34297920
  hypo
cataacaggaagtctccggatgatgaggaga

SEQ ID NO: 24539 - DNA, 31 bp, Homo sapiens
  chr18:34889651-34889682
  hypo
acgagcagaggtatgcgcgccctgggatgtc

SEQ ID NO: 24540 - DNA, 70 bp, Homo sapiens
  chr18:36889401-36889471
  hypo
ggctggtccaatcaaccgcccaagggctgacaagtgcgggcgcgtggcgcggaactggtgggcagctccg

SEQ ID NO: 24541 - DNA, 37 bp, Homo sapiens
  chr18:37198432-37198469
  hypo
tgggaactggggcaacgcgcagcgctcatgggccagc

SEQ ID NO: 24542 - DNA, 31 bp, Homo sapiens
  chr18:37382687-37382718
  hypo
ttatgcctgacatatacgcatcatgtgtgtc

SEQ ID NO: 24543 - DNA, 54 bp, Homo sapiens; identical to SEQ ID NO: 6314
  chr18:42258997-42259051
  hypo

SEQ ID NO: 24544 - DNA, 58 bp, Homo sapiens; identical to SEQ ID NO: 6315
  chr18:42259072-42259130
  hypo

SEQ ID NO: 24545 - DNA, 39 bp, Homo sapiens; identical to SEQ ID NO: 6316
  chr18:42259996-42260035
  hypo

SEQ ID NO: 24546 - DNA, 106 bp, Homo sapiens; identical to SEQ ID NO: 6317
  chr18:42260145-42260251
  hypo

SEQ ID NO: 24547 - DNA, 31 bp, Homo sapiens; identical to SEQ ID NO: 6318
  chr18:42260319-42260350
  hypo

SEQ ID NO: 24548 - DNA, 40 bp, Homo sapiens; identical to SEQ ID NO: 6319
  chr18:42260531-42260571
  hypo

SEQ ID NO: 24549 - DNA, 26 bp, Homo sapiens
  chr18:43559605-43559631
  hypo
ttgctttttttttagacggagtcttg

SEQ ID NO: 24550 - DNA, 25 bp, Homo sapiens
  chr18:43577160-43577185
  hypo
tttgttttcttggagacggagtctt

SEQ ID NO: 24551 - DNA, 31 bp, Homo sapiens
  chr18:43599471-43599502
  hypo
gtgtccatattgaggccgggtgcagtggctc

SEQ ID NO: 24552 - DNA, 31 bp, Homo sapiens
  chr18:43605713-43605744
  hypo
tgtggacatatatccacgggcatctctgaga

SEQ ID NO: 24553 - DNA, 30 bp, Homo sapiens
  chr18:43606965-43606995
  hypo
aataagaccatatggccgggtgcaatggct

SEQ ID NO: 24554 - DNA, 31 bp, Homo sapiens
  chr18:43613982-43614013
  hypo
ttgaccagctaatgcacgaagggaatctgtc

SEQ ID NO: 24555 - DNA, 49 bp, Homo sapiens
  chr18:43614046-43614095
  hypo
tgtcctgagacatagccgaccacagtgagggtcccggaaacagagctgt

SEQ ID NO: 24556 - DNA, 31 bp, Homo sapiens
  chr18:43614103-43614134
  hypo
caggttgaccatgggacgtacaggagcttat

SEQ ID NO: 24557 - DNA, 31 bp, Homo sapiens
  chr18:43614145-43614176
  hypo
cagagtcctgaggcaccggggctgtggatcc

SEQ ID NO: 24558 - DNA, 31 bp, Homo sapiens
  chr18:43627251-43627282
  hypo
tgtccagggttaggtgcggtggctcatacct

SEQ ID NO: 24559 - DNA, 31 bp, Homo sapiens
  chr18:43637142-43637173
  hypo
gccctggctctgcctgcgtcccactcagcag

SEQ ID NO: 24560 - DNA, 13 bp, Homo sapiens
  chr18:43663650-43663663
  hypo
acttacaaagagc

SEQ ID NO: 24561 - DNA, 34 bp, Homo sapiens; identical to SEQ ID NO: 6323
  chr18:43924113-43924147
  hypo

SEQ ID NO: 24562 - DNA, 27 bp, Homo sapiens
  chr18:44531779-44531806
  hypo
tctgtcagcagtggcccgaccttggct

SEQ ID NO: 24563 - DNA, 31 bp, Homo sapiens
  chr18:44700790-44700821
  hypo
ttcttccttgggaggccgaggtgggcagatc

SEQ ID NO: 24564 - DNA, 34 bp, Homo sapiens
  chr18:44701014-44701048
  hypo
gggggacagggtgagactccgtctcaaaaaaaaa

SEQ ID NO: 24565 - DNA, 31 bp, Homo sapiens
  chr18:44701081-44701112
  hypo
cttccaatctttcctccgtattgtagcctca

SEQ ID NO: 24566 - DNA, 31 bp, Homo sapiens
  chr18:45058416-45058447
  hypo
ggcattttggacatttcgtgggggggcttgt

SEQ ID NO: 24567 - DNA, 31 bp, Homo sapiens
  chr18:45443477-45443508
  hypo
gcctcctgggttcaagcgattccccttacag

SEQ ID NO: 24568 - DNA, 31 bp, Homo sapiens
  chr18:45536044-45536075
  hypo
ggctaatcctcaggcccggtagtgtgtacac

SEQ ID NO: 24569 - DNA, 31 bp, Homo sapiens
  chr18:45554568-45554599
  hypo
gtggcccccatctcttcgatgttggccctga

SEQ ID NO: 24570 - DNA, 58 bp, Homo sapiens
  chr18:45554645-45554703
  hypo
ggtaaacattaaatagcgcccccaggagtccagacatgaacagcggcctgcagggaag

SEQ ID NO: 24571 - DNA, 62 bp, Homo sapiens
  chr18:45554707-45554769
  hypo
ggtagcattctgagttcgcagagctacctgtgggctttgctgaagctcggaagctcccctga

SEQ ID NO: 24572 - DNA, 31 bp, Homo sapiens
  chr18:45567065-45567096
  hypo
tcatcctcctcccccccgtcccccccaggct

SEQ ID NO: 24573 - DNA, 40 bp, Homo sapiens
  chr18:45579500-45579540
  hypo
gtaaaagtgcttgatgcgtcccttccgcctgccccagagg

SEQ ID NO: 24574 - DNA, 31 bp, Homo sapiens
  chr18:45579561-45579592
  hypo
atgtctgtcttcccatcgcccctacagtggc

SEQ ID NO: 24575 - DNA, 35 bp, Homo sapiens
  chr18:45579600-45579635
  hypo
ggcatggagttgggagcggccgcttctgcagaatg

SEQ ID NO: 24576 - DNA, 31 bp, Homo sapiens
  chr18:45579659-45579690
  hypo
cacaggccttgcatgcgcgggttggggaatg

SEQ ID NO: 24577 - DNA, 31 bp, Homo sapiens
  chr18:45594042-45594073
  hypo
agcccttacaattgcacgagccaattctgta

SEQ ID NO: 24578 - DNA, 8 bp, Homo sapiens
  chr18:45594121-45594129
  hypo
cagcaatt

SEQ ID NO: 24579 - DNA, 107 bp, Homo sapiens; identical to SEQ ID NO: 6327
  chr18:45687996-45688103
  hypo

SEQ ID NO: 24580 - DNA, 83 bp, Homo sapiens; identical to SEQ ID NO: 6328
  chr18:45688153-45688236
  hypo

SEQ ID NO: 24581 - DNA, 31 bp, Homo sapiens
  chr18:45822972-45823003
  hypo
ctcctctcccacagcacgttcccgagtctcg

SEQ ID NO: 24582 - DNA, 31 bp, Homo sapiens
  chr18:45854284-45854315
  hypo
agatattaagtgaggccgggcgtagtgactc

SEQ ID NO: 24583 - DNA, 67 bp, Homo sapiens
  chr18:45917049-45917116
  hypo
gtaaaatgagatgctgcgtcccagcatcgccaaggtgtggttccagccccagcgggccacagttctg

SEQ ID NO: 24584 - DNA, 36 bp, Homo sapiens
  chr18:45917168-45917204
  hypo
ctaagagcctggtccccgtggcggctggagagggct

SEQ ID NO: 24585 - DNA, 103 bp, Homo sapiens; identical to SEQ ID NO: 6331
  chr18:45935847-45935950
  hypo

SEQ ID NO: 24586 - DNA, 141 bp, Homo sapiens; identical to SEQ ID NO: 6332
  chr18:45936025-45936166
  hypo

SEQ ID NO: 24587 - DNA, 471 bp, Homo sapiens; identical to SEQ ID NO: 6333
  chr18:45936197-45936668
  hypo

SEQ ID NO: 24588 - DNA, 31 bp, Homo sapiens; identical to SEQ ID NO: 6334
  chr18:45936826-45936857
  hypo

SEQ ID NO: 24589 - DNA, 44 bp, Homo sapiens; identical to SEQ ID NO: 6335
  chr18:45936897-45936941
  hypo

SEQ ID NO: 24590 - DNA, 52 bp, Homo sapiens; identical to SEQ ID NO: 6336
  chr18:45936946-45936998
  hypo

SEQ ID NO: 24591 - DNA, 41 bp, Homo sapiens; identical to SEQ ID NO: 6337
  chr18:45937002-45937043
  hypo

SEQ ID NO: 24592 - DNA, 87 bp, Homo sapiens; identical to SEQ ID NO: 6342
  chr18:46065840-46065927
  hypo

SEQ ID NO: 24593 - DNA, 55 bp, Homo sapiens; identical to SEQ ID NO: 6343
  chr18:46065928-46065983
  hypo

SEQ ID NO: 24594 - DNA, 131 bp, Homo sapiens; identical to SEQ ID NO: 6344
  chr18:46066028-46066159
  hypo

SEQ ID NO: 24595 - DNA, 234 bp, Homo sapiens; identical to SEQ ID NO: 6345
  chr18:46066173-46066407
  hypo

SEQ ID NO: 24596 - DNA, 70 bp, Homo sapiens; identical to SEQ ID NO: 6346
  chr18:46066469-46066539
  hypo

SEQ ID NO: 24597 - DNA, 36 bp, Homo sapiens; identical to SEQ ID NO: 6352
  chr18:46067208-46067244
  hypo

SEQ ID NO: 24598 - DNA, 124 bp, Homo sapiens; identical to SEQ ID NO: 6353
  chr18:46067437-46067561
  hypo

SEQ ID NO: 24599 - DNA, 153 bp, Homo sapiens; identical to SEQ ID NO: 6354
  chr18:46067570-46067723
  hypo

SEQ ID NO: 24600 - DNA, 31 bp, Homo sapiens
  chr18:46142221-46142252
  hypo
ggaatggccgagaggacgtgaggacacaaga

SEQ ID NO: 24601 - DNA, 83 bp, Homo sapiens
  chr18:46142661-46142744
  hypo
ttttattcccatccagcggaggccagcttcccggggccaggcacggagcctgcttggggccagctctccggaacctgtgccca

SEQ ID NO: 24602 - DNA, 31 bp, Homo sapiens
  chr18:46142778-46142809
  hypo
attcactgctcactggcgagtcagtatggaa

SEQ ID NO: 24603 - DNA, 31 bp, Homo sapiens; identical to SEQ ID NO: 6357
  chr18:46476386-46476417
  hypo

SEQ ID NO: 24604 - DNA, 37 bp, Homo sapiens
  chr18:46501831-46501868
  hypo
accccagccccctcaccgaaaccgggcctgtcccctc

SEQ ID NO: 24605 - DNA, 31 bp, Homo sapiens
  chr18:47019806-47019837
  hypo
tctttgtcttctcctccgggttcctctttta

SEQ ID NO: 24606 - DNA, 44 bp, Homo sapiens
  chr18:47019855-47019899
  hypo
gtaacagacaatgggccgggcgcggtggctcacgcctgtaatcc

SEQ ID NO: 24607 - DNA, 27 bp, Homo sapiens
  chr18:47171180-47171207
  hypo
agagtcttcagccaggcgcagtggctc

SEQ ID NO: 24608 - DNA, 16 bp, Homo sapiens
  chr18:47285296-47285312
  hypo
ccggccagtggtattt

SEQ ID NO: 24609 - DNA, 45 bp, Homo sapiens
  chr18:47285354-47285399
  hypo
gaaatggatgtgaaggcgtgctgcgaactgcgccatgtggggtgt

SEQ ID NO: 24610 - DNA, 39 bp, Homo sapiens
  chr18:47285409-47285448
  hypo
ttcaggtagcattcagcgtgaggccggtgttttcacagc

SEQ ID NO: 24611 - DNA, 31 bp, Homo sapiens
  chr18:47500682-47500713
  hypo
caggtagcagatagagcgagacaggcggcag

SEQ ID NO: 24612 - DNA, 398 bp, Homo sapiens; identical to SEQ ID NO: 6363
  chr18:47720984-47721382
  hypo

SEQ ID NO: 24613 - DNA, 61 bp, Homo sapiens; identical to SEQ ID NO: 6364
  chr18:47721459-47721520
  hypo

SEQ ID NO: 24614 - DNA, 31 bp, Homo sapiens; identical to SEQ ID NO: 6366
  chr18:47792639-47792670
  hypo

SEQ ID NO: 24615 - DNA, 31 bp, Homo sapiens; identical to SEQ ID NO: 6367
  chr18:47792691-47792722
  hypo

SEQ ID NO: 24616 - DNA, 99 bp, Homo sapiens; identical to SEQ ID NO: 6368
  chr18:47792726-47792825
  hypo

SEQ ID NO: 24617 - DNA, 31 bp, Homo sapiens
  chr18:48135893-48135924
  hypo
acacaggtgtttgtgacgagaatgcactcct

SEQ ID NO: 24618 - DNA, 31 bp, Homo sapiens
  chr18:48256054-48256085
  hypo
gcgccagcccccagttcgacctggacgtgtt

SEQ ID NO: 24619 - DNA, 40 bp, Homo sapiens
  chr18:48493742-48493782
  hypo
ttgaccacctcaagtacgctgagcacgaaatcagtgcatc

SEQ ID NO: 24620 - DNA, 42 bp, Homo sapiens
  chr18:48493846-48493888
  hypo
ccctgtggtctgtaatcgccacgtgcccgttctgtatacagc

SEQ ID NO: 24621 - DNA, 31 bp, Homo sapiens; identical to SEQ ID NO: 6374
  chr18:53254902-53254933
  hypo

SEQ ID NO: 24622 - DNA, 80 bp, Homo sapiens; identical to SEQ ID NO: 6375
  chr18:53255102-53255182
  hypo

SEQ ID NO: 24623 - DNA, 102 bp, Homo sapiens; identical to SEQ ID NO: 6376
  chr18:53255284-53255386
  hypo

SEQ ID NO: 24624 - DNA, 31 bp, Homo sapiens
  chr18:55138397-55138428
  hypo
tccctggcttgatgagcgttgctgcacgact

SEQ ID NO: 24625 - DNA, 31 bp, Homo sapiens
  chr18:55373610-55373641
  hypo
cccaggcaggtggttacgtggaaggcaggtg

SEQ ID NO: 24626 - DNA, 31 bp, Homo sapiens
  chr18:55423988-55424019
  hypo
cacataggtgatgctgcgtcctttcagatgt

SEQ ID NO: 24627 - DNA, 31 bp, Homo sapiens
  chr18:55425542-55425573
  hypo
ctgttttctgtttatccgtcctgtgtgtttt

SEQ ID NO: 24628 - DNA, 26 bp, Homo sapiens
  chr18:55445745-55445771
  hypo
gccaccgcgcccggcctataatctca

SEQ ID NO: 24629 - DNA, 31 bp, Homo sapiens
  chr18:55850956-55850987
  hypo
tttttacttggttcaccgtaagtttgcaaaa

SEQ ID NO: 24630 - DNA, 31 bp, Homo sapiens
  chr18:55894720-55894751
  hypo
ttagtaaaatggaattcgctgggtgattctt

SEQ ID NO: 24631 - DNA, 31 bp, Homo sapiens
  chr18:55945679-55945710
  hypo
gaccccttctaatccacgtcccacattatag

SEQ ID NO: 24632 - DNA, 75 bp, Homo sapiens
  chr18:55945750-55945825
  hypo
ctgccaaaaccccatacggtcctccattaccaatcaggtgaatcgacttgcatttcccagcgtgtccccacaccc

SEQ ID NO: 24633 - DNA, 31 bp, Homo sapiens
  chr18:55945833-55945864
  hypo
tccatgacactgggcccgtccctgcctttat

SEQ ID NO: 24634 - DNA, 31 bp, Homo sapiens
  chr18:55976208-55976239
  hypo
caactgggtgacttcacgctgtcctcagcgc

SEQ ID NO: 24635 - DNA, 39 bp, Homo sapiens
  chr18:56036806-56036845
  hypo
agcctgcatagggccacgctgagccggggagaattggcc

SEQ ID NO: 24636 - DNA, 31 bp, Homo sapiens
  chr18:56483561-56483592
  hypo
gaagacaatttttccacggaccaggggtggg

SEQ ID NO: 24637 - DNA, 45 bp, Homo sapiens
  chr18:56483917-56483962
  hypo
taagtttgaaattccccggccgggcgcggtggctcacgcctgtaa

SEQ ID NO: 24638 - DNA, 16 bp, Homo sapiens
  chr18:59001327-59001343
  hypo
aggtggaggacgtggc

SEQ ID NO: 24639 - DNA, 31 bp, Homo sapiens
  chr18:59483671-59483702
  hypo
gagagtcctgggacagcgtctccatggtgga

SEQ ID NO: 24640 - DNA, 49 bp, Homo sapiens
  chr18:59533472-59533521
  hypo
cttctagacagcgagtcgggcccaggtagccccacggatggctactccc

SEQ ID NO: 24641 - DNA, 39 bp, Homo sapiens
  chr18:59533523-59533562
  hypo
ccagatgccttatacacggggactcgtttatcctcagga

SEQ ID NO: 24642 - DNA, 31 bp, Homo sapiens
  chr18:59533644-59533675
  hypo
acagagtgagaatctgcgaggacaagattca

SEQ ID NO: 24643 - DNA, 40 bp, Homo sapiens; identical to SEQ ID NO: 6387
  chr18:59992690-59992730
  hypo

SEQ ID NO: 24644 - DNA, 31 bp, Homo sapiens
  chr18:60010358-60010389
  hypo
gaaaaaccacatctttcgactctactgtaag

SEQ ID NO: 24645 - DNA, 31 bp, Homo sapiens
  chr18:60010760-60010791
  hypo
actcaacatggctttgcgtagggaaataaat

SEQ ID NO: 24646 - DNA, 51 bp, Homo sapiens
  chr18:60077429-60077480
  hypo
caatgcttgaaaaacccgtccttggctggggggcctcggtcacctgcacta

SEQ ID NO: 24647 - DNA, 31 bp, Homo sapiens
  chr18:60077489-60077520
  hypo
ctgtggacccatttttcgtgaagaggagatc

SEQ ID NO: 24648 - DNA, 31 bp, Homo sapiens
  chr18:60077549-60077580
  hypo
tggaggcagggctcatcgagactcacccagc

SEQ ID NO: 24649 - DNA, 31 bp, Homo sapiens
  chr18:60077587-60077618
  hypo
aatgagtccaacactgcggctgggcaaagtg

SEQ ID NO: 24650 - DNA, 31 bp, Homo sapiens
  chr18:60117013-60117044
  hypo
tgagaacctaagatggcgatgcttttatcca

SEQ ID NO: 24651 - DNA, 53 bp, Homo sapiens
  chr18:60117059-60117112
  hypo
tgcttctcctgagagccgggagcactatcccagccgaacgagagtctcccttt

SEQ ID NO: 24652 - DNA, 31 bp, Homo sapiens
  chr18:60117147-60117178
  hypo
tagcccaatcaatgcacggctaatcctggca

SEQ ID NO: 24653 - DNA, 104 bp, Homo sapiens
  chr18:60120641-60120745
  hypo
ttgcttcttatttcaccgagaaaatagatggcatccgaaaagaacttgcctgtcccacctccccgtctactatcctcctgtgtctgtcccgaaatactgtctgt

SEQ ID NO: 24654 - DNA, 31 bp, Homo sapiens
  chr18:60120804-60120835
  hypo
acttactcaaaaatgtcgctcctgtgatcat

SEQ ID NO: 24655 - DNA, 32 bp, Homo sapiens
  chr18:60127357-60127389
  hypo
tttaaaaaatgttggccgggcctggtggctca

SEQ ID NO: 24656 - DNA, 31 bp, Homo sapiens
  chr18:60129833-60129864
  hypo
gggacacagccatgaacgaaaatctggcaaa

SEQ ID NO: 24657 - DNA, 31 bp, Homo sapiens
  chr18:60154517-60154548
  hypo
tttttttttgagacagcgtcttgctttgctg

SEQ ID NO: 24658 - DNA, 31 bp, Homo sapiens
  chr18:60154556-60154587
  hypo
ggaatgcagtggcactcgcatggttcctgac

SEQ ID NO: 24659 - DNA, 43 bp, Homo sapiens
  chr18:60154596-60154639
  hypo
tcaagtgatcctcctgcgtggctgggaccgaaggccacacctg

SEQ ID NO: 24660 - DNA, 69 bp, Homo sapiens; identical to SEQ ID NO: 6389
  chr18:60189546-60189615
  hypo

SEQ ID NO: 24661 - DNA, 79 bp, Homo sapiens; identical to SEQ ID NO: 6390
  chr18:60189626-60189705
  hypo

SEQ ID NO: 24662 - DNA, 88 bp, Homo sapiens; identical to SEQ ID NO: 6391
  chr18:60189824-60189912
  hypo

SEQ ID NO: 24663 - DNA, 79 bp, Homo sapiens; identical to SEQ ID NO: 6392
  chr18:60190084-60190163
  hypo

SEQ ID NO: 24664 - DNA, 188 bp, Homo sapiens; identical to SEQ ID NO: 6393
  chr18:60190165-60190353
  hypo

SEQ ID NO: 24665 - DNA, 57 bp, Homo sapiens; identical to SEQ ID NO: 6394
  chr18:60190443-60190500
  hypo

SEQ ID NO: 24666 - DNA, 204 bp, Homo sapiens; identical to SEQ ID NO: 6395
  chr18:60190610-60190814
  hypo

SEQ ID NO: 24667 - DNA, 518 bp, Homo sapiens; identical to SEQ ID NO: 6396
  chr18:60190846-60191364
  hypo

SEQ ID NO: 24668 - DNA, 60 bp, Homo sapiens; identical to SEQ ID NO: 6397
  chr18:60191440-60191500
  hypo

SEQ ID NO: 24669 - DNA, 193 bp, Homo sapiens; identical to SEQ ID NO: 6398
  chr18:60191503-60191696
  hypo

SEQ ID NO: 24670 - DNA, 96 bp, Homo sapiens; identical to SEQ ID NO: 6399
  chr18:60191978-60192074
  hypo

SEQ ID NO: 24671 - DNA, 31 bp, Homo sapiens; identical to SEQ ID NO: 6400
  chr18:60193831-60193862
  hypo

SEQ ID NO: 24672 - DNA, 92 bp, Homo sapiens; identical to SEQ ID NO: 6401
  chr18:60194121-60194213
  hypo

SEQ ID NO: 24673 - DNA, 43 bp, Homo sapiens
  chr18:60210293-60210336
  hypo
atgtcttcttcttgcccgtcagctgtatcgggaattccttgtc

SEQ ID NO: 24674 - DNA, 88 bp, Homo sapiens
  chr18:60210352-60210440
  hypo
ctccctgcttgagctacgccttttctcctcaggttggatggcacgcaccctgaagccaggtggaaccatgccacgtttttgtgaatcc

SEQ ID NO: 24675 - DNA, 31 bp, Homo sapiens
  chr18:60210719-60210750
  hypo
tcctggtgtcttactgcggcatgcgtctcgc

SEQ ID NO: 24676 - DNA, 2 bp, Homo sapiens
  chr18:60216458-60216460
  hypo
aa

SEQ ID NO: 24677 - DNA, 47 bp, Homo sapiens
  chr18:60216495-60216542
  hypo
ggcatgattcccacagcgggtgtgtagaatgccgacagagtcttcta

SEQ ID NO: 24678 - DNA, 34 bp, Homo sapiens
  chr18:60217645-60217679
  hypo
cttgaaaagggaggaacggcgacatcctgaccta

SEQ ID NO: 24679 - DNA, 31 bp, Homo sapiens
  chr18:60217693-60217724
  hypo
gtaatgatttacctgacgcctatcatagcag

SEQ ID NO: 24680 - DNA, 31 bp, Homo sapiens
  chr18:60217729-60217760
  hypo
acacaggacaaagggccgctccaaatggggt

SEQ ID NO: 24681 - DNA, 31 bp, Homo sapiens
  chr18:60217780-60217811
  hypo
gagatcctttctctggcgtacttcttaaaat

SEQ ID NO: 24682 - DNA, 47 bp, Homo sapiens
  chr18:60229134-60229181
  hypo
tcaaatatttcttctccgcttttctcttgctccgtcttccaagactc

SEQ ID NO: 24683 - DNA, 23 bp, Homo sapiens
  chr18:60229199-60229222
  hypo
atttttcaccatgtcccgtggtt

SEQ ID NO: 24684 - DNA, 27 bp, Homo sapiens
  chr18:60229521-60229548
  hypo
accgtgcccagccgtcccatgtctttt

SEQ ID NO: 24685 - DNA, 43 bp, Homo sapiens
  chr18:60234751-60234794
  hypo
ctggctcctgccaggacgcagtcagcgccgtcagctgtctgtg

SEQ ID NO: 24686 - DNA, 29 bp, Homo sapiens
  chr18:60234859-60234888
  hypo
attacctcatatagagcgttaagaatgct

SEQ ID NO: 24687 - DNA, 35 bp, Homo sapiens
  chr18:60242134-60242169
  hypo
acttctccccagccagcgagcgcaggtatcagcca

SEQ ID NO: 24688 - DNA, 31 bp, Homo sapiens
  chr18:60254709-60254740
  hypo
agggcatctggaagaccgtggttctccttgc

SEQ ID NO: 24689 - DNA, 31 bp, Homo sapiens
  chr18:60273153-60273184
  hypo
tggcctggcgttcctgcgctactcagtccct

SEQ ID NO: 24690 - DNA, 31 bp, Homo sapiens
  chr18:60273193-60273224
  hypo
tcataaaggtgcaccccgctgccccacacag

SEQ ID NO: 24691 - DNA, 19 bp, Homo sapiens
  chr18:60346046-60346065
  hypo
agtccggcctaaagtgata

SEQ ID NO: 24692 - DNA, 117 bp, Homo sapiens; identical to SEQ ID NO: 6402
  chr18:60382938-60383055
  hypo

SEQ ID NO: 24693 - DNA, 55 bp, Homo sapiens; identical to SEQ ID NO: 6403
  chr18:60383085-60383140
  hypo

SEQ ID NO: 24694 - DNA, 464 bp, Homo sapiens; identical to SEQ ID NO: 6404
  chr18:60383150-60383614
  hypo

SEQ ID NO: 24695 - DNA, 57 bp, Homo sapiens; identical to SEQ ID NO: 6405
  chr18:60383661-60383718
  hypo

SEQ ID NO: 24696 - DNA, 159 bp, Homo sapiens; identical to SEQ ID NO: 6406
  chr18:60384006-60384165
  hypo

SEQ ID NO: 24697 - DNA, 29 bp, Homo sapiens
  chr18:60415770-60415799
  hypo
gccccgcccaaattcggaatagttatatt

SEQ ID NO: 24698 - DNA, 27 bp, Homo sapiens
  chr18:60476063-60476090
  hypo
ggcgtgagccaccgtgcctggcctgga

SEQ ID NO: 24699 - DNA, 82 bp, Homo sapiens
  chr18:60523277-60523359
  hypo
taggcccttcttactgcgagtttcccattttcagattcaactaaccggggatcaaaacctgccaacacggagggctgagtgt

SEQ ID NO: 24700 - DNA, 31 bp, Homo sapiens
  chr18:60523376-60523407
  hypo
cagggacttgagcatccgtggattttgatac

SEQ ID NO: 24701 - DNA, 34 bp, Homo sapiens
  chr18:60523430-60523464
  hypo
cccagtggatatggagcgccgaccatatgttggt

SEQ ID NO: 24702 - DNA, 34 bp, Homo sapiens
  chr18:60534963-60534997
  hypo
ctttggtattctgccacggcgatgcatgccaaga

SEQ ID NO: 24703 - DNA, 36 bp, Homo sapiens
  chr18:60549765-60549801
  hypo
acaggcatgagccaccgcgcccggccattcacttaa

SEQ ID NO: 24704 - DNA, 31 bp, Homo sapiens
  chr18:60614350-60614381
  hypo
cacattgaggaagagccgtgctctgaaggga

SEQ ID NO: 24705 - DNA, 71 bp, Homo sapiens
  chr18:60645389-60645460
  hypo
tctgtggtcctacagtcgagacagtcgagggacccgcagggaacctgcacagttgccgcaggtgctctgta

SEQ ID NO: 24706 - DNA, 49 bp, Homo sapiens
  chr18:60645492-60645541
  hypo
aggatggcaaggtgaacggagtgactgagtccacgcgcatcctgggcta

SEQ ID NO: 24707 - DNA, 39 bp, Homo sapiens
  chr18:60645553-60645592
  hypo
tcccagtgtggtgcctcgcccccacgtgcagtccgtgct

SEQ ID NO: 24708 - DNA, 89 bp, Homo sapiens
  chr18:60645978-60646067
  hypo
tggggtcaacagcctccgatgagcccccgcccggagccctaagcgagaacagccctgcctaccccagtgagcagcgctgcatgctccac

SEQ ID NO: 24709 - DNA, 111 bp, Homo sapiens
  chr18:60646078-60646189
  hypo
gtccaactccttccagcgccagctatccagcgccacgttctctagcgccttctccgacaacggccttgacagtgacgatgaggagcccatcgagggcgtcttcaccaacgg

SEQ ID NO: 24710 - DNA, 44 bp, Homo sapiens
  chr18:60654358-60654402
  hypo
gaaccccctccacatgcgctgagtgcagacgacacaggagcaga

SEQ ID NO: 24711 - DNA, 31 bp, Homo sapiens
  chr18:60675741-60675772
  hypo
caccctgatcacagaacgcttatcatagctg

SEQ ID NO: 24712 - DNA, 31 bp, Homo sapiens
  chr18:61164471-61164502
  hypo
gctagcattggaatagcgtttggcagcttga

SEQ ID NO: 24713 - DNA, 27 bp, Homo sapiens
  chr18:67941008-67941035
  hypo
tgtctgaggctgggtgcggtggctcat

SEQ ID NO: 24714 - DNA, 80 bp, Homo sapiens; identical to SEQ ID NO: 6411
  chr18:67955796-67955876
  hypo

SEQ ID NO: 24715 - DNA, 31 bp, Homo sapiens; identical to SEQ ID NO: 6412
  chr18:67955915-67955946
  hypo

SEQ ID NO: 24716 - DNA, 60 bp, Homo sapiens; identical to SEQ ID NO: 6413
  chr18:67956753-67956813
  hypo

SEQ ID NO: 24717 - DNA, 93 bp, Homo sapiens; identical to SEQ ID NO: 6414
  chr18:67956838-67956931
  hypo

SEQ ID NO: 24718 - DNA, 28 bp, Homo sapiens
  chr18:67980296-67980324
  hypo
tgagccaccacaccgggtccatggattt

SEQ ID NO: 24719 - DNA, 12 bp, Homo sapiens
  chr18:67985373-67985385
  hypo
gaaccactgtac

SEQ ID NO: 24720 - DNA, 31 bp, Homo sapiens
  chr18:67985433-67985464
  hypo
agtctttttgcctgtacgtgattctgcagaa

SEQ ID NO: 24721 - DNA, 31 bp, Homo sapiens
  chr18:67991163-67991194
  hypo
tggacactggcccacacgttagagtttatac

SEQ ID NO: 24722 - DNA, 35 bp, Homo sapiens
  chr18:67991239-67991274
  hypo
tctttataaacatcatcgggcggggcatggtagct

SEQ ID NO: 24723 - DNA, 31 bp, Homo sapiens
  chr18:67991979-67992010
  hypo
gtagtacaacaaccatcgctagccagtgact

SEQ ID NO: 24724 - DNA, 40 bp, Homo sapiens
  chr18:67992049-67992089
  hypo
aagatatggccagctgcgatatcaacggtgaagatgaaaa

SEQ ID NO: 24725 - DNA, 118 bp, Homo sapiens
  chr18:67992232-67992350
  hypo
ccatagtctttaaagacgtgagagctcagaggccgataaggtccacgtcgctccgcagccatcactacagtcccgcgccgtggcctctgcggcccacaaactccgaggagacctgcat

SEQ ID NO: 24726 - DNA, 31 bp, Homo sapiens
  chr18:67992599-67992630
  hypo
tcctttggaaggatcacggagctattgtctg

SEQ ID NO: 24727 - DNA, 65 bp, Homo sapiens
  chr18:67992642-67992707
  hypo
cccatggaagtctctgcggttcctcctcaagtgggagggcgcgctttccccgaggatgagagtca

SEQ ID NO: 24728 - DNA, 31 bp, Homo sapiens
  chr18:67992930-67992961
  hypo
catttgaattttgatccgaactctgctcctg

SEQ ID NO: 24729 - DNA, 31 bp, Homo sapiens
  chr18:68042721-68042752
  hypo
acaggtgtgagccaccgcgtctgacctctgg

SEQ ID NO: 24730 - DNA, 31 bp, Homo sapiens
  chr18:68053093-68053124
  hypo
gttaggtgagataatacgattcacttaaagt

SEQ ID NO: 24731 - DNA, 31 bp, Homo sapiens
  chr18:68059453-68059484
  hypo
tgtacttgagtttaggcgaggaagagctctt

SEQ ID NO: 24732 - DNA, 31 bp, Homo sapiens
  chr18:68088585-68088616
  hypo
aaatgcagaaattattcgtctccataggtac

SEQ ID NO: 24733 - DNA, 31 bp, Homo sapiens
  chr18:68180999-68181030
  hypo
cctggctccccccgtccgtctgcaaaatgga

SEQ ID NO: 24734 - DNA, 35 bp, Homo sapiens; identical to SEQ ID NO: 6415
  chr18:70535605-70535640
  hypo

SEQ ID NO: 24735 - DNA, 31 bp, Homo sapiens
  chr18:71003886-71003917
  hypo
atttcccttaccagtacgttaatgtaagaat

SEQ ID NO: 24736 - DNA, 31 bp, Homo sapiens
  chr18:71745556-71745587
  hypo
tttcaaggcccccccccgacctgccccagca

SEQ ID NO: 24737 - DNA, 42 bp, Homo sapiens
  chr18:71847877-71847919
  hypo
gggcgttcctggagaccgtaaggggcacgttcatggagcaga

SEQ ID NO: 24738 - DNA, 41 bp, Homo sapiens
  chr18:71847920-71847961
  hypo
gaagcagagacatgagcgatggtgggcggaagtccacacca

SEQ ID NO: 24739 - DNA, 50 bp, Homo sapiens
  chr18:71867253-71867303
  hypo
tgaaggagcgaagccccgtccttgggaagaggagacgtgagccaggcagg

SEQ ID NO: 24740 - DNA, 57 bp, Homo sapiens
  chr18:71867335-71867392
  hypo
tccagatgaaggctaacgaggtgcagctccacccagcctcctcgggctctccttccc

SEQ ID NO: 24741 - DNA, 31 bp, Homo sapiens
  chr18:71867395-71867426
  hypo
ggagcctctcatcctgcgatggccacattct

SEQ ID NO: 24742 - DNA, 31 bp, Homo sapiens
  chr18:71872660-71872691
  hypo
cttctcaaggagccttcgtaactgtcagtgg

SEQ ID NO: 24743 - DNA, 31 bp, Homo sapiens
  chr18:71879692-71879723
  hypo
cccagggtcatcctggcgacccaatcaactc

SEQ ID NO: 24744 - DNA, 44 bp, Homo sapiens
  chr18:71879748-71879792
  hypo
cacacatagctcccatcgccacaacatggcgggctgccccatgc

SEQ ID NO: 24745 - DNA, 43 bp, Homo sapiens
  chr18:71889076-71889119
  hypo
agactggttgtgaagacgggaattcagcgcgccatgcagggga

SEQ ID NO: 24746 - DNA, 65 bp, Homo sapiens
  chr18:71889143-71889208
  hypo
ccatcccctcctcaggcgtttttgcttcatgcttatatccgtgtcatcatcgggcctcttatgct

SEQ ID NO: 24747 - DNA, 31 bp, Homo sapiens
  chr18:71889217-71889248
  hypo
tttgtgtgttctctctcgcttaacaaactca

SEQ ID NO: 24748 - DNA, 49 bp, Homo sapiens
  chr18:71904649-71904698
  hypo
ctgaaatggcagtccccgctcttctcgtccactgcgcacctcctggcct

SEQ ID NO: 24749 - DNA, 42 bp, Homo sapiens; identical to SEQ ID NO: 6416
  chr18:71958660-71958702
  hypo

SEQ ID NO: 24750 - DNA, 31 bp, Homo sapiens
  chr18:71982746-71982777
  hypo
gcagcacgcagttagccggggcttcagcgcc

SEQ ID NO: 24751 - DNA, 62 bp, Homo sapiens
  chr18:71983205-71983267
  hypo
cttgaaggaggcagagcggaagcgagggagactgctggaggccctgccgcccacccgccctt

SEQ ID NO: 24752 - DNA, 31 bp, Homo sapiens
  chr18:72035257-72035288
  hypo
ttacttctctctgggccgtgctggcctcctg

SEQ ID NO: 24753 - DNA, 31 bp, Homo sapiens
  chr18:72213717-72213748
  hypo
agatgcggtactgtctcgtgccacccccctt

SEQ ID NO: 24754 - DNA, 31 bp, Homo sapiens
  chr18:72344371-72344402
  hypo
cacagatgaaaacacacgatgcagaatcagt

SEQ ID NO: 24755 - DNA, 31 bp, Homo sapiens
  chr18:72344403-72344434
  hypo
ctgaaacacctggaagcgtgcagcagtgtgc

SEQ ID NO: 24756 - DNA, 48 bp, Homo sapiens
  chr18:72741504-72741552
  hypo
ccaccttcattcagggcggagtgtgtgtgcgtgcgtgtgtgtgcgtat

SEQ ID NO: 24757 - DNA, 31 bp, Homo sapiens
  chr18:72741600-72741631
  hypo
gcatgcgcagggcatgcgcaggggcaggaag

SEQ ID NO: 24758 - DNA, 31 bp, Homo sapiens
  chr18:72801127-72801158
  hypo
ctgagcgaggccaccacggcttccccacctg

SEQ ID NO: 24759 - DNA, 31 bp, Homo sapiens
  chr18:72823620-72823651
  hypo
agggttgtttcagtgccgatgagaggtttgg

SEQ ID NO: 24760 - DNA, 46 bp, Homo sapiens
  chr18:72896218-72896264
  hypo
caggggaggttgaggacgtccctgcactccccgccctgtaagcatc

SEQ ID NO: 24761 - DNA, 31 bp, Homo sapiens
  chr18:72997866-72997897
  hypo
ggccccaccacgagcacgcccagcaccagct

SEQ ID NO: 24762 - DNA, 31 bp, Homo sapiens
  chr18:74058618-74058649
  hypo
actgactagtcagggccgggccggtggggca

SEQ ID NO: 24763 - DNA, 31 bp, Homo sapiens
  chr18:74060163-74060194
  hypo
tgtgggtagctgtggacgatgcttccctgaa

SEQ ID NO: 24764 - DNA, 50 bp, Homo sapiens
  chr18:74069271-74069321
  hypo
agagtggcgcacccagcgcagagtggcgtccccagcgcagagtggcgtcc

SEQ ID NO: 24765 - DNA, 31 bp, Homo sapiens
  chr18:74069366-74069397
  hypo
agagtggcgtacccagcggagagtggcgtac

SEQ ID NO: 24766 - DNA, 31 bp, Homo sapiens
  chr18:74069544-74069575
  hypo
tctggaaagccacattcgggaacttatctag

SEQ ID NO: 24767 - DNA, 71 bp, Homo sapiens
  chr18:74089170-74089241
  hypo
tgaggatctaagaccacgcctcagggacgccactcctgagtcacacctcaagccaacgtgaatgacgagac

SEQ ID NO: 24768 - DNA, 31 bp, Homo sapiens
  chr18:74090940-74090971
  hypo
ttgatggagtgtaggacgggggggcgcccca

SEQ ID NO: 24769 - DNA, 43 bp, Homo sapiens
  chr18:74091041-74091084
  hypo
gctcctgggctgccttcgaggggggctcgcggggaggtagagg

SEQ ID NO: 24770 - DNA, 31 bp, Homo sapiens
  chr18:74092348-74092379
  hypo
agccatctgtcttcagcgggagaagccaccc

SEQ ID NO: 24771 - DNA, 31 bp, Homo sapiens
  chr18:74094300-74094331
  hypo
ctcatttctaaatattcgaaaaaggcaacat

SEQ ID NO: 24772 - DNA, 31 bp, Homo sapiens
  chr18:74096611-74096642
  hypo
ggccctgatcctgaaacggaagaactcggct

SEQ ID NO: 24773 - DNA, 65 bp, Homo sapiens
  chr18:74097032-74097097
  hypo
gcagccctagagaaggcgcacgtcgctcccaaccccacgagtgtgcacacgcgtgccacagacgg

SEQ ID NO: 24774 - DNA, 31 bp, Homo sapiens
  chr18:74100531-74100562
  hypo
gatggagaaagggaaccggacaagcttattg

SEQ ID NO: 24775 - DNA, 31 bp, Homo sapiens
  chr18:74113766-74113797
  hypo
accaaccacacccccgcgctccatctctcca

SEQ ID NO: 24776 - DNA, 31 bp, Homo sapiens
  chr18:74115004-74115035
  hypo
cagaaaccaccaaaggcgcctggcactactg

SEQ ID NO: 24777 - DNA, 46 bp, Homo sapiens
  chr18:74116223-74116269
  hypo
acacgcctgggggagacgacgtgatcccactcgccccactccagca

SEQ ID NO: 24778 - DNA, 31 bp, Homo sapiens
  chr18:74117535-74117566
  hypo
tcactttcggggcacccggttctgttgtgtt

SEQ ID NO: 24779 - DNA, 31 bp, Homo sapiens
  chr18:74120420-74120451
  hypo
tggctctggtatagctcggaaagtacactgt

SEQ ID NO: 24780 - DNA, 16 bp, Homo sapiens
  chr18:74136515-74136531
  hypo
ggtgaaaaggttcccc

SEQ ID NO: 24781 - DNA, 31 bp, Homo sapiens
  chr18:74145002-74145033
  hypo
ctgaaatccacacatgcggcactttccattg

SEQ ID NO: 24782 - DNA, 45 bp, Homo sapiens
  chr18:74145079-74145124
  hypo
aggccagcctctgctgcgactgctgttcatcgctgtttctgttat

SEQ ID NO: 24783 - DNA, 31 bp, Homo sapiens
  chr18:74148371-74148402
  hypo
atcgttttgagcctctcgtgggacccatgat

SEQ ID NO: 24784 - DNA, 31 bp, Homo sapiens
  chr18:74149886-74149917
  hypo
gtcccatctattgagtcgcagtgagtatcta

SEQ ID NO: 24785 - DNA, 51 bp, Homo sapiens
  chr18:74149959-74150010
  hypo
atgacagatattagcacgacaagaaatggtgaaaagcgggagtagtgaaat

SEQ ID NO: 24786 - DNA, 61 bp, Homo sapiens
  chr18:74153448-74153509
  hypo
ccgcactcgaagcactcggaggacttgccctggccggtggtggctgcggccctgcggttgg

SEQ ID NO: 24787 - DNA, 87 bp, Homo sapiens
  chr18:74154493-74154580
  hypo
ctgccttggcctcccccggggcgcatgcggacccctctgcccccttcttgctgctccgcagcaggactctgccgctgtcggcctgcg

SEQ ID NO: 24788 - DNA, 63 bp, Homo sapiens
  chr18:74154585-74154648
  hypo
ccgttcaggaccctggcgccgtcggcctgcgaggccccgttcagcagccggttgcaggccgag

SEQ ID NO: 24789 - DNA, 31 bp, Homo sapiens
  chr18:74154972-74155003
  hypo
cgcctcagctccatctcggcctctctgttgc

SEQ ID NO: 24790 - DNA, 31 bp, Homo sapiens
  chr18:74155961-74155992
  hypo
gtagctgtgtccagcacggaacaggccccca

SEQ ID NO: 24791 - DNA, 31 bp, Homo sapiens
  chr18:74156515-74156546
  hypo
atgacagggccacccacgaaaagacctgggg

SEQ ID NO: 24792 - DNA, 31 bp, Homo sapiens
  chr18:74156550-74156581
  hypo
agctccctgtttgctccgagttttgcagcct

SEQ ID NO: 24793 - DNA, 31 bp, Homo sapiens
  chr18:74170657-74170688
  hypo
gtgcctcaccgtcgtgcgtgtgcatgcctgt

SEQ ID NO: 24794 - DNA, 27 bp, Homo sapiens
  chr18:74175990-74176017
  hypo
gactcaaggccgggcgcgggtgctcac

SEQ ID NO: 24795 - DNA, 24 bp, Homo sapiens
  chr18:74192763-74192787
  hypo
caccgcacccggctggtttttaca

SEQ ID NO: 24796 - DNA, 31 bp, Homo sapiens; identical to SEQ ID NO: 6425
  chr18:74204793-74204824
  hypo

SEQ ID NO: 24797 - DNA, 31 bp, Homo sapiens
  chr18:74273198-74273229
  hypo
ggcactgatttatcttcgctgtgaaaggtcc

SEQ ID NO: 24798 - DNA, 31 bp, Homo sapiens
  chr18:74274870-74274901
  hypo
ctagacgcacggcgtacgctccatacatatg

SEQ ID NO: 24799 - DNA, 57 bp, Homo sapiens
  chr18:74275322-74275379
  hypo
tgagacaggacaggtgcgctcctaccgctgacaccagagtcccgaagatgcccgtcc

SEQ ID NO: 24800 - DNA, 35 bp, Homo sapiens
  chr18:74299117-74299152
  hypo
gtgcatatatgggccacgtgcgtatatgggacacg

SEQ ID NO: 24801 - DNA, 31 bp, Homo sapiens
  chr18:74299794-74299825
  hypo
ctcacaaatcctaaagcggcttttacacaac

SEQ ID NO: 24802 - DNA, 31 bp, Homo sapiens
  chr18:74324131-74324162
  hypo
accgaagccttgaaggcgagcaggcaccctc

SEQ ID NO: 24803 - DNA, 22 bp, Homo sapiens
  chr18:74381417-74381439
  hypo
gccggtaatgctagcacgttga

SEQ ID NO: 24804 - DNA, 36 bp, Homo sapiens
  chr18:74420788-74420824
  hypo
tggcttagagagcggtcgtcacgtgacccggaagtg

SEQ ID NO: 24805 - DNA, 36 bp, Homo sapiens
  chr18:74426496-74426532
  hypo
ggcatcagacagtgcccgtgacgaggtcagggccac

SEQ ID NO: 24806 - DNA, 31 bp, Homo sapiens
  chr18:74426590-74426621
  hypo
tggtgggggttaaaccgcgtgaagctgaagg

SEQ ID NO: 24807 - DNA, 31 bp, Homo sapiens
  chr18:74426671-74426702
  hypo
actatcttaggacatacggcagatttttcta

SEQ ID NO: 24808 - DNA, 40 bp, Homo sapiens
  chr18:74443756-74443796
  hypo
atgaccttgctcactgcgccatagccgtgaggttcaagcc

SEQ ID NO: 24809 - DNA, 31 bp, Homo sapiens
  chr18:74451537-74451568
  hypo
tgctgtgtggcccacacgggagcaaagaggg

SEQ ID NO: 24810 - DNA, 31 bp, Homo sapiens
  chr18:74451803-74451834
  hypo
gaccgaggggatgcagcgcacagtcatgaga

SEQ ID NO: 24811 - DNA, 39 bp, Homo sapiens
  chr18:74471097-74471136
  hypo
gaacgttgttcctgcccgggaggacgcctgcagccgcgc

SEQ ID NO: 24812 - DNA, 31 bp, Homo sapiens
  chr18:74592527-74592558
  hypo
aaagaacaggcttttccgaagttgtatctat

SEQ ID NO: 24813 - DNA, 31 bp, Homo sapiens
  chr18:74592566-74592597
  hypo
acagaggtggaaaaagcgttttattctttct

SEQ ID NO: 24814 - DNA, 31 bp, Homo sapiens
  chr18:74631682-74631713
  hypo
taggttttcttcattacgattttgatccctt

SEQ ID NO: 24815 - DNA, 31 bp, Homo sapiens
  chr18:74633614-74633645
  hypo
caaaatgctaccaaggcgacataaagtgcta

SEQ ID NO: 24816 - DNA, 35 bp, Homo sapiens
  chr18:74697570-74697605
  hypo
tggctggcacggggggcggccgcatcctggcagca

SEQ ID NO: 24817 - DNA, 31 bp, Homo sapiens
  chr18:74734079-74734110
  hypo
tgccctgtaagtgagacgtatcatgcagtcc

SEQ ID NO: 24818 - DNA, 31 bp, Homo sapiens
  chr18:74738359-74738390
  hypo
ctagaataaaacataacgcagaaatcacctt

SEQ ID NO: 24819 - DNA, 31 bp, Homo sapiens
  chr18:74743579-74743610
  hypo
tgacatatctaatagacgaacatcttgttgc

SEQ ID NO: 24820 - DNA, 31 bp, Homo sapiens
  chr18:74759388-74759419
  hypo
gcatggaaagtagattcgcagtggccggggg

SEQ ID NO: 24821 - DNA, 25 bp, Homo sapiens
  chr18:74760839-74760864
  hypo
tcaagaataatctctacgagggcag

SEQ ID NO: 24822 - DNA, 31 bp, Homo sapiens
  chr18:74763858-74763889
  hypo
atgttctttgtagaagcgaggcccagctcct

SEQ ID NO: 24823 - DNA, 35 bp, Homo sapiens
  chr18:74764263-74764298
  hypo
gtgatcagcagcatcccgatcgggggggtaagaca

SEQ ID NO: 24824 - DNA, 48 bp, Homo sapiens
  chr18:74770084-74770132
  hypo
tttaagttcggcagaggacacccagggctgcaccggctcttcagggac

SEQ ID NO: 24825 - DNA, 48 bp, Homo sapiens
  chr18:74794098-74794146
  hypo
cgcccggcccatagcagcatattttataatagccgcaaggtagaaact

SEQ ID NO: 24826 - DNA, 31 bp, Homo sapiens
  chr18:74794227-74794258
  hypo
gaatgaaggactggtacgtgctacaccatgg

SEQ ID NO: 24827 - DNA, 31 bp, Homo sapiens
  chr18:74806855-74806886
  hypo
tgtgtctagaggctaacgtgtcaccaggcag

SEQ ID NO: 24828 - DNA, 31 bp, Homo sapiens
  chr18:74823086-74823117
  hypo
aagctccataaatacacgctgaagacacgac

SEQ ID NO: 24829 - DNA, 31 bp, Homo sapiens
  chr18:74832263-74832294
  hypo
ccaggtgacctcagacgcgctgcacacacct

SEQ ID NO: 24830 - DNA, 31 bp, Homo sapiens
  chr18:74841695-74841726
  hypo
taattagaggccaggcgcggtggctcatgcc

SEQ ID NO: 24831 - DNA, 35 bp, Homo sapiens
  chr18:74847366-74847401
  hypo
caggcctgagccaccacgcccggccaggactgaat

SEQ ID NO: 24832 - DNA, 93 bp, Homo sapiens
  chr18:75998624-75998717
  hypo
acgtggtgtgtgtgtgtgtcgtgtgtcgtgtggcgtgtgccgtgcgtgtgcgcaccgtgggcgggaggcgagaggaagcgcagtgggagccgc

SEQ ID NO: 24833 - DNA, 112 bp, Homo sapiens
  chr18:75998742-75998854
  hypo
gggaggcgaagcagcccgggtgggggcgttcgctggaaacggggcccctctgaagggcgtgggcagccggtgcctgcagagcgtggagagctgcggccgcctcacctgacac

SEQ ID NO: 24834 - DNA, 44 bp, Homo sapiens
  chr18:75998930-75998974
  hypo
gctccggcaacatcagcgacagtggagcccggtctcaaaagacc

SEQ ID NO: 24835 - DNA, 39 bp, Homo sapiens
  chr18:75998989-75999028
  hypo
gaagaaggaaggaggccgaggcgccgcagggaccctggc

SEQ ID NO: 24836 - DNA, 31 bp, Homo sapiens
  chr18:76435960-76435991
  hypo
cgttcactcaggaagccgaagcccagaagag

SEQ ID NO: 24837 - DNA, 31 bp, Homo sapiens
  chr18:76435997-76436028
  hypo
ctcaaagttcacagcacgtggcctagaattc

SEQ ID NO: 24838 - DNA, 31 bp, Homo sapiens
  chr18:76436051-76436082
  hypo
taactcatcccctgtgcggtgatgcttctga

SEQ ID NO: 24839 - DNA, 31 bp, Homo sapiens
  chr18:76543110-76543141
  hypo
ggaggctggggagccccgggtgtccaggcac

SEQ ID NO: 24840 - DNA, 31 bp, Homo sapiens
  chr18:76653431-76653462
  hypo
accgaaggctacacaccgcacaactccgtct

SEQ ID NO: 24841 - DNA, 31 bp, Homo sapiens
  chr18:77126099-77126130
  hypo
tattgattctttttaccggacacctgggagg

SEQ ID NO: 24842 - DNA, 46 bp, Homo sapiens
  chr18:77143640-77143686
  hypo
cagtccacaggccacccgtgggttctgaaacgcgcccctcagtgtg

SEQ ID NO: 24843 - DNA, 31 bp, Homo sapiens; identical to SEQ ID NO: 6430
  chr18:77159935-77159966
  hypo

SEQ ID NO: 24844 - DNA, 100 bp, Homo sapiens; identical to SEQ ID NO: 6431
  chr18:77159979-77160079
  hypo

SEQ ID NO: 24845 - DNA, 21 bp, Homo sapiens
  chr18:77167728-77167749
  hypo
gccaccgcgcctggccacctc

SEQ ID NO: 24846 - DNA, 31 bp, Homo sapiens
  chr18:77212961-77212992
  hypo
gtgcttcaatcaaaatcggctttagaggtct

SEQ ID NO: 24847 - DNA, 55 bp, Homo sapiens
  chr18:77236207-77236262
  hypo
gcgcctgggagggatccgcctgtccacgtgcagccgcctccgggcggcgtcggcc

SEQ ID NO: 24848 - DNA, 31 bp, Homo sapiens
  chr18:77290968-77290999
  hypo
cctggcaagggcatctcgttatatggacagc

SEQ ID NO: 24849 - DNA, 31 bp, Homo sapiens
  chr18:77372905-77372936
  hypo
tatctgcaggcacacgcgggtacatgtgggc

SEQ ID NO: 24850 - DNA, 40 bp, Homo sapiens
  chr18:77493026-77493066
  hypo
agtccctgagtctcctcgtggtgggcgtggccaaagcact

SEQ ID NO: 24851 - DNA, 109 bp, Homo sapiens
  chr18:77508898-77509007
  hypo
gtgtctgtgtgtgagccgtgtctgtgtgtgagccgtgttggtgcatgtgcacagggctctccagcgggagctgaggtggtcccttccgtgggctcggttcaggtcctgt

SEQ ID NO: 24852 - DNA, 31 bp, Homo sapiens
  chr18:77509014-77509045
  hypo
tgccaagttatgctggcgtttctgaaggtgt

SEQ ID NO: 24853 - DNA, 31 bp, Homo sapiens
  chr18:77509176-77509207
  hypo
ccacggatggcttcctcgcttgattttagaa

SEQ ID NO: 24854 - DNA, 46 bp, Homo sapiens
  chr18:77509343-77509389
  hypo
ctcagtgcccctgatacgtccaacccagcgtcgctgtgagggagtc

SEQ ID NO: 24855 - DNA, 31 bp, Homo sapiens
  chr18:77509394-77509425
  hypo
cacctgccagcacccccgagtctggccccac

SEQ ID NO: 24856 - DNA, 83 bp, Homo sapiens
  chr18:77509510-77509593
  hypo
acacgagatccaggcccgccccctcctggacttggtgaccgtcccgagctcgacctgagagggcacttcggctctcctgttca

SEQ ID NO: 24857 - DNA, 40 bp, Homo sapiens
  chr18:77509598-77509638
  hypo
atgactgccccctccccgaggtcagcgccatgcactgctc

SEQ ID NO: 24858 - DNA, 70 bp, Homo sapiens
  chr18:77511470-77511540
  hypo
agttgggttctctgaacgagcttgtcgtgactgatcggctgtgtgtgccagcccacggggttctcttgtc

SEQ ID NO: 24859 - DNA, 51 bp, Homo sapiens
  chr18:77512013-77512064
  hypo
agctgaggttccttggcgcagtgggacgtcccagcacggcaccaggaggga

SEQ ID NO: 24860 - DNA, 31 bp, Homo sapiens
  chr18:77532168-77532199
  hypo
gcagctcccacggcctcgtccatttctaaaa

SEQ ID NO: 24861 - DNA, 31 bp, Homo sapiens
  chr18:77555363-77555394
  hypo
acacaggactgatttacgggatcagagaggg

SEQ ID NO: 24862 - DNA, 31 bp, Homo sapiens
  chr18:77630315-77630346
  hypo
ttgatgattgcaatgacgtggtgtggttttg

SEQ ID NO: 24863 - DNA, 43 bp, Homo sapiens
  chr18:77664460-77664503
  hypo
ttgacttctctgtggccgcaagagctgccgcctggctggggct

SEQ ID NO: 24864 - DNA, 31 bp, Homo sapiens
  chr18:77677978-77678009
  hypo
cccacacccacacctacgccacacacctgta

SEQ ID NO: 24865 - DNA, 31 bp, Homo sapiens; identical to SEQ ID NO: 6433
  chr18:77710900-77710931
  hypo

SEQ ID NO: 24866 - DNA, 36 bp, Homo sapiens; identical to SEQ ID NO: 6434
  chr18:77712072-77712108
  hypo

SEQ ID NO: 24867 - DNA, 31 bp, Homo sapiens
  chr18:77713122-77713153
  hypo
ctgcccctgctcagccgcgccctagcctgag

SEQ ID NO: 24868 - DNA, 31 bp, Homo sapiens
  chr18:77753636-77753667
  hypo
cagtcctttcagctaccggatttgaccaact

SEQ ID NO: 24869 - DNA, 58 bp, Homo sapiens
  chr18:77753720-77753778
  hypo
actcccctcagcctttcggggcattcttaggcaactgagaatcgcgtgagggtgtctg

SEQ ID NO: 24870 - DNA, 31 bp, Homo sapiens
  chr18:77753781-77753812
  hypo
ggaaagcaccttaagacgtgcaacagctctg

SEQ ID NO: 24871 - DNA, 19 bp, Homo sapiens
  chr18:77773126-77773145
  hypo
ttttttttttttgagacgg

SEQ ID NO: 24872 - DNA, 136 bp, Homo sapiens; identical to SEQ ID NO: 6436
  chr18:77794467-77794603
  hypo

SEQ ID NO: 24873 - DNA, 31 bp, Homo sapiens
  chr18:77805634-77805665
  hypo
gttaccctcagatagacgtttgggagggttc

SEQ ID NO: 24874 - DNA, 34 bp, Homo sapiens
  chr18:77805694-77805728
  hypo
tgctgttgtgttgtggcgacgacactgtggacta

SEQ ID NO: 24875 - DNA, 31 bp, Homo sapiens
  chr18:77835956-77835987
  hypo
ctcccaccccttccacgcggtgtggcagacg

SEQ ID NO: 24876 - DNA, 31 bp, Homo sapiens; identical to SEQ ID NO: 6437
  chr18:77867027-77867058
  hypo

SEQ ID NO: 24877 - DNA, 39 bp, Homo sapiens
  chr18:77913922-77913961
  hypo
ctttaaacaagctgttcgaggggacgagggttcaccctc

SEQ ID NO: 24878 - DNA, 22 bp, Homo sapiens
  chr18:77931207-77931229
  hypo
ttggaaaggggcaaacgcggcc

SEQ ID NO: 24879 - DNA, 42 bp, Homo sapiens
  chr18:77939057-77939099
  hypo
ccacagacaagccctgcgtacactgaccgtagactggtgtgt

SEQ ID NO: 24880 - DNA, 31 bp, Homo sapiens
  chr18:77939114-77939145
  hypo
gggaccccaggtcacacgcccctgggggata

SEQ ID NO: 24881 - DNA, 55 bp, Homo sapiens
  chr18:77939171-77939226
  hypo
cctcagccaagtcagccgatgtccccagctgggatgtctgcggaagctgtggtcc

SEQ ID NO: 24882 - DNA, 31 bp, Homo sapiens
  chr18:77939507-77939538
  hypo
catcctccctcatcagcgactgtgcccctgc

SEQ ID NO: 24883 - DNA, 36 bp, Homo sapiens
  chr18:77942204-77942240
  hypo
cttgtatgtgagcattcgcagcggcatcattcacag

SEQ ID NO: 24884 - DNA, 57 bp, Homo sapiens
  chr18:77942247-77942304
  hypo
gaggtggaaacaaccccgatgtccatcaactgatgaaccaaccgatgaacacagggt

SEQ ID NO: 24885 - DNA, 66 bp, Homo sapiens
  chr18:77942332-77942398
  hypo
acagagggagcaaggccgtgaaacctgcagcgggagcaaggcggtgaaacccgcagagggagcaag

SEQ ID NO: 24886 - DNA, 133 bp, Homo sapiens
  chr18:77943847-77943980
  hypo
catgcaccctcacacacgcatataccctcagacatgctcgcacaccctcacacacgcatataccctgacatgctcgcacaccctcacacgcatgcacccacacaggcaccctcacactcgcatatacagtcac

SEQ ID NO: 24887 - DNA, 31 bp, Homo sapiens
  chr18:77943985-77944016
  hypo
cttgcacaccctcacacgcacccacacatgc

SEQ ID NO: 24888 - DNA, 31 bp, Homo sapiens
  chr18:77944230-77944261
  hypo
caccctcacacatgctcgcacacccacacat

SEQ ID NO: 24889 - DNA, 63 bp, Homo sapiens
  chr19:292199-292262
  hypo
cagaagagcacgggggcgccaggagctgggaaccccatgaaatggcgccggggtctgtgcccc

SEQ ID NO: 24890 - DNA, 39 bp, Homo sapiens
  chr19:327874-327913
  hypo
tcatgtctgggaggttcggggccacgtcaccaccctcac

SEQ ID NO: 24891 - DNA, 31 bp, Homo sapiens
  chr19:328011-328042
  hypo
gccccatcaggagggacggctctgggggttc

SEQ ID NO: 24892 - DNA, 35 bp, Homo sapiens
  chr19:369327-369362
  hypo
gcctgagctcaatccccgcccggagaatgcaagac

SEQ ID NO: 24893 - DNA, 31 bp, Homo sapiens
  chr19:403366-403397
  hypo
aagacctgaggcagggcgagacaccacgcag

SEQ ID NO: 24894 - DNA, 59 bp, Homo sapiens
  chr19:403713-403772
  hypo
gtgcacctacctggcacgcacacgcacacacccgtgcagcctagcgatgagtggctggg

SEQ ID NO: 24895 - DNA, 36 bp, Homo sapiens
  chr19:407469-407505
  hypo
ccccacgcgcctggcccgactcggggccaggttccg

SEQ ID NO: 24896 - DNA, 38 bp, Homo sapiens
  chr19:434175-434213
  hypo
gaggaggccgggcagatacacggcgccccattgtgagc

SEQ ID NO: 24897 - DNA, 221 bp, Homo sapiens
  chr19:450885-451106
  hypo
ccacatcatatttcagcgtgtggatggccatgccgtggccatgtcatatttcagcgtgtggatggccataccatagccacgtcatatttcagtgtgtggatggccacgccatggctgtgccgtatttcagcgtgtggatggccacgccgtggccacatcatatttcagcgtgtggatggccacgccgtggccacgtcgtattttagcgtgtggatggccat

SEQ ID NO: 24898 - DNA, 31 bp, Homo sapiens; identical to SEQ ID NO: 6440
  chr19:452244-452275
  hypo

SEQ ID NO: 24899 - DNA, 2 bp, Homo sapiens
  chr19:453562-453564
  hypo
gc

SEQ ID NO: 24900 - DNA, 31 bp, Homo sapiens
  chr19:485118-485149
  hypo
tgcaacctcaacccagcggaggaccctgctg

SEQ ID NO: 24901 - DNA, 43 bp, Homo sapiens
  chr19:485164-485207
  hypo
tatggagggtcattgccgtgctctaccacgtaacacacgtaca

SEQ ID NO: 24902 - DNA, 31 bp, Homo sapiens
  chr19:485318-485349
  hypo
gggcgtgcccgagccccgtggcgccctgggc

SEQ ID NO: 24903 - DNA, 31 bp, Homo sapiens
  chr19:485363-485394
  hypo
ctgcccagaacaggtgcgcagtgagtgcctg

SEQ ID NO: 24904 - DNA, 42 bp, Homo sapiens
  chr19:491381-491423
  hypo
gacaatttcagtctctcgacgcgacgccgtgtggcttgtgcc

SEQ ID NO: 24905 - DNA, 65 bp, Homo sapiens
  chr19:491427-491492
  hypo
tagccacctagaccctcgggagaggcctgtgcggctcctggctgggcccccgtcttcaaagcagc

SEQ ID NO: 24906 - DNA, 44 bp, Homo sapiens
  chr19:491496-491540
  hypo
gagtggccctttgacccgtgagacagggccgtggaagctggggt

SEQ ID NO: 24907 - DNA, 41 bp, Homo sapiens; identical to SEQ ID NO: 6450
  chr19:507105-507146
  hypo

SEQ ID NO: 24908 - DNA, 5 bp, Homo sapiens
  chr19:516297-516302
  hypo
cgtaa

SEQ ID NO: 24909 - DNA, 39 bp, Homo sapiens
  chr19:530217-530256
  hypo
atcacaggcgtgagccaccgtgcccggcctgtatgttga

SEQ ID NO: 24910 - DNA, 31 bp, Homo sapiens
  chr19:530449-530480
  hypo
gggtcacagtgatgcccggaatcagctgggg

SEQ ID NO: 24911 - DNA, 81 bp, Homo sapiens
  chr19:541845-541926
  hypo
cagcttccggactggccgcaccccggaggagccacgggggcgctgctgggaacgtgggcggggggccgtttcctgacacta

SEQ ID NO: 24912 - DNA, 31 bp, Homo sapiens
  chr19:548573-548604
  hypo
acaccctggacagccccggtctcaccttcca

SEQ ID NO: 24913 - DNA, 31 bp, Homo sapiens
  chr19:549360-549391
  hypo
caggtttagcaacctgcgcaagaccacacag

SEQ ID NO: 24914 - DNA, 60 bp, Homo sapiens
  chr19:562308-562368
  hypo
gctgtggatatctttacggggtatatgaaccagacaggcatcaaacgaaactagctgggg

SEQ ID NO: 24915 - DNA, 34 bp, Homo sapiens
  chr19:585309-585343
  hypo
aggtggatgtccaccccgtcggtgggtgcccggc

SEQ ID NO: 24916 - DNA, 65 bp, Homo sapiens
  chr19:585371-585436
  hypo
cccgtcggtgggtgcccggcgcggaggggtgcggaggtggatgtccgccccgtcggtgggtgccc

SEQ ID NO: 24917 - DNA, 31 bp, Homo sapiens
  chr19:599191-599222
  hypo
tctcttccttttggaccgtttcctcgggatc

SEQ ID NO: 24918 - DNA, 48 bp, Homo sapiens; identical to SEQ ID NO: 6451
  chr19:603684-603732
  hypo

SEQ ID NO: 24919 - DNA, 31 bp, Homo sapiens; identical to SEQ ID NO: 6452
  chr19:603815-603846
  hypo

SEQ ID NO: 24920 - DNA, 99 bp, Homo sapiens; identical to SEQ ID NO: 6453
  chr19:603850-603949
  hypo

SEQ ID NO: 24921 - DNA, 43 bp, Homo sapiens
  chr19:617958-618001
  hypo
accctcctgcaggcctcgccccacccctcgccccgcccctccc

SEQ ID NO: 24922 - DNA, 31 bp, Homo sapiens
  chr19:618307-618338
  hypo
caggaccacctacattcggggcacacagcct

SEQ ID NO: 24923 - DNA, 217 bp, Homo sapiens
  chr19:618515-618732
  hypo
tgtgggaggagtccagcgagtggatgaagttgggcgggaagccgttcttctgcttacgtgtgttgggctttctgaggacggaacaggtgccggtgggggcggcccagggacacccctaactggccgctgtctccaccgtggctgctctccagacccccggccaggccccagcccgggccccccactcaccggctgatgtctccgttgtgggtgtagg

SEQ ID NO: 24924 - DNA, 57 bp, Homo sapiens
  chr19:618762-618819
  hypo
aaaaaggggaaggggccggtgagtcccacccgaggcccagcacggtggtggtacatt

SEQ ID NO: 24925 - DNA, 31 bp, Homo sapiens
  chr19:618831-618862
  hypo
cactggggtagtggcacgctaggatggtggc

SEQ ID NO: 24926 - DNA, 31 bp, Homo sapiens
  chr19:619168-619199
  hypo
cttagggagtcctggccgagcggggacagga

SEQ ID NO: 24927 - DNA, 39 bp, Homo sapiens
  chr19:619203-619242
  hypo
acgtacctggatggcccgggtccccgagaacatctcctg

SEQ ID NO: 24928 - DNA, 76 bp, Homo sapiens
  chr19:619245-619321
  hypo
actcttgaagacctggcgtacgagatagtgagaggcctcccacacgaactcctgcagagggcgggcagcaggtgca

SEQ ID NO: 24929 - DNA, 37 bp, Homo sapiens
  chr19:619323-619360
  hypo
tcctcaggggctggcccgttcacgccctactcccccc

SEQ ID NO: 24930 - DNA, 72 bp, Homo sapiens
  chr19:619615-619687
  hypo
cttctcaatctgcaggcgcccgccatagcgcgtgaccccgtacaccaccgtcatcaccgtctgcttcaccac

SEQ ID NO: 24931 - DNA, 85 bp, Homo sapiens
  chr19:634303-634388
  hypo
ggaatgaaataaacctcggagcctagagcctgccctggtctccgcgtgatcctgcctaggaggagcagggcgggagctttagaat

SEQ ID NO: 24932 - DNA, 64 bp, Homo sapiens
  chr19:634400-634464
  hypo
gtgtgcccacctgtgtcgttcagccggggcagcaggccagaggcgggagcgcctgctgtggggc

SEQ ID NO: 24933 - DNA, 31 bp, Homo sapiens
  chr19:635349-635380
  hypo
gcccagaacgaggactcgacctcactctgga

SEQ ID NO: 24934 - DNA, 31 bp, Homo sapiens
  chr19:640828-640859
  hypo
cgggcccgctggctgccgcctgaatcaccac

SEQ ID NO: 24935 - DNA, 164 bp, Homo sapiens
  chr19:640878-641042
  hypo
cccctgtccttcccaccgctttcatctgggcgccaaggccctcattaggccgcacgtgacgagggcggacaggggactggctgggccggtccatccatggcgggcatggccaggcggggtggcctcgggccggggcagaggcctggctccgctgcctgacctgg

SEQ ID NO: 24936 - DNA, 31 bp, Homo sapiens
  chr19:641052-641083
  hypo
gcctctctccaagcctcggtttccccagctg

SEQ ID NO: 24937 - DNA, 31 bp, Homo sapiens
  chr19:647152-647183
  hypo
cgagctggctgcaccccgggccaggcatcca

SEQ ID NO: 24938 - DNA, 31 bp, Homo sapiens
  chr19:647356-647387
  hypo
ctcctgggcttaacttcgggagagcagtttt

SEQ ID NO: 24939 - DNA, 53 bp, Homo sapiens
  chr19:647727-647780
  hypo
gggagccgctgaaccccgtgcttcagcgctgggggagccgctgggccccgtct

SEQ ID NO: 24940 - DNA, 132 bp, Homo sapiens; identical to SEQ ID NO: 6461
  chr19:680399-680531
  hypo

SEQ ID NO: 24941 - DNA, 27 bp, Homo sapiens
  chr19:680552-680579
  hypo
cgaggctgctgccgcagtaggcggggg

SEQ ID NO: 24942 - DNA, 31 bp, Homo sapiens
  chr19:696904-696935
  hypo
cgggtgatggcgttcacggcagtggctagca

SEQ ID NO: 24943 - DNA, 46 bp, Homo sapiens
  chr19:746554-746600
  hypo
tcatgggttaccagaacgtggaggatgaggccgagaccaagaaggt

SEQ ID NO: 24944 - DNA, 57 bp, Homo sapiens
  chr19:746607-746664
  hypo
cttcaagataccatcacggcggagctggtggtcatcgaagacgcggctgagcccaag

SEQ ID NO: 24945 - DNA, 31 bp, Homo sapiens
  chr19:746665-746696
  hypo
agcctgcaccacccaacggcagtgctgccga

SEQ ID NO: 24946 - DNA, 40 bp, Homo sapiens
  chr19:748342-748382
  hypo
ttgcctttcaacctggcgaggaaggcgtggccaggccagg

SEQ ID NO: 24947 - DNA, 38 bp, Homo sapiens
  chr19:758090-758128
  hypo
cggagggtccccagcccggactccggagagccctcagc

SEQ ID NO: 24948 - DNA, 57 bp, Homo sapiens
  chr19:762947-763004
  hypo
aggcatgagccactatcgcctgacccctctttgagctgaatccgaaatgccaaatac

SEQ ID NO: 24949 - DNA, 31 bp, Homo sapiens
  chr19:784935-784966
  hypo
ccaggaggaggaaggacggtctgcaagtgtt

SEQ ID NO: 24950 - DNA, 31 bp, Homo sapiens
  chr19:805033-805064
  hypo
tacaacgcctgctgcacgctgcgcatcgact

SEQ ID NO: 24951 - DNA, 182 bp, Homo sapiens; identical to SEQ ID NO: 6463
  chr19:813431-813613
  hypo

SEQ ID NO: 24952 - DNA, 234 bp, Homo sapiens; identical to SEQ ID NO: 6464
  chr19:813626-813860
  hypo

SEQ ID NO: 24953 - DNA, 31 bp, Homo sapiens
  chr19:814135-814166
  hypo
accccttcgggacccacgtctatcccctcag

SEQ ID NO: 24954 - DNA, 31 bp, Homo sapiens; identical to SEQ ID NO: 6465
  chr19:814390-814421
  hypo

SEQ ID NO: 24955 - DNA, 133 bp, Homo sapiens; identical to SEQ ID NO: 6466
  chr19:814428-814561
  hypo

SEQ ID NO: 24956 - DNA, 102 bp, Homo sapiens
  chr19:814688-814790
  hypo
caccgacacatagaccgcggcgaaggctgacagcgtggcgtgctgggacgggaaggtcttcctgtaagaggcgtccagcgtgagccccgcccacctggggac

SEQ ID NO: 24957 - DNA, 120 bp, Homo sapiens
  chr19:871024-871144
  hypo
ggacacacgcacctggcgaggccgtcgagctgcagggtggcagcactgccaggcagcgtgggcgcccggccaaactgcagacgaaggggctgcttgggctgcaggcggctaaccaggccg

SEQ ID NO: 24958 - DNA, 93 bp, Homo sapiens
  chr19:882614-882707
  hypo
cctgctggagcatgtgcggccagtggacaggccacgccacctcggctgctaaccgcagacacgtgggaaccaggagagcgcagctgaggcagc

SEQ ID NO: 24959 - DNA, 49 bp, Homo sapiens
  chr19:883701-883750
  hypo
agatggtagacacagacgtgcccagcgggggcaccgggcagtgaaggtg

SEQ ID NO: 24960 - DNA, 93 bp, Homo sapiens
  chr19:883752-883845
  hypo
ggtctgtgcagccacacggggtggcgccaggtgctgctgcaggagccagcgcagcccaaactgcctggtgactcaccacgaggcccaggggaa

SEQ ID NO: 24961 - DNA, 31 bp, Homo sapiens
  chr19:883870-883901
  hypo
ggaccgggcgaaggaacgagccctgggagaa

SEQ ID NO: 24962 - DNA, 231 bp, Homo sapiens
  chr19:884017-884248
  hypo
aaccacctgcaggccccgggagccatcggggcctcttgacacgtgctcattagtggcttctgaggagcgcctgccccacctgccccacgtgcccccacgtctggccactccagggtccattagcgctaatcggcaaatgcctgtgctctcatctaccgggaaaacatctcccttctccagagcggaggccagcctaaaaaccaggcccgcagcctccgaggctctgaaaac

SEQ ID NO: 24963 - DNA, 31 bp, Homo sapiens
  chr19:884280-884311
  hypo
gcgggcgtccctgcttcgctccagccccagg

SEQ ID NO: 24964 - DNA, 145 bp, Homo sapiens
  chr19:884995-885140
  hypo
cgcacaaaagcacctgcgggggaggtgggggtgagggctgacccggcactgctgtggtggccacgccaccaccggagcctgagctgcgggaccctggggccacgcactgctgggcctgtctcttcagccacgcctgcccctcggg

SEQ ID NO: 24965 - DNA, 36 bp, Homo sapiens
  chr19:891446-891482
  hypo
gggcacagccgggagacgcagcggagggtctgcgct

SEQ ID NO: 24966 - DNA, 85 bp, Homo sapiens
  chr19:891515-891600
  hypo
gacactagctctctcccgaaggaagagcccgcagacaggcaagcggtggggcggctccctgtagccgaggcggggctgagtgaca

SEQ ID NO: 24967 - DNA, 31 bp, Homo sapiens
  chr19:899787-899818
  hypo
gacctctgacccaccacgtgaggctgcttaa

SEQ ID NO: 24968 - DNA, 50 bp, Homo sapiens
  chr19:900832-900882
  hypo
cctccggtcctccccacggccagggcccctcctccgcgccttgctcctgc

SEQ ID NO: 24969 - DNA, 74 bp, Homo sapiens
  chr19:900883-900957
  hypo
ctcatcctccaggtagcgaagaacccgctcctgctcctccccggagcggttcatgaaatcgttccagacctgga

SEQ ID NO: 24970 - DNA, 43 bp, Homo sapiens
  chr19:900983-901026
  hypo
tgaaacactggggctgcgctgacatccccgggcaaatgggcac

SEQ ID NO: 24971 - DNA, 31 bp, Homo sapiens
  chr19:901068-901099
  hypo
ctgtccactgaggggccgctgcttgtgtcgg

SEQ ID NO: 24972 - DNA, 60 bp, Homo sapiens
  chr19:932326-932386
  hypo
ggaaactgaggctgggcggggagtgggtctttccttgggctgggacgagccagcaccttc

SEQ ID NO: 24973 - DNA, 77 bp, Homo sapiens
  chr19:932541-932618
  hypo
gccagcttgggcaccacggcactgttcccccgaaaggcccagccaccccaggccttccgcggcgatggcgttcccag

SEQ ID NO: 24974 - DNA, 63 bp, Homo sapiens
  chr19:942141-942204
  hypo
gagctatggacagggccgctgggggtgcacccccaccctctccgaccccgaggagctgccggc

SEQ ID NO: 24975 - DNA, 47 bp, Homo sapiens; identical to SEQ ID NO: 6467
  chr19:942339-942386
  hypo

SEQ ID NO: 24976 - DNA, 90 bp, Homo sapiens
  chr19:945744-945834
  hypo
acggcgtcgacatggccggggcaggcgtgttctggccccttgcactgcccggctcctgctgctggtgctgggctgcgtttctgttcagag

SEQ ID NO: 24977 - DNA, 31 bp, Homo sapiens
  chr19:945842-945873
  hypo
ctgggagtgatgggaccgcagtctcccacca

SEQ ID NO: 24978 - DNA, 73 bp, Homo sapiens
  chr19:955718-955791
  hypo
caggcagggtagaccccgtaataccgggtcagaatctcagaggagaggaccttccgctcgccctggaagggcc

SEQ ID NO: 24979 - DNA, 93 bp, Homo sapiens
  chr19:955794-955887
  hypo
ggtgtgctggcctctacgtgcggttcttagccggggggctgcgtaacgaaggacctcaaaccgcgggcgtaaaacaaacgaaacctgttctcc

SEQ ID NO: 24980 - DNA, 51 bp, Homo sapiens
  chr19:956014-956065
  hypo
ggcctctgtctctgtgcgaccgtctccagtgcccaccggccttcactgtga

SEQ ID NO: 24981 - DNA, 31 bp, Homo sapiens
  chr19:956068-956099
  hypo
tttctcaatttgatcacgtctgcaaaggccc

SEQ ID NO: 24982 - DNA, 171 bp, Homo sapiens
  chr19:956394-956565
  hypo
gatacactcctagatccgtgactcggtgatggacggggtctcggaggaagaacgtggaggggagggggcggcagccgggccggggtcagaggacgaggccgggcgtgtggccatgtgtgcgtgcctgtgctcatgggacccaccggcccggccagccgggtctacctgagg

SEQ ID NO: 24983 - DNA, 48 bp, Homo sapiens
  chr19:956590-956638
  hypo
ggggaaagggcctccccggccaccataaatcagcgcaggaatgcaggc

SEQ ID NO: 24984 - DNA, 31 bp, Homo sapiens
  chr19:956641-956672
  hypo
ccagtctggcgctggccgggttggggcggag

SEQ ID NO: 24985 - DNA, 36 bp, Homo sapiens
  chr19:957165-957201
  hypo
tttcccctctggaagacgttccggggcctggtgatc

SEQ ID NO: 24986 - DNA, 31 bp, Homo sapiens
  chr19:959192-959223
  hypo
tggagcccccagaagccgtgagaggcaggaa

SEQ ID NO: 24987 - DNA, 76 bp, Homo sapiens
  chr19:959710-959786
  hypo
gaagaggagagagagacggggagacggtcttgtggagacggaggcagagactggagcgctgcggccacaagccagg

SEQ ID NO: 24988 - DNA, 31 bp, Homo sapiens
  chr19:995015-995046
  hypo
ctggtccctgtggaaacgcagggctcaggac

SEQ ID NO: 24989 - DNA, 57 bp, Homo sapiens
  chr19:1003389-1003446
  hypo
gcaccggtacccgcggcggtcctcctcggctgtgacatcgcccgtgcccgtcgggtg

SEQ ID NO: 24990 - DNA, 51 bp, Homo sapiens
  chr19:1003479-1003530
  hypo
ttggggacaccactgccgcccaaggccctgcccaccgcggggctgccacca

SEQ ID NO: 24991 - DNA, 77 bp, Homo sapiens
  chr19:1004489-1004566
  hypo
cacctgacaccccccccgccctgcccctaggttcctggccaacacgtccttccagggccgcacgggccccgtgtggg

SEQ ID NO: 24992 - DNA, 290 bp, Homo sapiens
  chr19:1004836-1005126
  hypo
tggaccctggcaccaacgactcggccaccctggacgcactgttcgccgcgctggccaacggctcagcgccccgtgccctgcgcaagtgctgctacggctactgcattgacctgctggagcggctggcggaggacacgcccttcgacttcgagctgtacctcgtgggtgacggcaagtacggcgccctgcgggacggccgctggaccggcctggtcggggacctgctggccggccgggcccacatggcggtcaccagcttcagtatcaactccgcccgctcacaggtggtg

SEQ ID NO: 24993 - DNA, 57 bp, Homo sapiens
  chr19:1005155-1005212
  hypo
cctgggcatcatggtgcgggcacgggacacggcctcacccatcggtgcctttatgtg

SEQ ID NO: 24994 - DNA, 137 bp, Homo sapiens
  chr19:1005213-1005350
  hypo
cccctgcactggtccacgtggctgggcgtctttgcggccctgcacctcaccgcgctcttcctcaccgtgtacgagtggcgtagcccctacggcctcacgccacgtggccgcaaccgcagcaccgtcttctcctactc

SEQ ID NO: 24995 - DNA, 31 bp, Homo sapiens
  chr19:1005355-1005386
  hypo
ccctcaacctgtgctacgccatcctcttcag

SEQ ID NO: 24996 - DNA, 134 bp, Homo sapiens
  chr19:1007587-1007721
  hypo
gaggggcaggcagaggcgctgacggggtcccccgcgcagctgcaccacccggcgcagggcttccgcttcggcaccgtgtgggagagcagcgccgaggcgtacatcaagaagagcttccccgacatgcacgcaca

SEQ ID NO: 24997 - DNA, 173 bp, Homo sapiens
  chr19:1007841-1008014
  hypo
ccggccccagcaggagcgacccccccaagctcaacgccttcatcatggacaagtcgctcctggactacgaggtctccatcgacgccgactgcaaactgctgaccgtgggaaagcccttcgccattgagggtgagaggcacctgggcgaggcggggcgccggggtctctgggga

SEQ ID NO: 24998 - DNA, 31 bp, Homo sapiens
  chr19:1008207-1008238
  hypo
agtcctccggcttcatcgacctgctccacga

SEQ ID NO: 24999 - DNA, 31 bp, Homo sapiens
  chr19:1030121-1030152
  hypo
gctggatagggacactcgaggtccccactgg

SEQ ID NO: 25000 - DNA, 50 bp, Homo sapiens
  chr19:1030175-1030225
  hypo
cacagcccattccccacggcggtgtctcagagcaccgaaggccaagaaag

SEQ ID NO: 25001 - DNA, 31 bp, Homo sapiens
  chr19:1033553-1033584
  hypo
aaggagaagaatcagacgaatgttgagtgtc

SEQ ID NO: 25002 - DNA, 80 bp, Homo sapiens
  chr19:1047801-1047881
  hypo
ggctgcattggaggggcggggcctgaggcaggtgggcggggtttctgggccgcctcatacctggacgccctgattccagg

SEQ ID NO: 25003 - DNA, 26 bp, Homo sapiens
  chr19:1047889-1047915
  hypo
cagaagctggcacagtcgccgggcgc

SEQ ID NO: 25004 - DNA, 130 bp, Homo sapiens
  chr19:1050981-1051111
  hypo
tccgctccagcatggccgccatccggccccacctgggcgtctgtcctcagtacaacgtgctgtttgacatgtgcgtctcggcaggcccagagtgcagcggtgggaagggactggacgccctctgggactc

SEQ ID NO: 25005 - DNA, 179 bp, Homo sapiens
  chr19:1051442-1051621
  hypo
accaggtgggatgcaacggaagctgtccgtggccattgcctttgtgggcggctcccaagttgttatcctggacgagcctacggctggcgtggatcctgcttcccgccgcggtatttgggagctgctgctcaaataccgagaaggtaagagctggggattctgctcgaggggccagaaaa

SEQ ID NO: 25006 - DNA, 37 bp, Homo sapiens
  chr19:1080479-1080516
  hypo
gttcacaagtcatggccgctctcgatctcagactcgg

SEQ ID NO: 25007 - DNA, 68 bp, Homo sapiens
  chr19:1080709-1080777
  hypo
tccagtggtaccatgtcgtccacggaggagctggtggacccagacggtggagccggggcttcagcctt

SEQ ID NO: 25008 - DNA, 105 bp, Homo sapiens
  chr19:1082937-1083042
  hypo
ggccggcaggacggctcggagagcgaggcagtggcggtggccctggcaggtcggctgcgggagctcctgcgggacctgccgcctgagaaccgggcctcgctgcag

SEQ ID NO: 25009 - DNA, 44 bp, Homo sapiens
  chr19:1089504-1089548
  hypo
tgatgtacctgccagccgtctcactgggccggatgatcttcacc

SEQ ID NO: 25010 - DNA, 31 bp, Homo sapiens
  chr19:1105540-1105571
  hypo
gcgggtgggtgggggtcggggtgggctccag

SEQ ID NO: 25011 - DNA, 140 bp, Homo sapiens
  chr19:1105587-1105727
  hypo
gagtgtgcagggggcccggactgagggggtgccagcccccgactcactcacacaccttggccgccacaggagccagggagtaacgaagagatcaaagagttcgccgcgggctacaacgtcaaattcgatatgttcagcaa

SEQ ID NO: 25012 - DNA, 31 bp, Homo sapiens
  chr19:1111948-1111979
  hypo
acccctgcccctgccccgccccccaaccctg

SEQ ID NO: 25013 - DNA, 255 bp, Homo sapiens
  chr19:1112184-1112439
  hypo
caccagactctccaggcgcttggccacgatggaggcgaaccggcgctccccggccagctccgagatgaggaagacatactctggcgcggagacctggttggaccggtgggtgcggcctgggggcagagctgctctcagggcccggccaggcgggggcggggccgagaccatgttgggggcggggccaggcagcgctgggggcggggccggactcaccgaactgctggatggcgcggtcggcgctccacggcagct

SEQ ID NO: 25014 - DNA, 31 bp, Homo sapiens
  chr19:1112570-1112601
  hypo
gcaaggcccgccccagcgttgccgccacctc

SEQ ID NO: 25015 - DNA, 159 bp, Homo sapiens
  chr19:1112602-1112761
  hypo
tcacccactaggcccccgctccaggtcaccaggacgtcccggggcagcgagaggcctgcggggcgcggacaccacccgccacacggccactcgcgcccgcacctggcacacacacactccagaagtgcgcgggtccacagtccccggggacccttgggc

SEQ ID NO: 25016 - DNA, 80 bp, Homo sapiens
  chr19:1156203-1156283
  hypo
gtctctgagccccccacgtctgtggacgccccttccaggcggcaaccccaggaggctcaggggaccgggttcttcaaggg

SEQ ID NO: 25017 - DNA, 61 bp, Homo sapiens
  chr19:1156567-1156628
  hypo
actcacaacagccacccgaggaagcagcccagtgtccacggataggcgagtggaccagcat

SEQ ID NO: 25018 - DNA, 31 bp, Homo sapiens
  chr19:1170969-1171000
  hypo
acacacacacaacatacgaggacaggcacac

SEQ ID NO: 25019 - DNA, 31 bp, Homo sapiens
  chr19:1171424-1171455
  hypo
agagtccccagggcagcgctggcgtcatggg

SEQ ID NO: 25020 - DNA, 80 bp, Homo sapiens; identical to SEQ ID NO: 6469
  chr19:1173280-1173360
  hypo

SEQ ID NO: 25021 - DNA, 39 bp, Homo sapiens; identical to SEQ ID NO: 6470
  chr19:1173362-1173401
  hypo

SEQ ID NO: 25022 - DNA, 304 bp, Homo sapiens
  chr19:1226474-1226778
  hypo
cagtcacaatggacagcgccggggcctccccaaggccgtgtgtatgaacggcacagaggcggcgcagctgagcaccaaatccagggcggagggccgggcccccaaccctgcccgcaaggcctgctccgccagcagcaagatccgccggctgtcggcctgcaagcagcagtgaggctggccgcctgcaggtggggcgcggcggggcccgggtggggcatgtggggacaacgcctggatgccacagccagccgtgagcatagcccgcgctagtcagtcatggtgaccgtcacgtggctgcgcgtgg

SEQ ID NO: 25023 - DNA, 227 bp, Homo sapiens
  chr19:1227604-1227831
  hypo
gccccgccaggtgcccgcgccaggccctcagtcttcctgccggttccgcccgccctcccggagaggtggccgccatgcttctgtgccgaccacgccccaggacctccggagcgccctgcagggccgggcagggggacagcagggaccgggcgcagccctcccccctcggccgcccggcagtgcacgcggcttgttgacttcgcagccccgggcggagccttcccggg

SEQ ID NO: 25024 - DNA, 35 bp, Homo sapiens
  chr19:1231261-1231296
  hypo
cgcttgggggaacctgcgcacgggatgtgccgtaa

SEQ ID NO: 25025 - DNA, 88 bp, Homo sapiens
  chr19:1235203-1235291
  hypo
gggagggctgctcctccgggcggccacggcagggagggctggggccgcggcacgggcggccgggctggcggggcgagggacactcgtc

SEQ ID NO: 25026 - DNA, 123 bp, Homo sapiens
  chr19:1236402-1236525
  hypo
ctgtcctgcaaggtagcgccaggccctggagctcagcgctgggcagggcaagcactcggaggaatggggacgccaaggcggtgcagccggctcgagaaggactccagacgccctgtccgcccc

SEQ ID NO: 25027 - DNA, 36 bp, Homo sapiens
  chr19:1274635-1274671
  hypo
tcctccttccaggaggcgcttcgccagtgaggtgcg

SEQ ID NO: 25028 - DNA, 49 bp, Homo sapiens
  chr19:1274692-1274741
  hypo
cctggagcacgggctgcggtgcgccggcagcttacggggcggccagtcc

SEQ ID NO: 25029 - DNA, 37 bp, Homo sapiens
  chr19:1277514-1277551
  hypo
tttgaggtggagtggcgcgatcccaactcactgcaac

SEQ ID NO: 25030 - DNA, 31 bp, Homo sapiens
  chr19:1293374-1293405
  hypo
aggggtgggctgaggccgagcccatctccat

SEQ ID NO: 25031 - DNA, 51 bp, Homo sapiens
  chr19:1325875-1325926
  hypo
ggtggttcacaccagccgggcacggtggctcacacccgccgggcacagtgg

SEQ ID NO: 25032 - DNA, 31 bp, Homo sapiens
  chr19:1329362-1329393
  hypo
aaaaaaaaaaaaaagacgtacctgctcttct

SEQ ID NO: 25033 - DNA, 117 bp, Homo sapiens
  chr19:1333896-1334013
  hypo
aatcagcccacaactgcggcgacgaggcgtccgaggcggccgcaccccagcagcgatcggtgattcatggctcgatctgctaattgcctctcgggccggcttcgggctgatgcgttt

SEQ ID NO: 25034 - DNA, 31 bp, Homo sapiens
  chr19:1357741-1357772
  hypo
ggcgattccgacgccccggtcagtcctgcgt

SEQ ID NO: 25035 - DNA, 31 bp, Homo sapiens
  chr19:1394238-1394269
  hypo
acggttcaggtcaccccgggggcagtggaga

SEQ ID NO: 25036 - DNA, 31 bp, Homo sapiens; identical to SEQ ID NO: 6472
  chr19:1401652-1401683
  hypo

SEQ ID NO: 25037 - DNA, 36 bp, Homo sapiens; identical to SEQ ID NO: 6473
  chr19:1401687-1401723
  hypo

SEQ ID NO: 25038 - DNA, 67 bp, Homo sapiens
  chr19:1424904-1424971
  hypo
ggaggcctggagagcccggcgcactcctgcgcctagaggaggagacccgccccgttagccgggggcc

SEQ ID NO: 25039 - DNA, 45 bp, Homo sapiens
  chr19:1425595-1425640
  hypo
acacggagccccagcccggggtgtctggggcggaggcttgactca

SEQ ID NO: 25040 - DNA, 78 bp, Homo sapiens
  chr19:1425642-1425720
  hypo
cctcagtcagcagagccgtcaccgggagtgcggacgtcaccgtctgtccactccgtgtgcagtcgagtggtggctcct

SEQ ID NO: 25041 - DNA, 31 bp, Homo sapiens
  chr19:1432759-1432790
  hypo
ttcctcccctgctggacgctccccagccttt

SEQ ID NO: 25042 - DNA, 181 bp, Homo sapiens
  chr19:1482175-1482356
  hypo
tgtcccaggatgtaggcggggccgtcacacgctgctcggggacacgcacgcaaaggcccgtcagcttgccacccgcagcctgttactcgccacccgcccgcctggggccacatgcacgctgcccacggtggccgccaccgcctcccagcagtgggccctgccccgccggcactcaccctgg

SEQ ID NO: 25043 - DNA, 31 bp, Homo sapiens
  chr19:1482370-1482401
  hypo
gtcccgctgcacacacgcgctgctggtcacc

SEQ ID NO: 25044 - DNA, 187 bp, Homo sapiens; identical to SEQ ID NO: 6475
  chr19:1491115-1491302
  hypo

SEQ ID NO: 25045 - DNA, 158 bp, Homo sapiens; identical to SEQ ID NO: 6476
  chr19:1491308-1491466
  hypo

SEQ ID NO: 25046 - DNA, 82 bp, Homo sapiens
  chr19:1496612-1496694
  hypo
cgggcaggcatcaccccggtggctgtggccgggccctccactcccctggaagctgaccgtacgtaaccgctgtggggagata

SEQ ID NO: 25047 - DNA, 57 bp, Homo sapiens
  chr19:1496853-1496910
  hypo
tgagcatgttttctcacgtgtgcatatgtgtgtgtgtgcccacgtgtgcatgtgagt

SEQ ID NO: 25048 - DNA, 72 bp, Homo sapiens
  chr19:1506118-1506190
  hypo
gtcggggctgacaagacgctggacagccatcaggtagtcccggtggggtgccagcatcgggcaggggcagtg

SEQ ID NO: 25049 - DNA, 49 bp, Homo sapiens
  chr19:1533725-1533774
  hypo
gctacatgcccaactgcgggaggctggaagccttcgccctgagggatgt

SEQ ID NO: 25050 - DNA, 62 bp, Homo sapiens
  chr19:1565890-1565952
  hypo
catgtggccatagcctcgctcaaaggcccttgggtgccaggacaagcgcgttcacaaagaac

SEQ ID NO: 25051 - DNA, 117 bp, Homo sapiens
  chr19:1565971-1566088
  hypo
cctggaggctcaggctcgtgcctttggtcacttggtccccaggcctcggcttggacgcctgtctccacaggctcccagacactccgcacagggcagctgtcccgttctaggccctgg

SEQ ID NO: 25052 - DNA, 31 bp, Homo sapiens
  chr19:1579337-1579368
  hypo
aaagaatccacaccctcgtctcaacccacca

SEQ ID NO: 25053 - DNA, 31 bp, Homo sapiens
  chr19:1579375-1579406
  hypo
tggggggcctcctcctcggggcctacaagct

SEQ ID NO: 25054 - DNA, 52 bp, Homo sapiens
  chr19:1579658-1579710
  hypo
ccctggctcacctactcgactgcagccaccacctgctcgtcatctttccaga

SEQ ID NO: 25055 - DNA, 24 bp, Homo sapiens
  chr19:1582923-1582947
  hypo
cacatggggtggctcacgcctgta

SEQ ID NO: 25056 - DNA, 31 bp, Homo sapiens
  chr19:1612623-1612654
  hypo
cagcagtgtgggtacacggctggtgttggtg

SEQ ID NO: 25057 - DNA, 31 bp, Homo sapiens; identical to SEQ ID NO: 25056
  chr19:1612763-1612794
  hypo

SEQ ID NO: 25058 - DNA, 79 bp, Homo sapiens; identical to SEQ ID NO: 6481
  chr19:1748598-1748677
  hypo

SEQ ID NO: 25059 - DNA, 49 bp, Homo sapiens; identical to SEQ ID NO: 6482
  chr19:1748798-1748847
  hypo

SEQ ID NO: 25060 - DNA, 46 bp, Homo sapiens; identical to SEQ ID NO: 6484
  chr19:1749824-1749870
  hypo

SEQ ID NO: 25061 - DNA, 31 bp, Homo sapiens
  chr19:1808119-1808150
  hypo
tctgtggggagtgggacgtgaacccacccat

SEQ ID NO: 25062 - DNA, 31 bp, Homo sapiens
  chr19:1808151-1808182
  hypo
acacagacaaacacatcgatgctgccaggtg

SEQ ID NO: 25063 - DNA, 39 bp, Homo sapiens
  chr19:1808324-1808363
  hypo
tgacattggtctggaacgagagccgcgggctgcctggca

SEQ ID NO: 25064 - DNA, 58 bp, Homo sapiens
  chr19:1808382-1808440
  hypo
aggggatgggggtgcccgaggccagacctgcctcacttggcctcgcccagcatcctct

SEQ ID NO: 25065 - DNA, 58 bp, Homo sapiens
  chr19:1882111-1882169
  hypo
acacccccgaaacgcccggctccagcaccagggaaaccccatgcgccaggactcggtc

SEQ ID NO: 25066 - DNA, 55 bp, Homo sapiens
  chr19:1907660-1907715
  hypo
ctgcctggagctatgccggttcccagcccaggctggcggccgtgttctgctggga

SEQ ID NO: 25067 - DNA, 35 bp, Homo sapiens
  chr19:1907742-1907777
  hypo
gaggggtcccagtggtcggtcgcctgccttctggg

SEQ ID NO: 25068 - DNA, 55 bp, Homo sapiens
  chr19:1907811-1907866
  hypo
gctgttggggggcagtcgctgtgggagtgagtcgtccccccgggccatagcaggt

SEQ ID NO: 25069 - DNA, 31 bp, Homo sapiens
  chr19:1912249-1912280
  hypo
caagcgccagacctcacgcctcctgaaggag

SEQ ID NO: 25070 - DNA, 65 bp, Homo sapiens
  chr19:1912430-1912495
  hypo
ccggctgtggacccccgcggcctggggcaacccttcctggtgcccgtgcccgcccggccgcctct

SEQ ID NO: 25071 - DNA, 31 bp, Homo sapiens
  chr19:1912530-1912561
  hypo
ggcccacgtccttccacgaggacaagcaggt

SEQ ID NO: 25072 - DNA, 46 bp, Homo sapiens
  chr19:1920168-1920214
  hypo
agagagtgactgttctcgcccacgtccccgacgtgtctcccttgtc

SEQ ID NO: 25073 - DNA, 135 bp, Homo sapiens
  chr19:1921078-1921213
  hypo
aaaccacagcgcacagcgacttcatgtccaccgttggcttagtgaggccccacgctcagtgcgctgctgtggggcgagaggggacagccccgctctccctgtcctgggcggcttcaccagcgccacctccccaca

SEQ ID NO: 25074 - DNA, 31 bp, Homo sapiens
  chr19:1955468-1955499
  hypo
gaggctcaggctgaggcgaggctccgcgggg

SEQ ID NO: 25075 - DNA, 31 bp, Homo sapiens
  chr19:1969893-1969924
  hypo
ggtgggccccaacttccgcgtcggcaagaag

SEQ ID NO: 25076 - DNA, 41 bp, Homo sapiens
  chr19:1969925-1969966
  hypo
tcggctgcggcaacttcggggagctccgcctaggtgaggcc

SEQ ID NO: 25077 - DNA, 52 bp, Homo sapiens
  chr19:1970424-1970476
  hypo
tcaccatgtaaaaggccgcacctggcccacctggctccgtcccttctgctca

SEQ ID NO: 25078 - DNA, 39 bp, Homo sapiens
  chr19:1970493-1970532
  hypo
tcggggtctgattgcccgggcaggcgtgaggagcagggc

SEQ ID NO: 25079 - DNA, 31 bp, Homo sapiens
  chr19:1977041-1977072
  hypo
aggcctcattctgcagcgtatgctactcggg

SEQ ID NO: 25080 - DNA, 446 bp, Homo sapiens; identical to SEQ ID NO: 6487
  chr19:1978215-1978661
  hypo

SEQ ID NO: 25081 - DNA, 202 bp, Homo sapiens; identical to SEQ ID NO: 6488
  chr19:1978675-1978877
  hypo

SEQ ID NO: 25082 - DNA, 161 bp, Homo sapiens; identical to SEQ ID NO: 6489
  chr19:1978883-1979044
  hypo

SEQ ID NO: 25083 - DNA, 31 bp, Homo sapiens; identical to SEQ ID NO: 6490
  chr19:1979061-1979092
  hypo

SEQ ID NO: 25084 - DNA, 56 bp, Homo sapiens
  chr19:1979735-1979791
  hypo
ctccctcacccacagccgacccccatcggcaccgtccacaccgacctgccctccca

SEQ ID NO: 25085 - DNA, 83 bp, Homo sapiens
  chr19:1979936-1980019
  hypo
aatgcggacgaccccacggccggccactccaacgccccgatcacagcgcctgcagaggtggaggtggccgatgaaaccaagta

SEQ ID NO: 25086 - DNA, 153 bp, Homo sapiens
  chr19:1980882-1981035
  hypo
ggtgggcgctgccaggcgggtgcttctcgacgcacttgctcccggaggctgcgccccggcgcctggaacccgaggtgggaggaccggttggtgtcaccctgctcggccctcagccctgccgcgtggggcgcgtgggcacggagcttcctgcct

SEQ ID NO: 25087 - DNA, 42 bp, Homo sapiens
  chr19:1992973-1993015
  hypo
cagccaggcctggccccgcccccgcctcgtaccggccccgcc

SEQ ID NO: 25088 - DNA, 31 bp, Homo sapiens
  chr19:1993203-1993234
  hypo
gtgggaccgccatgcccgcccccaggggaga

SEQ ID NO: 25089 - DNA, 31 bp, Homo sapiens
  chr19:2000542-2000573
  hypo
ggggctcctccaacaccgagcccctccctgg

SEQ ID NO: 25090 - DNA, 31 bp, Homo sapiens
  chr19:2000619-2000650
  hypo
tgcctcctctgcccaccgtgagtccccagcc

SEQ ID NO: 25091 - DNA, 85 bp, Homo sapiens
  chr19:2000742-2000827
  hypo
attgctcacagcagcacgattcccaactccgaacgggggaaacaaccagcgtccattgacagacacggtgcgaccacccacgcac

SEQ ID NO: 25092 - DNA, 21 bp, Homo sapiens
  chr19:2009031-2009052
  hypo
ttccaagacagagtctcgctt

SEQ ID NO: 25093 - DNA, 31 bp, Homo sapiens
  chr19:2026536-2026567
  hypo
gtgaaggaggttgggcgcggtggctcacacc

SEQ ID NO: 25094 - DNA, 31 bp, Homo sapiens
  chr19:2039356-2039387
  hypo
cctctgctcaccttcccgggtgcctgcaatg

SEQ ID NO: 25095 - DNA, 31 bp, Homo sapiens
  chr19:2088264-2088295
  hypo
ctgcgagtggcaaggccggggatctaactgt

SEQ ID NO: 25096 - DNA, 48 bp, Homo sapiens
  chr19:2122385-2122433
  hypo
cacatactgccatccacggtggctttcaggccacggggcagcactgag

SEQ ID NO: 25097 - DNA, 39 bp, Homo sapiens
  chr19:2148549-2148588
  hypo
aactagacaacctcagcgctctggcgcttccagaaaacc

SEQ ID NO: 25098 - DNA, 31 bp, Homo sapiens
  chr19:2160535-2160566
  hypo
aaaaaaaaaaagtgggcggagatacaggttg

SEQ ID NO: 25099 - DNA, 58 bp, Homo sapiens; identical to SEQ ID NO: 6491
  chr19:2168976-2169034
  hypo

SEQ ID NO: 25100 - DNA, 53 bp, Homo sapiens; identical to SEQ ID NO: 6492
  chr19:2169048-2169101
  hypo

SEQ ID NO: 25101 - DNA, 31 bp, Homo sapiens
  chr19:2177162-2177193
  hypo
gcagccactagccactcggctgtgggcaccc

SEQ ID NO: 25102 - DNA, 31 bp, Homo sapiens
  chr19:2182655-2182686
  hypo
cccctctctgaccaggcgcttgctagtgtgt

SEQ ID NO: 25103 - DNA, 93 bp, Homo sapiens
  chr19:2182761-2182854
  hypo
ggagaccccaggcccccggatctcaggcagtggcggtgagagtgcctctctggctgcatgctcgccttctgcagggctcggagctgactgtct

SEQ ID NO: 25104 - DNA, 31 bp, Homo sapiens
  chr19:2188503-2188534
  hypo
gtgcaggccccctcggcgctggggatgtgga

SEQ ID NO: 25105 - DNA, 49 bp, Homo sapiens
  chr19:2191641-2191690
  hypo
cctgctccctccacagcggctggaaaggtcccccgcggaggaagacccc

SEQ ID NO: 25106 - DNA, 90 bp, Homo sapiens
  chr19:2216068-2216158
  hypo
cagcaaaaaccatcctcggccctccacatgactttatttgacgcccccagcttcccgaccccgcctctatgtggtcggcagctttggttt

SEQ ID NO: 25107 - DNA, 52 bp, Homo sapiens
  chr19:2216161-2216213
  hypo
catcccacacaagcagcgggggtcctggccacccctccgggtgtccatctgt

SEQ ID NO: 25108 - DNA, 31 bp, Homo sapiens
  chr19:2216465-2216496
  hypo
ttgagcagcatgagcccggagctctccatga

SEQ ID NO: 25109 - DNA, 85 bp, Homo sapiens
  chr19:2219929-2220014
  hypo
cactcgcctggggccccgctcaagttcccccgctgccctcttcccacgcggtactggacggtgaccccggcggcctcccccagcc

SEQ ID NO: 25110 - DNA, 45 bp, Homo sapiens
  chr19:2222842-2222887
  hypo
ctgcctgggccacagagcgagactccctctcggggggacaaaaaa

SEQ ID NO: 25111 - DNA, 35 bp, Homo sapiens
  chr19:2244065-2244100
  hypo
tgagacgagatgtgtgcgcccggctgccccagctt

SEQ ID NO: 25112 - DNA, 31 bp, Homo sapiens
  chr19:2266363-2266394
  hypo
agagtcatactctctgcgtcctctgccagca

SEQ ID NO: 25113 - DNA, 40 bp, Homo sapiens; identical to SEQ ID NO: 6497
  chr19:2273805-2273845
  hypo

SEQ ID NO: 25114 - DNA, 84 bp, Homo sapiens; identical to SEQ ID NO: 6498
  chr19:2273846-2273930
  hypo

SEQ ID NO: 25115 - DNA, 60 bp, Homo sapiens; identical to SEQ ID NO: 6499
  chr19:2273960-2274020
  hypo

SEQ ID NO: 25116 - DNA, 31 bp, Homo sapiens
  chr19:2275594-2275625
  hypo
ttggctatcatggagacgctgacctcagccc

SEQ ID NO: 25117 - DNA, 150 bp, Homo sapiens
  chr19:2275647-2275797
  hypo
ctggaccaggtgtgttcgccctgggttggggtcagtcccacagcagcgccagggcctggcccatcgaggactcggtggcctcggccaggtattcgcaacacagccagtcctcgaggctgggagcttccccacctgcggcccgctctgcta

SEQ ID NO: 25118 - DNA, 31 bp, Homo sapiens
  chr19:2275936-2275967
  hypo
cgccgagggccgcaagcgggtcagctgtgct

SEQ ID NO: 25119 - DNA, 61 bp, Homo sapiens
  chr19:2276265-2276326
  hypo
acacgaactcctccggcggctgcgtgcaggcctccgccagccactgcgccaccgtgcgctc

SEQ ID NO: 25120 - DNA, 31 bp, Homo sapiens
  chr19:2276439-2276470
  hypo
gcagctccaggccccacgggtggggcacgtc

SEQ ID NO: 25121 - DNA, 31 bp, Homo sapiens; identical to SEQ ID NO: 6502
  chr19:2289965-2289996
  hypo

SEQ ID NO: 25122 - DNA, 121 bp, Homo sapiens; identical to SEQ ID NO: 6503
  chr19:2290007-2290128
  hypo

SEQ ID NO: 25123 - DNA, 37 bp, Homo sapiens; identical to SEQ ID NO: 6504
  chr19:2290234-2290271
  hypo

SEQ ID NO: 25124 - DNA, 31 bp, Homo sapiens; identical to SEQ ID NO: 6505
  chr19:2329160-2329191
  hypo

SEQ ID NO: 25125 - DNA, 39 bp, Homo sapiens
  chr19:2359119-2359158
  hypo
acagcccagagagatccgaggaggcgtgacgcctaaatg

SEQ ID NO: 25126 - DNA, 146 bp, Homo sapiens
  chr19:2363008-2363154
  hypo
gggatcagggtcccagcgctcaggctggcctgaccgtggggtaattgggccctgcagagcctcacgccgcctgcttgtcctgccacgcggaatgggagtccgtgtgtgccccgctgcccacagcgtgtgaacgtgagttggggacc

SEQ ID NO: 25127 - DNA, 21 bp, Homo sapiens
  chr19:2366566-2366587
  hypo
ggccaggggctgggtgcggtg

SEQ ID NO: 25128 - DNA, 50 bp, Homo sapiens
  chr19:2376998-2377048
  hypo
gaaactggagtggccacgggtgggcggctccctcacgctggcttctcctg

SEQ ID NO: 25129 - DNA, 51 bp, Homo sapiens
  chr19:2399105-2399156
  hypo
attgcagcgagggatccgggcaaggctgcgggagcacggcatctccctggc

SEQ ID NO: 25130 - DNA, 31 bp, Homo sapiens
  chr19:2399160-2399191
  hypo
tatggcacaattgtgtcggctgagctcacag

SEQ ID NO: 25131 - DNA, 31 bp, Homo sapiens; identical to SEQ ID NO: 6508
  chr19:2488866-2488897
  hypo

SEQ ID NO: 25132 - DNA, 29 bp, Homo sapiens
  chr19:2507679-2507708
  hypo
cagagtctcactttgtcgcccagtctgga

SEQ ID NO: 25133 - DNA, 39 bp, Homo sapiens
  chr19:2513206-2513245
  hypo
agggatccccgcctcacgggcctgcacggaggacctggg

SEQ ID NO: 25134 - DNA, 18 bp, Homo sapiens
  chr19:2513267-2513285
  hypo
gcacgggttcttagacgc

SEQ ID NO: 25135 - DNA, 52 bp, Homo sapiens
  chr19:2513454-2513506
  hypo
tggctgcacctgctcccgtccgtgccgcagaggaggacgcagtcatctttca

SEQ ID NO: 25136 - DNA, 74 bp, Homo sapiens
  chr19:2518479-2518553
  hypo
cctactggttggatcccggccagcagcagcgtgatggggtctgggagggctcagagctgcgctggagggagact

SEQ ID NO: 25137 - DNA, 49 bp, Homo sapiens
  chr19:2524802-2524851
  hypo
tatgggtgtgtgcatgcgtgttggcgtgtgtgtacgtcactgtaggtgc

SEQ ID NO: 25138 - DNA, 31 bp, Homo sapiens
  chr19:2672825-2672856
  hypo
acaccaccagtgtggacgtcacgtgcccctg

SEQ ID NO: 25139 - DNA, 31 bp, Homo sapiens
  chr19:2683930-2683961
  hypo
ctcagccccagggggccgagctgcaaaagcg

SEQ ID NO: 25140 - DNA, 31 bp, Homo sapiens
  chr19:2733993-2734024
  hypo
tctctgcttccctgaccgacatgcctgggcc

SEQ ID NO: 25141 - DNA, 31 bp, Homo sapiens
  chr19:2753327-2753358
  hypo
gctgaacctgaaacttcgcccctgcagatct

SEQ ID NO: 25142 - DNA, 42 bp, Homo sapiens
  chr19:2795358-2795400
  hypo
tgggctcctgctcccccggatgctcctcgcagtatgcagtgg

SEQ ID NO: 25143 - DNA, 31 bp, Homo sapiens
  chr19:2795455-2795486
  hypo
tgttcatcctcttaggcgaggacccctggga

SEQ ID NO: 25144 - DNA, 31 bp, Homo sapiens
  chr19:2804071-2804102
  hypo
ggtcggagtgagctcccgatcattctttcca

SEQ ID NO: 25145 - DNA, 31 bp, Homo sapiens
  chr19:2917297-2917328
  hypo
gagcagtgtcggatggcgtttaatgggttcg

SEQ ID NO: 25146 - DNA, 31 bp, Homo sapiens
  chr19:2920046-2920077
  hypo
tgatcgtgtacagcatcgctgaatgactact

SEQ ID NO: 25147 - DNA, 34 bp, Homo sapiens
  chr19:2927483-2927517
  hypo
atagggccgggtgtggcggctcacgcctgtaatt

SEQ ID NO: 25148 - DNA, 31 bp, Homo sapiens
  chr19:2934501-2934532
  hypo
ctgctgagacttttcacgtatgtcacagatg

SEQ ID NO: 25149 - DNA, 31 bp, Homo sapiens
  chr19:2934559-2934590
  hypo
gtttctctacagtctgcgttttcataggagg

SEQ ID NO: 25150 - DNA, 20 bp, Homo sapiens
  chr19:2935614-2935634
  hypo
cactgcgcccagcccacggt

SEQ ID NO: 25151 - DNA, 38 bp, Homo sapiens
  chr19:2938053-2938091
  hypo
caggggtttgtacttctaacccacgatgccaaacggaa

SEQ ID NO: 25152 - DNA, 27 bp, Homo sapiens
  chr19:2938993-2939020
  hypo
tgctctccaggacgcagtgagggaatg

SEQ ID NO: 25153 - DNA, 31 bp, Homo sapiens
  chr19:2939040-2939071
  hypo
ggcagtgagggaatgacgccatccttaccca

SEQ ID NO: 25154 - DNA, 31 bp, Homo sapiens
  chr19:2941877-2941908
  hypo
catggggctgtgtgtgcgcctttcccctcat

SEQ ID NO: 25155 - DNA, 38 bp, Homo sapiens
  chr19:2941909-2941947
  hypo
ctaatggaagatgcaacgtcttccgagtttgagagttt

SEQ ID NO: 25156 - DNA, 126 bp, Homo sapiens; identical to SEQ ID NO: 6515
  chr19:2944666-2944792
  hypo

SEQ ID NO: 25157 - DNA, 194 bp, Homo sapiens; identical to SEQ ID NO: 6516
  chr19:2944798-2944992
  hypo

SEQ ID NO: 25158 - DNA, 62 bp, Homo sapiens; identical to SEQ ID NO: 6520
  chr19:2950417-2950479
  hypo

SEQ ID NO: 25159 - DNA, 39 bp, Homo sapiens; identical to SEQ ID NO: 6521
  chr19:2950537-2950576
  hypo

SEQ ID NO: 25160 - DNA, 75 bp, Homo sapiens; identical to SEQ ID NO: 6522
  chr19:2950579-2950654
  hypo

SEQ ID NO: 25161 - DNA, 31 bp, Homo sapiens; identical to SEQ ID NO: 6523
  chr19:2950849-2950880
  hypo

SEQ ID NO: 25162 - DNA, 95 bp, Homo sapiens; identical to SEQ ID NO: 6524
  chr19:2950907-2951002
  hypo

SEQ ID NO: 25163 - DNA, 31 bp, Homo sapiens; identical to SEQ ID NO: 6526
  chr19:2977420-2977451
  hypo

SEQ ID NO: 25164 - DNA, 60 bp, Homo sapiens; identical to SEQ ID NO: 6527
  chr19:2977453-2977513
  hypo

SEQ ID NO: 25165 - DNA, 62 bp, Homo sapiens
  chr19:2996847-2996909
  hypo
tgggtaaccaccaggccgagttccccttgcctctgagatatcgcatccgccattctcctctt

SEQ ID NO: 25166 - DNA, 31 bp, Homo sapiens
  chr19:3055603-3055634
  hypo
aggggctgggcaagtgcggggccccctcaca

SEQ ID NO: 25167 - DNA, 43 bp, Homo sapiens
  chr19:3055855-3055898
  hypo
gtgggatgagcaaagccgtgttcgggcccgagggcagccagtc

SEQ ID NO: 25168 - DNA, 31 bp, Homo sapiens
  chr19:3056363-3056394
  hypo
ggagagagagggggagcgggagatgggggtg

SEQ ID NO: 25169 - DNA, 88 bp, Homo sapiens; identical to SEQ ID NO: 6528
  chr19:3094303-3094391
  hypo

SEQ ID NO: 25170 - DNA, 53 bp, Homo sapiens; identical to SEQ ID NO: 6529
  chr19:3094776-3094829
  hypo

SEQ ID NO: 25171 - DNA, 31 bp, Homo sapiens
  chr19:3102679-3102710
  hypo
ggttctgagactgaagcgaagcaggcatgag

SEQ ID NO: 25172 - DNA, 47 bp, Homo sapiens
  chr19:3105563-3105610
  hypo
cccaagagctccgtggcggaagaagctgatcccgcctcccaacacca

SEQ ID NO: 25173 - DNA, 31 bp, Homo sapiens
  chr19:3105757-3105788
  hypo
gtggggtctttgcacccgtgcacctgctgaa

SEQ ID NO: 25174 - DNA, 44 bp, Homo sapiens
  chr19:3105804-3105848
  hypo
ggctttttggcttttacgagtaaagctgccgtggtgcttggtgt

SEQ ID NO: 25175 - DNA, 31 bp, Homo sapiens
  chr19:3108247-3108278
  hypo
caggtgaggggtcctgcgacaggcacctgtg

SEQ ID NO: 25176 - DNA, 64 bp, Homo sapiens
  chr19:3109615-3109679
  hypo
cagggggcagtgtggccgtggccgctgagcaaagctctggggaagggggcgcccagcccttggg

SEQ ID NO: 25177 - DNA, 45 bp, Homo sapiens
  chr19:3109682-3109727
  hypo
gtctgtgcagagatgccgttggggtgagtccgtctgtcagggcac

SEQ ID NO: 25178 - DNA, 104 bp, Homo sapiens
  chr19:3113300-3113404
  hypo
cgacgtctcccctgcccgccctcgcaggccaatgcgctcctgatccgggaggtggacgtggagaaggtgaccaccttcgagcatcagtacgtcagtgccatcaa

SEQ ID NO: 25179 - DNA, 125 bp, Homo sapiens
  chr19:3113405-3113530
  hypo
accctgtgggaggacccgggcatccaggaatgctacgaccgcaggcgcgagtaccagctctccgactctgccaagtagtaagtgcggccgcaccgctggcggcctggggacggcagctgcgggcc

SEQ ID NO: 25180 - DNA, 31 bp, Homo sapiens
  chr19:3113610-3113641
  hypo
gcccgggccacctggccggatggagggacca

SEQ ID NO: 25181 - DNA, 83 bp, Homo sapiens
  chr19:3114795-3114878
  hypo
ctgcttcagacactgccgtaggtggcgcagtgcgcggtccaccccctcctggtggctttccgtcctcccgctggtttgggtgc

SEQ ID NO: 25182 - DNA, 35 bp, Homo sapiens
  chr19:3115058-3115093
  hypo
catcatcttccggtaccgcccgggccacagcaggc

SEQ ID NO: 25183 - DNA, 31 bp, Homo sapiens
  chr19:3117183-3117214
  hypo
caggatacagctgaggcgagccaggcatagg

SEQ ID NO: 25184 - DNA, 31 bp, Homo sapiens
  chr19:3117233-3117264
  hypo
tcccctcacagccccacgctggcctcttaac

SEQ ID NO: 25185 - DNA, 31 bp, Homo sapiens
  chr19:3118889-3118920
  hypo
ggtggctgagtcctggcgctgtgtcctttca

SEQ ID NO: 25186 - DNA, 137 bp, Homo sapiens
  chr19:3118965-3119102
  hypo
tccactgctttgagaacgtgacatccatcatgtttctcgtcgccctcagcgaatacgaccaagtcctggtggagtcggacaacgaggtgggccctgccctgagcaggggcagcgttgggggccgggccttccccacc

SEQ ID NO: 25187 - DNA, 110 bp, Homo sapiens
  chr19:3219524-3219634
  hypo
agtcgccgcgccctgccactcccacgcgctttacttcctcagtaacatccatggcacgggcatcctgcagtgaccgatgcccaccagactgcatccgctaacaagacagg

SEQ ID NO: 25188 - DNA, 199 bp, Homo sapiens; identical to SEQ ID NO: 6531
  chr19:3361101-3361300
  hypo

SEQ ID NO: 25189 - DNA, 37 bp, Homo sapiens; identical to SEQ ID NO: 6532
  chr19:3361306-3361343
  hypo

SEQ ID NO: 25190 - DNA, 55 bp, Homo sapiens; identical to SEQ ID NO: 6533
  chr19:3367361-3367416
  hypo

SEQ ID NO: 25191 - DNA, 31 bp, Homo sapiens
  chr19:3381002-3381033
  hypo
caacctcagttttacccgtctgtacaatggg

SEQ ID NO: 25192 - DNA, 54 bp, Homo sapiens
  chr19:3410577-3410631
  hypo
agggccttgtgggccacgggaagaaggtgggcttttccccgcaaagaaggtggg

SEQ ID NO: 25193 - DNA, 4 bp, Homo sapiens
  chr19:3424686-3424690
  hypo
tcat

SEQ ID NO: 25194 - DNA, 61 bp, Homo sapiens
  chr19:3424702-3424763
  hypo
gctcagagaaggcaagcgacttgctcagggtcgcacagcaagaaagcggcacagctgggat

SEQ ID NO: 25195 - DNA, 40 bp, Homo sapiens
  chr19:3424793-3424833
  hypo
tctaagttcttacccacgactgagccgcccctgcagaagc

SEQ ID NO: 25196 - DNA, 31 bp, Homo sapiens
  chr19:3449069-3449100
  hypo
cccccaggactctccccgcctctccagcttc

SEQ ID NO: 25197 - DNA, 31 bp, Homo sapiens
  chr19:3453420-3453451
  hypo
gtgaattaggaaaaacgcggagaacctgctg

SEQ ID NO: 25198 - DNA, 87 bp, Homo sapiens
  chr19:3453991-3454078
  hypo
ggtcagaggtcaggcccgaccctgcagggcctggcgagtttggtgggtctccggaaaacagcccagtggccacgtggttgggcccat

SEQ ID NO: 25199 - DNA, 31 bp, Homo sapiens
  chr19:3562379-3562410
  hypo
ctttatgtgctggctgcggaatgccacctga

SEQ ID NO: 25200 - DNA, 58 bp, Homo sapiens; identical to SEQ ID NO: 6535
  chr19:3573236-3573294
  hypo

SEQ ID NO: 25201 - DNA, 113 bp, Homo sapiens
  chr19:3577704-3577817
  hypo
cccacctccccgacctcgttccctccgtccgtgactgtcctcagcggaccctggacgcccgccgctctagccccgcgtccccaccctgtccccgtcctcgccatcctcctgcc

SEQ ID NO: 25202 - DNA, 31 bp, Homo sapiens
  chr19:3577948-3577979
  hypo
cctcgcctgaccttcccgcctgtcccccagg

SEQ ID NO: 25203 - DNA, 55 bp, Homo sapiens
  chr19:3578192-3578247
  hypo
ctgctgggtgggactccgcagcttactagagatcacctcccggaggggcctacct

SEQ ID NO: 25204 - DNA, 31 bp, Homo sapiens
  chr19:3589345-3589376
  hypo
agattctagaaaggctcggctgttggcctcc

SEQ ID NO: 25205 - DNA, 26 bp, Homo sapiens
  chr19:3595359-3595385
  hypo
gagcaagactccgtctaaaaaaaaaa

SEQ ID NO: 25206 - DNA, 31 bp, Homo sapiens
  chr19:3638706-3638737
  hypo
gtgcgtgtgggcgtgtcgtgagagtgctggc

SEQ ID NO: 25207 - DNA, 125 bp, Homo sapiens
  chr19:3638745-3638870
  hypo
gagcatgtgggtgggtcgacagggcacactcacgtgcctgtgtgcaggtgtgtgtatgcggtgtgcacacggtggagcgtgtgtgagagagagtccggttgacgagccggcggcaggaggagccc

SEQ ID NO: 25208 - DNA, 35 bp, Homo sapiens
  chr19:3680258-3680293
  hypo
tgacacaccactgaggcggccggctctctgtctaa

SEQ ID NO: 25209 - DNA, 45 bp, Homo sapiens
  chr19:3691223-3691268
  hypo
gatgggagagatggacgcgtcctccgctgccggaacacggagcgc

SEQ ID NO: 25210 - DNA, 31 bp, Homo sapiens
  chr19:3709473-3709504
  hypo
cagagaggggaggggtcggcagcaaaagtgt

SEQ ID NO: 25211 - DNA, 31 bp, Homo sapiens
  chr19:3730409-3730440
  hypo
ccagggcgccaggactcggatgaagacgatg

SEQ ID NO: 25212 - DNA, 67 bp, Homo sapiens
  chr19:3730456-3730523
  hypo
ggaggtggaccagggccggggctatgacggcgactcatccagtggctccggccgctcctgggacgag

SEQ ID NO: 25213 - DNA, 31 bp, Homo sapiens
  chr19:3731830-3731861
  hypo
ttaggatgggagggcccgcacctggactgct

SEQ ID NO: 25214 - DNA, 96 bp, Homo sapiens
  chr19:3739004-3739100
  hypo
ttccacgtgctggacacgctgcaccccggccccgggcagagccacgcacgaggaggccactggctggcggtgcgcatgggtcgtgacctgcgggag

SEQ ID NO: 25215 - DNA, 49 bp, Homo sapiens
  chr19:3740454-3740503
  hypo
gcctgtccacaggctccgaggggtaggacgaggacgtctttggggccac

SEQ ID NO: 25216 - DNA, 151 bp, Homo sapiens
  chr19:3740633-3740784
  hypo
cgagttctggcggctgcggggtcttcgtcgaggagccaagaagaccactcagcggagccgtgaggacctctcagctctgacccgacagggccgctacccgccctacgaacgagtggtgttgcgagaaggtggggcccggagctggaggggc

SEQ ID NO: 25217 - DNA, 9 bp, Homo sapiens
  chr19:3740844-3740853
  hypo
aggcacagt

SEQ ID NO: 25218 - DNA, 126 bp, Homo sapiens
  chr19:3747849-3747975
  hypo
ccgctgacctcagctgcgacagccgcgttaacagcgactacgagacggacggcgagggcggcgcgtacacggatggcgagggctacacagacggcgagggggggccctacacggatgtggatgatg

SEQ ID NO: 25219 - DNA, 43 bp, Homo sapiens
  chr19:3754227-3754270
  hypo
tgcgcgtgctggtgggcgggttccgttccgacaccagctgggt

SEQ ID NO: 25220 - DNA, 77 bp, Homo sapiens
  chr19:3770863-3770940
  hypo
gggcctcggggagtctcggagctgccacggcacccgagcctgactccagccgctcctggcggcgccacttggcccgg

SEQ ID NO: 25221 - DNA, 97 bp, Homo sapiens
  chr19:3778196-3778293
  hypo
cggggcgaggtggagccgtcggcgtcctgccctgagacggaggctggggcacctgcactgcgtagctcccgggccagcttctcggccagtttgcgga

SEQ ID NO: 25222 - DNA, 103 bp, Homo sapiens
  chr19:3778990-3779093
  hypo
ccgtgtttgagagcctcgggcgccgtccacttgacgggcagccggcttgagtctagccccttccgctcggctttggccaggccaaagtcgctgaccttggcca

SEQ ID NO: 25223 - DNA, 45 bp, Homo sapiens
  chr19:3779103-3779148
  hypo
tgagaccaggatgttgcgggcggccaggtcgcggtgcacaagctt

SEQ ID NO: 25224 - DNA, 37 bp, Homo sapiens
  chr19:3779158-3779195
  hypo
aggtactccatgccctcggccacgtgcctgggggtag

SEQ ID NO: 25225 - DNA, 51 bp, Homo sapiens
  chr19:3779390-3779441
  hypo
agctgagcggtgttcacgagggctcgaccccgggtccgcagaaagttcacc

SEQ ID NO: 25226 - DNA, 31 bp, Homo sapiens
  chr19:3779455-3779486
  hypo
ggggtgggagatggccgcgggatgttggggc

SEQ ID NO: 25227 - DNA, 40 bp, Homo sapiens
  chr19:3807697-3807737
  hypo
tgtgtccatgcatgcacggtgtgcccgtgtgtgtgtgcat

SEQ ID NO: 25228 - DNA, 95 bp, Homo sapiens
  chr19:3816806-3816901
  hypo
gacgcctttcaggacccgagtctggggggcaacgctgctgtggggacaaagccacagacgtgcgccatcagcggagagacgcggggtaccccagc

SEQ ID NO: 25229 - DNA, 31 bp, Homo sapiens
  chr19:3830871-3830902
  hypo
ctgccaagcacaagcacgcatgcacacacac

SEQ ID NO: 25230 - DNA, 40 bp, Homo sapiens
  chr19:3855406-3855446
  hypo
aaagtgaaagcagtcccgggcgatccggcggcagattcat

SEQ ID NO: 25231 - DNA, 72 bp, Homo sapiens
  chr19:3978024-3978096
  hypo
cctttatcgatgtcctcggccaggccgtcggggaagggccgcgccttcatgtacagccggttgtgcttgttg

SEQ ID NO: 25232 - DNA, 31 bp, Homo sapiens
  chr19:3979327-3979358
  hypo
ttgatggggatgcaggcgtggtcctcctcca

SEQ ID NO: 25233 - DNA, 31 bp, Homo sapiens
  chr19:3979372-3979403
  hypo
atctccaggtgcagctcgccggcgcccgcga

SEQ ID NO: 25234 - DNA, 46 bp, Homo sapiens
  chr19:4037905-4037951
  hypo
accacgcagaggggcacgggccagcctcgggcgcagagggaggagt

SEQ ID NO: 25235 - DNA, 35 bp, Homo sapiens
  chr19:4037959-4037994
  hypo
tttttctttttattgtcgttcgttttgtttttcca

SEQ ID NO: 25236 - DNA, 31 bp, Homo sapiens
  chr19:4042779-4042810
  hypo
accccgcctggggcctcgggaaagcctggag

SEQ ID NO: 25237 - DNA, 43 bp, Homo sapiens
  chr19:4043287-4043330
  hypo
ctgaggcggcagcggtcgtaacaggctgcgtttagtggttctt

SEQ ID NO: 25238 - DNA, 39 bp, Homo sapiens
  chr19:4043526-4043565
  hypo
ctctgtaccctgagggcgccgccccgccccccattcacc

SEQ ID NO: 25239 - DNA, 31 bp, Homo sapiens
  chr19:4044507-4044538
  hypo
gacgggggctccggcccggccacctccccgg

SEQ ID NO: 25240 - DNA, 31 bp, Homo sapiens
  chr19:4050406-4050437
  hypo
attggattgtgagccccgagaaggcaggggt

SEQ ID NO: 25241 - DNA, 144 bp, Homo sapiens; identical to SEQ ID NO: 6536
  chr19:4053896-4054040
  hypo

SEQ ID NO: 25242 - DNA, 83 bp, Homo sapiens; identical to SEQ ID NO: 6537
  chr19:4054304-4054387
  hypo

SEQ ID NO: 25243 - DNA, 53 bp, Homo sapiens; identical to SEQ ID NO: 6538
  chr19:4054418-4054471
  hypo

SEQ ID NO: 25244 - DNA, 74 bp, Homo sapiens
  chr19:4054601-4054675
  hypo
gccacggcggccacagcggcggccacggcctccttggtggcatccaggtcatcatcggacgccccaaaggcgga

SEQ ID NO: 25245 - DNA, 60 bp, Homo sapiens
  chr19:4054730-4054790
  hypo
ttgctctggaagaactcgaggtactccttggcgcggaggaggttgcgctgatcaatttga

SEQ ID NO: 25246 - DNA, 174 bp, Homo sapiens; identical to SEQ ID NO: 6539
  chr19:4054879-4055053
  hypo

SEQ ID NO: 25247 - DNA, 59 bp, Homo sapiens; identical to SEQ ID NO: 6541
  chr19:4064871-4064930
  hypo

SEQ ID NO: 25248 - DNA, 31 bp, Homo sapiens; identical to SEQ ID NO: 6542
  chr19:4064938-4064969
  hypo

SEQ ID NO: 25249 - DNA, 13 bp, Homo sapiens
  chr19:4093666-4093679
  hypo
acagagtgagact

SEQ ID NO: 25250 - DNA, 31 bp, Homo sapiens
  chr19:4094940-4094971
  hypo
ccttccccgtggtctgcggcacatgcctgtg

SEQ ID NO: 25251 - DNA, 60 bp, Homo sapiens
  chr19:4095013-4095073
  hypo
aatggagtggggctggcgaccctcccagaacctgcgggcggatcccggggagcccacagt

SEQ ID NO: 25252 - DNA, 42 bp, Homo sapiens
  chr19:4096415-4096457
  hypo
gcccagggaggtggcccggcctggtcacgtggccaacaggac

SEQ ID NO: 25253 - DNA, 31 bp, Homo sapiens
  chr19:4111004-4111035
  hypo
gatgtcatgcttagtgcgagatgccagacac

SEQ ID NO: 25254 - DNA, 24 bp, Homo sapiens
  chr19:4129629-4129653
  hypo
gaatcatccttctggccgggcgcg

SEQ ID NO: 25255 - DNA, 31 bp, Homo sapiens
  chr19:4144137-4144168
  hypo
tccaggtgagagggtccgctgtgacccttgg

SEQ ID NO: 25256 - DNA, 31 bp, Homo sapiens
  chr19:4295628-4295659
  hypo
ttgtcatcatgagccccgccatctttatcct

SEQ ID NO: 25257 - DNA, 115 bp, Homo sapiens
  chr19:4322985-4323100
  hypo
acacgctgatcgacggcggggagcattactgggaggtgcgctacgagccggacagcaaggcgttcggcgtgggcgtggcctaccgcagcctgggccgcttcgagcaactgggcaa

SEQ ID NO: 25258 - DNA, 189 bp, Homo sapiens
  chr19:4361538-4361727
  hypo
acccagcagggggtgccggccagtgtggacggaggggcggggcggggacacgggtgagtcactgcggcaggggcacaagcacctccacgtagctgagcgggaagaagcccgactggccgtccagcatgccctcgtaccagttctcatcgatctggttggtcagcgtgatgacgtcgccctcatggaagc

SEQ ID NO: 25259 - DNA, 137 bp, Homo sapiens; identical to SEQ ID NO: 6543
  chr19:4432849-4432986
  hypo

SEQ ID NO: 25260 - DNA, 31 bp, Homo sapiens
  chr19:4443067-4443098
  hypo
gagcagatacttgaaccgactcaattcctgt

SEQ ID NO: 25261 - DNA, 38 bp, Homo sapiens
  chr19:4544027-4544065
  hypo
aggagggaggatgaagcggaggccgggagcagggggtg

SEQ ID NO: 25262 - DNA, 31 bp, Homo sapiens
  chr19:4547997-4548028
  hypo
ccttgcttcccgcccacggctggcctggggt

SEQ ID NO: 25263 - DNA, 63 bp, Homo sapiens
  chr19:4554998-4555061
  hypo
ttggagtcatgtttcacggtgcgcagggtgggcctgtccccgaggctgcggtagatgacagca

SEQ ID NO: 25264 - DNA, 42 bp, Homo sapiens
  chr19:4555920-4555962
  hypo
gaaaagccatggccagcggaggtcgggcgagcagaggcctgg

SEQ ID NO: 25265 - DNA, 31 bp, Homo sapiens
  chr19:4556074-4556105
  hypo
cacctttacgaagtttcgacactcgccctga

SEQ ID NO: 25266 - DNA, 67 bp, Homo sapiens
  chr19:4556107-4556174
  hypo
tggggacaggaggaagcggggagcgcgatgtgggcgtggtcatggtgatgggcgtggccagaacctg

SEQ ID NO: 25267 - DNA, 40 bp, Homo sapiens
  chr19:4556912-4556952
  hypo
aatgccagggctgattcgcaggggccgggaccgagccagg

SEQ ID NO: 25268 - DNA, 31 bp, Homo sapiens
  chr19:4557109-4557140
  hypo
tccccggcgcagtgccgcgtccccctggccc

SEQ ID NO: 25269 - DNA, 31 bp, Homo sapiens
  chr19:4557203-4557234
  hypo
ggggctccagctctacgcggtagaggttgtc

SEQ ID NO: 25270 - DNA, 31 bp, Homo sapiens
  chr19:4557256-4557287
  hypo
tgagaactgggggctccgccaccctctcccg

SEQ ID NO: 25271 - DNA, 31 bp, Homo sapiens
  chr19:4557305-4557336
  hypo
caatgtggtgtgcacacgggggcatgcaggg

SEQ ID NO: 25272 - DNA, 31 bp, Homo sapiens
  chr19:4557340-4557371
  hypo
gccaatgcctctgacacgagcaactctagcg

SEQ ID NO: 25273 - DNA, 24 bp, Homo sapiens
  chr19:4627237-4627261
  hypo
aaaacaaccactcccacgataaca

SEQ ID NO: 25274 - DNA, 56 bp, Homo sapiens
  chr19:4670739-4670795
  hypo
gcgaacttctcataatcgttgcagccaagatgtgtgtgcatcgatattcaaaatta

SEQ ID NO: 25275 - DNA, 23 bp, Homo sapiens
  chr19:4670855-4670878
  hypo
gctggagggcagtggcgcgatct

SEQ ID NO: 25276 - DNA, 88 bp, Homo sapiens
  chr19:4679561-4679649
  hypo
ctccctccattaggcccggagcaggggtgggtgtggcagcccccgatcccgtgcttccagcaccgaaggcaggcggaaccctgagctg

SEQ ID NO: 25277 - DNA, 111 bp, Homo sapiens
  chr19:4714198-4714309
  hypo
gccgtggatgatgctccggagcccgtcccacgagtgcttctgcacctggaagcgggcggccgggtcatctgtggcggctgcgtcgcctcggtcggccgttggggtcccggt

SEQ ID NO: 25278 - DNA, 31 bp, Homo sapiens
  chr19:4794012-4794043
  hypo
tacctgcagacagggtcggaggtgttagcga

SEQ ID NO: 25279 - DNA, 31 bp, Homo sapiens
  chr19:4795186-4795217
  hypo
agatttttgtcaagagcgagactccatcagc

SEQ ID NO: 25280 - DNA, 88 bp, Homo sapiens
  chr19:4816812-4816900
  hypo
ttggccaccttcctggcgaagatctgggagtgttcgtccagccgcaccagcccggagagcaggctggccgtgtcggagctgagctggg

SEQ ID NO: 25281 - DNA, 30 bp, Homo sapiens
  chr19:4885981-4886011
  hypo
aatttaaaaaacaggccgggcgtggtggct

SEQ ID NO: 25282 - DNA, 35 bp, Homo sapiens
  chr19:4902799-4902834
  hypo
tcgggcagcactaattcgatcgacttcaccacaga

SEQ ID NO: 25283 - DNA, 69 bp, Homo sapiens
  chr19:4930782-4930851
  hypo
aggtggtcagggtgacgcggaaggccccctcccgggacgagccctgcagctccacgtccaggccggcgc

SEQ ID NO: 25284 - DNA, 31 bp, Homo sapiens
  chr19:4985733-4985764
  hypo
tgctggaacccagacccgccttcactgcccc

SEQ ID NO: 25285 - DNA, 31 bp, Homo sapiens
  chr19:5023577-5023608
  hypo
cacaggggctggaggccggctgggactcact

SEQ ID NO: 25286 - DNA, 31 bp, Homo sapiens
  chr19:5030563-5030594
  hypo
gaggccatgtgtgcaccggcctgcagagagg

SEQ ID NO: 25287 - DNA, 74 bp, Homo sapiens
  chr19:5031055-5031129
  hypo
cacagtggtccagctgcggcctctgctccctctgagccggtggctccctggggacagtgcgcaggccctgggtg

SEQ ID NO: 25288 - DNA, 48 bp, Homo sapiens
  chr19:5031142-5031190
  hypo
cacatctgggtgagagcgggagggcaggtgcagcgttggggggatcct

SEQ ID NO: 25289 - DNA, 31 bp, Homo sapiens
  chr19:5047927-5047958
  hypo
cccattgagctgtgagcggccccaggtgtcc

SEQ ID NO: 25290 - DNA, 41 bp, Homo sapiens
  chr19:5049195-5049236
  hypo
gggactgacagggatgcgccaggagccgagggcctctcctg

SEQ ID NO: 25291 - DNA, 31 bp, Homo sapiens
  chr19:5070999-5071030
  hypo
cgtgcctcccttctctcgcaggtacgccatc

SEQ ID NO: 25292 - DNA, 31 bp, Homo sapiens
  chr19:5073396-5073427
  hypo
agcaggctctaggctccgcagtctgtactgg

SEQ ID NO: 25293 - DNA, 53 bp, Homo sapiens
  chr19:5218521-5218574
  hypo
gggttctgagtccttgcgtttactttaggagaagcaagcggaacagtccagtt

SEQ ID NO: 25294 - DNA, 31 bp, Homo sapiens
  chr19:5218631-5218662
  hypo
aaaaggaccatggacccgtatgactagggtt

SEQ ID NO: 25295 - DNA, 31 bp, Homo sapiens
  chr19:5218666-5218697
  hypo
ggaccaagtacagctacgtgtacaagctgtg

SEQ ID NO: 25296 - DNA, 78 bp, Homo sapiens
  chr19:5231442-5231520
  hypo
gtggtcggggggatgccgttcacctccttgggttccgggtcctctgagcccagcggtcggtagcggacgctgtagccc

SEQ ID NO: 25297 - DNA, 52 bp, Homo sapiens
  chr19:5245974-5246026
  hypo
acgcaggtgatgttcacgttgccccctggcatgatctcgtggctcatgggca

SEQ ID NO: 25298 - DNA, 31 bp, Homo sapiens
  chr19:5274367-5274398
  hypo
tggaaagaagggggggcgctgatgggtccag

SEQ ID NO: 25299 - DNA, 59 bp, Homo sapiens
  chr19:5274409-5274468
  hypo
ggataccaaggagccacgaaaacctgcattccatgccctgcccacggaagtgccatgtg

SEQ ID NO: 25300 - DNA, 31 bp, Homo sapiens
  chr19:5312164-5312195
  hypo
gacaaatgggcatgtccgtcaggaggggctg

SEQ ID NO: 25301 - DNA, 31 bp, Homo sapiens
  chr19:5312226-5312257
  hypo
aaaagaatgcatagtacgcagccctgaaaaa

SEQ ID NO: 25302 - DNA, 31 bp, Homo sapiens
  chr19:5312259-5312290
  hypo
catccctggctgtgtgcgtcctggtactgtc

SEQ ID NO: 25303 - DNA, 51 bp, Homo sapiens
  chr19:5312298-5312349
  hypo
agcatggcagggacagcgggcataggatgtgtgggacgagaaggtgagcac

SEQ ID NO: 25304 - DNA, 31 bp, Homo sapiens
  chr19:5582380-5582411
  hypo
ggggtgccctgacaaccggggaggctgagga

SEQ ID NO: 25305 - DNA, 31 bp, Homo sapiens
  chr19:5587486-5587517
  hypo
cccgcagcctttagagcgcttgggttttttt

SEQ ID NO: 25306 - DNA, 31 bp, Homo sapiens
  chr19:5587839-5587870
  hypo
gggccacagccaccctcgtccctggagccag

SEQ ID NO: 25307 - DNA, 31 bp, Homo sapiens
  chr19:5608412-5608443
  hypo
cttaatcatcagtgtccgagtgaagtcaaca

SEQ ID NO: 25308 - DNA, 121 bp, Homo sapiens
  chr19:5695909-5696030
  hypo
tctggtgtgtctctcacggccccatctgctcctcggccgcaggtcccacctgtctctcccgggcccaggagctcccagaggcacggcctctgcaggctctggggggcgccccctgctctgg

SEQ ID NO: 25309 - DNA, 92 bp, Homo sapiens
  chr19:5696051-5696143
  hypo
gggctgggcttacctccgcaatggccagcttctcctgggccacgtagcccgacacgttgatcatctccatacggtctcgcagcggctcgggg

SEQ ID NO: 25310 - DNA, 59 bp, Homo sapiens
  chr19:5696147-5696206
  hypo
tgtccgtgacgttggccgtgcagatgaacagcacctgggggcggcggcaaggtgctggg

SEQ ID NO: 25311 - DNA, 31 bp, Homo sapiens
  chr19:5698922-5698953
  hypo
tcggttgcccacaacccggattgctctacca

SEQ ID NO: 25312 - DNA, 31 bp, Homo sapiens
  chr19:5785479-5785510
  hypo
gatcctctgtgggagccgctccagcagcccc

SEQ ID NO: 25313 - DNA, 43 bp, Homo sapiens; identical to SEQ ID NO: 6547
  chr19:5804851-5804894
  hypo

SEQ ID NO: 25314 - DNA, 49 bp, Homo sapiens
  chr19:5805004-5805053
  hypo
ccaccgcccccagccccgcccccggccccgcccccggccccgcgccggc

SEQ ID NO: 25315 - DNA, 43 bp, Homo sapiens
  chr19:5844273-5844316
  hypo
ccagctcggtcttggccgagaggttgagcggtgggtgggcagg

SEQ ID NO: 25316 - DNA, 31 bp, Homo sapiens
  chr19:5858549-5858580
  hypo
aaagcagaggtccaggcgcattagaggagct

SEQ ID NO: 25317 - DNA, 31 bp, Homo sapiens
  chr19:5858594-5858625
  hypo
gctgggtcttcacaagcggaagatgagacag

SEQ ID NO: 25318 - DNA, 31 bp, Homo sapiens
  chr19:5859463-5859494
  hypo
tacaagcgtgagccaccgcacccagccaggt

SEQ ID NO: 25319 - DNA, 42 bp, Homo sapiens
  chr19:5867191-5867233
  hypo
tagggcgtgaagatgtcggagtcgctgcggtaggacatggtg

SEQ ID NO: 25320 - DNA, 31 bp, Homo sapiens
  chr19:5885338-5885369
  hypo
tttcttcattgctgcccggtgtatagtagca

SEQ ID NO: 25321 - DNA, 75 bp, Homo sapiens
  chr19:5896951-5897026
  hypo
cttcaaggaaggtgcccggaggattgagtgtgactctgtaggcagcggcggtcaggcctgcgagacagaggaggg

SEQ ID NO: 25322 - DNA, 31 bp, Homo sapiens
  chr19:5897475-5897506
  hypo
attctcctgtggggcccggggctcctgggcc

SEQ ID NO: 25323 - DNA, 48 bp, Homo sapiens
  chr19:5910338-5910386
  hypo
caagcactctctacagcgattgcatctaatcttcgagtttccctgtag

SEQ ID NO: 25324 - DNA, 36 bp, Homo sapiens
  chr19:5910418-5910454
  hypo
aaagtgaggcccaggccgggcgcggtgtctcacgcc

SEQ ID NO: 25325 - DNA, 31 bp, Homo sapiens
  chr19:5914877-5914908
  hypo
ccagtgctctgcacagcgtcttgggggtttg

SEQ ID NO: 25326 - DNA, 195 bp, Homo sapiens
  chr19:5914952-5915147
  hypo
ccccatgtcccaggcccgggaggctgtcatcgcagctgcatttgccaagctggaccgcagtggggacggcgtcgtgacggtggacgacctccgcggggtgtacagtggccgtgcccaccccaaggtgcgcagtggggagtggaccgaggacgaggtgctgcgccgcttcctggacaacttcgactcctctgagaa

SEQ ID NO: 25327 - DNA, 31 bp, Homo sapiens
  chr19:5915367-5915398
  hypo
cactccccacccctgccggagacctcccttc

SEQ ID NO: 25328 - DNA, 31 bp, Homo sapiens
  chr19:5915420-5915451
  hypo
cagccacaccacagagcggggaggggcaggt

SEQ ID NO: 25329 - DNA, 31 bp, Homo sapiens
  chr19:5915656-5915687
  hypo
ccctgcccctcccttgcgggtcccccaggaa

SEQ ID NO: 25330 - DNA, 31 bp, Homo sapiens
  chr19:5915746-5915777
  hypo
ctgcccaggtgtggagcgaggggcacagggg

SEQ ID NO: 25331 - DNA, 96 bp, Homo sapiens
  chr19:5915873-5915969
  hypo
caggtaacatgtccagcgggcccagtatctacattctggtgagcggcccgaggctgggagctctgggcgggggcagaccggcggggccttgcagca

SEQ ID NO: 25332 - DNA, 31 bp, Homo sapiens
  chr19:5915970-5916001
  hypo
gggtgggggtaaagtgcgggtggtggtggag

SEQ ID NO: 25333 - DNA, 40 bp, Homo sapiens
  chr19:5938153-5938193
  hypo
acctcttcccttgacacggacatcacgccagcagctaact

SEQ ID NO: 25334 - DNA, 31 bp, Homo sapiens
  chr19:5938199-5938230
  hypo
acaatgcttttgaagtcggcaatgaatttat

SEQ ID NO: 25335 - DNA, 31 bp, Homo sapiens
  chr19:5938253-5938284
  hypo
ttcaggttgttaaactcgcttgttaaatctt

SEQ ID NO: 25336 - DNA, 31 bp, Homo sapiens
  chr19:5938287-5938318
  hypo
tgaggaatttcagccacgtgggagaaacttt

SEQ ID NO: 25337 - DNA, 31 bp, Homo sapiens
  chr19:5957315-5957346
  hypo
caggctgccagctcatcgccatgaatcaggc

SEQ ID NO: 25338 - DNA, 31 bp, Homo sapiens
  chr19:5957769-5957800
  hypo
ttccctccaagctcaacgtgaaagtgtaaag

SEQ ID NO: 25339 - DNA, 31 bp, Homo sapiens
  chr19:5957803-5957834
  hypo
tctgcttaggtctccccgtctgtgggcagaa

SEQ ID NO: 25340 - DNA, 31 bp, Homo sapiens
  chr19:5994933-5994964
  hypo
ctgccacgctgctcatcgcccatgtcatctg

SEQ ID NO: 25341 - DNA, 91 bp, Homo sapiens
  chr19:5994989-5995080
  hypo
catcatcaggagggcacgagagggagagaaggaagtgcacgttccgagaactgctccggcacgccaggcagggcaccgaggatacatggca

SEQ ID NO: 25342 - DNA, 31 bp, Homo sapiens
  chr19:5995152-5995183
  hypo
cccagctcgggccaggcgaaagagcctctgc

SEQ ID NO: 25343 - DNA, 37 bp, Homo sapiens
  chr19:5995187-5995224
  hypo
tgcctccctttcccagcgccgacgggcctggggcctg

SEQ ID NO: 25344 - DNA, 53 bp, Homo sapiens
  chr19:5995245-5995298
  hypo
ctggggtcctcccacccgcatgggacagagacggggcccgggggtccctctgg

SEQ ID NO: 25345 - DNA, 37 bp, Homo sapiens
  chr19:5995308-5995345
  hypo
ccactctcctgctgggcgtgggcgcaggagaccaggg

SEQ ID NO: 25346 - DNA, 61 bp, Homo sapiens
  chr19:5996022-5996083
  hypo
tggctgccccaaagcccggcgttcacgccaatgtgcagagaacaggcggcttccacagttt

SEQ ID NO: 25347 - DNA, 54 bp, Homo sapiens
  chr19:5996648-5996702
  hypo
ttgtggatgtgctaagcgccacttgattgtgcgctttcacgtggaaatctctcc

SEQ ID NO: 25348 - DNA, 64 bp, Homo sapiens
  chr19:5997128-5997192
  hypo
aggtagaacatgtactcgtcgtagagcaggcggatgaggtggaaggagccgaagctggcagcgc

SEQ ID NO: 25349 - DNA, 31 bp, Homo sapiens
  chr19:5998650-5998681
  hypo
ccaaaggcctcccccacgcagatgaggtgct

SEQ ID NO: 25350 - DNA, 31 bp, Homo sapiens
  chr19:5998707-5998738
  hypo
gccccggtgtctggtgcgatgcttcagtcca

SEQ ID NO: 25351 - DNA, 31 bp, Homo sapiens
  chr19:5998911-5998942
  hypo
ctacagaaataaatcccgtaaacctaatttt

SEQ ID NO: 25352 - DNA, 31 bp, Homo sapiens
  chr19:5999289-5999320
  hypo
aagtggaacagtgtctcggtctcccttgtga

SEQ ID NO: 25353 - DNA, 31 bp, Homo sapiens
  chr19:5999417-5999448
  hypo
ctcttctcaattcttccgcttgcaaccttcc

SEQ ID NO: 25354 - DNA, 31 bp, Homo sapiens
  chr19:6001971-6002002
  hypo
gaaatcctgctccagccgctgcaccacactc

SEQ ID NO: 25355 - DNA, 31 bp, Homo sapiens
  chr19:6002065-6002096
  hypo
tgtggacccccagccacggcagccctccctg

SEQ ID NO: 25356 - DNA, 60 bp, Homo sapiens
  chr19:6002099-6002159
  hypo
ctagccatgctcagggcgggacatcgtgctgtgcttgagccttctcgcccttgaccttga

SEQ ID NO: 25357 - DNA, 31 bp, Homo sapiens
  chr19:6002170-6002201
  hypo
caagtcctgtgtctcccgtcacaggggcaga

SEQ ID NO: 25358 - DNA, 44 bp, Homo sapiens
  chr19:6002204-6002248
  hypo
gagagctgagggggatcgtacccggcttccggggactcataccc

SEQ ID NO: 25359 - DNA, 31 bp, Homo sapiens
  chr19:6003432-6003463
  hypo
aattccgaagagcaggcgggtgccctgcagc

SEQ ID NO: 25360 - DNA, 31 bp, Homo sapiens
  chr19:6003849-6003880
  hypo
tctcttttccacaagtcggccaaggttctac

SEQ ID NO: 25361 - DNA, 15 bp, Homo sapiens
  chr19:6004041-6004056
  hypo
agcactgacgcgtca

SEQ ID NO: 25362 - DNA, 15 bp, Homo sapiens
  chr19:6004120-6004135
  hypo
cgctctctgggacac

SEQ ID NO: 25363 - DNA, 59 bp, Homo sapiens
  chr19:6004162-6004221
  hypo
agcccctcccagccatcgttggggagcccaggccccaccccggacgcaccttggtctgg

SEQ ID NO: 25364 - DNA, 31 bp, Homo sapiens
  chr19:6004271-6004302
  hypo
gctcttggcaaagttacggatggcctgtgtc

SEQ ID NO: 25365 - DNA, 46 bp, Homo sapiens
  chr19:6004499-6004545
  hypo
ccacccactgcctatgcgggtctcacaggggcgattctgccccagg

SEQ ID NO: 25366 - DNA, 31 bp, Homo sapiens
  chr19:6004552-6004583
  hypo
gggcaatgtctggggacgttaatggtggtca

SEQ ID NO: 25367 - DNA, 31 bp, Homo sapiens
  chr19:6005507-6005538
  hypo
ggcccgagggctccctcgtggtgggtgctgt

SEQ ID NO: 25368 - DNA, 31 bp, Homo sapiens
  chr19:6005977-6006008
  hypo
ggctactcccagaggccggcctgcatgcccc

SEQ ID NO: 25369 - DNA, 31 bp, Homo sapiens
  chr19:6006014-6006045
  hypo
accttctagaaagcaccgagcccagcccagc

SEQ ID NO: 25370 - DNA, 31 bp, Homo sapiens
  chr19:6007013-6007044
  hypo
gtcacttactggggaccggcctcagcacgtc

SEQ ID NO: 25371 - DNA, 31 bp, Homo sapiens
  chr19:6008233-6008264
  hypo
atctgggggaggaacacgggaacatcagaaa

SEQ ID NO: 25372 - DNA, 31 bp, Homo sapiens
  chr19:6010176-6010207
  hypo
cggccatggtctgttccggagtgctgtgcag

SEQ ID NO: 25373 - DNA, 57 bp, Homo sapiens
  chr19:6010214-6010271
  hypo
tgggagccgctgtccccgaggctgtccgtcttctgggctggccggtacctaggccag

SEQ ID NO: 25374 - DNA, 31 bp, Homo sapiens
  chr19:6020513-6020544
  hypo
ctctgttcagggtctacgcctcaccagcagg

SEQ ID NO: 25375 - DNA, 31 bp, Homo sapiens
  chr19:6026068-6026099
  hypo
tacaggtgtgagccaccgcacctggttgcct

SEQ ID NO: 25376 - DNA, 105 bp, Homo sapiens
  chr19:6026146-6026251
  hypo
aggttgccaggtcagacgcacacttacatggctgttgagtaaaccgcttttgtgtgatgtgattccttcgcttttttggaggttttcaatcgccatttcaagcta

SEQ ID NO: 25377 - DNA, 75 bp, Homo sapiens
  chr19:6027063-6027138
  hypo
acacggaaaacagcgacgtaaaatctgctgcagcccaccctgacgaccagaggactgaagcgggaggagatgaac

SEQ ID NO: 25378 - DNA, 31 bp, Homo sapiens
  chr19:6027415-6027446
  hypo
agcctcagggtgcaggcgatgagaaggcaat

SEQ ID NO: 25379 - DNA, 31 bp, Homo sapiens
  chr19:6033195-6033226
  hypo
actcttaactaatccacggacgttatagaat

SEQ ID NO: 25380 - DNA, 55 bp, Homo sapiens
  chr19:6040233-6040288
  hypo
gtaggtgtaggctgttcgtctgttagaaagagagaagtcacgcatgggacgctgt

SEQ ID NO: 25381 - DNA, 37 bp, Homo sapiens
  chr19:6044406-6044443
  hypo
caggactgatcagaggcgacggcggggtgatggtcag

SEQ ID NO: 25382 - DNA, 31 bp, Homo sapiens
  chr19:6044607-6044638
  hypo
cacatgcaccttcacccgcccaggcagcttt

SEQ ID NO: 25383 - DNA, 31 bp, Homo sapiens
  chr19:6044662-6044693
  hypo
gcaaggtgacactgatcgtccctagtacaga

SEQ ID NO: 25384 - DNA, 41 bp, Homo sapiens
  chr19:6044708-6044749
  hypo
cctctggatagccatccgcaccactgcgtgggagagcactc

SEQ ID NO: 25385 - DNA, 31 bp, Homo sapiens
  chr19:6045211-6045242
  hypo
ctaataaggatgccagcgcaagggcattctg

SEQ ID NO: 25386 - DNA, 34 bp, Homo sapiens
  chr19:6045243-6045277
  hypo
ttccaggtgagctgggcgccgtgtgcttggagaa

SEQ ID NO: 25387 - DNA, 31 bp, Homo sapiens
  chr19:6045328-6045359
  hypo
ggacacacatggtggccgtgagtggcactga

SEQ ID NO: 25388 - DNA, 31 bp, Homo sapiens
  chr19:6045465-6045496
  hypo
caatttcaagtgggcacggaaacatatcaat

SEQ ID NO: 25389 - DNA, 31 bp, Homo sapiens
  chr19:6062945-6062976
  hypo
atattcaatatctgctcgtcctttccctccc

SEQ ID NO: 25390 - DNA, 73 bp, Homo sapiens
  chr19:6063034-6063107
  hypo
cacccacatcccctcccgtgagctgctgtgtctcgtatccctcctgtcctgccgctctcgctcttgctcctag

SEQ ID NO: 25391 - DNA, 62 bp, Homo sapiens
  chr19:6064107-6064169
  hypo
ccaaccccagaccctacgtagcacattgcctgcaaagatgctcaagacgtgttttgcaatga

SEQ ID NO: 25392 - DNA, 40 bp, Homo sapiens
  chr19:6064171-6064211
  hypo
aagagaatgagcagcccgcctgctccgggctgctcacctg

SEQ ID NO: 25393 - DNA, 31 bp, Homo sapiens
  chr19:6064230-6064261
  hypo
gttggcctccagctcccgtcttcagctgagc

SEQ ID NO: 25394 - DNA, 31 bp, Homo sapiens
  chr19:6083196-6083227
  hypo
catgagccactgtgcccggccttcatcatga

SEQ ID NO: 25395 - DNA, 31 bp, Homo sapiens
  chr19:6095199-6095230
  hypo
atgtttctttattggccggtaatgatctaga

SEQ ID NO: 25396 - DNA, 26 bp, Homo sapiens
  chr19:6096746-6096772
  hypo
gcacctggcctcgtttcttataattt

SEQ ID NO: 25397 - DNA, 60 bp, Homo sapiens
  chr19:6105443-6105503
  hypo
aaggcatctagcttggcgatgaggtcaaagaggtattaggcttggcggggagtggagtta

SEQ ID NO: 25398 - DNA, 54 bp, Homo sapiens
  chr19:6105627-6105681
  hypo
tgggctgagagactgccgagcaccagtggtggaatcatccgggctagatgctgg

SEQ ID NO: 25399 - DNA, 31 bp, Homo sapiens
  chr19:6105699-6105730
  hypo
ctggcagtggaggtggcgaggcatggtcagg

SEQ ID NO: 25400 - DNA, 567 bp, Homo sapiens; identical to SEQ ID NO: 6548
  chr19:6110323-6110890
  hypo

SEQ ID NO: 25401 - DNA, 31 bp, Homo sapiens; identical to SEQ ID NO: 6549
  chr19:6110900-6110931
  hypo

SEQ ID NO: 25402 - DNA, 47 bp, Homo sapiens
  chr19:6333624-6333671
  hypo
ctgggccctgatgaggcggggagaggacagcccggtgccccgcggca

SEQ ID NO: 25403 - DNA, 31 bp, Homo sapiens
  chr19:6345240-6345271
  hypo
aatttttattggcacacggtcacacccattt

SEQ ID NO: 25404 - DNA, 31 bp, Homo sapiens
  chr19:6345351-6345382
  hypo
caagacaattttatcacggaggtgtggaatg

SEQ ID NO: 25405 - DNA, 31 bp, Homo sapiens
  chr19:6425393-6425424
  hypo
gacatgggtgggtgttcggtgactgacactg

SEQ ID NO: 25406 - DNA, 31 bp, Homo sapiens; identical to SEQ ID NO: 6551
  chr19:6459633-6459664
  hypo

SEQ ID NO: 25407 - DNA, 234 bp, Homo sapiens; identical to SEQ ID NO: 6556
  chr19:6590324-6590558
  hypo

SEQ ID NO: 25408 - DNA, 48 bp, Homo sapiens; identical to SEQ ID NO: 6557
  chr19:6590571-6590619
  hypo

SEQ ID NO: 25409 - DNA, 31 bp, Homo sapiens; identical to SEQ ID NO: 6558
  chr19:6590668-6590699
  hypo

SEQ ID NO: 25410 - DNA, 31 bp, Homo sapiens; identical to SEQ ID NO: 6559
  chr19:6590784-6590815
  hypo

SEQ ID NO: 25411 - DNA, 239 bp, Homo sapiens; identical to SEQ ID NO: 6560
  chr19:6590846-6591085
  hypo

SEQ ID NO: 25412 - DNA, 44 bp, Homo sapiens; identical to SEQ ID NO: 6561
  chr19:6591087-6591131
  hypo

SEQ ID NO: 25413 - DNA, 31 bp, Homo sapiens; identical to SEQ ID NO: 6562
  chr19:6591154-6591185
  hypo

SEQ ID NO: 25414 - DNA, 31 bp, Homo sapiens
  chr19:6829820-6829851
  hypo
tctactcatctgtaagcgcaggggagactcc

SEQ ID NO: 25415 - DNA, 75 bp, Homo sapiens; identical to SEQ ID NO: 6566
  chr19:7293558-7293633
  hypo

SEQ ID NO: 25416 - DNA, 193 bp, Homo sapiens; identical to SEQ ID NO: 6567
  chr19:7293748-7293941
  hypo

SEQ ID NO: 25417 - DNA, 31 bp, Homo sapiens; identical to SEQ ID NO: 6568
  chr19:7294068-7294099
  hypo

SEQ ID NO: 25418 - DNA, 54 bp, Homo sapiens; identical to SEQ ID NO: 6569
  chr19:7294178-7294232
  hypo

SEQ ID NO: 25419 - DNA, 31 bp, Homo sapiens; identical to SEQ ID NO: 6570
  chr19:7294289-7294320
  hypo

SEQ ID NO: 25420 - DNA, 185 bp, Homo sapiens; identical to SEQ ID NO: 6571
  chr19:7294496-7294681
  hypo

SEQ ID NO: 25421 - DNA, 81 bp, Homo sapiens; identical to SEQ ID NO: 6575
  chr19:7459680-7459761
  hypo

SEQ ID NO: 25422 - DNA, 137 bp, Homo sapiens; identical to SEQ ID NO: 6576
  chr19:7459763-7459900
  hypo

SEQ ID NO: 25423 - DNA, 90 bp, Homo sapiens; identical to SEQ ID NO: 6577
  chr19:7460065-7460155
  hypo

SEQ ID NO: 25424 - DNA, 123 bp, Homo sapiens; identical to SEQ ID NO: 6578
  chr19:7460171-7460294
  hypo

SEQ ID NO: 25425 - DNA, 66 bp, Homo sapiens; identical to SEQ ID NO: 6579
  chr19:7460310-7460376
  hypo

SEQ ID NO: 25426 - DNA, 31 bp, Homo sapiens; identical to SEQ ID NO: 6580
  chr19:7460385-7460416
  hypo

SEQ ID NO: 25427 - DNA, 45 bp, Homo sapiens; identical to SEQ ID NO: 6581
  chr19:7460445-7460490
  hypo

SEQ ID NO: 25428 - DNA, 50 bp, Homo sapiens; identical to SEQ ID NO: 6582
  chr19:7460506-7460556
  hypo

SEQ ID NO: 25429 - DNA, 31 bp, Homo sapiens
  chr19:7484063-7484094
  hypo
cagatgtacccacactcggcctctgtacccc

SEQ ID NO: 25430 - DNA, 31 bp, Homo sapiens
  chr19:7484128-7484159
  hypo
acccacactcggcctccgcaccccaggtgtg

SEQ ID NO: 25431 - DNA, 31 bp, Homo sapiens
  chr19:7484795-7484826
  hypo
cagatacacccacactcggcctctgtacccc

SEQ ID NO: 25432 - DNA, 17 bp, Homo sapiens
  chr19:7525689-7525706
  hypo
tttttaaacagagcctc

SEQ ID NO: 25433 - DNA, 31 bp, Homo sapiens
  chr19:7535318-7535349
  hypo
gcaggggccagcctgtcggtgctctgggcct

SEQ ID NO: 25434 - DNA, 40 bp, Homo sapiens
  chr19:7535356-7535396
  hypo
gtttctgtagggttagcggtggtgccggggtcactttctg

SEQ ID NO: 25435 - DNA, 16 bp, Homo sapiens
  chr19:7539552-7539568
  hypo
cgcgcctggtctattt

SEQ ID NO: 25436 - DNA, 31 bp, Homo sapiens; identical to SEQ ID NO: 6583
  chr19:7553841-7553872
  hypo

SEQ ID NO: 25437 - DNA, 35 bp, Homo sapiens
  chr19:7660555-7660590
  hypo
caagctccctccaccatcgccgcagtccaggccgc

SEQ ID NO: 25438 - DNA, 130 bp, Homo sapiens; identical to SEQ ID NO: 6587
  chr19:7660714-7660844
  hypo

SEQ ID NO: 25439 - DNA, 52 bp, Homo sapiens; identical to SEQ ID NO: 6588
  chr19:7660882-7660934
  hypo

SEQ ID NO: 25440 - DNA, 37 bp, Homo sapiens
  chr19:7685313-7685350
  hypo
gccagaacgcgccggtcgtctgcgtggggggcagggc

SEQ ID NO: 25441 - DNA, 73 bp, Homo sapiens
  chr19:7685353-7685426
  hypo
ggtgggtgtgtgtgcccgtgagctggctgactccgccgcagcccccaaccctgatacccgtccctccccacag

SEQ ID NO: 25442 - DNA, 31 bp, Homo sapiens
  chr19:7685530-7685561
  hypo
cacgcgcgtgctcgtccgacagcacctggac

SEQ ID NO: 25443 - DNA, 52 bp, Homo sapiens
  chr19:7711961-7712013
  hypo
tggcccctgaataccccgtggggggcactcctgaccccggaccccatgcctg

SEQ ID NO: 25444 - DNA, 188 bp, Homo sapiens
  chr19:7712021-7712209
  hypo
cccctaacctgcctctcggccgccaggacgccgtggaggaccggctggacaggaacctgtggcccttcgtatccgaccccgcccccacggccagctcccaggccgctgtcaggtgaggccccggggccgcccccgcccacgcctgggtctgtgttaggtgggcggcctggcggcggtgagggcctcct

SEQ ID NO: 25445 - DNA, 31 bp, Homo sapiens; identical to SEQ ID NO: 6590
  chr19:7762517-7762548
  hypo

SEQ ID NO: 25446 - DNA, 31 bp, Homo sapiens
  chr19:7946856-7946887
  hypo
tcatagcagtagtattcgcaagaaccaaaag

SEQ ID NO: 25447 - DNA, 17 bp, Homo sapiens
  chr19:7980157-7980174
  hypo
accgatgtcactctctt

SEQ ID NO: 25448 - DNA, 51 bp, Homo sapiens
  chr19:7989495-7989546
  hypo
ggcggatggggggcagcggtgggcaccggggcagggcgcgctgacctgtcc

SEQ ID NO: 25449 - DNA, 81 bp, Homo sapiens; identical to SEQ ID NO: 6591
  chr19:7990125-7990206
  hypo

SEQ ID NO: 25450 - DNA, 115 bp, Homo sapiens; identical to SEQ ID NO: 6592
  chr19:7990893-7991008
  hypo

SEQ ID NO: 25451 - DNA, 82 bp, Homo sapiens; identical to SEQ ID NO: 6593
  chr19:7991079-7991161
  hypo

SEQ ID NO: 25452 - DNA, 50 bp, Homo sapiens
  chr19:7992142-7992192
  hypo
cctggtctcggcagagcgcccacacgtacagcatccgcagcaccttgtcc

SEQ ID NO: 25453 - DNA, 31 bp, Homo sapiens
  chr19:8053914-8053945
  hypo
tggctgctgtggggctcggagacacccgtgt

SEQ ID NO: 25454 - DNA, 34 bp, Homo sapiens
  chr19:8057696-8057730
  hypo
ctaataatgggtgtggcggcgccatcacagctca

SEQ ID NO: 25455 - DNA, 31 bp, Homo sapiens
  chr19:8057745-8057776
  hypo
ctgggagatcctcaagcgatcctcacacctc

SEQ ID NO: 25456 - DNA, 15 bp, Homo sapiens
  chr19:8057781-8057796
  hypo
cctgagtagctggga

SEQ ID NO: 25457 - DNA, 31 bp, Homo sapiens
  chr19:8176033-8176064
  hypo
cagaggtccacgttctcggcacattcatccc

SEQ ID NO: 25458 - DNA, 31 bp, Homo sapiens
  chr19:8183831-8183862
  hypo
acttgtagctcccatccgtgttggtgcaagt

SEQ ID NO: 25459 - DNA, 38 bp, Homo sapiens
  chr19:8203389-8203427
  hypo
gaggtctccagcacagcggcccccgaaaagcactgaga

SEQ ID NO: 25460 - DNA, 190 bp, Homo sapiens; identical to SEQ ID NO: 6597
  chr19:8274531-8274721
  hypo

SEQ ID NO: 25461 - DNA, 10 bp, Homo sapiens
  chr19:8475417-8475427
  hypo
catctcaaaa

SEQ ID NO: 25462 - DNA, 40 bp, Homo sapiens
  chr19:8528371-8528411
  hypo
cctccaaagggatgtgcgtaagtatcgtctagttacttat

SEQ ID NO: 25463 - DNA, 36 bp, Homo sapiens
  chr19:8528434-8528470
  hypo
taggactggtttcactcgactcgtttccttttgact

SEQ ID NO: 25464 - DNA, 59 bp, Homo sapiens
  chr19:8528501-8528560
  hypo
agcatgaaaaaagctgcggaagtcctaaacaagcatagtctgagcggaagaccactgaa

SEQ ID NO: 25465 - DNA, 31 bp, Homo sapiens
  chr19:8554604-8554635
  hypo
ccttcccccagtgaagcgctctcaggatcca

SEQ ID NO: 25466 - DNA, 41 bp, Homo sapiens
  chr19:8554690-8554731
  hypo
ttggctgtggaggggcgcgtcctgcccggctgcctgcctgg

SEQ ID NO: 25467 - DNA, 31 bp, Homo sapiens
  chr19:8554738-8554769
  hypo
tgctgttctgatcacccggagccccccttgc

SEQ ID NO: 25468 - DNA, 31 bp, Homo sapiens
  chr19:8555044-8555075
  hypo
ggctgtcctggccccacgcctaccggtctta

SEQ ID NO: 25469 - DNA, 39 bp, Homo sapiens
  chr19:8555098-8555137
  hypo
tttccaggggatctgccgaggaagcgtgacttccatgga

SEQ ID NO: 25470 - DNA, 41 bp, Homo sapiens
  chr19:8575699-8575740
  hypo
gcccccctctccacccgcgcattcctcggccttacccgcgg

SEQ ID NO: 25471 - DNA, 31 bp, Homo sapiens
  chr19:8576371-8576402
  hypo
gagggcgcgtcggagccgccctggggtcttc

SEQ ID NO: 25472 - DNA, 171 bp, Homo sapiens
  chr19:8576622-8576793
  hypo
ccggtgggggcaggggcgggggtcgtgaagggttccagcagcgggaacggcaggcccggcgctgatgcggggtcaacctccggggggcgctccggcgcgggcggctctcggtccagggccgggggtggcggcggggctgggctctgcgcatgctccgcgcaaacatgcagg

SEQ ID NO: 25473 - DNA, 31 bp, Homo sapiens; identical to SEQ ID NO: 6598
  chr19:8579004-8579035
  hypo

SEQ ID NO: 25474 - DNA, 74 bp, Homo sapiens; identical to SEQ ID NO: 6599
  chr19:8579158-8579232
  hypo

SEQ ID NO: 25475 - DNA, 46 bp, Homo sapiens
  chr19:8587384-8587430
  hypo
cacaccaggcactggccgttgccccacgctgcgcttcctctgcatg

SEQ ID NO: 25476 - DNA, 35 bp, Homo sapiens
  chr19:8587554-8587589
  hypo
tgttgtgctctgagggcggacgtgcccggggtcgt

SEQ ID NO: 25477 - DNA, 31 bp, Homo sapiens
  chr19:8606744-8606775
  hypo
cttggggggttgtagccggaggtccccatgc

SEQ ID NO: 25478 - DNA, 26 bp, Homo sapiens
  chr19:8628969-8628995
  hypo
agaagtgggtgctggccgggcatggc

SEQ ID NO: 25479 - DNA, 31 bp, Homo sapiens
  chr19:8934835-8934866
  hypo
gcactacagctgcttccgccttggtctcctg

SEQ ID NO: 25480 - DNA, 31 bp, Homo sapiens
  chr19:8934890-8934921
  hypo
tgccatggtgggaagacgctcaagtggccct

SEQ ID NO: 25481 - DNA, 31 bp, Homo sapiens
  chr19:9099750-9099781
  hypo
agtaatacttagttggcggggggggcgggtc

SEQ ID NO: 25482 - DNA, 31 bp, Homo sapiens; identical to SEQ ID NO: 6600
  chr19:9267730-9267761
  hypo

SEQ ID NO: 25483 - DNA, 31 bp, Homo sapiens; identical to SEQ ID NO: 6602
  chr19:9896567-9896598
  hypo

SEQ ID NO: 25484 - DNA, 39 bp, Homo sapiens
  chr19:9921965-9922004
  hypo
gcatccagccctgtctcggtcacacggtaggtaccaccc

SEQ ID NO: 25485 - DNA, 7 bp, Homo sapiens
  chr19:9937314-9937321
  hypo
cataaat

SEQ ID NO: 25486 - DNA, 35 bp, Homo sapiens
  chr19:9937355-9937390
  hypo
aacagtaaaaatcccacggccggggaaatcaggac

SEQ ID NO: 25487 - DNA, 31 bp, Homo sapiens
  chr19:9937410-9937441
  hypo
ctttaggcataagcacgcgcattaaagacaa

SEQ ID NO: 25488 - DNA, 67 bp, Homo sapiens
  chr19:9937464-9937531
  hypo
ataaccagctcattagcgctcatgcatatggacggcatatcatgaatggaggcggctctcaagcaca

SEQ ID NO: 25489 - DNA, 60 bp, Homo sapiens
  chr19:9960943-9961003
  hypo
ctgagcaactaaagcccggccccaggggacctcccctcccccaagcgctgagtttctaat

SEQ ID NO: 25490 - DNA, 31 bp, Homo sapiens
  chr19:9981318-9981349
  hypo
gcctgctgccaatccccgcactctccccttc

SEQ ID NO: 25491 - DNA, 62 bp, Homo sapiens; identical to SEQ ID NO: 6604
  chr19:10197476-10197538
  hypo

SEQ ID NO: 25492 - DNA, 49 bp, Homo sapiens; identical to SEQ ID NO: 6605
  chr19:10197545-10197594
  hypo

SEQ ID NO: 25493 - DNA, 24 bp, Homo sapiens
  chr19:10253881-10253905
  hypo
gcccaggcactctacccgtttttt

SEQ ID NO: 25494 - DNA, 31 bp, Homo sapiens
  chr19:10287834-10287865
  hypo
gtctagagaacagaaccgcaagatgaaaacc

SEQ ID NO: 25495 - DNA, 34 bp, Homo sapiens
  chr19:10295673-10295707
  hypo
cctgattccccaccagcgccgctcacatatgagc

SEQ ID NO: 25496 - DNA, 38 bp, Homo sapiens; identical to SEQ ID NO: 6609
  chr19:10363216-10363254
  hypo

SEQ ID NO: 25497 - DNA, 76 bp, Homo sapiens; identical to SEQ ID NO: 6611
  chr19:10381114-10381190
  hypo

SEQ ID NO: 25498 - DNA, 31 bp, Homo sapiens
  chr19:10433903-10433934
  hypo
tgcaggatgttgggctcggggaggagtccct

SEQ ID NO: 25499 - DNA, 50 bp, Homo sapiens; identical to SEQ ID NO: 6621
  chr19:10529657-10529707
  hypo

SEQ ID NO: 25500 - DNA, 45 bp, Homo sapiens; identical to SEQ ID NO: 6622
  chr19:10529915-10529960
  hypo

SEQ ID NO: 25501 - DNA, 31 bp, Homo sapiens; identical to SEQ ID NO: 6623
  chr19:10529970-10530001
  hypo

SEQ ID NO: 25502 - DNA, 68 bp, Homo sapiens; identical to SEQ ID NO: 6624
  chr19:10530026-10530094
  hypo

SEQ ID NO: 25503 - DNA, 31 bp, Homo sapiens; identical to SEQ ID NO: 6625
  chr19:10530117-10530148
  hypo

SEQ ID NO: 25504 - DNA, 41 bp, Homo sapiens
  chr19:10665923-10665964
  hypo
cctgcgcatgtggccccgccgcgccccgccccatcacctgt

SEQ ID NO: 25505 - DNA, 31 bp, Homo sapiens
  chr19:10685491-10685522
  hypo
ggggactgaggtgactcgagccaagggacag

SEQ ID NO: 25506 - DNA, 31 bp, Homo sapiens
  chr19:10685523-10685554
  hypo
agagaggggaacccaccgaagtcaaggggag

SEQ ID NO: 25507 - DNA, 31 bp, Homo sapiens
  chr19:10685577-10685608
  hypo
acctggatcccagagacggtgaagtagggga

SEQ ID NO: 25508 - DNA, 43 bp, Homo sapiens
  chr19:10689001-10689044
  hypo
gggagatggaggcaggcgtggcggcaggagcctgtaatcccag

SEQ ID NO: 25509 - DNA, 31 bp, Homo sapiens; identical to SEQ ID NO: 6626
  chr19:10691748-10691779
  hypo

SEQ ID NO: 25510 - DNA, 110 bp, Homo sapiens; identical to SEQ ID NO: 6627
  chr19:10691799-10691909
  hypo

SEQ ID NO: 25511 - DNA, 73 bp, Homo sapiens; identical to SEQ ID NO: 6628
  chr19:10691924-10691997
  hypo

SEQ ID NO: 25512 - DNA, 58 bp, Homo sapiens; identical to SEQ ID NO: 6629
  chr19:10692012-10692070
  hypo

SEQ ID NO: 25513 - DNA, 31 bp, Homo sapiens
  chr19:10726540-10726571
  hypo
taaagatgaaatgaggcgggctggacatggt

SEQ ID NO: 25514 - DNA, 5 bp, Homo sapiens
  chr19:10732738-10732743
  hypo
aggtg

SEQ ID NO: 25515 - DNA, 31 bp, Homo sapiens
  chr19:10732753-10732784
  hypo
caaggcctgaaggcaacggagctgtatggat

SEQ ID NO: 25516 - DNA, 31 bp, Homo sapiens
  chr19:10732800-10732831
  hypo
ttctaagcagagggaccgagcagctagtgca

SEQ ID NO: 25517 - DNA, 38 bp, Homo sapiens
  chr19:10732846-10732884
  hypo
gaccatgcctgctgagcgtgggacgtacccaggaggcc

SEQ ID NO: 25518 - DNA, 31 bp, Homo sapiens
  chr19:10742230-10742261
  hypo
gaggctcaggtggtgacggggaggctctgca

SEQ ID NO: 25519 - DNA, 45 bp, Homo sapiens
  chr19:10742290-10742335
  hypo
gctccatgcagtggcccggagatgcttccccgctatccacgccta

SEQ ID NO: 25520 - DNA, 31 bp, Homo sapiens; identical to SEQ ID NO: 6630
  chr19:10762204-10762235
  hypo

SEQ ID NO: 25521 - DNA, 31 bp, Homo sapiens; identical to SEQ ID NO: 6631
  chr19:10762250-10762281
  hypo

SEQ ID NO: 25522 - DNA, 63 bp, Homo sapiens
  chr19:10823485-10823548
  hypo
tgtttgagaaggacttcggccccatagacccggagtgcacctgccccacgtgccaaaagtagg

SEQ ID NO: 25523 - DNA, 31 bp, Homo sapiens
  chr19:10859212-10859243
  hypo
aggatgaggcagggaccgaggtgggcagagg

SEQ ID NO: 25524 - DNA, 31 bp, Homo sapiens
  chr19:10859264-10859295
  hypo
ttctgctccaacagagcgacagagaagcccc

SEQ ID NO: 25525 - DNA, 31 bp, Homo sapiens
  chr19:10872494-10872525
  hypo
agtgagagacagcagccgatgggcccaccac

SEQ ID NO: 25526 - DNA, 30 bp, Homo sapiens
  chr19:10881731-10881761
  hypo
gtgctggataataggcgtgagccactgtgc

SEQ ID NO: 25527 - DNA, 31 bp, Homo sapiens
  chr19:10940832-10940863
  hypo
catacacccccctggccggcccccagcagtg

SEQ ID NO: 25528 - DNA, 31 bp, Homo sapiens
  chr19:11003116-11003147
  hypo
atggtcctcagatacccggggctgggcagca

SEQ ID NO: 25529 - DNA, 31 bp, Homo sapiens
  chr19:11003214-11003245
  hypo
gagagggaggccaggccgggttagggttctg

SEQ ID NO: 25530 - DNA, 31 bp, Homo sapiens
  chr19:11003247-11003278
  hypo
gtttgggattctcttccgaggctggcattga

SEQ ID NO: 25531 - DNA, 53 bp, Homo sapiens
  chr19:11008200-11008253
  hypo
agagcttcatcagggccgactgcagtgtggcaggccagcgagtagccccaggc

SEQ ID NO: 25532 - DNA, 69 bp, Homo sapiens
  chr19:11008258-11008327
  hypo
ccaggggtggccaaagcgtaacactcagtccgggtttgtgttctttacgttccccgttggagactccac

SEQ ID NO: 25533 - DNA, 25 bp, Homo sapiens
  chr19:11008368-11008393
  hypo
aatgctagctctgggccgggcacgg

SEQ ID NO: 25534 - DNA, 47 bp, Homo sapiens
  chr19:11026630-11026677
  hypo
caactgaggtccccagcggcgttggggtagcccggggcccaccaccc

SEQ ID NO: 25535 - DNA, 134 bp, Homo sapiens
  chr19:11129075-11129209
  hypo
cacaggggaacagccacgagttgccgctccctcccatccctgtcctcccgcctgccacctgagccaggccccgcctcgcccctcactgtcctcgttctctctcacagtcaggaaccttccgtggctggagggtg

SEQ ID NO: 25536 - DNA, 58 bp, Homo sapiens
  chr19:11129718-11129776
  hypo
gtttcctctcttgctacggaggtgcaggcggtggtgggcaggacgtccacacatacct

SEQ ID NO: 25537 - DNA, 31 bp, Homo sapiens
  chr19:11129795-11129826
  hypo
atgctgggtctccagtcgcatggagtctcca

SEQ ID NO: 25538 - DNA, 31 bp, Homo sapiens
  chr19:11129840-11129871
  hypo
tccagtcacatggatccgggagtttggactg

SEQ ID NO: 25539 - DNA, 31 bp, Homo sapiens
  chr19:11159058-11159089
  hypo
caccatcatgcctggccggaatttttgtttt

SEQ ID NO: 25540 - DNA, 31 bp, Homo sapiens
  chr19:11159327-11159358
  hypo
ggtttagctgggcacccgctgctgtgttggg

SEQ ID NO: 25541 - DNA, 31 bp, Homo sapiens
  chr19:11160309-11160340
  hypo
gtccaagtgtcaaggccgcatgtgtgtcagg

SEQ ID NO: 25542 - DNA, 201 bp, Homo sapiens; identical to SEQ ID NO: 6634
  chr19:11200921-11201122
  hypo

SEQ ID NO: 25543 - DNA, 89 bp, Homo sapiens; identical to SEQ ID NO: 6635
  chr19:11201126-11201215
  hypo

SEQ ID NO: 25544 - DNA, 31 bp, Homo sapiens; identical to SEQ ID NO: 6636
  chr19:11201271-11201302
  hypo

SEQ ID NO: 25545 - DNA, 31 bp, Homo sapiens
  chr19:11285561-11285592
  hypo
tttgcaatccccaacacgttccccaaggaag

SEQ ID NO: 25546 - DNA, 40 bp, Homo sapiens
  chr19:11304533-11304573
  hypo
gggcagcgagctcaggcgggggcggcgctgcactgccacg

SEQ ID NO: 25547 - DNA, 172 bp, Homo sapiens; identical to SEQ ID NO: 6639
  chr19:11308101-11308273
  hypo

SEQ ID NO: 25548 - DNA, 31 bp, Homo sapiens
  chr19:11327509-11327540
  hypo
cactcagcccgcagcacgctgggtccctggg

SEQ ID NO: 25549 - DNA, 31 bp, Homo sapiens
  chr19:11327562-11327593
  hypo
catcatctcctgcccacgccctcaaaccttg

SEQ ID NO: 25550 - DNA, 31 bp, Homo sapiens
  chr19:11327619-11327650
  hypo
cagcaaatccaacagacgtcccagctggggg

SEQ ID NO: 25551 - DNA, 31 bp, Homo sapiens
  chr19:11327655-11327686
  hypo
caggtcagtggcccagcgctgcaggagcgcc

SEQ ID NO: 25552 - DNA, 31 bp, Homo sapiens
  chr19:11333606-11333637
  hypo
gatgtcaacattgctccgccttccatccatg

SEQ ID NO: 25553 - DNA, 31 bp, Homo sapiens
  chr19:11333639-11333670
  hypo
atgcccaccctgcccacgcccactcctacct

SEQ ID NO: 25554 - DNA, 55 bp, Homo sapiens
  chr19:11339622-11339677
  hypo
tggaagaagaaccaggcgtgctggaggatggcctcgcgtacggcactgctgctga

SEQ ID NO: 25555 - DNA, 31 bp, Homo sapiens
  chr19:11339685-11339716
  hypo
tgcagagccagctcctcgtgaagcagctggg

SEQ ID NO: 25556 - DNA, 49 bp, Homo sapiens
  chr19:11339724-11339773
  hypo
caggggtcacagagtgcgaggtgccaccccttcccgtaccccctctgga

SEQ ID NO: 25557 - DNA, 31 bp, Homo sapiens
  chr19:11361414-11361445
  hypo
cccaataaacactgatcggattaatacaggt

SEQ ID NO: 25558 - DNA, 43 bp, Homo sapiens; identical to SEQ ID NO: 6640
  chr19:11373071-11373114
  hypo

SEQ ID NO: 25559 - DNA, 31 bp, Homo sapiens; identical to SEQ ID NO: 6641
  chr19:11399747-11399778
  hypo

SEQ ID NO: 25560 - DNA, 175 bp, Homo sapiens; identical to SEQ ID NO: 6642
  chr19:11465992-11466167
  hypo

SEQ ID NO: 25561 - DNA, 31 bp, Homo sapiens; identical to SEQ ID NO: 6643
  chr19:11466333-11466364
  hypo

SEQ ID NO: 25562 - DNA, 31 bp, Homo sapiens; identical to SEQ ID NO: 6644
  chr19:11466379-11466410
  hypo

SEQ ID NO: 25563 - DNA, 23 bp, Homo sapiens
  chr19:11490381-11490404
  hypo
ttttttttttttgagacggagtt

SEQ ID NO: 25564 - DNA, 31 bp, Homo sapiens
  chr19:11515224-11515255
  hypo
aaaaaacaaatgatgacgacaacaacaacaa

SEQ ID NO: 25565 - DNA, 31 bp, Homo sapiens
  chr19:11527679-11527710
  hypo
cctcaccttgctggttcgatagtggaggaag

SEQ ID NO: 25566 - DNA, 31 bp, Homo sapiens
  chr19:11549271-11549302
  hypo
caggtaaagtatacaacggaaggaggccagg

SEQ ID NO: 25567 - DNA, 214 bp, Homo sapiens
  chr19:11594588-11594802
  hypo
agttgtactgcacctccgcagtgtgcttcttcatgtgccagttgagcgacgcgcgctgccggcactggtagccacagatctcgcacctgccgggagcccgtggcgggacggggcggggtcagagtgggcggggcggggcggggccctacaaggccgagcgcaggtggaaccgggcccagacactgcgttggggcgaagccgcccctgggacctg

SEQ ID NO: 25568 - DNA, 31 bp, Homo sapiens
  chr19:11608299-11608330
  hypo
taagggattcccatcccggagggctgccagg

SEQ ID NO: 25569 - DNA, 30 bp, Homo sapiens
  chr19:11666079-11666109
  hypo
aaaaaaaaaaaaagtcgaaataaggttgct

SEQ ID NO: 25570 - DNA, 31 bp, Homo sapiens
  chr19:11699981-11700012
  hypo
tcctcaatgatttgaacgtttgatcatttga

SEQ ID NO: 25571 - DNA, 31 bp, Homo sapiens
  chr19:11700032-11700063
  hypo
cgtgatcaaacattcccgttactctctagac

SEQ ID NO: 25572 - DNA, 53 bp, Homo sapiens
  chr19:11794320-11794373
  hypo
caagagagagagactccgtctcaaaaaaaaaaaaagtgcgtatgtgtatatat

SEQ ID NO: 25573 - DNA, 31 bp, Homo sapiens
  chr19:11794390-11794421
  hypo
ttgctaggtctagaggcgagtgccaccatcc

SEQ ID NO: 25574 - DNA, 31 bp, Homo sapiens
  chr19:11794445-11794476
  hypo
ttgtaaggtggagggtcgtgaactcctggcc

SEQ ID NO: 25575 - DNA, 47 bp, Homo sapiens
  chr19:11926328-11926375
  hypo
tcatctctgacaggttcgtgtgggaggagtagcggtctttggggtcc

SEQ ID NO: 25576 - DNA, 30 bp, Homo sapiens
  chr19:11926399-11926429
  hypo
aaattaaactgaggtacgttaacaattaaa

SEQ ID NO: 25577 - DNA, 50 bp, Homo sapiens
  chr19:11961500-11961550
  hypo
aggaaggaattcaagacgagtcacaaagtgcagtgcgaagagagtttatt

SEQ ID NO: 25578 - DNA, 39 bp, Homo sapiens; identical to SEQ ID NO: 6645
  chr19:12146543-12146582
  hypo

SEQ ID NO: 25579 - DNA, 31 bp, Homo sapiens
  chr19:12628508-12628539
  hypo
ccctaggggaaactttcggtaacaccctgga

SEQ ID NO: 25580 - DNA, 31 bp, Homo sapiens
  chr19:12729991-12730022
  hypo
gaagctgcaggctatccgttccaatggttgt

SEQ ID NO: 25581 - DNA, 31 bp, Homo sapiens
  chr19:12730024-12730055
  hypo
tgtttagactttttcacggttttgtttttgt

SEQ ID NO: 25582 - DNA, 51 bp, Homo sapiens
  chr19:12747554-12747605
  hypo
acctcttgcccctgtgcggccccgccgaactggaaacgtttccagcaggtg

SEQ ID NO: 25583 - DNA, 31 bp, Homo sapiens
  chr19:12757980-12758011
  hypo
cattgcccccacctgccggccccaggtaaga

SEQ ID NO: 25584 - DNA, 31 bp, Homo sapiens
  chr19:12774321-12774352
  hypo
tccctggtttcaaagccggccatgtcccacc

SEQ ID NO: 25585 - DNA, 154 bp, Homo sapiens; identical to SEQ ID NO: 6646
  chr19:12806991-12807145
  hypo

SEQ ID NO: 25586 - DNA, 96 bp, Homo sapiens; identical to SEQ ID NO: 6647
  chr19:12807176-12807272
  hypo

SEQ ID NO: 25587 - DNA, 20 bp, Homo sapiens
  chr19:12835314-12835334
  hypo
tgttttgtttttgagacgga

SEQ ID NO: 25588 - DNA, 58 bp, Homo sapiens
  chr19:12885519-12885577
  hypo
ccctggagccatgcctcgttgaaccaggaggggtctctgggggcgagaaggtgggatg

SEQ ID NO: 25589 - DNA, 43 bp, Homo sapiens
  chr19:12985183-12985226
  hypo
agggctgtggccaaggcggcgctgagcccggtgcaggaacacg

SEQ ID NO: 25590 - DNA, 31 bp, Homo sapiens
  chr19:12985283-12985314
  hypo
tagagcctgcgcggcccggggctaaggctgt

SEQ ID NO: 25591 - DNA, 74 bp, Homo sapiens
  chr19:12986929-12987003
  hypo
ctcctctccctggttccgattcatgtcacccacgcaggtccagggcccttttggggacacgcaccatttggagt

SEQ ID NO: 25592 - DNA, 46 bp, Homo sapiens
  chr19:13007715-13007761
  hypo
ccctacagggtcccttcggctgcctgaacaacgcccggtacggcat

SEQ ID NO: 25593 - DNA, 31 bp, Homo sapiens
  chr19:13010498-13010529
  hypo
atttcccttctgaagtcgttcagatgtgttc

SEQ ID NO: 25594 - DNA, 20 bp, Homo sapiens
  chr19:13016955-13016975
  hypo
cactgcgcccagcctgatgc

SEQ ID NO: 25595 - DNA, 31 bp, Homo sapiens
  chr19:13071905-13071936
  hypo
tccccagtttccctttcgcccagtccctggc

SEQ ID NO: 25596 - DNA, 25 bp, Homo sapiens
  chr19:13071966-13071991
  hypo
gagacggatggagtctcgctccgtt

SEQ ID NO: 25597 - DNA, 31 bp, Homo sapiens
  chr19:13089222-13089253
  hypo
tgtgagcctgggaggcgcggtggctcaggcc

SEQ ID NO: 25598 - DNA, 94 bp, Homo sapiens; identical to SEQ ID NO: 6653
  chr19:13094455-13094549
  hypo

SEQ ID NO: 25599 - DNA, 31 bp, Homo sapiens; identical to SEQ ID NO: 6654
  chr19:13094556-13094587
  hypo

SEQ ID NO: 25600 - DNA, 135 bp, Homo sapiens; identical to SEQ ID NO: 6655
  chr19:13106027-13106162
  hypo

SEQ ID NO: 25601 - DNA, 128 bp, Homo sapiens; identical to SEQ ID NO: 6656
  chr19:13106342-13106470
  hypo

SEQ ID NO: 25602 - DNA, 125 bp, Homo sapiens; identical to SEQ ID NO: 6657
  chr19:13106528-13106653
  hypo

SEQ ID NO: 25603 - DNA, 97 bp, Homo sapiens; identical to SEQ ID NO: 6658
  chr19:13106773-13106870
  hypo

SEQ ID NO: 25604 - DNA, 31 bp, Homo sapiens; identical to SEQ ID NO: 6659
  chr19:13107273-13107304
  hypo

SEQ ID NO: 25605 - DNA, 25 bp, Homo sapiens
  chr19:13115951-13115976
  hypo
tcctgtcctccgtggggctgtctca

SEQ ID NO: 25606 - DNA, 31 bp, Homo sapiens
  chr19:13116014-13116045
  hypo
gagaaagaagagacagcggtcagcagaatgg

SEQ ID NO: 25607 - DNA, 31 bp, Homo sapiens
  chr19:13156411-13156442
  hypo
tggagaccttggcccacggtgctcagcagtc

SEQ ID NO: 25608 - DNA, 31 bp, Homo sapiens
  chr19:13156498-13156529
  hypo
tgtgttgaccccatggcgggcatcaggggac

SEQ ID NO: 25609 - DNA, 31 bp, Homo sapiens
  chr19:13156639-13156670
  hypo
tccatgtcctcgttgccgactgaggcacctg

SEQ ID NO: 25610 - DNA, 44 bp, Homo sapiens
  chr19:13160323-13160367
  hypo
tatgtggtcttcatgtcgggcttctttcacggagcataatgttt

SEQ ID NO: 25611 - DNA, 31 bp, Homo sapiens
  chr19:13177632-13177663
  hypo
aagatcctagaagccccgtgggcccagaccc

SEQ ID NO: 25612 - DNA, 31 bp, Homo sapiens
  chr19:13177665-13177696
  hypo
gccaagcctcatcccccggccctctggctgc

SEQ ID NO: 25613 - DNA, 80 bp, Homo sapiens
  chr19:13177731-13177811
  hypo
ctcctgtctgctgagacggggagaacccctctgtgacccgtccccttagccccccatctatccaccgttcccctcctcag

SEQ ID NO: 25614 - DNA, 40 bp, Homo sapiens
  chr19:13179792-13179832
  hypo
tggccaaggcacctgtcggacacagcggctgggctcaggt

SEQ ID NO: 25615 - DNA, 62 bp, Homo sapiens
  chr19:13186059-13186121
  hypo
cagctgagggttttgccgacttctctgatgtgggcagcttggaggaccgtggcatcacagat

SEQ ID NO: 25616 - DNA, 31 bp, Homo sapiens
  chr19:13186183-13186214
  hypo
atcttggggttgggcacgcagtgagtgccca

SEQ ID NO: 25617 - DNA, 31 bp, Homo sapiens
  chr19:13186478-13186509
  hypo
gatgcaggtatgggtgcgggggatcctgacc

SEQ ID NO: 25618 - DNA, 31 bp, Homo sapiens
  chr19:13197661-13197692
  hypo
atctgtgaggacagaacgaggcactggctgg

SEQ ID NO: 25619 - DNA, 31 bp, Homo sapiens
  chr19:13197713-13197744
  hypo
ctcagggcttgctcaccgataggaggaggag

SEQ ID NO: 25620 - DNA, 31 bp, Homo sapiens
  chr19:13197773-13197804
  hypo
cgggtgcccggaagggcggaactctatccca

SEQ ID NO: 25621 - DNA, 31 bp, Homo sapiens
  chr19:13197842-13197873
  hypo
ggccttcctgagcccacgctgcagtggtcat

SEQ ID NO: 25622 - DNA, 54 bp, Homo sapiens
  chr19:13199712-13199766
  hypo
aagaagaaaaatcattcgagaggtcccaggtagacccggcgtgaaggacaggag

SEQ ID NO: 25623 - DNA, 50 bp, Homo sapiens; identical to SEQ ID NO: 6663
  chr19:13213712-13213762
  hypo

SEQ ID NO: 25624 - DNA, 20 bp, Homo sapiens
  chr19:13213789-13213809
  hypo
cggtccgccacccctcaggg

SEQ ID NO: 25625 - DNA, 82 bp, Homo sapiens; identical to SEQ ID NO: 6665
  chr19:13263792-13263874
  hypo

SEQ ID NO: 25626 - DNA, 69 bp, Homo sapiens; identical to SEQ ID NO: 6666
  chr19:13264168-13264237
  hypo

SEQ ID NO: 25627 - DNA, 31 bp, Homo sapiens; identical to SEQ ID NO: 6667
  chr19:13264554-13264585
  hypo

SEQ ID NO: 25628 - DNA, 136 bp, Homo sapiens; identical to SEQ ID NO: 6668
  chr19:13266907-13267043
  hypo

SEQ ID NO: 25629 - DNA, 63 bp, Homo sapiens; identical to SEQ ID NO: 6669
  chr19:13274018-13274081
  hypo

SEQ ID NO: 25630 - DNA, 56 bp, Homo sapiens
  chr19:13332534-13332590
  hypo
tgggcagtgcctgacacggttggtccccttcctcctgaagccgcccttttaaacat

SEQ ID NO: 25631 - DNA, 31 bp, Homo sapiens
  chr19:13346306-13346337
  hypo
taacagattctctgcacgactacatcacaga

SEQ ID NO: 25632 - DNA, 31 bp, Homo sapiens
  chr19:13346400-13346431
  hypo
gggccagcagcagggacgaggactcaccttg

SEQ ID NO: 25633 - DNA, 67 bp, Homo sapiens
  chr19:13346445-13346512
  hypo
ggtccagagaagaatgcggatggtgtaaccctgacggagaagtttgatgagccgggcagctcggaag

SEQ ID NO: 25634 - DNA, 31 bp, Homo sapiens
  chr19:13838455-13838486
  hypo
ctaagctgtggctggacgaggcagctcatgc

SEQ ID NO: 25635 - DNA, 74 bp, Homo sapiens; identical to SEQ ID NO: 6671
  chr19:13961396-13961470
  hypo

SEQ ID NO: 25636 - DNA, 31 bp, Homo sapiens
  chr19:13965967-13965998
  hypo
gaacatttccatcacccgcaaaagaaatctc

SEQ ID NO: 25637 - DNA, 31 bp, Homo sapiens
  chr19:13994001-13994032
  hypo
tgaggtgcctgaccctcgctgcccacctagg

SEQ ID NO: 25638 - DNA, 31 bp, Homo sapiens
  chr19:13997267-13997298
  hypo
tgcggtgaagtggagtcgtctaccttggctg

SEQ ID NO: 25639 - DNA, 31 bp, Homo sapiens
  chr19:14000114-14000145
  hypo
atgaggcaggtggtctcgctgccctgccagc

SEQ ID NO: 25640 - DNA, 31 bp, Homo sapiens
  chr19:14000163-14000194
  hypo
atgccctgctgagccccgggctcctggagag

SEQ ID NO: 25641 - DNA, 31 bp, Homo sapiens
  chr19:14000376-14000407
  hypo
cccatcatggactctccgctcccaggtgcca

SEQ ID NO: 25642 - DNA, 31 bp, Homo sapiens
  chr19:14000961-14000992
  hypo
tgttccttttggccaccgtcacctggaaccc

SEQ ID NO: 25643 - DNA, 31 bp, Homo sapiens
  chr19:14001000-14001031
  hypo
tcaggcttgctgtcatcggccccttgttctg

SEQ ID NO: 25644 - DNA, 41 bp, Homo sapiens
  chr19:14001045-14001086
  hypo
ctggccctctgtgaggcggacaaccccgtccccctgtctgg

SEQ ID NO: 25645 - DNA, 38 bp, Homo sapiens
  chr19:14001099-14001137
  hypo
tgagaatccccactgccgggcaccgcctgcacagggct

SEQ ID NO: 25646 - DNA, 31 bp, Homo sapiens
  chr19:14001140-14001171
  hypo
gctgctctgctcagggcgggcactgtctgcc

SEQ ID NO: 25647 - DNA, 31 bp, Homo sapiens
  chr19:14029921-14029952
  hypo
taacacctgtggccctcgcagcaataccaag

SEQ ID NO: 25648 - DNA, 31 bp, Homo sapiens
  chr19:14030022-14030053
  hypo
ttgcccctgtaggcctcgccccagtaggccc

SEQ ID NO: 25649 - DNA, 89 bp, Homo sapiens
  chr19:14066987-14067076
  hypo
accaccgtgacatctacgtcagcaccgtggccgtgccaccgccaggccgctgtgctgcttgccaggatgccagccgagcccacccaggt

SEQ ID NO: 25650 - DNA, 31 bp, Homo sapiens; identical to SEQ ID NO: 6674
  chr19:14074199-14074230
  hypo

SEQ ID NO: 25651 - DNA, 31 bp, Homo sapiens
  chr19:14107952-14107983
  hypo
ctggcaagggggaagccggcccaagcagccc

SEQ ID NO: 25652 - DNA, 51 bp, Homo sapiens
  chr19:14181304-14181355
  hypo
tgtggcaggtgcctcccgccaggagaacggcgccagcgtgatcctccatga

SEQ ID NO: 25653 - DNA, 36 bp, Homo sapiens
  chr19:14181475-14181511
  hypo
ggagaaccagagcctgcgtggcgtggtacaggagct

SEQ ID NO: 25654 - DNA, 31 bp, Homo sapiens; identical to SEQ ID NO: 6675
  chr19:14205671-14205702
  hypo

SEQ ID NO: 25655 - DNA, 52 bp, Homo sapiens
  chr19:14209035-14209087
  hypo
atttatatcatgtccacgcccagacaaaacaaaggcacggtgtttgaagtca

SEQ ID NO: 25656 - DNA, 31 bp, Homo sapiens
  chr19:14209102-14209133
  hypo
tttggtggggaggtgacgtgtcaagagaggg

SEQ ID NO: 25657 - DNA, 31 bp, Homo sapiens
  chr19:14262993-14263024
  hypo
aaggcaaggatgagctcgaaatgcaagtcca

SEQ ID NO: 25658 - DNA, 49 bp, Homo sapiens; identical to SEQ ID NO: 6676
  chr19:14316560-14316609
  hypo

SEQ ID NO: 25659 - DNA, 31 bp, Homo sapiens
  chr19:14352488-14352519
  hypo
ccccaagtgacttgcccgcttcagtctccta

SEQ ID NO: 25660 - DNA, 31 bp, Homo sapiens
  chr19:14552118-14552149
  hypo
caccactgacctgggccgcagcctgggcccc

SEQ ID NO: 25661 - DNA, 58 bp, Homo sapiens; identical to SEQ ID NO: 6677
  chr19:14607123-14607181
  hypo

SEQ ID NO: 25662 - DNA, 31 bp, Homo sapiens
  chr19:14617205-14617236
  hypo
gcggcagagattggagcgatgcagctacaag

SEQ ID NO: 25663 - DNA, 31 bp, Homo sapiens
  chr19:14630489-14630520
  hypo
tccccagtgcctggaacgcagtgagaacctc

SEQ ID NO: 25664 - DNA, 31 bp, Homo sapiens
  chr19:14815853-14815884
  hypo
gtcttttgccaggggccggggctgttcctga

SEQ ID NO: 25665 - DNA, 80 bp, Homo sapiens
  chr19:14815915-14815995
  hypo
ggagacaccattgactcgagaggaccggccagctctccaggagccgccttggtctctgggatgcacggtaagcctgggag

SEQ ID NO: 25666 - DNA, 31 bp, Homo sapiens
  chr19:15221469-15221500
  hypo
agcgggagcggccccccggccaggtgcccct

SEQ ID NO: 25667 - DNA, 31 bp, Homo sapiens
  chr19:15281704-15281735
  hypo
cactttccctccccagcgcctggctctgaag

SEQ ID NO: 25668 - DNA, 31 bp, Homo sapiens
  chr19:15285091-15285122
  hypo
agcagggccggcacctcgctggcacaatcca

SEQ ID NO: 25669 - DNA, 314 bp, Homo sapiens; identical to SEQ ID NO: 6678
  chr19:15288400-15288714
  hypo

SEQ ID NO: 25670 - DNA, 31 bp, Homo sapiens; identical to SEQ ID NO: 6679
  chr19:15288801-15288832
  hypo

SEQ ID NO: 25671 - DNA, 31 bp, Homo sapiens
  chr19:15337909-15337940
  hypo
agcgactttggcaaagcgcagagtgaggccc

SEQ ID NO: 25672 - DNA, 31 bp, Homo sapiens
  chr19:15364849-15364880
  hypo
caagttctgggagtgccgtctctgggctcta

SEQ ID NO: 25673 - DNA, 40 bp, Homo sapiens
  chr19:15364952-15364992
  hypo
gtcacctaacctgtttcggagtcttcgctgtcagaggagc

SEQ ID NO: 25674 - DNA, 61 bp, Homo sapiens
  chr19:16025605-16025666
  hypo
gtcctgcgtgcaacatcgggagatgaccgggactgggggatgcaaccgcaggctctcctta

SEQ ID NO: 25675 - DNA, 31 bp, Homo sapiens
  chr19:16025684-16025715
  hypo
ggcagctgggccaggtcgtccctaagaaaac

SEQ ID NO: 25676 - DNA, 31 bp, Homo sapiens
  chr19:16025762-16025793
  hypo
cttctctgtttccaagcgagactttttctcc

SEQ ID NO: 25677 - DNA, 54 bp, Homo sapiens
  chr19:16147949-16148003
  hypo
tgtcttgagctagggacggcctggccacaccctgagccccggaggttcccagag

SEQ ID NO: 25678 - DNA, 162 bp, Homo sapiens; identical to SEQ ID NO: 6685
  chr19:16186890-16187052
  hypo

SEQ ID NO: 25679 - DNA, 31 bp, Homo sapiens; identical to SEQ ID NO: 6686
  chr19:16187105-16187136
  hypo

SEQ ID NO: 25680 - DNA, 31 bp, Homo sapiens; identical to SEQ ID NO: 6687
  chr19:16187138-16187169
  hypo

SEQ ID NO: 25681 - DNA, 343 bp, Homo sapiens; identical to SEQ ID NO: 6688
  chr19:16187276-16187619
  hypo

SEQ ID NO: 25682 - DNA, 15 bp, Homo sapiens
  chr19:16187640-16187655
  hypo
cgacccacatccctg

SEQ ID NO: 25683 - DNA, 240 bp, Homo sapiens; identical to SEQ ID NO: 6690
  chr19:16187798-16188038
  hypo

SEQ ID NO: 25684 - DNA, 37 bp, Homo sapiens; identical to SEQ ID NO: 6692
  chr19:16222616-16222653
  hypo

SEQ ID NO: 25685 - DNA, 57 bp, Homo sapiens
  chr19:16226373-16226430
  hypo
aaagtgctttgtgaaccgctcaacaccgcgtagaccctgttgcgctttaatactttg

SEQ ID NO: 25686 - DNA, 31 bp, Homo sapiens
  chr19:16226502-16226533
  hypo
caggtgagtcaaggtgcgtgcaggactgggg

SEQ ID NO: 25687 - DNA, 31 bp, Homo sapiens
  chr19:16228440-16228471
  hypo
ggaaaggggatgaaagcgggaggtgagagac

SEQ ID NO: 25688 - DNA, 31 bp, Homo sapiens
  chr19:16232443-16232474
  hypo
tatcacagtggctgaacggtgagaaagccag

SEQ ID NO: 25689 - DNA, 57 bp, Homo sapiens
  chr19:16232677-16232734
  hypo
actgtgcattggttaccgaagcctagatgtttctgtggagcccgtgccccaactcct

SEQ ID NO: 25690 - DNA, 31 bp, Homo sapiens
  chr19:16232871-16232902
  hypo
gaaagacacaggaagccggttcttccaggtg

SEQ ID NO: 25691 - DNA, 60 bp, Homo sapiens
  chr19:16243051-16243111
  hypo
ggagtcaaaatcacaccggaccagcagaagaggagcagctttttccgatgtgttcttctg

SEQ ID NO: 25692 - DNA, 88 bp, Homo sapiens
  chr19:16243191-16243279
  hypo
gccctcccacctccaacgccccgcccacgccgcggccaccgggcccacggccaccagaatgcaattgagaaatcgtttattttagtaa

SEQ ID NO: 25693 - DNA, 31 bp, Homo sapiens
  chr19:16337581-16337612
  hypo
gtcacccggcctcacacgccaggtcctgcac

SEQ ID NO: 25694 - DNA, 31 bp, Homo sapiens
  chr19:16338020-16338051
  hypo
agcccttggggagccccgagccatcccccag

SEQ ID NO: 25695 - DNA, 57 bp, Homo sapiens
  chr19:16472530-16472587
  hypo
ccagggaagctgcaagcggaagggagtggggtggcccggaggcggaggactcaactt

SEQ ID NO: 25696 - DNA, 126 bp, Homo sapiens
  chr19:16485581-16485707
  hypo
cacccatatgagaatacgtgcacatgtgtgtaaatgtgtgtacacgtatgtaagcacagagtgtgcatgcccgggtgtgtatgagcacacacgcacgcatatgtgtgtgcacgtttgcatgcatgc

SEQ ID NO: 25697 - DNA, 31 bp, Homo sapiens
  chr19:16495005-16495036
  hypo
cctgcctgggggctgccgagaagggacagag

SEQ ID NO: 25698 - DNA, 4 bp, Homo sapiens
  chr19:16550466-16550470
  hypo
actc

SEQ ID NO: 25699 - DNA, 31 bp, Homo sapiens
  chr19:16550471-16550502
  hypo
agcctgggcaacagagcgaggctcaaaaaat

SEQ ID NO: 25700 - DNA, 31 bp, Homo sapiens
  chr19:16590107-16590138
  hypo
taagccccaccgggtgcgatggctcgtgcct

SEQ ID NO: 25701 - DNA, 62 bp, Homo sapiens
  chr19:16638586-16638648
  hypo
aaacagaacaccctgccgtgccttgcagcgttaaactcccctgcactcgcaggacaatggtg

SEQ ID NO: 25702 - DNA, 69 bp, Homo sapiens
  chr19:16638667-16638736
  hypo
ccaaaccatcaaagctcggggaagggacgtgaagacctgtcacttgacctgtcccggagccacaggaag

SEQ ID NO: 25703 - DNA, 25 bp, Homo sapiens
  chr19:16679842-16679867
  hypo
ttttttttttttgagacggagtctc

SEQ ID NO: 25704 - DNA, 31 bp, Homo sapiens
  chr19:16715769-16715800
  hypo
acctacctgcagtactcgacagcacccacca

SEQ ID NO: 25705 - DNA, 31 bp, Homo sapiens
  chr19:16835421-16835452
  hypo
gctcaggtgggaggatcgtttgttggcagga

SEQ ID NO: 25706 - DNA, 10 bp, Homo sapiens
  chr19:16835509-16835519
  hypo
atattttttt

SEQ ID NO: 25707 - DNA, 31 bp, Homo sapiens
  chr19:17160622-17160653
  hypo
aatagctacagtgctacggtagtatataaag

SEQ ID NO: 25708 - DNA, 31 bp, Homo sapiens
  chr19:17335975-17336006
  hypo
aaaaaaatgccaagcacgattatgggatcac

SEQ ID NO: 25709 - DNA, 30 bp, Homo sapiens
  chr19:17336185-17336215
  hypo
ggctaggaaggaggtcgaggccacagtgag

SEQ ID NO: 25710 - DNA, 99 bp, Homo sapiens; identical to SEQ ID NO: 6693
  chr19:17355756-17355855
  hypo

SEQ ID NO: 25711 - DNA, 57 bp, Homo sapiens
  chr19:17369110-17369167
  hypo
tcactcatgggggcttcgtctcctgctcctgagtcggcctcccgcagagcaagcaga

SEQ ID NO: 25712 - DNA, 271 bp, Homo sapiens; identical to SEQ ID NO: 6694
  chr19:17392542-17392813
  hypo

SEQ ID NO: 25713 - DNA, 48 bp, Homo sapiens; identical to SEQ ID NO: 6695
  chr19:17392819-17392867
  hypo

SEQ ID NO: 25714 - DNA, 58 bp, Homo sapiens; identical to SEQ ID NO: 6696
  chr19:17392868-17392926
  hypo

SEQ ID NO: 25715 - DNA, 48 bp, Homo sapiens
  chr19:17423020-17423068
  hypo
ctcgccactcagccaccgggccctgtgtgagcccggccagggttcagt

SEQ ID NO: 25716 - DNA, 34 bp, Homo sapiens
  chr19:17423126-17423160
  hypo
tgtaagcagatgacctcgccggggtgtgagggag

SEQ ID NO: 25717 - DNA, 39 bp, Homo sapiens
  chr19:17423161-17423200
  hypo
ctctgggagaggctcccgaagtgtcgggggaacaaaggg

SEQ ID NO: 25718 - DNA, 31 bp, Homo sapiens
  chr19:17447345-17447376
  hypo
aaaatattgagcagggcgaggtaagggggta

SEQ ID NO: 25719 - DNA, 44 bp, Homo sapiens
  chr19:17449441-17449485
  hypo
ggcggaccttatccacgcggaaacagaggcgcagcggcggcagg

SEQ ID NO: 25720 - DNA, 31 bp, Homo sapiens
  chr19:17648069-17648100
  hypo
tatgactcatatttatcgagcaactgcccat

SEQ ID NO: 25721 - DNA, 50 bp, Homo sapiens
  chr19:17688041-17688091
  hypo
gctcccaccaagacaccggacaagatgggcttcgacgaggtgagctgggc

SEQ ID NO: 25722 - DNA, 31 bp, Homo sapiens
  chr19:17759136-17759167
  hypo
atggtgccccacccatcgccttgcccttcag

SEQ ID NO: 25723 - DNA, 80 bp, Homo sapiens
  chr19:17759173-17759253
  hypo
cccgccatgcaagccccggggctccccacgccaacccgtggccctgcgctcaggccctgcgctcacgctgcaggcagtcg

SEQ ID NO: 25724 - DNA, 31 bp, Homo sapiens
  chr19:17759328-17759359
  hypo
ccccacagcagcccctcgcactcgtagcagt

SEQ ID NO: 25725 - DNA, 31 bp, Homo sapiens
  chr19:17986849-17986880
  hypo
gcttgtgggcgggccccgccaggtgctcacg

SEQ ID NO: 25726 - DNA, 52 bp, Homo sapiens
  chr19:17994698-17994750
  hypo
tgtgggtggccttgggcgccacgctgtacccacccagcgagcagaccatgag

SEQ ID NO: 25727 - DNA, 31 bp, Homo sapiens
  chr19:18041195-18041226
  hypo
acctgctgggaattggcgaaaactagcagtc

SEQ ID NO: 25728 - DNA, 46 bp, Homo sapiens
  chr19:18054322-18054368
  hypo
ggaggaggcggccgaccggcacccagaaagacgcatgcgggcagcc

SEQ ID NO: 25729 - DNA, 31 bp, Homo sapiens
  chr19:18054809-18054840
  hypo
agtgggtggggagaggcgggcgaagaatggg

SEQ ID NO: 25730 - DNA, 31 bp, Homo sapiens; identical to SEQ ID NO: 6704
  chr19:18119199-18119230
  hypo

SEQ ID NO: 25731 - DNA, 31 bp, Homo sapiens
  chr19:18123644-18123675
  hypo
atggctagatggggagcggtatttctgaatt

SEQ ID NO: 25732 - DNA, 67 bp, Homo sapiens
  chr19:18123740-18123807
  hypo
tgggggacatgaggccgcgctgcatgacttgctgaacggcacagggacccctcgaggaacaaggttg

SEQ ID NO: 25733 - DNA, 31 bp, Homo sapiens
  chr19:18123850-18123881
  hypo
caagggctgacctccccgactgcatcaaagt

SEQ ID NO: 25734 - DNA, 71 bp, Homo sapiens
  chr19:18123890-18123961
  hypo
aagtctcagagtgaggcgggggcctttcggatatcacatgggacagaggaagagcccggctggaatctgac

SEQ ID NO: 25735 - DNA, 48 bp, Homo sapiens
  chr19:18207918-18207966
  hypo
gggtgagatcctcactcgcctcaccctagaacccgttctgctgtgtgt

SEQ ID NO: 25736 - DNA, 3 bp, Homo sapiens
  chr19:18208001-18208004
  hypo
ttt

SEQ ID NO: 25737 - DNA, 38 bp, Homo sapiens
  chr19:18241248-18241286
  hypo
gtgcctgctggggcctcgatctccggtcccagcaagcc

SEQ ID NO: 25738 - DNA, 65 bp, Homo sapiens
  chr19:18241290-18241355
  hypo
cctctgtccccagggccgtctacctggtgcggcaccgtgacacacggcagcgctttgccatcaag

SEQ ID NO: 25739 - DNA, 41 bp, Homo sapiens; identical to SEQ ID NO: 6705
  chr19:18271956-18271997
  hypo

SEQ ID NO: 25740 - DNA, 65 bp, Homo sapiens
  chr19:18273253-18273318
  hypo
tggcaccttcctagtccgagatgcttctagcaagatccagggcgagtacacgctgaccctcaggt

SEQ ID NO: 25741 - DNA, 31 bp, Homo sapiens
  chr19:18277901-18277932
  hypo
aaccctgaggtctctgcgccaccccacccct

SEQ ID NO: 25742 - DNA, 9 bp, Homo sapiens
  chr19:18435013-18435022
  hypo
tttttcttg

SEQ ID NO: 25743 - DNA, 31 bp, Homo sapiens
  chr19:18435084-18435115
  hypo
tccttaattacatctgcgaagaccctgttct

SEQ ID NO: 25744 - DNA, 50 bp, Homo sapiens
  chr19:18556528-18556578
  hypo
gtcaggtcaccagttccgaaaggtggcaggtggggcggctacgtccaagg

SEQ ID NO: 25745 - DNA, 47 bp, Homo sapiens
  chr19:18591738-18591785
  hypo
cagcccgcagcagatatttctatctgcattcacgaaggtgcatagaa

SEQ ID NO: 25746 - DNA, 38 bp, Homo sapiens
  chr19:18591843-18591881
  hypo
aactgtggcctctacacgctccacgcaccttgcttgct

SEQ ID NO: 25747 - DNA, 31 bp, Homo sapiens
  chr19:18835064-18835095
  hypo
tgttgttctctgcactcgctaggagtcaatt

SEQ ID NO: 25748 - DNA, 60 bp, Homo sapiens
  chr19:18836820-18836880
  hypo
tcccgactcatgtaccgcgccctcgatcttctctggagttgaggccgggccctggaacag

SEQ ID NO: 25749 - DNA, 107 bp, Homo sapiens
  chr19:18870969-18871076
  hypo
gcagctccagcagcaccggcaacctcgcggccaacctgacgcacctgggcatcggtggcgccggccagggtaaggcagggacactccgccctcggacagagcactgg

SEQ ID NO: 25750 - DNA, 31 bp, Homo sapiens
  chr19:18880024-18880055
  hypo
agcccgttgggcacagcgcctggggcccagg

SEQ ID NO: 25751 - DNA, 31 bp, Homo sapiens; identical to SEQ ID NO: 6713
  chr19:18880083-18880114
  hypo

SEQ ID NO: 25752 - DNA, 31 bp, Homo sapiens
  chr19:18883943-18883974
  hypo
tgatgcaggaggcaggcggctcatggaggta

SEQ ID NO: 25753 - DNA, 31 bp, Homo sapiens
  chr19:18895720-18895751
  hypo
aggctcggccacagcacggaaggggttcgcc

SEQ ID NO: 25754 - DNA, 31 bp, Homo sapiens
  chr19:18895772-18895803
  hypo
tgcttccacatgaccacgtagaagctggagc

SEQ ID NO: 25755 - DNA, 43 bp, Homo sapiens
  chr19:18957752-18957795
  hypo
agatcgcaccactgcactccagcctgagcgacagtcacggcag

SEQ ID NO: 25756 - DNA, 31 bp, Homo sapiens
  chr19:18988954-18988985
  hypo
agagggcctggctggtcggcaccttccaggg

SEQ ID NO: 25757 - DNA, 43 bp, Homo sapiens
  chr19:18989988-18990031
  hypo
gggacagggattgggacgaggacgggaccgccactgtggagga

SEQ ID NO: 25758 - DNA, 31 bp, Homo sapiens
  chr19:18997500-18997531
  hypo
ctccagcctccatctgcggcttcctggcccc

SEQ ID NO: 25759 - DNA, 31 bp, Homo sapiens
  chr19:19004328-19004359
  hypo
ctctcgggcatcttggcggcatctctgggct

SEQ ID NO: 25760 - DNA, 23 bp, Homo sapiens
  chr19:19147971-19147994
  hypo
cgacagagcgagactctgtctca

SEQ ID NO: 25761 - DNA, 31 bp, Homo sapiens
  chr19:19214216-19214247
  hypo
tataaggacaccaattcgcatttagggccca

SEQ ID NO: 25762 - DNA, 87 bp, Homo sapiens
  chr19:19447943-19448030
  hypo
ttcttacattcccaaacgtgactatttcctttcagaattccgttgatgcagcaaagccgctgctgcggaaggcgatccagatctcac

SEQ ID NO: 25763 - DNA, 31 bp, Homo sapiens
  chr19:19605784-19605815
  hypo
ttaattttgtgttatacgtttgccttgttag

SEQ ID NO: 25764 - DNA, 66 bp, Homo sapiens
  chr19:19674353-19674419
  hypo
gagagaggccagagtccgcagggtgaggaaggcgtccccagcgctgggcagcgggaagggtccaga

SEQ ID NO: 25765 - DNA, 31 bp, Homo sapiens
  chr19:19723143-19723174
  hypo
tctgaaaacaaacttacggcaacaaaacatg

SEQ ID NO: 25766 - DNA, 51 bp, Homo sapiens
  chr19:19735077-19735128
  hypo
tccatcagtgggtggccgttctcgggaagcatgatgcgagtgctggcacct

SEQ ID NO: 25767 - DNA, 55 bp, Homo sapiens
  chr19:19766966-19767021
  hypo
tctgggctgaggtcttcgatgggctcctggggaggaagatcgtgaatctggatgg

SEQ ID NO: 25768 - DNA, 31 bp, Homo sapiens
  chr19:19769451-19769482
  hypo
ctccggctcccagccacgtgtcagcatttgc

SEQ ID NO: 25769 - DNA, 5 bp, Homo sapiens
  chr19:19775582-19775587
  hypo
tctcc

SEQ ID NO: 25770 - DNA, 25 bp, Homo sapiens
  chr19:19842850-19842875
  hypo
ggcgacagagcgagactccgtcaca

SEQ ID NO: 25771 - DNA, 19 bp, Homo sapiens
  chr19:21513268-21513287
  hypo
tttttatttttttagacgg

SEQ ID NO: 25772 - DNA, 15 bp, Homo sapiens
  chr19:21513406-21513421
  hypo
cgctggccaccatgc

SEQ ID NO: 25773 - DNA, 70 bp, Homo sapiens
  chr19:21513594-21513664
  hypo
acctttgaaactaactcgtattttacctttctagcacatcgcagttcagaccaggcgcattccaggcagc

SEQ ID NO: 25774 - DNA, 31 bp, Homo sapiens; identical to SEQ ID NO: 6716
  chr19:21664417-21664448
  hypo

SEQ ID NO: 25775 - DNA, 40 bp, Homo sapiens
  chr19:22239553-22239593
  hypo
acaggtgtaagccaccgcgcccggccgaatttagaaattt

SEQ ID NO: 25776 - DNA, 31 bp, Homo sapiens
  chr19:23083159-23083190
  hypo
attcctttggccttcacgttttcgggagctt

SEQ ID NO: 25777 - DNA, 31 bp, Homo sapiens
  chr19:23084330-23084361
  hypo
ccacctctccgtttaccgccttctcccatca

SEQ ID NO: 25778 - DNA, 31 bp, Homo sapiens
  chr19:23453187-23453218
  hypo
tatatttcagagtcaacgggtaacattttat

SEQ ID NO: 25779 - DNA, 31 bp, Homo sapiens
  chr19:23694934-23694965
  hypo
gggcctgggaatcccacggacaaaaagctct

SEQ ID NO: 25780 - DNA, 37 bp, Homo sapiens
  chr19:24270270-24270307
  hypo
ttcagaaataagatggcggctgcgctgacagccagac

SEQ ID NO: 25781 - DNA, 31 bp, Homo sapiens
  chr19:24270316-24270347
  hypo
tcctgtttcttccctgcgcagtgactgtgcc

SEQ ID NO: 25782 - DNA, 52 bp, Homo sapiens
  chr19:24270365-24270417
  hypo
tgggcagctgtggacccgcagccccgcgtctctcccagattgttcagggacc

SEQ ID NO: 25783 - DNA, 31 bp, Homo sapiens
  chr19:24273700-24273731
  hypo
agtttaggaagtttctcggacatgttttttt

SEQ ID NO: 25784 - DNA, 31 bp, Homo sapiens
  chr19:30561932-30561963
  hypo
tcctggcctagcagagcgttttattattatg

SEQ ID NO: 25785 - DNA, 31 bp, Homo sapiens
  chr19:30562031-30562062
  hypo
aataaagcacccttgccgctcaagggaaaaa

SEQ ID NO: 25786 - DNA, 31 bp, Homo sapiens; identical to SEQ ID NO: 6717
  chr19:30730220-30730251
  hypo

SEQ ID NO: 25787 - DNA, 31 bp, Homo sapiens
  chr19:32835110-32835141
  hypo
atctcttaccttttatcgaaaaaaaaattac

SEQ ID NO: 25788 - DNA, 44 bp, Homo sapiens
  chr19:32835204-32835248
  hypo
attctaactttgcagccgggcgcggtggctcacgccggtaaccc

SEQ ID NO: 25789 - DNA, 56 bp, Homo sapiens
  chr19:32850571-32850627
  hypo
taacatggctacttttcgttggatccatgtctcctgcgtttcggagagctgcatat

SEQ ID NO: 25790 - DNA, 67 bp, Homo sapiens
  chr19:32850692-32850759
  hypo
agcacttaaaaatttgcggccgcttttcctttcttgttgcgttggtagctgacgtttagtggtaaac

SEQ ID NO: 25791 - DNA, 31 bp, Homo sapiens
  chr19:32898334-32898365
  hypo
ttaattcttcaaaatccggttgtcaacacat

SEQ ID NO: 25792 - DNA, 31 bp, Homo sapiens
  chr19:32898369-32898400
  hypo
tatggagtatctcccacgtggccacttctgt

SEQ ID NO: 25793 - DNA, 31 bp, Homo sapiens
  chr19:32898407-32898438
  hypo
actgaagacctactaccgcctatggaagtag

SEQ ID NO: 25794 - DNA, 43 bp, Homo sapiens
  chr19:32898447-32898490
  hypo
tacaactgtgtagttacgtgacgcattgcgtggtaactgctat

SEQ ID NO: 25795 - DNA, 31 bp, Homo sapiens
  chr19:32898498-32898529
  hypo
gagggagaagatcagccggaactggaatgtc

SEQ ID NO: 25796 - DNA, 31 bp, Homo sapiens
  chr19:33334782-33334813
  hypo
ggagtgaggcgcctgacgctgatgtaagaaa

SEQ ID NO: 25797 - DNA, 31 bp, Homo sapiens
  chr19:33357609-33357640
  hypo
aagtgctgcagcccatcgtctacctcctggg

SEQ ID NO: 25798 - DNA, 82 bp, Homo sapiens
  chr19:33365574-33365656
  hypo
gtagagtgctgacacacgggtggactgtggaacaaggggatggcggcccagagcacccagcacagacgcggggagccagcct

SEQ ID NO: 25799 - DNA, 36 bp, Homo sapiens
  chr19:33365689-33365725
  hypo
aggaagcagcctcatgcgctccgtaggtttgaagtc

SEQ ID NO: 25800 - DNA, 31 bp, Homo sapiens
  chr19:33488746-33488777
  hypo
gaaagagcagcaggtgcgagggccctggggc

SEQ ID NO: 25801 - DNA, 31 bp, Homo sapiens
  chr19:33515046-33515077
  hypo
aaactgcacaggaggccgggtgtggtggctc

SEQ ID NO: 25802 - DNA, 69 bp, Homo sapiens; identical to SEQ ID NO: 6719
  chr19:33555490-33555559
  hypo

SEQ ID NO: 25803 - DNA, 35 bp, Homo sapiens; identical to SEQ ID NO: 6720
  chr19:33555747-33555782
  hypo

SEQ ID NO: 25804 - DNA, 86 bp, Homo sapiens; identical to SEQ ID NO: 6721
  chr19:33555883-33555969
  hypo

SEQ ID NO: 25805 - DNA, 31 bp, Homo sapiens
  chr19:33556996-33557027
  hypo
atatcaaggctggcctcgaactcccgacctt

SEQ ID NO: 25806 - DNA, 41 bp, Homo sapiens
  chr19:33557038-33557079
  hypo
actcgtctcgctctgtcgcccaggctgaagtgcaatggcgc

SEQ ID NO: 25807 - DNA, 38 bp, Homo sapiens
  chr19:33557318-33557356
  hypo
ggagcacggttcttaaccacctccgttttctaggctgc

SEQ ID NO: 25808 - DNA, 120 bp, Homo sapiens
  chr19:33693686-33693806
  hypo
tccccccactgcaacccgcatcccaaccaaagatgggccggcctttctcggcctcctctcccgacagcggcctgcagtgggaagctggagcagcacacggagcggcgtggggtcatctac

SEQ ID NO: 25809 - DNA, 31 bp, Homo sapiens
  chr19:33694485-33694516
  hypo
ccacgggcctctgtggcgaggtgcccaagct

SEQ ID NO: 25810 - DNA, 31 bp, Homo sapiens
  chr19:33696683-33696714
  hypo
ggaggccgcccagggccgcctcactgtggcc

SEQ ID NO: 25811 - DNA, 31 bp, Homo sapiens
  chr19:33697266-33697297
  hypo
aggtgggcgctgtgcccgcagccaggggacc

SEQ ID NO: 25812 - DNA, 57 bp, Homo sapiens
  chr19:33697589-33697646
  hypo
agggcctcattccacccgtggaggactttcctgtctacagtgcgtcccaggtgagcc

SEQ ID NO: 25813 - DNA, 31 bp, Homo sapiens
  chr19:33697776-33697807
  hypo
ggacaaggtggtctctcgggtctcaggtccc

SEQ ID NO: 25814 - DNA, 31 bp, Homo sapiens
  chr19:33698373-33698404
  hypo
accctgggcccccactcgccagagccactgg

SEQ ID NO: 25815 - DNA, 62 bp, Homo sapiens
  chr19:33698406-33698468
  hypo
gtctgcaggaaccccccgcccccctgctccccaatgctggaggccagcgatgatgaggccct

SEQ ID NO: 25816 - DNA, 31 bp, Homo sapiens
  chr19:33772907-33772938
  hypo
aggccacgcttgcagccgcccttgtcccagt

SEQ ID NO: 25817 - DNA, 59 bp, Homo sapiens
  chr19:33772982-33773041
  hypo
gacctgaagagactgccgggcactagaggggtccatgtgggacccggaacccaaaggat

SEQ ID NO: 25818 - DNA, 31 bp, Homo sapiens
  chr19:33773067-33773098
  hypo
tggagggcccctgacccgtctcagcggccgt

SEQ ID NO: 25819 - DNA, 71 bp, Homo sapiens; identical to SEQ ID NO: 6725
  chr19:33792586-33792657
  hypo

SEQ ID NO: 25820 - DNA, 461 bp, Homo sapiens; identical to SEQ ID NO: 6726
  chr19:33792664-33793125
  hypo

SEQ ID NO: 25821 - DNA, 44 bp, Homo sapiens; identical to SEQ ID NO: 6727
  chr19:33793282-33793326
  hypo

SEQ ID NO: 25822 - DNA, 298 bp, Homo sapiens; identical to SEQ ID NO: 6728
  chr19:33793356-33793654
  hypo

SEQ ID NO: 25823 - DNA, 38 bp, Homo sapiens; identical to SEQ ID NO: 6729
  chr19:33793669-33793707
  hypo

SEQ ID NO: 25824 - DNA, 132 bp, Homo sapiens; identical to SEQ ID NO: 6730
  chr19:33793732-33793864
  hypo

SEQ ID NO: 25825 - DNA, 132 bp, Homo sapiens; identical to SEQ ID NO: 6731
  chr19:33793869-33794001
  hypo

SEQ ID NO: 25826 - DNA, 31 bp, Homo sapiens
  chr19:33926620-33926651
  hypo
cgttagttctcaatcacgacaggactgggtg

SEQ ID NO: 25827 - DNA, 58 bp, Homo sapiens
  chr19:33926665-33926723
  hypo
ggccatgggcagaggccgtgcagcccaacccacgctcccatggcgtccctggattggt

SEQ ID NO: 25828 - DNA, 31 bp, Homo sapiens
  chr19:33926768-33926799
  hypo
gctctcagcaggtcctcggccttcccagggc

SEQ ID NO: 25829 - DNA, 37 bp, Homo sapiens
  chr19:33996088-33996125
  hypo
tcaccatccatttcccgcggcccggcctgccttcagc

SEQ ID NO: 25830 - DNA, 89 bp, Homo sapiens
  chr19:33996126-33996215
  hypo
acaaacaatgctgcctcgccgactctcactctgctctccacagaaggcagcggcatttgctctgcggtggaagccggcagccatctgag

SEQ ID NO: 25831 - DNA, 31 bp, Homo sapiens
  chr19:33997988-33998019
  hypo
accctcccaccatacccgcatccatctctca

SEQ ID NO: 25832 - DNA, 68 bp, Homo sapiens
  chr19:33998037-33998105
  hypo
ccctgggaaggctgagcgcccctccctgcatacccagagccggggacggaatgcgttacaaaggttcc

SEQ ID NO: 25833 - DNA, 31 bp, Homo sapiens
  chr19:34039505-34039536
  hypo
gttgctaccgttgcaacgcaagccaccttaa

SEQ ID NO: 25834 - DNA, 36 bp, Homo sapiens
  chr19:35512755-35512791
  hypo
attcacacctcgggtacgttccgttggggccgggtt

SEQ ID NO: 25835 - DNA, 31 bp, Homo sapiens
  chr19:35551107-35551138
  hypo
gcccttggggaggccacgtcccctcaagctc

SEQ ID NO: 25836 - DNA, 34 bp, Homo sapiens
  chr19:35551204-35551238
  hypo
ggctccagtcccctgtcgccgccccctgctgacc

SEQ ID NO: 25837 - DNA, 67 bp, Homo sapiens
  chr19:35551242-35551309
  hypo
tcccacagactgtggccgcaggaagctgcccgtggaccgcatcgtgggaggccgggacaccagcttg

SEQ ID NO: 25838 - DNA, 31 bp, Homo sapiens
  chr19:35566027-35566058
  hypo
accaaattccattttacggggcacttggtcc

SEQ ID NO: 25839 - DNA, 31 bp, Homo sapiens
  chr19:35587924-35587955
  hypo
gggaccaggaagggcccgggttgggagaaat

SEQ ID NO: 25840 - DNA, 31 bp, Homo sapiens
  chr19:35590624-35590655
  hypo
ctgccacctgcagggccgctatatccgcctg

SEQ ID NO: 25841 - DNA, 33 bp, Homo sapiens
  chr19:35591099-35591132
  hypo
gcgtgaagaacagcaacgccgggcgtgggagct

SEQ ID NO: 25842 - DNA, 4 bp, Homo sapiens
  chr19:35599308-35599312
  hypo
aaaa

SEQ ID NO: 25843 - DNA, 31 bp, Homo sapiens
  chr19:35599313-35599344
  hypo
aaaaaaaaaagaatggcgttcattcatccac

SEQ ID NO: 25844 - DNA, 34 bp, Homo sapiens
  chr19:35608941-35608975
  hypo
aggaagtgccagctctcgctatcaaaattataac

SEQ ID NO: 25845 - DNA, 55 bp, Homo sapiens
  chr19:35615954-35616009
  hypo
gggcttaaggcctagacgtgtggctgatgaacgtggcccacggtcagcagctcac

SEQ ID NO: 25846 - DNA, 48 bp, Homo sapiens
  chr19:35616186-35616234
  hypo
gatgtgggcaaaggcacggggggccaccagggccggaggccccagctc

SEQ ID NO: 25847 - DNA, 67 bp, Homo sapiens
  chr19:35616274-35616341
  hypo
aggacctggctgaaggcgaagtcgctgcctaggatggccagctggtccctggcgatgagcagtggct

SEQ ID NO: 25848 - DNA, 74 bp, Homo sapiens
  chr19:35616344-35616418
  hypo
agacgtgggcaccgcgcgagggaagttgctgcagcagacgaaacatggagccgtcccagcgcatgacctgtggg

SEQ ID NO: 25849 - DNA, 77 bp, Homo sapiens
  chr19:35616429-35616506
  hypo
tgagggcctggggtcccgggggtctctgggggccgtggaacagcttggaagcagaagcctgtcggtcccaaaactcc

SEQ ID NO: 25850 - DNA, 42 bp, Homo sapiens; identical to SEQ ID NO: 6735
  chr19:35738943-35738985
  hypo

SEQ ID NO: 25851 - DNA, 31 bp, Homo sapiens
  chr19:35795098-35795129
  hypo
tggttctgttccctagcggggctgatgtgat

SEQ ID NO: 25852 - DNA, 31 bp, Homo sapiens
  chr19:35804027-35804058
  hypo
tggtgaccgcagggctcgctgggcctgcggt

SEQ ID NO: 25853 - DNA, 31 bp, Homo sapiens
  chr19:35889405-35889436
  hypo
gcttcccatcattctccggatatcattctac

SEQ ID NO: 25854 - DNA, 40 bp, Homo sapiens; identical to SEQ ID NO: 6736
  chr19:36123861-36123901
  hypo

SEQ ID NO: 25855 - DNA, 31 bp, Homo sapiens; identical to SEQ ID NO: 6737
  chr19:36123966-36123997
  hypo

SEQ ID NO: 25856 - DNA, 18 bp, Homo sapiens
  chr19:36132081-36132099
  hypo
aggcgtgaatcaccgcgc

SEQ ID NO: 25857 - DNA, 31 bp, Homo sapiens
  chr19:36156234-36156265
  hypo
cggcccctggggacacgcgctggctcagtcc

SEQ ID NO: 25858 - DNA, 31 bp, Homo sapiens
  chr19:36156397-36156428
  hypo
aaatgtctggtccatgcgtgtgttggggggc

SEQ ID NO: 25859 - DNA, 76 bp, Homo sapiens
  chr19:36220087-36220163
  hypo
agaacgagtggacacacgtcaactgtgccatctggtcggcggaagtcttcgaggagaacgacggctccctcaagaa

SEQ ID NO: 25860 - DNA, 31 bp, Homo sapiens
  chr19:36220166-36220197
  hypo
gcatgctgctgtggcccgagggaggcagatg

SEQ ID NO: 25861 - DNA, 137 bp, Homo sapiens
  chr19:36221571-36221708
  hypo
tcccaagcatcctaaccgtcttatcccacatgccaggtgctcccgtctgtactggagcacagtggatgctcggaggcgctgctggtatcggtgccgaattctggagtatcggccatgggggccgagggaagagccag

SEQ ID NO: 25862 - DNA, 31 bp, Homo sapiens
  chr19:36221738-36221769
  hypo
ccattgtgcacagccccgccccttcctcagg

SEQ ID NO: 25863 - DNA, 31 bp, Homo sapiens
  chr19:36221785-36221816
  hypo
tcttcttcctgaataccgctctccctaaaca

SEQ ID NO: 25864 - DNA, 31 bp, Homo sapiens
  chr19:36221821-36221852
  hypo
acagatctctgttccccgctcccttttggaa

SEQ ID NO: 25865 - DNA, 39 bp, Homo sapiens
  chr19:36221877-36221916
  hypo
agttgctgtaatgtaacggcagctcgcttactgccatgc

SEQ ID NO: 25866 - DNA, 31 bp, Homo sapiens
  chr19:36222350-36222381
  hypo
gagggtacacccatcccgtctggaaaccagg

SEQ ID NO: 25867 - DNA, 51 bp, Homo sapiens
  chr19:36222431-36222482
  hypo
ggtaatggagagcctccgggccggggcgggcgggagcgtctgatgtggctt

SEQ ID NO: 25868 - DNA, 60 bp, Homo sapiens
  chr19:36222503-36222563
  hypo
aagtggtaggactggccgtgctggagggagggcagttccccatggcgtgcaaagcctgca

SEQ ID NO: 25869 - DNA, 31 bp, Homo sapiens
  chr19:36222575-36222606
  hypo
aggagatggcaaggagcgagtggggagaggc

SEQ ID NO: 25870 - DNA, 41 bp, Homo sapiens
  chr19:36275618-36275659
  hypo
ccagagccgctgccctcgctggctgccgggagctgcctcct

SEQ ID NO: 25871 - DNA, 31 bp, Homo sapiens
  chr19:36362341-36362372
  hypo
ccaccagcatcctcttcgcacttgggatcta

SEQ ID NO: 25872 - DNA, 31 bp, Homo sapiens
  chr19:36388610-36388641
  hypo
ggaggcaggaaattttcggcagcagaagcag

SEQ ID NO: 25873 - DNA, 31 bp, Homo sapiens
  chr19:36388659-36388690
  hypo
cagtgtaggcagcatgcgtgttggggtccca

SEQ ID NO: 25874 - DNA, 31 bp, Homo sapiens
  chr19:36525680-36525711
  hypo
ttctccatagcaacaccgcctcccagacctg

SEQ ID NO: 25875 - DNA, 31 bp, Homo sapiens; identical to SEQ ID NO: 6740
  chr19:36544541-36544572
  hypo

SEQ ID NO: 25876 - DNA, 52 bp, Homo sapiens
  chr19:36592821-36592873
  hypo
agggatgggtggggcccgctttctccatttcaggtggcgtctgctgtgactc

SEQ ID NO: 25877 - DNA, 31 bp, Homo sapiens
  chr19:36592903-36592934
  hypo
cttccctgtcaggatgcgcaggtcccacaga

SEQ ID NO: 25878 - DNA, 152 bp, Homo sapiens
  chr19:36604428-36604580
  hypo
aaggtgcatggacagccggccagctacgcttaccgtgagcgccgcgagaagctgcacgtgtgcgaggactgcggcttcaccagctcccggcccgacacctacgcacagcaccgcgccctgcaccgcgcagcctgatacggtgtgccagcgtc

SEQ ID NO: 25879 - DNA, 31 bp, Homo sapiens
  chr19:36604747-36604778
  hypo
gatttggacccagcagcgccttaccccaaaa

SEQ ID NO: 25880 - DNA, 31 bp, Homo sapiens
  chr19:36853753-36853784
  hypo
aaattcatcacaaactcgggttttattataa

SEQ ID NO: 25881 - DNA, 35 bp, Homo sapiens
  chr19:36853814-36853849
  hypo
taaactttcaaaaattcgttcgatggcagtctaca

SEQ ID NO: 25882 - DNA, 54 bp, Homo sapiens
  chr19:36853886-36853940
  hypo
taattcaataaaatctcgaaagtcttccccaattctcaacgtctacaatatcta

SEQ ID NO: 25883 - DNA, 31 bp, Homo sapiens
  chr19:36858741-36858772
  hypo
gaaattgacagtatttcgaaaaggacagaga

SEQ ID NO: 25884 - DNA, 31 bp, Homo sapiens; identical to SEQ ID NO: 6741
  chr19:36909232-36909263
  hypo

SEQ ID NO: 25885 - DNA, 135 bp, Homo sapiens; identical to SEQ ID NO: 6742
  chr19:36909623-36909758
  hypo

SEQ ID NO: 25886 - DNA, 49 bp, Homo sapiens; identical to SEQ ID NO: 6743
  chr19:36909886-36909935
  hypo

SEQ ID NO: 25887 - DNA, 27 bp, Homo sapiens
  chr19:36952281-36952308
  hypo
aaaactcttggctggacgcagtggctt

SEQ ID NO: 25888 - DNA, 31 bp, Homo sapiens
  chr19:36957676-36957707
  hypo
aaaaatacagacaattcggccaggcgcagtg

SEQ ID NO: 25889 - DNA, 31 bp, Homo sapiens
  chr19:36970716-36970747
  hypo
tttctttgtttgtttgcgtgtttgcttggtt

SEQ ID NO: 25890 - DNA, 28 bp, Homo sapiens
  chr19:36971640-36971668
  hypo
aagcttcggggccaggcgtggtggctta

SEQ ID NO: 25891 - DNA, 31 bp, Homo sapiens
  chr19:37128452-37128483
  hypo
ccgggcatagtggctgcgcatgcctgtagtc

SEQ ID NO: 25892 - DNA, 31 bp, Homo sapiens
  chr19:37173450-37173481
  hypo
tctatgtctgtaatggcggttgcatgggttt

SEQ ID NO: 25893 - DNA, 31 bp, Homo sapiens
  chr19:37699579-37699610
  hypo
taactaaaagaaaaacgcgtcagaacaatta

SEQ ID NO: 25894 - DNA, 31 bp, Homo sapiens
  chr19:37725643-37725674
  hypo
aattataataatttgacgtgcaagttgtaac

SEQ ID NO: 25895 - DNA, 24 bp, Homo sapiens
  chr19:37735566-37735590
  hypo
cactgcggccggtctttttatttt

SEQ ID NO: 25896 - DNA, 20 bp, Homo sapiens
  chr19:37818354-37818374
  hypo
tttcattaaactaatacgga

SEQ ID NO: 25897 - DNA, 18 bp, Homo sapiens
  chr19:37829030-37829048
  hypo
tctcttttctttgaggcg

SEQ ID NO: 25898 - DNA, 31 bp, Homo sapiens
  chr19:37831823-37831854
  hypo
acaggcgtgagccaccgcgtctggccttgtg

SEQ ID NO: 25899 - DNA, 41 bp, Homo sapiens
  chr19:37853602-37853643
  hypo
gtgcagggaatgtgggcgaggctttacgtggaagtcaaacc

SEQ ID NO: 25900 - DNA, 70 bp, Homo sapiens
  chr19:37853686-37853756
  hypo
gtgcaaggattgtggacgaggctttacttggaagtcgaacctctttacacatcagcggacacactcaggg

SEQ ID NO: 25901 - DNA, 31 bp, Homo sapiens
  chr19:37854102-37854133
  hypo
atgtctgcctggagtgcgggcagtgctttag

SEQ ID NO: 25902 - DNA, 39 bp, Homo sapiens
  chr19:38069704-38069743
  hypo
gcacctctgcagcaaccgcacctccgcctaaactctggt

SEQ ID NO: 25903 - DNA, 31 bp, Homo sapiens
  chr19:38069815-38069846
  hypo
cctaaacagtgaagttcggcattgtttggaa

SEQ ID NO: 25904 - DNA, 24 bp, Homo sapiens
  chr19:38141042-38141066
  hypo
caggcttttgctctgtcgctcagg

SEQ ID NO: 25905 - DNA, 22 bp, Homo sapiens
  chr19:38222906-38222928
  hypo
ctgtgcccggcaaaaattaact

SEQ ID NO: 25906 - DNA, 25 bp, Homo sapiens
  chr19:38273673-38273698
  hypo
gcaacaagagcgaaactctgtctca

SEQ ID NO: 25907 - DNA, 31 bp, Homo sapiens
  chr19:38273725-38273756
  hypo
actttttcacataggacgatgaaggattcca

SEQ ID NO: 25908 - DNA, 58 bp, Homo sapiens
  chr19:38383047-38383105
  hypo
aagaggagtgaacagtcgggattgtcaaggatagtcatctaggcgtgagcaaaggcta

SEQ ID NO: 25909 - DNA, 58 bp, Homo sapiens; identical to SEQ ID NO: 6744
  chr19:38398220-38398278
  hypo

SEQ ID NO: 25910 - DNA, 31 bp, Homo sapiens; identical to SEQ ID NO: 6745
  chr19:38417473-38417504
  hypo

SEQ ID NO: 25911 - DNA, 55 bp, Homo sapiens
  chr19:38500468-38500523
  hypo
tggttttctatgacggcgtgatatggatggttaatcatgtcgcaaagccctgctg

SEQ ID NO: 25912 - DNA, 73 bp, Homo sapiens
  chr19:38564441-38564514
  hypo
atgctcttagaaacctcgcacggagtcctaggagaggaccctgggccgaccaagcccacgtcctgtgcccact

SEQ ID NO: 25913 - DNA, 31 bp, Homo sapiens
  chr19:38564624-38564655
  hypo
cactatttccataacccgtccatgacacacg

SEQ ID NO: 25914 - DNA, 31 bp, Homo sapiens
  chr19:38613383-38613414
  hypo
gcgcatgctagggcggcgtccagcctcaggg

SEQ ID NO: 25915 - DNA, 31 bp, Homo sapiens
  chr19:38621444-38621475
  hypo
gtggcagctcccagatcgctggcatgaggcc

SEQ ID NO: 25916 - DNA, 31 bp, Homo sapiens
  chr19:38764529-38764560
  hypo
tcataaaaaatacaatcgtaaagatacaata

SEQ ID NO: 25917 - DNA, 31 bp, Homo sapiens
  chr19:38779795-38779826
  hypo
ctgaagaccactccagcgatatgttcaacta

SEQ ID NO: 25918 - DNA, 46 bp, Homo sapiens
  chr19:38817273-38817319
  hypo
ttctccatcgcctttgcgctcctgggcgtgccgaccaccatgctgc

SEQ ID NO: 25919 - DNA, 31 bp, Homo sapiens
  chr19:38828124-38828155
  hypo
cacccatcgacccgagcgaggtgaggggacc

SEQ ID NO: 25920 - DNA, 52 bp, Homo sapiens
  chr19:38828170-38828222
  hypo
agagggattttgaacccgcactccactcatttctggacgtgtggcctaacct

SEQ ID NO: 25921 - DNA, 57 bp, Homo sapiens
  chr19:38828260-38828317
  hypo
agatcaactactcctgcgaggaaaaggtgagtgggtgcagcacggataggctcattc

SEQ ID NO: 25922 - DNA, 52 bp, Homo sapiens; identical to SEQ ID NO: 6746
  chr19:38853183-38853235
  hypo

SEQ ID NO: 25923 - DNA, 31 bp, Homo sapiens
  chr19:38858044-38858075
  hypo
cccaccctttttcctgcggcatctcactttc

SEQ ID NO: 25924 - DNA, 31 bp, Homo sapiens
  chr19:38873934-38873965
  hypo
agccagcagcagaagccggaagacaccacca

SEQ ID NO: 25925 - DNA, 31 bp, Homo sapiens
  chr19:39087809-39087840
  hypo
tgccctctatcctcctcgccacccacactac

SEQ ID NO: 25926 - DNA, 126 bp, Homo sapiens
  chr19:39092088-39092214
  hypo
gagggatgtgtccaggcggccgtgctgtggatccggagggggcagccattgaacaactttacgagaagggcacatccctgggcaggtcgccgcggggccaggcagcagatccggcaaagagagcag

SEQ ID NO: 25927 - DNA, 46 bp, Homo sapiens
  chr19:39151299-39151345
  hypo
tgctgggattacaggcgcgagccaccatgcccgacccatggactca

SEQ ID NO: 25928 - DNA, 35 bp, Homo sapiens
  chr19:39151505-39151540
  hypo
attgggaatggctttgcgagcgggtggtgagggga

SEQ ID NO: 25929 - DNA, 31 bp, Homo sapiens
  chr19:39151782-39151813
  hypo
gtctacattcaacttgcgcctgcaaactcag

SEQ ID NO: 25930 - DNA, 31 bp, Homo sapiens
  chr19:39211843-39211874
  hypo
tgctacctttctaagccgtgctaccacggcc

SEQ ID NO: 25931 - DNA, 31 bp, Homo sapiens
  chr19:39221973-39222004
  hypo
caactctgccccatcccggcagggtgagtac

SEQ ID NO: 25932 - DNA, 47 bp, Homo sapiens
  chr19:39222034-39222081
  hypo
ttcctcatccatcaaacggactaagacagccccgaccccatagggtg

SEQ ID NO: 25933 - DNA, 33 bp, Homo sapiens
  chr19:39238368-39238401
  hypo
ttttttgggacagtctcgcctcgtcacccaggc

SEQ ID NO: 25934 - DNA, 31 bp, Homo sapiens
  chr19:39305898-39305929
  hypo
gtgcccctcgcctgcccgctgccagtctgaa

SEQ ID NO: 25935 - DNA, 24 bp, Homo sapiens
  chr19:39309633-39309657
  hypo
tgtgtgtgtgtgtgtgcgggcacg

SEQ ID NO: 25936 - DNA, 60 bp, Homo sapiens
  chr19:39327504-39327564
  hypo
attttctgcaggtcaacggcaggggtctaaggagtgactgcccaacgtgaggcttcaaga

SEQ ID NO: 25937 - DNA, 34 bp, Homo sapiens
  chr19:39327570-39327604
  hypo
aattaccaattatgcacggcgtttctccttctct

SEQ ID NO: 25938 - DNA, 31 bp, Homo sapiens
  chr19:39327626-39327657
  hypo
ccattcctatctccttcgccagcccaaggca

SEQ ID NO: 25939 - DNA, 31 bp, Homo sapiens
  chr19:39329500-39329531
  hypo
acctctgctgccctcccgagcctgagcacct

SEQ ID NO: 25940 - DNA, 75 bp, Homo sapiens
  chr19:39329571-39329646
  hypo
gaggtgggtaatggcccggtctacagcgtagccatcagccatctccaccatggcggcccccggcttgcttttcat

SEQ ID NO: 25941 - DNA, 34 bp, Homo sapiens
  chr19:39330891-39330925
  hypo
gtagcgacttgggccccgacggtgaccccccact

SEQ ID NO: 25942 - DNA, 31 bp, Homo sapiens; identical to SEQ ID NO: 6754
  chr19:39379455-39379486
  hypo

SEQ ID NO: 25943 - DNA, 31 bp, Homo sapiens
  chr19:39415992-39416023
  hypo
ccccacagaactctgacgcagttcacccttc

SEQ ID NO: 25944 - DNA, 54 bp, Homo sapiens
  chr19:39416071-39416125
  hypo
tctgatcagcctatgccggctgccggaactccattcctccggctgacaactgga

SEQ ID NO: 25945 - DNA, 31 bp, Homo sapiens
  chr19:39416138-39416169
  hypo
ctgggcccaggggacacgaggggactttgct

SEQ ID NO: 25946 - DNA, 49 bp, Homo sapiens
  chr19:39644615-39644664
  hypo
tttgaaccttaaagtccgaggatggagtattgttcgatgtttttgcctc

SEQ ID NO: 25947 - DNA, 31 bp, Homo sapiens
  chr19:39645706-39645737
  hypo
gggaaggacccaggtgcgtctgtctgctgtg

SEQ ID NO: 25948 - DNA, 31 bp, Homo sapiens
  chr19:39645861-39645892
  hypo
ctagggtgtcaactcccgtgggcaggaagtt

SEQ ID NO: 25949 - DNA, 51 bp, Homo sapiens
  chr19:39670669-39670720
  hypo
gccaggagtgagcctccgtccccaaagccagccaggcgtcatcagcaccag

SEQ ID NO: 25950 - DNA, 31 bp, Homo sapiens
  chr19:39670724-39670755
  hypo
ctcagcctggtcctctcgggaagtgagtggc

SEQ ID NO: 25951 - DNA, 54 bp, Homo sapiens
  chr19:39964613-39964667
  hypo
aatatgagtatgctttcgatgatgagcccaccccgtccccgcaggcctatgggg

SEQ ID NO: 25952 - DNA, 31 bp, Homo sapiens
  chr19:39992862-39992893
  hypo
aaatacaggagtattacggtttctatgagat

SEQ ID NO: 25953 - DNA, 36 bp, Homo sapiens
  chr19:40020472-40020508
  hypo
gtcagattagccaggccgtggcgagaggcacaacta

SEQ ID NO: 25954 - DNA, 42 bp, Homo sapiens
  chr19:40386022-40386064
  hypo
ctcacttttccctcaccgacactcaaacgactgttcacctgg

SEQ ID NO: 25955 - DNA, 22 bp, Homo sapiens
  chr19:40474856-40474878
  hypo
aggcggcacccattgccgctcc

SEQ ID NO: 25956 - DNA, 31 bp, Homo sapiens
  chr19:40710378-40710409
  hypo
cccctgcctgcagcttcggggtgctgctgtg

SEQ ID NO: 25957 - DNA, 31 bp, Homo sapiens
  chr19:40829748-40829779
  hypo
agacagatgggaaagccgccagtgcaaagcc

SEQ ID NO: 25958 - DNA, 42 bp, Homo sapiens
  chr19:40829792-40829834
  hypo
ggaaaggcaggttagacggccctgggccgagtgaggttgaga

SEQ ID NO: 25959 - DNA, 52 bp, Homo sapiens
  chr19:40829840-40829892
  hypo
aaagagtcaggagcaccgctcagggaagacaacagctcgcacgcccagaatc

SEQ ID NO: 25960 - DNA, 31 bp, Homo sapiens
  chr19:40834858-40834889
  hypo
agttccccaagcacagcggaattgctgcgtc

SEQ ID NO: 25961 - DNA, 44 bp, Homo sapiens
  chr19:40900556-40900600
  hypo
gcccgcctgtgcctctcggcttagccccacgtccagctcaagct

SEQ ID NO: 25962 - DNA, 44 bp, Homo sapiens; identical to SEQ ID NO: 6757
  chr19:40939938-40939982
  hypo

SEQ ID NO: 25963 - DNA, 25 bp, Homo sapiens
  chr19:40951174-40951199
  hypo
taatattattttttgccgggcgcag

SEQ ID NO: 25964 - DNA, 31 bp, Homo sapiens
  chr19:40951613-40951644
  hypo
aaggtttcctcctctccgaagccctccctgg

SEQ ID NO: 25965 - DNA, 31 bp, Homo sapiens
  chr19:40951678-40951709
  hypo
ccatggcctcctgtgccgccatcccagtcct

SEQ ID NO: 25966 - DNA, 39 bp, Homo sapiens
  chr19:40951723-40951762
  hypo
tatatggactgaggaacgccccgccgagggcaggtacca

SEQ ID NO: 25967 - DNA, 31 bp, Homo sapiens
  chr19:41174214-41174245
  hypo
tcaccattctggaccacgtaatggttctgga

SEQ ID NO: 25968 - DNA, 31 bp, Homo sapiens
  chr19:41201589-41201620
  hypo
gctgtgatcttgggcacgtgacttaacccct

SEQ ID NO: 25969 - DNA, 22 bp, Homo sapiens
  chr19:41294369-41294391
  hypo
gacagagcgagactcttaaaaa

SEQ ID NO: 25970 - DNA, 31 bp, Homo sapiens
  chr19:41328143-41328174
  hypo
cgtgtccctagtgatgcggtgcggcaagttc

SEQ ID NO: 25971 - DNA, 19 bp, Homo sapiens
  chr19:41881146-41881165
  hypo
agcatgcaagtgagcccgt

SEQ ID NO: 25972 - DNA, 41 bp, Homo sapiens
  chr19:41881464-41881505
  hypo
gagccactgcgcccggcccgtgagcccgtttctttatctgc

SEQ ID NO: 25973 - DNA, 31 bp, Homo sapiens
  chr19:41881533-41881564
  hypo
cccttcagcactcctccgcaaaaaaacaccc

SEQ ID NO: 25974 - DNA, 17 bp, Homo sapiens
  chr19:41881568-41881585
  hypo
acaaaataggccaggcg

SEQ ID NO: 25975 - DNA, 31 bp, Homo sapiens
  chr19:41946358-41946389
  hypo
gatggggtgttcttcccggcagagtaccttt

SEQ ID NO: 25976 - DNA, 31 bp, Homo sapiens; identical to SEQ ID NO: 6771
  chr19:42028282-42028313
  hypo

SEQ ID NO: 25977 - DNA, 108 bp, Homo sapiens; identical to SEQ ID NO: 6772
  chr19:42028352-42028460
  hypo

SEQ ID NO: 25978 - DNA, 284 bp, Homo sapiens; identical to SEQ ID NO: 6773
  chr19:42028469-42028753
  hypo

SEQ ID NO: 25979 - DNA, 36 bp, Homo sapiens
  chr19:42400291-42400327
  hypo
ggtcttaacatctgtccgtcccgtgctgaagtacag

SEQ ID NO: 25980 - DNA, 61 bp, Homo sapiens
  chr19:42400355-42400416
  hypo
gggtagctttagcccccgcaattccaggcccccagagtgtgggtctcgtggccgcagaggc

SEQ ID NO: 25981 - DNA, 50 bp, Homo sapiens
  chr19:42408202-42408252
  hypo
agaagaaattggtccacgagggcccactgacgtggcgggtgactaaggac

SEQ ID NO: 25982 - DNA, 44 bp, Homo sapiens
  chr19:42408299-42408343
  hypo
ggcagtgagccaagggcggggagggggtcgcgcgggggcacgcc

SEQ ID NO: 25983 - DNA, 41 bp, Homo sapiens
  chr19:42408431-42408472
  hypo
gctcaagtcccatagccggacactgacgcccacgcccgatg

SEQ ID NO: 25984 - DNA, 31 bp, Homo sapiens
  chr19:42408827-42408858
  hypo
ccacaaacactggaagcggctggagggtggg

SEQ ID NO: 25985 - DNA, 56 bp, Homo sapiens
  chr19:42408859-42408915
  hypo
gtggctggaggggtttcgttaggtaagccagggtacatgcccgattccataaggag

SEQ ID NO: 25986 - DNA, 31 bp, Homo sapiens
  chr19:42408929-42408960
  hypo
gctcaggaggacacatcgggccctggatatt

SEQ ID NO: 25987 - DNA, 31 bp, Homo sapiens
  chr19:42408987-42409018
  hypo
atgggagccctgagagcgccaccactgtggg

SEQ ID NO: 25988 - DNA, 31 bp, Homo sapiens
  chr19:42424224-42424255
  hypo
actcacagacatgacacgctcacagacatac

SEQ ID NO: 25989 - DNA, 31 bp, Homo sapiens
  chr19:42712731-42712762
  hypo
cactgccagtgcctggcgcatggaataaaat

SEQ ID NO: 25990 - DNA, 56 bp, Homo sapiens
  chr19:42712764-42712820
  hypo
aaactgtcatccctgccgtggcccgcgaggccaagctgctccggccccagcctggc

SEQ ID NO: 25991 - DNA, 47 bp, Homo sapiens
  chr19:42729403-42729450
  hypo
ctcagcaggggctcgccggcaacaccggcggacggctcacagcccgg

SEQ ID NO: 25992 - DNA, 70 bp, Homo sapiens
  chr19:42796491-42796561
  hypo
ctgggtaccagccctgcgtccagccaggctggaacagtcacctcgtacgggcccacgagctctgtagctc

SEQ ID NO: 25993 - DNA, 31 bp, Homo sapiens
  chr19:42809712-42809743
  hypo
agccaccatacccaaccgagaaaaaaatttt

SEQ ID NO: 25994 - DNA, 31 bp, Homo sapiens
  chr19:42813634-42813665
  hypo
acaggcataagccaccgcgcccagccctccc

SEQ ID NO: 25995 - DNA, 43 bp, Homo sapiens
  chr19:42813774-42813817
  hypo
gcctgagaaacctggtcgtgtccgtcgtcggaagactaggcgg

SEQ ID NO: 25996 - DNA, 20 bp, Homo sapiens
  chr19:42815749-42815769
  hypo
ccctgcgaaccctctatttt

SEQ ID NO: 25997 - DNA, 31 bp, Homo sapiens; identical to SEQ ID NO: 6779
  chr19:43866888-43866919
  hypo

SEQ ID NO: 25998 - DNA, 37 bp, Homo sapiens
  chr19:43975085-43975122
  hypo
ttacaggcgtgagccaccatgccgggcccaaagtgtc

SEQ ID NO: 25999 - DNA, 31 bp, Homo sapiens
  chr19:44128828-44128859
  hypo
cccaccttgtctaaaacgctccaagtattta

SEQ ID NO: 26000 - DNA, 39 bp, Homo sapiens; identical to SEQ ID NO: 6781
  chr19:44144096-44144135
  hypo

SEQ ID NO: 26001 - DNA, 70 bp, Homo sapiens; identical to SEQ ID NO: 6782
  chr19:44144185-44144255
  hypo

SEQ ID NO: 26002 - DNA, 17 bp, Homo sapiens
  chr19:44207877-44207894
  hypo
tgcgtacaagagacata

SEQ ID NO: 26003 - DNA, 31 bp, Homo sapiens
  chr19:44207937-44207968
  hypo
ccagtctgtctgggttcgaaagccaacactt

SEQ ID NO: 26004 - DNA, 45 bp, Homo sapiens
  chr19:44564103-44564148
  hypo
acctttgtcagttaccgcggtgatctgaaccgcaaattaccaaca

SEQ ID NO: 26005 - DNA, 57 bp, Homo sapiens
  chr19:44578498-44578555
  hypo
tgcatcctctgcctcccggtctcaaaaaaaaaaaatatttaacgttttattttcata

SEQ ID NO: 26006 - DNA, 29 bp, Homo sapiens
  chr19:44655369-44655398
  hypo
tggtaaggacattgctcgctctgtcgccc

SEQ ID NO: 26007 - DNA, 32 bp, Homo sapiens
  chr19:44988474-44988506
  hypo
ctggcagccaccgcgcccggcctatttcctca

SEQ ID NO: 26008 - DNA, 301 bp, Homo sapiens; identical to SEQ ID NO: 6799
  chr19:45004315-45004616
  hypo

SEQ ID NO: 26009 - DNA, 60 bp, Homo sapiens; identical to SEQ ID NO: 6800
  chr19:45004619-45004679
  hypo

SEQ ID NO: 26010 - DNA, 110 bp, Homo sapiens; identical to SEQ ID NO: 6801
  chr19:45004771-45004881
  hypo

SEQ ID NO: 26011 - DNA, 31 bp, Homo sapiens; identical to SEQ ID NO: 6802
  chr19:45004885-45004916
  hypo

SEQ ID NO: 26012 - DNA, 63 bp, Homo sapiens
  chr19:45108573-45108636
  hypo
tttagagggttttcatcgacacgcttgttcccagggcccctagcgtgtcgcacacttgttccc

SEQ ID NO: 26013 - DNA, 31 bp, Homo sapiens
  chr19:45141558-45141589
  hypo
ttaaaatttttttggccgggcacagtggctc

SEQ ID NO: 26014 - DNA, 31 bp, Homo sapiens
  chr19:45149596-45149627
  hypo
cagagtaataatgcagcgtttcatggatttg

SEQ ID NO: 26015 - DNA, 31 bp, Homo sapiens
  chr19:45149630-45149661
  hypo
acccaagatttctccccgttttctacattgg

SEQ ID NO: 26016 - DNA, 37 bp, Homo sapiens
  chr19:45149710-45149747
  hypo
tggtatgtgaaacctacgacactggtgcgatgaaaaa

SEQ ID NO: 26017 - DNA, 36 bp, Homo sapiens
  chr19:45162025-45162061
  hypo
gcactcaggcatatcccgtaacgccatcatcttcct

SEQ ID NO: 26018 - DNA, 36 bp, Homo sapiens
  chr19:45164647-45164683
  hypo
cgtcttcagatgcccacggcccggcctcaggagcct

SEQ ID NO: 26019 - DNA, 89 bp, Homo sapiens
  chr19:45164688-45164777
  hypo
ttttctcctggtgcctcgagcagcatttcccaacccttcctgctgggcggaatcccctgtagagtttgctaagacgcagccccagacag

SEQ ID NO: 26020 - DNA, 52 bp, Homo sapiens
  chr19:45164802-45164854
  hypo
tctgcattttaatatccgctctctcccccctgccccacgccccttcaattcc

SEQ ID NO: 26021 - DNA, 31 bp, Homo sapiens
  chr19:45186850-45186881
  hypo
ttgggggctgtggggccgatgaggtggactc

SEQ ID NO: 26022 - DNA, 51 bp, Homo sapiens
  chr19:45186947-45186998
  hypo
aggtccttgtgcagcccgtgaatgcacgcccgccttcggtctgttccttca

SEQ ID NO: 26023 - DNA, 31 bp, Homo sapiens
  chr19:45193692-45193723
  hypo
ccgagcacttattatacgccatgcactatgc

SEQ ID NO: 26024 - DNA, 31 bp, Homo sapiens
  chr19:45193743-45193774
  hypo
actgatatcctcacaacggttctgtgagtga

SEQ ID NO: 26025 - DNA, 6 bp, Homo sapiens
  chr19:45193791-45193797
  hypo
taatgg

SEQ ID NO: 26026 - DNA, 31 bp, Homo sapiens
  chr19:45202941-45202972
  hypo
cggccatgagccaccacgcccggccagagcc

SEQ ID NO: 26027 - DNA, 84 bp, Homo sapiens
  chr19:45211219-45211303
  hypo
aggacctgctggtctacgcctggtaccgcgggcctgcctccgagcccaaccggctgctcagccagctgccgtcaggaacctgga

SEQ ID NO: 26028 - DNA, 47 bp, Homo sapiens; identical to SEQ ID NO: 6807
  chr19:45312125-45312172
  hypo

SEQ ID NO: 26029 - DNA, 31 bp, Homo sapiens; identical to SEQ ID NO: 6808
  chr19:45312174-45312205
  hypo

SEQ ID NO: 26030 - DNA, 35 bp, Homo sapiens; identical to SEQ ID NO: 6809
  chr19:45312232-45312267
  hypo

SEQ ID NO: 26031 - DNA, 31 bp, Homo sapiens; identical to SEQ ID NO: 6810
  chr19:45312293-45312324
  hypo

SEQ ID NO: 26032 - DNA, 31 bp, Homo sapiens
  chr19:45314750-45314781
  hypo
gatctgcaaggtgccccgtgtctaggcacag

SEQ ID NO: 26033 - DNA, 31 bp, Homo sapiens
  chr19:45317398-45317429
  hypo
cttcccttagatcccacggagcacgtgcagt

SEQ ID NO: 26034 - DNA, 31 bp, Homo sapiens
  chr19:45322432-45322463
  hypo
gccaattggggggcagcgtaagggaccttcc

SEQ ID NO: 26035 - DNA, 56 bp, Homo sapiens; identical to SEQ ID NO: 6813
  chr19:45348185-45348241
  hypo

SEQ ID NO: 26036 - DNA, 31 bp, Homo sapiens; identical to SEQ ID NO: 6814
  chr19:45348243-45348274
  hypo

SEQ ID NO: 26037 - DNA, 117 bp, Homo sapiens; identical to SEQ ID NO: 6816
  chr19:45348954-45349071
  hypo

SEQ ID NO: 26038 - DNA, 495 bp, Homo sapiens; identical to SEQ ID NO: 6817
  chr19:45349504-45349999
  hypo

SEQ ID NO: 26039 - DNA, 56 bp, Homo sapiens; identical to SEQ ID NO: 6818
  chr19:45350001-45350057
  hypo

SEQ ID NO: 26040 - DNA, 31 bp, Homo sapiens
  chr19:45368652-45368683
  hypo
cgcccagatgcacctgcgaaccaccagaatg

SEQ ID NO: 26041 - DNA, 49 bp, Homo sapiens
  chr19:45368824-45368873
  hypo
ggctcacggtggaggacgagggcaactacacttgcgagtttgccacctt

SEQ ID NO: 26042 - DNA, 36 bp, Homo sapiens
  chr19:45377061-45377097
  hypo
gtacctcctgccaacccgccccgtttctttagcatt

SEQ ID NO: 26043 - DNA, 31 bp, Homo sapiens
  chr19:45377456-45377487
  hypo
ggcaatttggggtctccgggagtacttaggt

SEQ ID NO: 26044 - DNA, 28 bp, Homo sapiens
  chr19:45386809-45386837
  hypo
gcatgagccactgcgcccagccaatgcc

SEQ ID NO: 26045 - DNA, 40 bp, Homo sapiens
  chr19:45390078-45390118
  hypo
cttgagcctaggagctcgagaccagcgtgggcaacatggg

SEQ ID NO: 26046 - DNA, 31 bp, Homo sapiens
  chr19:45390120-45390151
  hypo
acccagcaacattttgcgtctacaaaaatac

SEQ ID NO: 26047 - DNA, 31 bp, Homo sapiens
  chr19:45465160-45465191
  hypo
tgtctaagacagcccccgtgtccattctccc

SEQ ID NO: 26048 - DNA, 31 bp, Homo sapiens
  chr19:45465345-45465376
  hypo
acttgggtttgttcaccgaaaacattcaaat

SEQ ID NO: 26049 - DNA, 4 bp, Homo sapiens
  chr19:45546674-45546678
  hypo
aaaa

SEQ ID NO: 26050 - DNA, 31 bp, Homo sapiens
  chr19:45546691-45546722
  hypo
attttttccattcatacgtatatgcacatac

SEQ ID NO: 26051 - DNA, 31 bp, Homo sapiens
  chr19:45546745-45546776
  hypo
aattatatttgggtcacgtttgtaccctagg

SEQ ID NO: 26052 - DNA, 104 bp, Homo sapiens
  chr19:45574607-45574711
  hypo
tgtgccagtcctgctgcgccccaggcactgggggctggccgttccctcaccccctcactccaaaccggtctgtccagccgtccaccccacggaggggaagcctc

SEQ ID NO: 26053 - DNA, 31 bp, Homo sapiens
  chr19:45603729-45603760
  hypo
cccaggaggtaggtgccgtttgccccaattt

SEQ ID NO: 26054 - DNA, 31 bp, Homo sapiens
  chr19:45603944-45603975
  hypo
atctataacccagaatcgtttataaaataga

SEQ ID NO: 26055 - DNA, 31 bp, Homo sapiens
  chr19:45603978-45604009
  hypo
aacagtgctggctttgcggtgttgtggcagg

SEQ ID NO: 26056 - DNA, 59 bp, Homo sapiens
  chr19:45626601-45626660
  hypo
accaggaagaaacctacgagcgcatccttgctgagggcaggacccgctctccacatcct

SEQ ID NO: 26057 - DNA, 31 bp, Homo sapiens
  chr19:45626697-45626728
  hypo
tccctgtcttgaagttcgagaaggctgcatt

SEQ ID NO: 26058 - DNA, 42 bp, Homo sapiens
  chr19:45626737-45626779
  hypo
ccacaacctgtctgtccggtttgaagccggggcctgagggct

SEQ ID NO: 26059 - DNA, 31 bp, Homo sapiens
  chr19:45626813-45626844
  hypo
caaacctccctctgtccgctcccacaggtgt

SEQ ID NO: 26060 - DNA, 31 bp, Homo sapiens
  chr19:45626855-45626886
  hypo
accattccctctgtagcgtggtagaggctgg

SEQ ID NO: 26061 - DNA, 49 bp, Homo sapiens
  chr19:45626896-45626945
  hypo
ctgcaggattatgatgcggattaaatgcagtaatcgagtgtttggcaga

SEQ ID NO: 26062 - DNA, 31 bp, Homo sapiens
  chr19:45626965-45626996
  hypo
tcagtaaagagctgctcgcaccattctgtgc

SEQ ID NO: 26063 - DNA, 120 bp, Homo sapiens
  chr19:45737163-45737283
  hypo
gtaagtgttgacagagcgctgaggtttttggaccacagtggtgccggagctcttattctaggactgcaagcgtccatggtactaaggtgctggaaccggaagcctcggtagcagtgagag

SEQ ID NO: 26064 - DNA, 31 bp, Homo sapiens
  chr19:45753566-45753597
  hypo
agcgctgtgtggcctccgagaggctcttgtc

SEQ ID NO: 26065 - DNA, 79 bp, Homo sapiens
  chr19:45810101-45810180
  hypo
tgcacctgttctacttcggacgagcccagccgatcagcgttggacacgtcaaatactgagcccacggcagctgtgtcca

SEQ ID NO: 26066 - DNA, 32 bp, Homo sapiens
  chr19:45813961-45813993
  hypo
ctgatcctcagcctctcgagtagctgggacca

SEQ ID NO: 26067 - DNA, 61 bp, Homo sapiens
  chr19:45851244-45851305
  hypo
gatccctgcccgccttcggaccctgcataacctcgtgatccagtacgcggggcagggccgc

SEQ ID NO: 26068 - DNA, 156 bp, Homo sapiens
  chr19:45851313-45851469
  hypo
ggcggtgcctctgtgccgccaggccttggaggacctggagcgcagctcgggccactgccaccctgacgtggccaccatgctcaacatcctggcgctggtgtaccggtgagcactgcggccagccatggctgggggcaggaacggcagggacccatt

SEQ ID NO: 26069 - DNA, 40 bp, Homo sapiens
  chr19:45856037-45856077
  hypo
acgccaaacatgatgacggcccgcccgtagtggtgcactg

SEQ ID NO: 26070 - DNA, 31 bp, Homo sapiens
  chr19:45856080-45856111
  hypo
ggcagaggagagggggcgaggggggttacaa

SEQ ID NO: 26071 - DNA, 31 bp, Homo sapiens
  chr19:45856125-45856156
  hypo
acagggacagcctcacgcgacccaggatgct

SEQ ID NO: 26072 - DNA, 39 bp, Homo sapiens
  chr19:45895250-45895289
  hypo
gggacagctctggctccggccccccgggccctggccccc

SEQ ID NO: 26073 - DNA, 38 bp, Homo sapiens
  chr19:45895420-45895458
  hypo
gccacctcctccagctcgggcaccgactgtgcctccgg

SEQ ID NO: 26074 - DNA, 47 bp, Homo sapiens; identical to SEQ ID NO: 6822
  chr19:45908809-45908856
  hypo

SEQ ID NO: 26075 - DNA, 31 bp, Homo sapiens; identical to SEQ ID NO: 6823
  chr19:45959072-45959103
  hypo

SEQ ID NO: 26076 - DNA, 59 bp, Homo sapiens; identical to SEQ ID NO: 6824
  chr19:45959173-45959232
  hypo

SEQ ID NO: 26077 - DNA, 102 bp, Homo sapiens; identical to SEQ ID NO: 6825
  chr19:45959233-45959335
  hypo

SEQ ID NO: 26078 - DNA, 25 bp, Homo sapiens
  chr19:46234862-46234887
  hypo
gcgcccggcccgtcccctcctttct

SEQ ID NO: 26079 - DNA, 108 bp, Homo sapiens; identical to SEQ ID NO: 6827
  chr19:46271507-46271615
  hypo

SEQ ID NO: 26080 - DNA, 34 bp, Homo sapiens; identical to SEQ ID NO: 6828
  chr19:46273812-46273846
  hypo

SEQ ID NO: 26081 - DNA, 31 bp, Homo sapiens
  chr19:46327209-46327240
  hypo
ttgcggggcatgctggcgcccagggtgagac

SEQ ID NO: 26082 - DNA, 57 bp, Homo sapiens
  chr19:46330671-46330728
  hypo
aagggagtgtggaagacgtgggctggttactcaggatagaggcggcctctgcaagct

SEQ ID NO: 26083 - DNA, 31 bp, Homo sapiens
  chr19:46345642-46345673
  hypo
ggaactccaaggaagccgggtgcttcagcac

SEQ ID NO: 26084 - DNA, 63 bp, Homo sapiens
  chr19:46345685-46345748
  hypo
cagcttcagattcttacgcacactgctcacctgcgatttggccagcgtcgggggcaggttggc

SEQ ID NO: 26085 - DNA, 31 bp, Homo sapiens
  chr19:46404483-46404514
  hypo
aaaaggcttgcaacagcgcaggcacacagcc

SEQ ID NO: 26086 - DNA, 111 bp, Homo sapiens
  chr19:46404521-46404632
  hypo
aagacactcacctgcacgtcggtcctcccggcggtcttccgacaacacgtagcgctgagggcaggcgcttgggggcggcggctgtgaagagggggccgcagggggctcctc

SEQ ID NO: 26087 - DNA, 31 bp, Homo sapiens
  chr19:46404634-46404665
  hypo
ccccagcacctgcccccggcgccgccacacc

SEQ ID NO: 26088 - DNA, 31 bp, Homo sapiens
  chr19:46835961-46835992
  hypo
cagacataatgcctcacgcctgtaatcccag

SEQ ID NO: 26089 - DNA, 4 bp, Homo sapiens
  chr19:46875775-46875779
  hypo
caaa

SEQ ID NO: 26090 - DNA, 51 bp, Homo sapiens
  chr19:46875805-46875856
  hypo
ccaatccccaaatacacgcagcccccagggcttcttcggggattgtgaacc

SEQ ID NO: 26091 - DNA, 37 bp, Homo sapiens
  chr19:46875886-46875923
  hypo
attacccatgagtactcgctgacgaagataatgcttt

SEQ ID NO: 26092 - DNA, 31 bp, Homo sapiens
  chr19:47113153-47113184
  hypo
gttcctgaagcgctctcgagctgttctgtaa

SEQ ID NO: 26093 - DNA, 40 bp, Homo sapiens
  chr19:47116935-47116975
  hypo
gatggactgattaaaacgcagcacccgctcaaggtgtgcg

SEQ ID NO: 26094 - DNA, 38 bp, Homo sapiens
  chr19:47200498-47200536
  hypo
gatgtttgaagagtcacgtgaaccgccagactttcctg

SEQ ID NO: 26095 - DNA, 39 bp, Homo sapiens
  chr19:47270416-47270455
  hypo
gcccagggatccccaccgccaggccggagccaaccccat

SEQ ID NO: 26096 - DNA, 31 bp, Homo sapiens
  chr19:47274002-47274033
  hypo
ccactgcacccagccccggcttttattttaa

SEQ ID NO: 26097 - DNA, 43 bp, Homo sapiens
  chr19:47284560-47284603
  hypo
agaggactcccaagtccgggcgcggtggctcacgcctgtaatc

SEQ ID NO: 26098 - DNA, 51 bp, Homo sapiens
  chr19:47305319-47305370
  hypo
agatgatcttgggtaacggattccatctctgaacctcgggtcatctctgaa

SEQ ID NO: 26099 - DNA, 31 bp, Homo sapiens
  chr19:47350196-47350227
  hypo
taggcatgggccaccacgcccagtcagccag

SEQ ID NO: 26100 - DNA, 56 bp, Homo sapiens; identical to SEQ ID NO: 6837
  chr19:47363285-47363341
  hypo

SEQ ID NO: 26101 - DNA, 31 bp, Homo sapiens; identical to SEQ ID NO: 6838
  chr19:47363344-47363375
  hypo

SEQ ID NO: 26102 - DNA, 14 bp, Homo sapiens
  chr19:47363388-47363402
  hypo
ccaggagaaagagc

SEQ ID NO: 26103 - DNA, 39 bp, Homo sapiens
  chr19:47498023-47498062
  hypo
agtacccaggcaggagcgggtccccgtaaatatctgctc

SEQ ID NO: 26104 - DNA, 31 bp, Homo sapiens; identical to SEQ ID NO: 6842
  chr19:47523252-47523283
  hypo

SEQ ID NO: 26105 - DNA, 31 bp, Homo sapiens
  chr19:47540627-47540658
  hypo
tgcattagatcctaagcgcaggcccacaatg

SEQ ID NO: 26106 - DNA, 35 bp, Homo sapiens
  chr19:47540683-47540718
  hypo
tcagaaaactgaggcacggcgcggagaggttaagt

SEQ ID NO: 26107 - DNA, 31 bp, Homo sapiens
  chr19:47540767-47540798
  hypo
ccaggtctgtctgttccggggtcagcacgcc

SEQ ID NO: 26108 - DNA, 44 bp, Homo sapiens
  chr19:47593037-47593081
  hypo
cccaaccacagcccagcgggtgatctctccggtctcctgtgcca

SEQ ID NO: 26109 - DNA, 52 bp, Homo sapiens
  chr19:47593148-47593200
  hypo
tgtgagaccaggccaccggggttggcccgggtggctccgatgccccagagga

SEQ ID NO: 26110 - DNA, 61 bp, Homo sapiens
  chr19:47593209-47593270
  hypo
agggcagggctcacctcggccgcggctgctgccctccttggcacgccggtactggttcagc

SEQ ID NO: 26111 - DNA, 85 bp, Homo sapiens
  chr19:47633341-47633426
  hypo
gagattacaggtgcgagtcaccgtgcctggcctattcctgttttcttaacgctcctctctcccactgggccgtgactgcctctaa

SEQ ID NO: 26112 - DNA, 54 bp, Homo sapiens
  chr19:47646738-47646792
  hypo
tttgtcttacaggctgcgggcctctcgggtgcttcttgtcggcttgaaaggact

SEQ ID NO: 26113 - DNA, 41 bp, Homo sapiens
  chr19:47646839-47646880
  hypo
tgaccatgctggatcacgaacaggtgcgctgttgtgagctc

SEQ ID NO: 26114 - DNA, 31 bp, Homo sapiens; identical to SEQ ID NO: 6843
  chr19:47729938-47729969
  hypo

SEQ ID NO: 26115 - DNA, 31 bp, Homo sapiens; identical to SEQ ID NO: 6844
  chr19:47738880-47738911
  hypo

SEQ ID NO: 26116 - DNA, 34 bp, Homo sapiens; identical to SEQ ID NO: 6845
  chr19:47742974-47743008
  hypo

SEQ ID NO: 26117 - DNA, 31 bp, Homo sapiens
  chr19:47777369-47777400
  hypo
agagggaaaagctgaccgttggggaggagct

SEQ ID NO: 26118 - DNA, 53 bp, Homo sapiens
  chr19:47817583-47817636
  hypo
cccaatatgtgggccacgtgccacaatgcagctacctacgtttatttttcact

SEQ ID NO: 26119 - DNA, 31 bp, Homo sapiens
  chr19:47844143-47844174
  hypo
gccatcgacccgctgcgcgtggccccgctcc

SEQ ID NO: 26120 - DNA, 31 bp, Homo sapiens
  chr19:47980239-47980270
  hypo
tgcccagcacccttggcggatgctaagctgg

SEQ ID NO: 26121 - DNA, 60 bp, Homo sapiens
  chr19:48003606-48003666
  hypo
ccactcccaaatgctccgggattgggaaggggtgatcagctgcaccgacaccaccgacac

SEQ ID NO: 26122 - DNA, 31 bp, Homo sapiens
  chr19:48003977-48004008
  hypo
tgcagcctggcagaacgcgtttccagcagct

SEQ ID NO: 26123 - DNA, 56 bp, Homo sapiens
  chr19:48012649-48012705
  hypo
acaggcctggcctcagcgccagctcatcgtgtgccagcctgcgtttccttatgtgt

SEQ ID NO: 26124 - DNA, 31 bp, Homo sapiens
  chr19:48058859-48058890
  hypo
gaatcactgtccttcccggagtacagggaca

SEQ ID NO: 26125 - DNA, 31 bp, Homo sapiens
  chr19:48073242-48073273
  hypo
tttctctggccgggcacggtggctcacgact

SEQ ID NO: 26126 - DNA, 31 bp, Homo sapiens
  chr19:48082931-48082962
  hypo
tttaggcatgagccaccgagcctggccaatg

SEQ ID NO: 26127 - DNA, 31 bp, Homo sapiens
  chr19:48082988-48083019
  hypo
ttgtgtcacttaacaacggagatctgtctga

SEQ ID NO: 26128 - DNA, 31 bp, Homo sapiens
  chr19:48120570-48120601
  hypo
ttttgccatctagactcggcttggcagattt

SEQ ID NO: 26129 - DNA, 31 bp, Homo sapiens
  chr19:48151219-48151250
  hypo
cctggcatttcctgggcgggaactactggtg

SEQ ID NO: 26130 - DNA, 38 bp, Homo sapiens
  chr19:48151264-48151302
  hypo
taacttgctcctgggtcggtgtgcgggatagggggagg

SEQ ID NO: 26131 - DNA, 105 bp, Homo sapiens
  chr19:48151306-48151411
  hypo
atcagtctttgtggagcgtctgccttctctccgtctccctgttttcctgttaccgtctccccgtccctctctctgtctctctgaactgctcgttccctccttgcc

SEQ ID NO: 26132 - DNA, 31 bp, Homo sapiens
  chr19:48154747-48154778
  hypo
catcttctcctcgggacgctgtctcttggtt

SEQ ID NO: 26133 - DNA, 22 bp, Homo sapiens
  chr19:48161875-48161897
  hypo
gagacttcgtctcaaaaaaaaa

SEQ ID NO: 26134 - DNA, 31 bp, Homo sapiens
  chr19:48161921-48161952
  hypo
ttctagaacagtggttcgcagagtgtggtct

SEQ ID NO: 26135 - DNA, 25 bp, Homo sapiens
  chr19:48293279-48293304
  hypo
gccacacaggcgtgagccacactgc

SEQ ID NO: 26136 - DNA, 43 bp, Homo sapiens
  chr19:48305537-48305580
  hypo
agattgggcctgggatcgggcctgggttcgggcctgagattgg

SEQ ID NO: 26137 - DNA, 31 bp, Homo sapiens
  chr19:48326572-48326603
  hypo
gttttcccaaaaggaacgagcgagggctgtg

SEQ ID NO: 26138 - DNA, 22 bp, Homo sapiens
  chr19:48586354-48586376
  hypo
agccaccgcgcctggccctggc

SEQ ID NO: 26139 - DNA, 31 bp, Homo sapiens
  chr19:48801739-48801770
  hypo
cagccaggcagggggacggcactgctgtgca

SEQ ID NO: 26140 - DNA, 31 bp, Homo sapiens
  chr19:48806355-48806386
  hypo
ggagagttgggcaaggcggggcccagagaga

SEQ ID NO: 26141 - DNA, 49 bp, Homo sapiens
  chr19:48823577-48823626
  hypo
gcttccctcctcggagcgggcgctccctgccaagcgtcccaaaggcatc

SEQ ID NO: 26142 - DNA, 31 bp, Homo sapiens; identical to SEQ ID NO: 6846
  chr19:48823670-48823701
  hypo

SEQ ID NO: 26143 - DNA, 31 bp, Homo sapiens; identical to SEQ ID NO: 6847
  chr19:48823705-48823736
  hypo

SEQ ID NO: 26144 - DNA, 31 bp, Homo sapiens
  chr19:48857972-48858003
  hypo
tgaatgaatgaatcagcgaaaaaagatcaga

SEQ ID NO: 26145 - DNA, 31 bp, Homo sapiens
  chr19:48889322-48889353
  hypo
tagggaacagagtcaccgtttaaagagagac

SEQ ID NO: 26146 - DNA, 24 bp, Homo sapiens
  chr19:48902532-48902556
  hypo
aggaatgggcctgggcgcggtggc

SEQ ID NO: 26147 - DNA, 22 bp, Homo sapiens
  chr19:48902795-48902817
  hypo
gcctgggcgacacagtgagact

SEQ ID NO: 26148 - DNA, 31 bp, Homo sapiens
  chr19:48902847-48902878
  hypo
ttcagaaagaaaggggcgaagtctagtggag

SEQ ID NO: 26149 - DNA, 45 bp, Homo sapiens
  chr19:48989604-48989649
  hypo
cgcgcccggccttttggaacattcttcctacgtgactcaggcccc

SEQ ID NO: 26150 - DNA, 53 bp, Homo sapiens; identical to SEQ ID NO: 6850
  chr19:48994528-48994581
  hypo

SEQ ID NO: 26151 - DNA, 31 bp, Homo sapiens; identical to SEQ ID NO: 6851
  chr19:48996514-48996545
  hypo

SEQ ID NO: 26152 - DNA, 41 bp, Homo sapiens
  chr19:49043470-49043511
  hypo
cctatccatgcattggcgaggcgtgtcgatcctgcagctgg

SEQ ID NO: 26153 - DNA, 43 bp, Homo sapiens
  chr19:49143015-49143058
  hypo
ccctccctctgaatctcgcctccgctcacgttgacaaagaggc

SEQ ID NO: 26154 - DNA, 54 bp, Homo sapiens
  chr19:49143067-49143121
  hypo
ccaggccattggggccgcgggaggcagcgctgaaattcccgtagagttcctggt

SEQ ID NO: 26155 - DNA, 31 bp, Homo sapiens
  chr19:49166052-49166083
  hypo
tagccagctgggtctgcggggcaggagatcc

SEQ ID NO: 26156 - DNA, 31 bp, Homo sapiens
  chr19:49173463-49173494
  hypo
ggaggtatgaggggaccgagtctgagactgg

SEQ ID NO: 26157 - DNA, 113 bp, Homo sapiens
  chr19:49173706-49173819
  hypo
gtggcggcagtggcagcgggggggccgggcacgggcggcacagcgggcagcgtggccatgacactggcagcggcctctcagcccagctgccgctagcccggcctggcccccaa

SEQ ID NO: 26158 - DNA, 56 bp, Homo sapiens
  chr19:49180461-49180517
  hypo
gatggaccttgaaacacggtgccgagtgaggaagccagactcggaaggccatggag

SEQ ID NO: 26159 - DNA, 31 bp, Homo sapiens
  chr19:49183538-49183569
  hypo
cggcccgccttcatcccggcccagatgcaca

SEQ ID NO: 26160 - DNA, 36 bp, Homo sapiens
  chr19:49183599-49183635
  hypo
tgccggtgctgcacagcgccacggccagcaggatcc

SEQ ID NO: 26161 - DNA, 84 bp, Homo sapiens
  chr19:49183641-49183725
  hypo
agaactaccacctgaacgactggatggaggaggagtaccgccacatcccggggcgctgtgtccgcctcacgggctacccctgct

SEQ ID NO: 26162 - DNA, 142 bp, Homo sapiens
  chr19:49183848-49183990
  hypo
ccttcgtgggggtccacgtgcgccggggggactatgtccgtgtcatgccgcgcgtatggaagggggtgctggccgaccggctacctgcagcgggccctggactggttccgggcctgctgccgcctcccggtctttgtggtca

SEQ ID NO: 26163 - DNA, 31 bp, Homo sapiens
  chr19:49207343-49207374
  hypo
ctcttctgtgaagatgcgttgggctgcaagt

SEQ ID NO: 26164 - DNA, 2 bp, Homo sapiens
  chr19:49207387-49207389
  hypo
gt

SEQ ID NO: 26165 - DNA, 14 bp, Homo sapiens
  chr19:49232013-49232027
  hypo
gtctcaaaaacaaa

SEQ ID NO: 26166 - DNA, 1 bp, Homo sapiens
  chr19:49237046-49237047
  hypo
a

SEQ ID NO: 26167 - DNA, 57 bp, Homo sapiens
  chr19:49237088-49237145
  hypo
gggcagtgcactcctacgaagaaaacacaggcttatccagaacgtgatcccaggcaa

SEQ ID NO: 26168 - DNA, 19 bp, Homo sapiens
  chr19:49241202-49241221
  hypo
tgtttgtttgttttttcga

SEQ ID NO: 26169 - DNA, 31 bp, Homo sapiens
  chr19:49246878-49246909
  hypo
ttcctagatggtcagacgaaggcacaggacc

SEQ ID NO: 26170 - DNA, 1 bp, Homo sapiens
  chr19:49246954-49246955
  hypo
g

SEQ ID NO: 26171 - DNA, 27 bp, Homo sapiens
  chr19:49278471-49278498
  hypo
actccatctcaacgaacaaatatatac

SEQ ID NO: 26172 - DNA, 89 bp, Homo sapiens
  chr19:49281056-49281145
  hypo
ccggccagctttgccattttcacacgtggcctccaaggtctctctggatgtgggacgcaggctcccaggtgaaccgcaatgatccccac

SEQ ID NO: 26173 - DNA, 31 bp, Homo sapiens
  chr19:49287746-49287777
  hypo
agcatggcagactgcacgtgtgactgacctc

SEQ ID NO: 26174 - DNA, 22 bp, Homo sapiens
  chr19:49292498-49292520
  hypo
gccacggcgcctagtcctgttt

SEQ ID NO: 26175 - DNA, 21 bp, Homo sapiens
  chr19:49335057-49335078
  hypo
tggacacagttgcccacgcct

SEQ ID NO: 26176 - DNA, 42 bp, Homo sapiens
  chr19:49348662-49348704
  hypo
ctcagggctggaagcccgggagaccctcggagacccaagacc

SEQ ID NO: 26177 - DNA, 31 bp, Homo sapiens
  chr19:49348814-49348845
  hypo
cgcccccagtcagtctcgggggacctagggg

SEQ ID NO: 26178 - DNA, 36 bp, Homo sapiens
  chr19:49463918-49463954
  hypo
catgtttacaatttttgaagccgacttcaattgtgg

SEQ ID NO: 26179 - DNA, 31 bp, Homo sapiens; identical to SEQ ID NO: 6854
  chr19:49466992-49467023
  hypo

SEQ ID NO: 26180 - DNA, 34 bp, Homo sapiens
  chr19:49525577-49525611
  hypo
atcctagccagggggacggcgagttagtcagaac

SEQ ID NO: 26181 - DNA, 97 bp, Homo sapiens
  chr19:49540856-49540953
  hypo
ggaaatgcgtgtgcttcgggtgatttaactgattattgaataggcccgcaggaggtgtgtcctgcccccgaggccgcagcctcggaggacattatct

SEQ ID NO: 26182 - DNA, 31 bp, Homo sapiens
  chr19:49606779-49606810
  hypo
ggcccccaggagttgccgagccccccccatc

SEQ ID NO: 26183 - DNA, 334 bp, Homo sapiens; identical to SEQ ID NO: 6859
  chr19:49660927-49661261
  hypo

SEQ ID NO: 26184 - DNA, 31 bp, Homo sapiens
  chr19:49828593-49828624
  hypo
tcctctgactgctcacgcgccactcccttcc

SEQ ID NO: 26185 - DNA, 42 bp, Homo sapiens
  chr19:49971865-49971907
  hypo
gggcagcagaaaaaggcgccccaaagtcggcaggagcttgtc

SEQ ID NO: 26186 - DNA, 33 bp, Homo sapiens
  chr19:49997365-49997398
  hypo
ggcgtgagccatcgcgcccggccaatttttttt

SEQ ID NO: 26187 - DNA, 37 bp, Homo sapiens
  chr19:49997509-49997546
  hypo
cagtctcacctgttcccggaactttgggaggccgagg

SEQ ID NO: 26188 - DNA, 126 bp, Homo sapiens
  chr19:50059841-50059967
  hypo
aggctgtcgcgggtcacggcacacacgtagcgctcgctgcgggtgatgagccccacgcggtccacggagctgtctagcggtgtgaagtgcacgggcgtcaggtccgacatgcgcaggggcttccct

SEQ ID NO: 26189 - DNA, 121 bp, Homo sapiens
  chr19:50059968-50060089
  hypo
acatggggcaggtcaccgtgcgggactgcaaggggcagagagaggcgggctcagtaggcagggctggcgcaggtggagagcgcgtggtccctgtgcgtgaggaggacggtggggaaccctg

SEQ ID NO: 26190 - DNA, 31 bp, Homo sapiens
  chr19:50060437-50060468
  hypo
gtcctgcgaggccgcccgctgaagctccttc

SEQ ID NO: 26191 - DNA, 42 bp, Homo sapiens
  chr19:50060911-50060953
  hypo
agtgcatgccccagcccgtgtttgggacgggggatgtagact

SEQ ID NO: 26192 - DNA, 48 bp, Homo sapiens
  chr19:50060976-50061024
  hypo
agcccatgtctatggacggacagtgagtgaggacgggagaagtgaagc

SEQ ID NO: 26193 - DNA, 50 bp, Homo sapiens
  chr19:50061034-50061084
  hypo
gctcagccctgcctggcgcacagcagttgcctgggcggtgctgcagttcc

SEQ ID NO: 26194 - DNA, 68 bp, Homo sapiens
  chr19:50061335-50061403
  hypo
ccatggaaggccaggccgggttcccagtaacacgccttgagaatgctcatctgcgtgtacctcccagg

SEQ ID NO: 26195 - DNA, 50 bp, Homo sapiens
  chr19:50061413-50061463
  hypo
tgtcctctgatttggccgtcagcccgttttacagacgatgaaactgaggc

SEQ ID NO: 26196 - DNA, 24 bp, Homo sapiens
  chr19:50061475-50061499
  hypo
aggtgatgtcaattcacgtagcac

SEQ ID NO: 26197 - DNA, 31 bp, Homo sapiens
  chr19:50092048-50092079
  hypo
tggttttggcgactgtcgctctgtctggatc

SEQ ID NO: 26198 - DNA, 34 bp, Homo sapiens
  chr19:50129707-50129741
  hypo
gagtgcctctgtcctgcggcgctggagtgggtgg

SEQ ID NO: 26199 - DNA, 106 bp, Homo sapiens
  chr19:50208441-50208547
  hypo
ggcagctcacagcccacggtttcctgcagactttgctgatgggaatgcgccccttatgctctgcccagtacgagaagatcttcaacaccacgcggattccaggggt

SEQ ID NO: 26200 - DNA, 31 bp, Homo sapiens
  chr19:50208610-50208641
  hypo
catgttttctggagtccgcctgactgagctg

SEQ ID NO: 26201 - DNA, 31 bp, Homo sapiens
  chr19:50215624-50215655
  hypo
atgttgagaaaggatgcgtcagcagagaagt

SEQ ID NO: 26202 - DNA, 31 bp, Homo sapiens
  chr19:50218145-50218176
  hypo
cacacaaccaacacaacgtccaactccaagc

SEQ ID NO: 26203 - DNA, 31 bp, Homo sapiens
  chr19:50247504-50247535
  hypo
gttgccttggtgggaccgatccaggttcatg

SEQ ID NO: 26204 - DNA, 31 bp, Homo sapiens
  chr19:50264372-50264403
  hypo
tttaaaaataaaggaacgaatgtatgcatct

SEQ ID NO: 26205 - DNA, 63 bp, Homo sapiens
  chr19:50304784-50304847
  hypo
ggccggctcccagctgcgcaatgctgacgtggagctgcagcagcgagccgtggagtacctcac

SEQ ID NO: 26206 - DNA, 34 bp, Homo sapiens
  chr19:50304852-50304886
  hypo
gctcagtggccagcaccgacgtcctggtcagagc

SEQ ID NO: 26207 - DNA, 35 bp, Homo sapiens
  chr19:50319639-50319674
  hypo
catgagccatctcgcccggccgaagattatgtttt

SEQ ID NO: 26208 - DNA, 65 bp, Homo sapiens
  chr19:50353429-50353494
  hypo
cttgctaactttacctcgctatggtcatatcccatcgccctgtggatgtgcgctagttaacactt

SEQ ID NO: 26209 - DNA, 49 bp, Homo sapiens
  chr19:50353513-50353562
  hypo
tctctccccagtggaccgtggggcctgtgagggacgtggtctgattcgg

SEQ ID NO: 26210 - DNA, 31 bp, Homo sapiens
  chr19:50355763-50355794
  hypo
cgcgcagttttgcacacgattgccaagatgt

SEQ ID NO: 26211 - DNA, 49 bp, Homo sapiens
  chr19:50361409-50361458
  hypo
tagctcttccagagggcggggctgggggcaagagcgcctccccaggtgg

SEQ ID NO: 26212 - DNA, 31 bp, Homo sapiens
  chr19:50364772-50364803
  hypo
gggaacatcagaggggcggcaggcccagggg

SEQ ID NO: 26213 - DNA, 132 bp, Homo sapiens
  chr19:50364830-50364962
  hypo
cagcccggggggtgtccgggctgagcgggctcacccggttgttgtggcgcgcctgctccagagtggcggtgaagaggaagcagcggcaggggacgcccgcggctcgggcacactggacgtacctgtggggga

SEQ ID NO: 26214 - DNA, 163 bp, Homo sapiens
  chr19:50364967-50365130
  hypo
ctggatgtgcaggccccgcccaccccgccgcaggccacctacggccccgcggtcacgctacctggcgcggctcgcggcgtctgggtttgtgttgtcgatggcgacccgtttcccttgcttcagggctgtctcacacgtggtcacacagcgctgccaggagcct

SEQ ID NO: 26215 - DNA, 31 bp, Homo sapiens
  chr19:50365131-50365162
  hypo
gcgtgtcctggggacacgagaggtcacaaac

SEQ ID NO: 26216 - DNA, 31 bp, Homo sapiens
  chr19:50406381-50406412
  hypo
acaacaaaacaaaaaacggttggtttgtcaa

SEQ ID NO: 26217 - DNA, 60 bp, Homo sapiens
  chr19:50406526-50406586
  hypo
aggctagtccccatcacggcagcgcacccggtctgcttcttgcctcgggaaacctttggc

SEQ ID NO: 26218 - DNA, 31 bp, Homo sapiens
  chr19:50424142-50424173
  hypo
tcaacatcagcttccccggggagaggcagtg

SEQ ID NO: 26219 - DNA, 31 bp, Homo sapiens
  chr19:50477608-50477639
  hypo
tgtcctgagaaatgcacggttaggtgattct

SEQ ID NO: 26220 - DNA, 31 bp, Homo sapiens
  chr19:50673968-50673999
  hypo
aaatgccagcagcacccgcactcccagctgt

SEQ ID NO: 26221 - DNA, 38 bp, Homo sapiens
  chr19:50705040-50705078
  hypo
ctggaattagaggcgtgagccaccgctcctggccagta

SEQ ID NO: 26222 - DNA, 31 bp, Homo sapiens
  chr19:50726894-50726925
  hypo
tgatgcctgggtttgtcgtctaagtgaatgt

SEQ ID NO: 26223 - DNA, 31 bp, Homo sapiens
  chr19:50753943-50753974
  hypo
aggtaggggctggggccggccttggggcatg

SEQ ID NO: 26224 - DNA, 54 bp, Homo sapiens
  chr19:50756057-50756111
  hypo
ttctccaaatccacagcgtgagcacctttgtttcagaggcggaggtctgaacct

SEQ ID NO: 26225 - DNA, 23 bp, Homo sapiens
  chr19:50764002-50764025
  hypo
tgcgtgtgtgtgtgtgcgtgcat

SEQ ID NO: 26226 - DNA, 31 bp, Homo sapiens
  chr19:50764722-50764753
  hypo
ccctcacagatccaggcgctggaactggacc

SEQ ID NO: 26227 - DNA, 62 bp, Homo sapiens
  chr19:50764856-50764918
  hypo
cttccaggcagctgcccggggatacctggctcgcaggtgggcagccacgctgtctcccgggg

SEQ ID NO: 26228 - DNA, 31 bp, Homo sapiens
  chr19:50765105-50765136
  hypo
agaggctggacttagccgcagggtgaccagc

SEQ ID NO: 26229 - DNA, 76 bp, Homo sapiens
  chr19:50765187-50765263
  hypo
taaaacagagaaagcccggggcaacccaggtcaagctgtccgctctccctggccagtccctcgaggggctccagtc

SEQ ID NO: 26230 - DNA, 31 bp, Homo sapiens
  chr19:50765284-50765315
  hypo
catagagtcccagtcccgggtgagacctgct

SEQ ID NO: 26231 - DNA, 31 bp, Homo sapiens
  chr19:50766646-50766677
  hypo
acactggcagtggtggcggctgtttaccaag

SEQ ID NO: 26232 - DNA, 31 bp, Homo sapiens
  chr19:50783166-50783197
  hypo
gccagactgttttccacggcagctgtaacat

SEQ ID NO: 26233 - DNA, 44 bp, Homo sapiens
  chr19:50784839-50784883
  hypo
cctcccctcagctttccgagtggcggcggcgccaggaggaggag

SEQ ID NO: 26234 - DNA, 121 bp, Homo sapiens
  chr19:50784897-50785018
  hypo
ggcaggggaggaggcacggcgccgggcagcccgggaggccgaggccctgacccagcgcctggcagaaaagacagagaccgtggatcggctggagcggggccgccgccggctgcagcaggag

SEQ ID NO: 26235 - DNA, 31 bp, Homo sapiens
  chr19:50819987-50820018
  hypo
atttcaaaaacaaaaacgaaagggttgggaa

SEQ ID NO: 26236 - DNA, 31 bp, Homo sapiens
  chr19:50826552-50826583
  hypo
gcttggccatggccagcgaatagtacatgcc

SEQ ID NO: 26237 - DNA, 101 bp, Homo sapiens
  chr19:50826584-50826685
  hypo
aagttgttgacaatgacgggcacaggcatggcgatggtcagcacccccgccagggcacacagcgccccgaccagcatccccgaccacgtcttggggtacat

SEQ ID NO: 26238 - DNA, 31 bp, Homo sapiens
  chr19:50826687-50826718
  hypo
ctccatagcccagggtcgtcatggtgaccac

SEQ ID NO: 26239 - DNA, 73 bp, Homo sapiens
  chr19:50826764-50826837
  hypo
gagcccaggatgtcatcggggtcggcgccaatgcgctcagcgtagtaaatcatggtggcgaagatgagcaccc

SEQ ID NO: 26240 - DNA, 120 bp, Homo sapiens
  chr19:50826854-50826974
  hypo
atgagcagcaggaactcgttggtgctggcgcggagcgtgtgtcccagcacgcgcagccccacgaagtgccgggtcagcttgaagatgcgcaggatgcggacgaagcggaccacccgcagg

SEQ ID NO: 26241 - DNA, 44 bp, Homo sapiens
  chr19:50827096-50827140
  hypo
tgggcagaaggtgatgcgcatgaggaactcgaaggtgaaccaga

SEQ ID NO: 26242 - DNA, 31 bp, Homo sapiens; identical to SEQ ID NO: 6871
  chr19:50829065-50829096
  hypo

SEQ ID NO: 26243 - DNA, 31 bp, Homo sapiens; identical to SEQ ID NO: 6872
  chr19:50833852-50833883
  hypo

SEQ ID NO: 26244 - DNA, 114 bp, Homo sapiens; identical to SEQ ID NO: 6873
  chr19:50833885-50833999
  hypo

SEQ ID NO: 26245 - DNA, 31 bp, Homo sapiens
  chr19:50838465-50838496
  hypo
gtcgccagccctcccccgccagccctaggaa

SEQ ID NO: 26246 - DNA, 31 bp, Homo sapiens
  chr19:50898860-50898891
  hypo
gtaaagaacacctgcacgccctttgcccaga

SEQ ID NO: 26247 - DNA, 31 bp, Homo sapiens
  chr19:50919969-50920000
  hypo
cagccaccagggtgagcggccctggccactg

SEQ ID NO: 26248 - DNA, 62 bp, Homo sapiens
  chr19:50920013-50920075
  hypo
cctcaacctgctctgccgtcaccccagatcctagacacccaccccatcggctggcactgcca

SEQ ID NO: 26249 - DNA, 31 bp, Homo sapiens
  chr19:51295127-51295158
  hypo
ccgcctgagctggctccgagaagcaagactg

SEQ ID NO: 26250 - DNA, 43 bp, Homo sapiens
  chr19:51295410-51295453
  hypo
gccctggagggctggacggtgagcagggcggcggtggggggcg

SEQ ID NO: 26251 - DNA, 31 bp, Homo sapiens; identical to SEQ ID NO: 6877
  chr19:52207084-52207115
  hypo

SEQ ID NO: 26252 - DNA, 31 bp, Homo sapiens; identical to SEQ ID NO: 6878
  chr19:52207133-52207164
  hypo

SEQ ID NO: 26253 - DNA, 82 bp, Homo sapiens; identical to SEQ ID NO: 6879
  chr19:52207202-52207284
  hypo

SEQ ID NO: 26254 - DNA, 405 bp, Homo sapiens; identical to SEQ ID NO: 6880
  chr19:52207401-52207806
  hypo

SEQ ID NO: 26255 - DNA, 31 bp, Homo sapiens; identical to SEQ ID NO: 6881
  chr19:52531307-52531338
  hypo

SEQ ID NO: 26256 - DNA, 57 bp, Homo sapiens; identical to SEQ ID NO: 6882
  chr19:52531783-52531840
  hypo

SEQ ID NO: 26257 - DNA, 31 bp, Homo sapiens
  chr19:52565128-52565159
  hypo
ctctaagggtgaagagcgaccatccctatag

SEQ ID NO: 26258 - DNA, 51 bp, Homo sapiens
  chr19:52569173-52569224
  hypo
ttataaggtttctctccggtatgaattttccgatgacgtgctaggcatgag

SEQ ID NO: 26259 - DNA, 72 bp, Homo sapiens
  chr19:52569227-52569299
  hypo
taactgaagaccttgccgcattcgttacactggaaaggtttctctccggtatgacttcgcctatgaattgaa

SEQ ID NO: 26260 - DNA, 51 bp, Homo sapiens
  chr19:52569341-52569392
  hypo
ttgtaaggtttctctccggtatgcattctttgatgacgtgctaggcatgaa

SEQ ID NO: 26261 - DNA, 31 bp, Homo sapiens; identical to SEQ ID NO: 6883
  chr19:52643470-52643501
  hypo

SEQ ID NO: 26262 - DNA, 36 bp, Homo sapiens; identical to SEQ ID NO: 6884
  chr19:52674676-52674712
  hypo

SEQ ID NO: 26263 - DNA, 36 bp, Homo sapiens
  chr19:52801590-52801626
  hypo
ggggaagaggcaagaccgggcacagtggctcacgcc

SEQ ID NO: 26264 - DNA, 31 bp, Homo sapiens
  chr19:53029535-53029566
  hypo
caggcatgttggctgacgcatgtaatcccag

SEQ ID NO: 26265 - DNA, 31 bp, Homo sapiens
  chr19:53034437-53034468
  hypo
tagtcctggccatgttcggtggctcacactt

SEQ ID NO: 26266 - DNA, 31 bp, Homo sapiens
  chr19:53089213-53089244
  hypo
tagttttggaaagttcgcgttaattggtttt

SEQ ID NO: 26267 - DNA, 35 bp, Homo sapiens
  chr19:53601967-53602002
  hypo
ccaggacccctgactgcgagcgcatcacctgctgg

SEQ ID NO: 26268 - DNA, 95 bp, Homo sapiens
  chr19:53602015-53602110
  hypo
tgcccaggatggccaccgggccccggtgatgtgtagagcgcggaagacccgggagctggagtaaggcggtggggacgcctcggcactggctgagg

SEQ ID NO: 26269 - DNA, 31 bp, Homo sapiens
  chr19:53668464-53668495
  hypo
tccagtatgaattcttcgatgatttgctaag

SEQ ID NO: 26270 - DNA, 61 bp, Homo sapiens
  chr19:53668504-53668565
  hypo
tgagtgaaaaccttgacgcattcattacatttgaaaggcttttctccggtatggatgatct

SEQ ID NO: 26271 - DNA, 34 bp, Homo sapiens
  chr19:53854270-53854304
  hypo
gaaatcaaacagttgacgggtagtacaaaccgac

SEQ ID NO: 26272 - DNA, 47 bp, Homo sapiens
  chr19:53854363-53854410
  hypo
tcgcatctgcctgaactccacatgtttcagaccgaagggaaaattgg

SEQ ID NO: 26273 - DNA, 31 bp, Homo sapiens
  chr19:53854426-53854457
  hypo
tctatcaacagtgcttcgttggtttcaacat

SEQ ID NO: 26274 - DNA, 31 bp, Homo sapiens
  chr19:54072512-54072543
  hypo
gaccccagatgcacctcgttttaatctcttt

SEQ ID NO: 26275 - DNA, 41 bp, Homo sapiens
  chr19:55609522-55609563
  hypo
gtgctttccaggggcacgtactcccccgagctcctgacagc

SEQ ID NO: 26276 - DNA, 31 bp, Homo sapiens
  chr19:55671890-55671921
  hypo
cagaatatcaagaagccgtcacttgcccagg

SEQ ID NO: 26277 - DNA, 36 bp, Homo sapiens
  chr19:55912264-55912300
  hypo
tccagaaccagacagacgaggcgagcctcatgccag

SEQ ID NO: 26278 - DNA, 50 bp, Homo sapiens; identical to SEQ ID NO: 6893
  chr19:55953998-55954048
  hypo

SEQ ID NO: 26279 - DNA, 31 bp, Homo sapiens
  chr19:55986596-55986627
  hypo
ttcaacaaacaagtaccgtctgcttctccat

SEQ ID NO: 26280 - DNA, 68 bp, Homo sapiens
  chr19:55986655-55986723
  hypo
ctgggcagcaaagacacgaaaggtcctcgctgtcatgggacatagataaatgtcgctgagcatgtaag

SEQ ID NO: 26281 - DNA, 31 bp, Homo sapiens
  chr19:55998079-55998110
  hypo
ccgcctgtctgtctctcgctggcaccgccgc

SEQ ID NO: 26282 - DNA, 31 bp, Homo sapiens
  chr19:56052608-56052639
  hypo
aggccccaggagtccacggctggccgcagag

SEQ ID NO: 26283 - DNA, 31 bp, Homo sapiens
  chr19:56066672-56066703
  hypo
caaattaaaacaagatcgattaaataatgat

SEQ ID NO: 26284 - DNA, 60 bp, Homo sapiens
  chr19:56089713-56089773
  hypo
gcgtggcgcgccaggtcggccaggcgcttgaactcccgctggcagcgcacgcactggaag

SEQ ID NO: 26285 - DNA, 87 bp, Homo sapiens; identical to SEQ ID NO: 6897
  chr19:56159540-56159627
  hypo

SEQ ID NO: 26286 - DNA, 50 bp, Homo sapiens; identical to SEQ ID NO: 6898
  chr19:56159637-56159687
  hypo

SEQ ID NO: 26287 - DNA, 31 bp, Homo sapiens
  chr19:56178937-56178968
  hypo
ctggtatgtcagccctcgaagacactggatc

SEQ ID NO: 26288 - DNA, 11 bp, Homo sapiens
  chr19:56179450-56179461
  hypo
actgagcttta

SEQ ID NO: 26289 - DNA, 31 bp, Homo sapiens
  chr19:56179511-56179542
  hypo
actcaccagtaggtcccgagcccaggtgacc

SEQ ID NO: 26290 - DNA, 31 bp, Homo sapiens
  chr19:56179584-56179615
  hypo
ctttgtgcctttggagcgttctggaggatgt

SEQ ID NO: 26291 - DNA, 40 bp, Homo sapiens
  chr19:56179647-56179687
  hypo
tttgggagacatggtgcgttctccccgaggagcctctgtg

SEQ ID NO: 26292 - DNA, 36 bp, Homo sapiens
  chr19:56179723-56179759
  hypo
tggggtggggtgggcacgtggcgacccctccctcgt

SEQ ID NO: 26293 - DNA, 31 bp, Homo sapiens
  chr19:56181898-56181929
  hypo
cctgcaccctgctgtccgtgcagctgttaga

SEQ ID NO: 26294 - DNA, 31 bp, Homo sapiens
  chr19:56197525-56197556
  hypo
gggtggtgaccagcaccgaaaacaaaacttg

SEQ ID NO: 26295 - DNA, 31 bp, Homo sapiens
  chr19:56197772-56197803
  hypo
tcagttagtggggatacgtgggatggggagg

SEQ ID NO: 26296 - DNA, 53 bp, Homo sapiens
  chr19:56198990-56199043
  hypo
tgtggtcctccctgtgcgctggcctcacctgtgccccacgctgcccttccatc

SEQ ID NO: 26297 - DNA, 44 bp, Homo sapiens
  chr19:56200495-56200539
  hypo
tgcctcatcctcaccccgccgtccctctgcgtgtcactctctgc

SEQ ID NO: 26298 - DNA, 31 bp, Homo sapiens
  chr19:56200565-56200596
  hypo
cagccctctctttcttcggctctatctgacc

SEQ ID NO: 26299 - DNA, 31 bp, Homo sapiens
  chr19:56205700-56205731
  hypo
ctgtgtactcaaggagcgtctgagggcaggc

SEQ ID NO: 26300 - DNA, 51 bp, Homo sapiens
  chr19:56205744-56205795
  hypo
gaggcacctgtgaacacgcccccgctgccttcccccgcgggcctatagacc

SEQ ID NO: 26301 - DNA, 31 bp, Homo sapiens
  chr19:56617328-56617359
  hypo
gcccacggcagtcaccgcgcattcccccctc

SEQ ID NO: 26302 - DNA, 31 bp, Homo sapiens
  chr19:56617513-56617544
  hypo
cctctgaactcctttccgtccctctggactt

SEQ ID NO: 26303 - DNA, 31 bp, Homo sapiens
  chr19:56617572-56617603
  hypo
acagcatctgttcctgcgtgtctgactcttc

SEQ ID NO: 26304 - DNA, 58 bp, Homo sapiens
  chr19:56617604-56617662
  hypo
acacagcatggtgctgcggcgtgccagcgtgtcgctcctctctcgggctgaaccccac

SEQ ID NO: 26305 - DNA, 34 bp, Homo sapiens
  chr19:56671236-56671270
  hypo
gcgcaaggagcacctgcggcgccaccgcgacacg

SEQ ID NO: 26306 - DNA, 31 bp, Homo sapiens
  chr19:56761105-56761136
  hypo
ctcctcagtgttgatacgatggcctcctctt

SEQ ID NO: 26307 - DNA, 31 bp, Homo sapiens
  chr19:56761139-56761170
  hypo
tcttttccatccaaggcgccacattgccttg

SEQ ID NO: 26308 - DNA, 31 bp, Homo sapiens
  chr19:56806260-56806291
  hypo
tatgactctgtctctacgacatgtccacagc

SEQ ID NO: 26309 - DNA, 31 bp, Homo sapiens; identical to SEQ ID NO: 6901
  chr19:56915153-56915184
  hypo

SEQ ID NO: 26310 - DNA, 52 bp, Homo sapiens; identical to SEQ ID NO: 6902
  chr19:56915376-56915428
  hypo

SEQ ID NO: 26311 - DNA, 58 bp, Homo sapiens; identical to SEQ ID NO: 6903
  chr19:56915637-56915695
  hypo

SEQ ID NO: 26312 - DNA, 43 bp, Homo sapiens; identical to SEQ ID NO: 6904
  chr19:56915725-56915768
  hypo

SEQ ID NO: 26313 - DNA, 99 bp, Homo sapiens; identical to SEQ ID NO: 6905
  chr19:56915770-56915869
  hypo

SEQ ID NO: 26314 - DNA, 15 bp, Homo sapiens
  chr19:57831971-57831986
  hypo
cgggagcctgacgcc

SEQ ID NO: 26315 - DNA, 8 bp, Homo sapiens
  chr19:57832024-57832032
  hypo
cgaggcct

SEQ ID NO: 26316 - DNA, 31 bp, Homo sapiens
  chr19:58006805-58006836
  hypo
aagccttgactgagtgcggtggctcacgcct

SEQ ID NO: 26317 - DNA, 31 bp, Homo sapiens
  chr19:58161230-58161261
  hypo
aactacacacatacaacgagtgtataaaatg

SEQ ID NO: 26318 - DNA, 116 bp, Homo sapiens; identical to SEQ ID NO: 6914
  chr19:58238569-58238685
  hypo

SEQ ID NO: 26319 - DNA, 49 bp, Homo sapiens; identical to SEQ ID NO: 6915
  chr19:58238689-58238738
  hypo

SEQ ID NO: 26320 - DNA, 54 bp, Homo sapiens; identical to SEQ ID NO: 6916
  chr19:58238987-58239041
  hypo

SEQ ID NO: 26321 - DNA, 31 bp, Homo sapiens
  chr19:58304690-58304721
  hypo
tacaggcatgagcccccgtgcctggccaaaa

SEQ ID NO: 26322 - DNA, 35 bp, Homo sapiens
  chr19:58316860-58316895
  hypo
ttttttttttttgagacggagtctcgctctgtcgc

SEQ ID NO: 26323 - DNA, 50 bp, Homo sapiens; identical to SEQ ID NO: 6921
  chr19:58661721-58661771
  hypo

SEQ ID NO: 26324 - DNA, 40 bp, Homo sapiens; identical to SEQ ID NO: 6922
  chr19:58694379-58694419
  hypo

SEQ ID NO: 26325 - DNA, 50 bp, Homo sapiens; identical to SEQ ID NO: 6923
  chr19:58694424-58694474
  hypo

SEQ ID NO: 26326 - DNA, 105 bp, Homo sapiens; identical to SEQ ID NO: 6924
  chr19:58694485-58694590
  hypo

SEQ ID NO: 26327 - DNA, 427 bp, Homo sapiens; identical to SEQ ID NO: 6925
  chr19:58694596-58695023
  hypo

SEQ ID NO: 26328 - DNA, 38 bp, Homo sapiens
  chr19:58711830-58711868
  hypo
attggtgggggacaagcgaggtacgggtgggcagcagt

SEQ ID NO: 26329 - DNA, 60 bp, Homo sapiens
  chr19:58711891-58711951
  hypo
ggttctgaggaggtgacgtttgagctcagacctgaatgggaaaggcgaaccaggtgaaga

SEQ ID NO: 26330 - DNA, 31 bp, Homo sapiens
  chr19:58711956-58711987
  hypo
gggaaggtgaaccaggcgaagatgttgggga

SEQ ID NO: 26331 - DNA, 91 bp, Homo sapiens
  chr19:58872595-58872686
  hypo
gacaaaaagaggttaacggggagcagaggtaggagggaagggtatgcggctctgtaagggcaacacggggatccttcgtgatggaaatatt

SEQ ID NO: 26332 - DNA, 89 bp, Homo sapiens; identical to SEQ ID NO: 6926
  chr19:58874183-58874272
  hypo

SEQ ID NO: 26333 - DNA, 31 bp, Homo sapiens; identical to SEQ ID NO: 6927
  chr19:58874318-58874349
  hypo

SEQ ID NO: 26334 - DNA, 69 bp, Homo sapiens
  chr19:58874870-58874939
  hypo
agaagctaagcagggtcgggcctggttagtacttgggagaccgtctgggaacaccgagtgctgttggct

SEQ ID NO: 26335 - DNA, 3 bp, Homo sapiens
  chr19:58874940-58874943
  hypo
aaa

SEQ ID NO: 26336 - DNA, 72 bp, Homo sapiens; identical to SEQ ID NO: 6928
  chr19:58920315-58920387
  hypo

SEQ ID NO: 26337 - DNA, 32 bp, Homo sapiens
  chr19:58964229-58964261
  hypo
tgtgggaaagaaattgcgggagcgctgagatc

SEQ ID NO: 26338 - DNA, 31 bp, Homo sapiens; identical to SEQ ID NO: 6929
  chr19:59010522-59010553
  hypo

SEQ ID NO: 26339 - DNA, 31 bp, Homo sapiens
  chr20:276871-276902
  hypo
gactggaaagtgcaaacggcccaagtcagtg

SEQ ID NO: 26340 - DNA, 34 bp, Homo sapiens
  chr20:276976-277010
  hypo
cacagttcttgatccacggcgtcagaaataaagt

SEQ ID NO: 26341 - DNA, 6 bp, Homo sapiens
  chr20:277015-277021
  hypo
aataaa

SEQ ID NO: 26342 - DNA, 31 bp, Homo sapiens
  chr20:401015-401046
  hypo
gcattccccttggacccggtgctgcccctgg

SEQ ID NO: 26343 - DNA, 97 bp, Homo sapiens
  chr20:401048-401145
  hypo
accccactcctgttcccgtctcagctcctcggcttcgtcacttccccacccctgacgttgagtggctccaccagccctggcccgggccctgccctgc

SEQ ID NO: 26344 - DNA, 31 bp, Homo sapiens
  chr20:401152-401183
  hypo
ctcaccactcagaccccggcccccttcctta

SEQ ID NO: 26345 - DNA, 31 bp, Homo sapiens
  chr20:401880-401911
  hypo
agagaagcagcctagacgtgagcgcaggcgt

SEQ ID NO: 26346 - DNA, 31 bp, Homo sapiens
  chr20:413053-413084
  hypo
ccatgctgcagtggtgcggaggagcagggag

SEQ ID NO: 26347 - DNA, 53 bp, Homo sapiens
  chr20:413085-413138
  hypo
tgtgtagggccaaccccggttcctgcctcagctccacccgccttgcacctgca

SEQ ID NO: 26348 - DNA, 31 bp, Homo sapiens
  chr20:413139-413170
  hypo
gtgaaaggtcttaagacgagcaggcccaggg

SEQ ID NO: 26349 - DNA, 41 bp, Homo sapiens
  chr20:799688-799729
  hypo
tgccgggatcacaggcgtgagccaccgcgccgggcccagct

SEQ ID NO: 26350 - DNA, 37 bp, Homo sapiens
  chr20:1276609-1276646
  hypo
cgtagagtagaagactcggtgccggcagtcaggaggc

SEQ ID NO: 26351 - DNA, 42 bp, Homo sapiens
  chr20:1323451-1323493
  hypo
gcaggacacccaaacacgtatgcaatgcgtacactggaagtt

SEQ ID NO: 26352 - DNA, 297 bp, Homo sapiens; identical to SEQ ID NO: 6942
  chr20:1784008-1784305
  hypo

SEQ ID NO: 26353 - DNA, 31 bp, Homo sapiens
  chr20:2143498-2143529
  hypo
ccaccacccattcacccggcccactggctct

SEQ ID NO: 26354 - DNA, 31 bp, Homo sapiens
  chr20:2150415-2150446
  hypo
caacaccacgacaacccggcttggatcctta

SEQ ID NO: 26355 - DNA, 42 bp, Homo sapiens
  chr20:2444390-2444432
  hypo
acctgttgggatggcccgccaaccccacggactggcccagca

SEQ ID NO: 26356 - DNA, 69 bp, Homo sapiens; identical to SEQ ID NO: 6943
  chr20:2444477-2444546
  hypo

SEQ ID NO: 26357 - DNA, 53 bp, Homo sapiens; identical to SEQ ID NO: 6944
  chr20:2444614-2444667
  hypo

SEQ ID NO: 26358 - DNA, 23 bp, Homo sapiens
  chr20:2645507-2645530
  hypo
caacatagggagacctcgactct

SEQ ID NO: 26359 - DNA, 21 bp, Homo sapiens
  chr20:2646009-2646030
  hypo
cagtcacgattttaggtgtgt

SEQ ID NO: 26360 - DNA, 31 bp, Homo sapiens
  chr20:2739579-2739610
  hypo
gtttcactctccagcccgggggcttcagggc

SEQ ID NO: 26361 - DNA, 62 bp, Homo sapiens
  chr20:2739612-2739674
  hypo
ggcatactcctaattacggtaggtctctggctgggtctggcctcccccgccccacctggccc

SEQ ID NO: 26362 - DNA, 31 bp, Homo sapiens
  chr20:2739707-2739738
  hypo
tgtgctcaagcctccccgctagcagccccac

SEQ ID NO: 26363 - DNA, 31 bp, Homo sapiens
  chr20:2739756-2739787
  hypo
tccaagtcttcctccccggggcccatctaga

SEQ ID NO: 26364 - DNA, 31 bp, Homo sapiens
  chr20:3003331-3003362
  hypo
cagtgcaggtgtagggcgtacaggtaccttt

SEQ ID NO: 26365 - DNA, 154 bp, Homo sapiens; identical to SEQ ID NO: 6945
  chr20:3154655-3154809
  hypo

SEQ ID NO: 26366 - DNA, 31 bp, Homo sapiens
  chr20:3175799-3175830
  hypo
ggggtggctagccttgcgtctggcacaggct

SEQ ID NO: 26367 - DNA, 31 bp, Homo sapiens
  chr20:3202085-3202116
  hypo
gcatctggcttgtccacggagttcagggtac

SEQ ID NO: 26368 - DNA, 31 bp, Homo sapiens
  chr20:3202289-3202320
  hypo
gagggaagagctgccccgctctgctttttat

SEQ ID NO: 26369 - DNA, 49 bp, Homo sapiens
  chr20:3211454-3211503
  hypo
cccccgatgctctgcccggctatggtcttctgcacgtctgtgggggtgc

SEQ ID NO: 26370 - DNA, 35 bp, Homo sapiens
  chr20:3211813-3211848
  hypo
gtacaaggggaacctgcgtgcgatgtcctcccgga

SEQ ID NO: 26371 - DNA, 40 bp, Homo sapiens
  chr20:3214856-3214896
  hypo
agggaggtggccgtctcgttcaggacgatgctggcctgcg

SEQ ID NO: 26372 - DNA, 291 bp, Homo sapiens; identical to SEQ ID NO: 6948
  chr20:3220114-3220405
  hypo

SEQ ID NO: 26373 - DNA, 31 bp, Homo sapiens; identical to SEQ ID NO: 6949
  chr20:3229261-3229292
  hypo

SEQ ID NO: 26374 - DNA, 31 bp, Homo sapiens
  chr20:3763472-3763503
  hypo
tccagggctcggatttcgggagggaaggtgg

SEQ ID NO: 26375 - DNA, 47 bp, Homo sapiens; identical to SEQ ID NO: 6951
  chr20:4129264-4129311
  hypo

SEQ ID NO: 26376 - DNA, 203 bp, Homo sapiens; identical to SEQ ID NO: 6952
  chr20:4129403-4129606
  hypo

SEQ ID NO: 26377 - DNA, 99 bp, Homo sapiens; identical to SEQ ID NO: 6953
  chr20:4129702-4129801
  hypo

SEQ ID NO: 26378 - DNA, 92 bp, Homo sapiens; identical to SEQ ID NO: 6954
  chr20:4129817-4129909
  hypo

SEQ ID NO: 26379 - DNA, 96 bp, Homo sapiens; identical to SEQ ID NO: 6955
  chr20:4130006-4130102
  hypo

SEQ ID NO: 26380 - DNA, 34 bp, Homo sapiens; identical to SEQ ID NO: 6957
  chr20:4803015-4803049
  hypo

SEQ ID NO: 26381 - DNA, 332 bp, Homo sapiens; identical to SEQ ID NO: 6958
  chr20:4803183-4803515
  hypo

SEQ ID NO: 26382 - DNA, 132 bp, Homo sapiens; identical to SEQ ID NO: 6959
  chr20:4803531-4803663
  hypo

SEQ ID NO: 26383 - DNA, 421 bp, Homo sapiens; identical to SEQ ID NO: 6960
  chr20:4803669-4804090
  hypo

SEQ ID NO: 26384 - DNA, 31 bp, Homo sapiens
  chr20:4865129-4865160
  hypo
cagctagctgtgctggcgggtgtgagtggac

SEQ ID NO: 26385 - DNA, 4 bp, Homo sapiens
  chr20:4951347-4951351
  hypo
actc

SEQ ID NO: 26386 - DNA, 31 bp, Homo sapiens
  chr20:4966923-4966954
  hypo
atagagagacccctttcgccacaaaaagaaa

SEQ ID NO: 26387 - DNA, 24 bp, Homo sapiens
  chr20:4967005-4967029
  hypo
ctggagtgcagtggcacgatctcg

SEQ ID NO: 26388 - DNA, 18 bp, Homo sapiens
  chr20:5135599-5135617
  hypo
ttccgattctgcttagag

SEQ ID NO: 26389 - DNA, 27 bp, Homo sapiens
  chr20:5762407-5762434
  hypo
agctaccacacccggccaatcttacac

SEQ ID NO: 26390 - DNA, 31 bp, Homo sapiens
  chr20:5762466-5762497
  hypo
tcctctgccttgttttcgggactctgtgtaa

SEQ ID NO: 26391 - DNA, 54 bp, Homo sapiens
  chr20:5762550-5762604
  hypo
gcaatatttcaacaaccggcacgactgtacaggtgcacacgagctgaatagagg

SEQ ID NO: 26392 - DNA, 68 bp, Homo sapiens; identical to SEQ ID NO: 6962
  chr20:5891914-5891982
  hypo

SEQ ID NO: 26393 - DNA, 31 bp, Homo sapiens
  chr20:6837484-6837515
  hypo
cagctctccaaactcacgctggctccagtgc

SEQ ID NO: 26394 - DNA, 31 bp, Homo sapiens
  chr20:6837579-6837610
  hypo
gtgtggatattattaacgttctgttagatac

SEQ ID NO: 26395 - DNA, 30 bp, Homo sapiens
  chr20:6837616-6837646
  hypo
acattatactgcatatcgattttttctttt

SEQ ID NO: 26396 - DNA, 66 bp, Homo sapiens
  chr20:7958417-7958483
  hypo
aagctaataacaaatacgattaaaccacttcagaaacacgtcaaagttgtacgagtcacacatata

SEQ ID NO: 26397 - DNA, 41 bp, Homo sapiens
  chr20:7958524-7958565
  hypo
tctgaagggcatgtcccgggctgaagcgatcaaagggcttt

SEQ ID NO: 26398 - DNA, 31 bp, Homo sapiens; identical to SEQ ID NO: 6963
  chr20:9049221-9049252
  hypo

SEQ ID NO: 26399 - DNA, 28 bp, Homo sapiens
  chr20:9598483-9598511
  hypo
gagccacgacgcccggcaagaatcccaa

SEQ ID NO: 26400 - DNA, 47 bp, Homo sapiens
  chr20:10515151-10515198
  hypo
agccttagaaggtttccgtaaagaaggagcctcgagtcaagcctgag

SEQ ID NO: 26401 - DNA, 58 bp, Homo sapiens
  chr20:10515261-10515319
  hypo
ctgctttgtcctgctccgtgttcagctcctggcgcagggctggcgtctggggtatgct

SEQ ID NO: 26402 - DNA, 170 bp, Homo sapiens; identical to SEQ ID NO: 6969
  chr20:10653740-10653910
  hypo

SEQ ID NO: 26403 - DNA, 108 bp, Homo sapiens; identical to SEQ ID NO: 6970
  chr20:10653916-10654024
  hypo

SEQ ID NO: 26404 - DNA, 129 bp, Homo sapiens; identical to SEQ ID NO: 6971
  chr20:10654668-10654797
  hypo

SEQ ID NO: 26405 - DNA, 36 bp, Homo sapiens; identical to SEQ ID NO: 6972
  chr20:10654955-10654991
  hypo

SEQ ID NO: 26406 - DNA, 151 bp, Homo sapiens; identical to SEQ ID NO: 6973
  chr20:10655071-10655222
  hypo

SEQ ID NO: 26407 - DNA, 49 bp, Homo sapiens; identical to SEQ ID NO: 6974
  chr20:10655279-10655328
  hypo

SEQ ID NO: 26408 - DNA, 73 bp, Homo sapiens; identical to SEQ ID NO: 6975
  chr20:10655444-10655517
  hypo

SEQ ID NO: 26409 - DNA, 38 bp, Homo sapiens; identical to SEQ ID NO: 6976
  chr20:10655521-10655559
  hypo

SEQ ID NO: 26410 - DNA, 53 bp, Homo sapiens; identical to SEQ ID NO: 6977
  chr20:10655570-10655623
  hypo

SEQ ID NO: 26411 - DNA, 66 bp, Homo sapiens; identical to SEQ ID NO: 6980
  chr20:11871661-11871727
  hypo

SEQ ID NO: 26412 - DNA, 128 bp, Homo sapiens; identical to SEQ ID NO: 6981
  chr20:11871950-11872078
  hypo

SEQ ID NO: 26413 - DNA, 34 bp, Homo sapiens; identical to SEQ ID NO: 6982
  chr20:11872100-11872134
  hypo

SEQ ID NO: 26414 - DNA, 11 bp, Homo sapiens
  chr20:13596452-13596463
  hypo
aatcttaaaaa

SEQ ID NO: 26415 - DNA, 25 bp, Homo sapiens
  chr20:13626963-13626988
  hypo
ccaccacgcccggccaagaccacct

SEQ ID NO: 26416 - DNA, 31 bp, Homo sapiens
  chr20:14115133-14115164
  hypo
acattaacctctttttcgtttataaagagaa

SEQ ID NO: 26417 - DNA, 59 bp, Homo sapiens
  chr20:14812473-14812532
  hypo
gcacacgttgtcctgccgagttgttgtgagtttgtcatcgttttcgtttgttgttgctg

SEQ ID NO: 26418 - DNA, 31 bp, Homo sapiens
  chr20:17471843-17471874
  hypo
gcgagaagctggagtgcggtgagacttgggg

SEQ ID NO: 26419 - DNA, 125 bp, Homo sapiens
  chr20:17489361-17489486
  hypo
ccaggccagagcagagcgcttggccacccactcagaaaaccccgtttctgccaggaacataggatatgttcagcgtgtgacagctcctcaagctgcatgcgtgtgcctgcgcgtaacacctccat

SEQ ID NO: 26420 - DNA, 45 bp, Homo sapiens
  chr20:17489498-17489543
  hypo
aagccccaatgcacacgcggcagactcgagcgtacctgtgcctgc

SEQ ID NO: 26421 - DNA, 57 bp, Homo sapiens
  chr20:17489689-17489746
  hypo
aagggcagagaaggtgcggggccctggtatggacggaatatccgtgtccccctgaat

SEQ ID NO: 26422 - DNA, 70 bp, Homo sapiens; identical to SEQ ID NO: 6986
  chr20:17549809-17549879
  hypo

SEQ ID NO: 26423 - DNA, 31 bp, Homo sapiens; identical to SEQ ID NO: 6987
  chr20:17549887-17549918
  hypo

SEQ ID NO: 26424 - DNA, 123 bp, Homo sapiens; identical to SEQ ID NO: 6988
  chr20:17549928-17550051
  hypo

SEQ ID NO: 26425 - DNA, 38 bp, Homo sapiens
  chr20:17971885-17971923
  hypo
agtgcataaaagaaagcgtcctcggctgggcgcagtgg

SEQ ID NO: 26426 - DNA, 31 bp, Homo sapiens
  chr20:18041682-18041713
  hypo
cctgcacatgtacccccgaatctaaaattaa

SEQ ID NO: 26427 - DNA, 31 bp, Homo sapiens
  chr20:18449103-18449134
  hypo
atacatttgttgatgtcgactaggtgaagat

SEQ ID NO: 26428 - DNA, 45 bp, Homo sapiens
  chr20:19207655-19207700
  hypo
caaaaggcatgcccatcgtaaaggctcacacgtactatcatgtaa

SEQ ID NO: 26429 - DNA, 31 bp, Homo sapiens; identical to SEQ ID NO: 6996
  chr20:19738269-19738300
  hypo

SEQ ID NO: 26430 - DNA, 31 bp, Homo sapiens
  chr20:19952936-19952967
  hypo
tctcagttctctctcccgacctctgtccaca

SEQ ID NO: 26431 - DNA, 31 bp, Homo sapiens; identical to SEQ ID NO: 6997
  chr20:19997854-19997885
  hypo

SEQ ID NO: 26432 - DNA, 34 bp, Homo sapiens
  chr20:20378094-20378128
  hypo
gccatcctatttcctacggcggggtttccttggc

SEQ ID NO: 26433 - DNA, 31 bp, Homo sapiens
  chr20:20378130-20378161
  hypo
atgcatcctctttctgcgtcaggcagtagct

SEQ ID NO: 26434 - DNA, 31 bp, Homo sapiens
  chr20:20378195-20378226
  hypo
attctgtgtcagtagacgaccatcagatctg

SEQ ID NO: 26435 - DNA, 31 bp, Homo sapiens
  chr20:20378232-20378263
  hypo
ggacatttatcagtgacgtggaccattgtct

SEQ ID NO: 26436 - DNA, 31 bp, Homo sapiens; identical to SEQ ID NO: 6998
  chr20:20692668-20692699
  hypo

SEQ ID NO: 26437 - DNA, 31 bp, Homo sapiens
  chr20:21115586-21115617
  hypo
catgaacccccatgcccgacccatctttcag

SEQ ID NO: 26438 - DNA, 36 bp, Homo sapiens
  chr20:22324532-22324568
  hypo
tgtccccgcacgcccacgttccgcatgggacctgac

SEQ ID NO: 26439 - DNA, 31 bp, Homo sapiens
  chr20:23108362-23108393
  hypo
agttagtacatggacccggagatgcctggac

SEQ ID NO: 26440 - DNA, 31 bp, Homo sapiens; identical to SEQ ID NO: 7006
  chr20:23618042-23618073
  hypo

SEQ ID NO: 26441 - DNA, 34 bp, Homo sapiens; identical to SEQ ID NO: 7007
  chr20:23618145-23618179
  hypo

SEQ ID NO: 26442 - DNA, 31 bp, Homo sapiens; identical to SEQ ID NO: 7008
  chr20:23618624-23618655
  hypo

SEQ ID NO: 26443 - DNA, 31 bp, Homo sapiens; identical to SEQ ID NO: 7009
  chr20:23618696-23618727
  hypo

SEQ ID NO: 26444 - DNA, 31 bp, Homo sapiens
  chr20:24476178-24476209
  hypo
ccctgagatgctgactcgcaacccagcctcc

SEQ ID NO: 26445 - DNA, 83 bp, Homo sapiens
  chr20:24944572-24944655
  hypo
cttctccggaaggcaccgctgtcgctgagttctaggacgaggctgtaccgcggcacaaacttcatcaccgtctcttgactaaa

SEQ ID NO: 26446 - DNA, 66 bp, Homo sapiens
  chr20:24944695-24944761
  hypo
ggccaagaacactgtgcgcagatcaaccgtgccgcccccaccatccaggaacggtctgactccttc

SEQ ID NO: 26447 - DNA, 12 bp, Homo sapiens
  chr20:25230508-25230520
  hypo
gagtcttgccct

SEQ ID NO: 26448 - DNA, 31 bp, Homo sapiens
  chr20:25230924-25230955
  hypo
atcctggagaggccagcgatgggctcaggga

SEQ ID NO: 26449 - DNA, 31 bp, Homo sapiens
  chr20:25236290-25236321
  hypo
ggggacaggaggggaccggtttcagaccaga

SEQ ID NO: 26450 - DNA, 34 bp, Homo sapiens
  chr20:25278857-25278891
  hypo
cactaggtgtggaacccggggtcatgtgtgcctg

SEQ ID NO: 26451 - DNA, 31 bp, Homo sapiens
  chr20:25310087-25310118
  hypo
gtccaccctccagtcacgtcatcatgtacca

SEQ ID NO: 26452 - DNA, 31 bp, Homo sapiens
  chr20:25310119-25310150
  hypo
caaccacaaacatcaacgggcaggatggaga

SEQ ID NO: 26453 - DNA, 31 bp, Homo sapiens
  chr20:25310157-25310188
  hypo
ctgcacacatgggtgccgtggagggtgaaga

SEQ ID NO: 26454 - DNA, 31 bp, Homo sapiens
  chr20:25310197-25310228
  hypo
gtgagtgaatggaaaacgacctgctctgtca

SEQ ID NO: 26455 - DNA, 31 bp, Homo sapiens
  chr20:25310246-25310277
  hypo
tgcaaaatatttgttgcgggaaaggctgaaa

SEQ ID NO: 26456 - DNA, 31 bp, Homo sapiens
  chr20:25320568-25320599
  hypo
gcccgtcaagccaggtcgccagcccagggtc

SEQ ID NO: 26457 - DNA, 15 bp, Homo sapiens
  chr20:25344141-25344156
  hypo
cgcacctggctgaca

SEQ ID NO: 26458 - DNA, 31 bp, Homo sapiens
  chr20:25344213-25344244
  hypo
tttaagggggcaggcacggtggctcattcct

SEQ ID NO: 26459 - DNA, 31 bp, Homo sapiens
  chr20:25451905-25451936
  hypo
gccaccacgcccagcccgctttatgtattat

SEQ ID NO: 26460 - DNA, 31 bp, Homo sapiens
  chr20:25470594-25470625
  hypo
aatctccttctgtaggcgactgttttcctag

SEQ ID NO: 26461 - DNA, 31 bp, Homo sapiens
  chr20:25470646-25470677
  hypo
tcaggctcctgcaggacggaggggatgtgtg

SEQ ID NO: 26462 - DNA, 37 bp, Homo sapiens
  chr20:25470724-25470761
  hypo
aagaacccccacccaccgcaggcgaggcacctggtgc

SEQ ID NO: 26463 - DNA, 31 bp, Homo sapiens
  chr20:25605600-25605631
  hypo
tttttatttttattttcgagatggagtcttg

SEQ ID NO: 26464 - DNA, 36 bp, Homo sapiens
  chr20:26062266-26062302
  hypo
ggaaggtgatggggttcgcagcgccaggggacccag

SEQ ID NO: 26465 - DNA, 21 bp, Homo sapiens
  chr20:30110867-30110888
  hypo
ttatgagacagagtctcgctc

SEQ ID NO: 26466 - DNA, 48 bp, Homo sapiens
  chr20:30153939-30153987
  hypo
tttggggtgctgggcacggccctgaggcagtgccgtgcccagcatggc

SEQ ID NO: 26467 - DNA, 60 bp, Homo sapiens
  chr20:30154019-30154079
  hypo
tcctatacctggtccccgcctgcatcggttttcctgtcctggtggcgctggccaagggag

SEQ ID NO: 26468 - DNA, 19 bp, Homo sapiens
  chr20:30181152-30181171
  hypo
acatcgttgcttttgcatc

SEQ ID NO: 26469 - DNA, 31 bp, Homo sapiens
  chr20:30181188-30181219
  hypo
actttttagaagaaaacgtacattatcatga

SEQ ID NO: 26470 - DNA, 62 bp, Homo sapiens
  chr20:30181234-30181296
  hypo
gagtacagctctgaagcggcctgaggtgagggtgcagctggaggcgccgccccctggtgact

SEQ ID NO: 26471 - DNA, 42 bp, Homo sapiens
  chr20:30468279-30468321
  hypo
ctctccgcaccccaaccgactttttttttttttttgagacgg

SEQ ID NO: 26472 - DNA, 78 bp, Homo sapiens; identical to SEQ ID NO: 7015
  chr20:30640282-30640360
  hypo

SEQ ID NO: 26473 - DNA, 184 bp, Homo sapiens; identical to SEQ ID NO: 7016
  chr20:30640364-30640548
  hypo

SEQ ID NO: 26474 - DNA, 31 bp, Homo sapiens; identical to SEQ ID NO: 7017
  chr20:30640550-30640581
  hypo

SEQ ID NO: 26475 - DNA, 31 bp, Homo sapiens
  chr20:30720983-30721014
  hypo
accatggtgagctgttcgtgtccatcctgtg

SEQ ID NO: 26476 - DNA, 31 bp, Homo sapiens
  chr20:30721031-30721062
  hypo
atagtgccagttaccccggaactctgcctct

SEQ ID NO: 26477 - DNA, 31 bp, Homo sapiens
  chr20:30864966-30864997
  hypo
gcaggctagagatgagcgtggcctggccttg

SEQ ID NO: 26478 - DNA, 65 bp, Homo sapiens
  chr20:31081012-31081077
  hypo
gtgtgagactaacttacgttcactcggtccaaggaagccatgcagggaaacgggcaggttaccaa

SEQ ID NO: 26479 - DNA, 24 bp, Homo sapiens
  chr20:31092068-31092092
  hypo
gaaacatctcagaggccgggcgtg

SEQ ID NO: 26480 - DNA, 57 bp, Homo sapiens
  chr20:31146688-31146745
  hypo
ccactgcagcctggaccggagcaggggcagcggaggggccgccgagaaccagtgcaa

SEQ ID NO: 26481 - DNA, 31 bp, Homo sapiens
  chr20:31196056-31196087
  hypo
aaggcccctggagacccggcctcagccccct

SEQ ID NO: 26482 - DNA, 31 bp, Homo sapiens
  chr20:31196132-31196163
  hypo
ggtggcctgttctccacgccaccctcacagg

SEQ ID NO: 26483 - DNA, 93 bp, Homo sapiens; identical to SEQ ID NO: 7020
  chr20:31351104-31351197
  hypo

SEQ ID NO: 26484 - DNA, 59 bp, Homo sapiens; identical to SEQ ID NO: 7021
  chr20:31351208-31351267
  hypo

SEQ ID NO: 26485 - DNA, 31 bp, Homo sapiens
  chr20:31859916-31859947
  hypo
attggctgggaaggggcgaacagaactttcc

SEQ ID NO: 26486 - DNA, 53 bp, Homo sapiens
  chr20:32301883-32301936
  hypo
gtgcatggaatggcagcgagttctgtgtgccaagggcacgccagggtggacac

SEQ ID NO: 26487 - DNA, 40 bp, Homo sapiens
  chr20:32370538-32370578
  hypo
cagctgggtctgtgcccgtgaccaacgctctaccaaaatg

SEQ ID NO: 26488 - DNA, 21 bp, Homo sapiens
  chr20:32370682-32370703
  hypo
tgggtgtggtggtgggcgcct

SEQ ID NO: 26489 - DNA, 31 bp, Homo sapiens
  chr20:32378462-32378493
  hypo
tgtgggtggcctcaggcgtcacggcccctcc

SEQ ID NO: 26490 - DNA, 31 bp, Homo sapiens
  chr20:32378502-32378533
  hypo
agatgacctggcaaagcgagccaaggtgcag

SEQ ID NO: 26491 - DNA, 46 bp, Homo sapiens
  chr20:32378714-32378760
  hypo
tggattttattcccagcgcagggcactgttgcggggtgaaggtctg

SEQ ID NO: 26492 - DNA, 47 bp, Homo sapiens
  chr20:32378889-32378936
  hypo
tccgctgtgctggctgcgccaagggcttttcccgccacaaatacctc

SEQ ID NO: 26493 - DNA, 31 bp, Homo sapiens
  chr20:32441487-32441518
  hypo
ccaaagcagtagggccgcgttgctgctcact

SEQ ID NO: 26494 - DNA, 18 bp, Homo sapiens
  chr20:32450377-32450395
  hypo
gcccggctggcttgtgtt

SEQ ID NO: 26495 - DNA, 31 bp, Homo sapiens
  chr20:32450396-32450427
  hypo
atttaaggaatggaagcgttcactcaagcca

SEQ ID NO: 26496 - DNA, 32 bp, Homo sapiens
  chr20:32584927-32584959
  hypo
ctgttttttttggagacggagtctcactccgt

SEQ ID NO: 26497 - DNA, 38 bp, Homo sapiens
  chr20:32677660-32677698
  hypo
tctgcaggattgtgtccggtgatcggcatgtgtgacaa

SEQ ID NO: 26498 - DNA, 20 bp, Homo sapiens
  chr20:32768435-32768455
  hypo
gaaatattttctgggccgtg

SEQ ID NO: 26499 - DNA, 31 bp, Homo sapiens
  chr20:32950142-32950173
  hypo
agggaggatttgaatccggtcagtgtaactc

SEQ ID NO: 26500 - DNA, 31 bp, Homo sapiens
  chr20:33131650-33131681
  hypo
ggaagtggcagcttctcgggaggtgccgcag

SEQ ID NO: 26501 - DNA, 31 bp, Homo sapiens
  chr20:33183872-33183903
  hypo
acctggcagacactaacgtcaccaagtgatc

SEQ ID NO: 26502 - DNA, 31 bp, Homo sapiens; identical to SEQ ID NO: 7023
  chr20:33464342-33464373
  hypo

SEQ ID NO: 26503 - DNA, 277 bp, Homo sapiens; identical to SEQ ID NO: 7024
  chr20:33464381-33464658
  hypo

SEQ ID NO: 26504 - DNA, 31 bp, Homo sapiens; identical to SEQ ID NO: 7025
  chr20:33464676-33464707
  hypo

SEQ ID NO: 26505 - DNA, 77 bp, Homo sapiens
  chr20:33544842-33544919
  hypo
tgagaccctgtcctaaaaacaaaacaaacgagcagcgaaggcatataattctgagggttgctcggcttgttttacag

SEQ ID NO: 26506 - DNA, 31 bp, Homo sapiens
  chr20:33547625-33547656
  hypo
cctttattgatctggtcgctaagtgtcaggt

SEQ ID NO: 26507 - DNA, 62 bp, Homo sapiens
  chr20:33572632-33572694
  hypo
accccctcacccccaccgccccagggcacccttgaggatcaaatcatcgaggccaaccctgc

SEQ ID NO: 26508 - DNA, 42 bp, Homo sapiens
  chr20:34041980-34042022
  hypo
aatttatacacaaggccgggcgcggtggctcacgcctgtaat

SEQ ID NO: 26509 - DNA, 50 bp, Homo sapiens
  chr20:34092135-34092185
  hypo
aagagcagcatctcctcgagcaggcagaattgagccgcagtctggaggcc

SEQ ID NO: 26510 - DNA, 31 bp, Homo sapiens
  chr20:34147977-34148008
  hypo
aaagggtccagacctgcgccagacgctcacc

SEQ ID NO: 26511 - DNA, 31 bp, Homo sapiens
  chr20:34148223-34148254
  hypo
ggctctggactcagcccgagggcccacaccc

SEQ ID NO: 26512 - DNA, 42 bp, Homo sapiens
  chr20:34312501-34312543
  hypo
tgtactatgattggcacgcctaaaactcgttggccagttaat

SEQ ID NO: 26513 - DNA, 63 bp, Homo sapiens
  chr20:34312555-34312618
  hypo
ggcactgagctaacatcgacgaactccacataagcaattcctttggaacgtcttgaatttctg

SEQ ID NO: 26514 - DNA, 185 bp, Homo sapiens; identical to SEQ ID NO: 7026
  chr20:34680179-34680364
  hypo

SEQ ID NO: 26515 - DNA, 370 bp, Homo sapiens; identical to SEQ ID NO: 7027
  chr20:34680572-34680942
  hypo

SEQ ID NO: 26516 - DNA, 19 bp, Homo sapiens
  chr20:34683674-34683693
  hypo
caatttattggcagggcgt

SEQ ID NO: 26517 - DNA, 31 bp, Homo sapiens
  chr20:34859595-34859626
  hypo
gcctgcccagagcttccgagggtgctgacgg

SEQ ID NO: 26518 - DNA, 85 bp, Homo sapiens
  chr20:35089001-35089086
  hypo
acaagagttgggtctgcgtctggcagacctaccacaggtgcggcctggagagatgaggcccacaaggcagcgacaggacctggat

SEQ ID NO: 26519 - DNA, 77 bp, Homo sapiens
  chr20:35089090-35089167
  hypo
tgaggagaggggactcgcggggtagaagccaggaactgggaaggcgaggaggcgtgaaggcaccacctactgccaac

SEQ ID NO: 26520 - DNA, 20 bp, Homo sapiens
  chr20:35442202-35442222
  hypo
taaatcgctctctttccctg

SEQ ID NO: 26521 - DNA, 12 bp, Homo sapiens
  chr20:35506704-35506716
  hypo
cgggcgcggtgg

SEQ ID NO: 26522 - DNA, 46 bp, Homo sapiens
  chr20:35615274-35615320
  hypo
tggacctggctagatacgactttcaccaacccgcaaagccaccctt

SEQ ID NO: 26523 - DNA, 31 bp, Homo sapiens
  chr20:35615341-35615372
  hypo
ttgagattttggtccacgaagacatggacca

SEQ ID NO: 26524 - DNA, 81 bp, Homo sapiens
  chr20:35924129-35924210
  hypo
gtggtggtgaagtatgcgagttgctgcctgtaaagtgctgttcgcaacacctggccgttcatttgccgactgctgctgctg

SEQ ID NO: 26525 - DNA, 31 bp, Homo sapiens
  chr20:35924234-35924265
  hypo
acctgtcacagccagtcgaaggggtgtctcc

SEQ ID NO: 26526 - DNA, 123 bp, Homo sapiens
  chr20:35987181-35987304
  hypo
tctgggctgcaggccccgtccccagtgcacccctccatgtctgccggtgtccgccccggcctgccgtctccaccccagccccactggcagagccggtttgagtctactgtccctgagcatgtt

SEQ ID NO: 26527 - DNA, 31 bp, Homo sapiens
  chr20:36567344-36567375
  hypo
aaagacatgagaagaccgatctgtagtttat

SEQ ID NO: 26528 - DNA, 31 bp, Homo sapiens
  chr20:36627480-36627511
  hypo
tatgtgacattgcaatcgggtgaagagaacc

SEQ ID NO: 26529 - DNA, 28 bp, Homo sapiens
  chr20:36666714-36666742
  hypo
ttttttttttttgagacggagtctctta

SEQ ID NO: 26530 - DNA, 31 bp, Homo sapiens
  chr20:36759315-36759346
  hypo
ttgacagagaatgtgacggtgggaactctag

SEQ ID NO: 26531 - DNA, 47 bp, Homo sapiens
  chr20:36760996-36761043
  hypo
gcttggggtcacacagcgggggaatggctgggcggatccctgaactc

SEQ ID NO: 26532 - DNA, 42 bp, Homo sapiens
  chr20:36766839-36766881
  hypo
gggggctgcaacagggcgagctgtcttcgcagaggcctgatg

SEQ ID NO: 26533 - DNA, 31 bp, Homo sapiens
  chr20:36770629-36770660
  hypo
aggtcctggagacatccgccctgctctgggc

SEQ ID NO: 26534 - DNA, 42 bp, Homo sapiens
  chr20:36770722-36770764
  hypo
agccagcccttcctgccgggacaatggcgcccacctctctgg

SEQ ID NO: 26535 - DNA, 31 bp, Homo sapiens
  chr20:36774949-36774980
  hypo
ctattggataaaggaccggagagggtggtca

SEQ ID NO: 26536 - DNA, 31 bp, Homo sapiens
  chr20:36802981-36803012
  hypo
ttgttgcaggtatcagcggttcattcctttt

SEQ ID NO: 26537 - DNA, 31 bp, Homo sapiens
  chr20:36803017-36803048
  hypo
ctgagtactattctgtcgcatgaatatacca

SEQ ID NO: 26538 - DNA, 31 bp, Homo sapiens
  chr20:36848110-36848141
  hypo
agaacatgaagctgctcgtccacaaggctgt

SEQ ID NO: 26539 - DNA, 31 bp, Homo sapiens
  chr20:36992908-36992939
  hypo
acctctcaggtcttaacgcttccctcctcct

SEQ ID NO: 26540 - DNA, 31 bp, Homo sapiens
  chr20:37145083-37145114
  hypo
gttattagaaaacatccgaaggaaaagatga

SEQ ID NO: 26541 - DNA, 31 bp, Homo sapiens
  chr20:37145122-37145153
  hypo
gatgacaaataacaagcgaggaaaaattatt

SEQ ID NO: 26542 - DNA, 31 bp, Homo sapiens
  chr20:37145166-37145197
  hypo
atagccagagggttatcgtttctatgtaaat

SEQ ID NO: 26543 - DNA, 55 bp, Homo sapiens
  chr20:37145206-37145261
  hypo
ggtgcaaaagtaattgcggtttttgccattaaaagtaatgcggccaaaactgcag

SEQ ID NO: 26544 - DNA, 66 bp, Homo sapiens; identical to SEQ ID NO: 7037
  chr20:37274777-37274843
  hypo

SEQ ID NO: 26545 - DNA, 57 bp, Homo sapiens; identical to SEQ ID NO: 7038
  chr20:37274850-37274907
  hypo

SEQ ID NO: 26546 - DNA, 31 bp, Homo sapiens; identical to SEQ ID NO: 7039
  chr20:37351616-37351647
  hypo

SEQ ID NO: 26547 - DNA, 162 bp, Homo sapiens; identical to SEQ ID NO: 7040
  chr20:37434190-37434352
  hypo

SEQ ID NO: 26548 - DNA, 33 bp, Homo sapiens; identical to SEQ ID NO: 7041
  chr20:37434488-37434521
  hypo

SEQ ID NO: 26549 - DNA, 52 bp, Homo sapiens; identical to SEQ ID NO: 7042
  chr20:37434530-37434582
  hypo

SEQ ID NO: 26550 - DNA, 128 bp, Homo sapiens; identical to SEQ ID NO: 7043
  chr20:37434593-37434721
  hypo

SEQ ID NO: 26551 - DNA, 157 bp, Homo sapiens; identical to SEQ ID NO: 7044
  chr20:37434736-37434893
  hypo

SEQ ID NO: 26552 - DNA, 60 bp, Homo sapiens; identical to SEQ ID NO: 7045
  chr20:37434930-37434990
  hypo

SEQ ID NO: 26553 - DNA, 319 bp, Homo sapiens; identical to SEQ ID NO: 7046
  chr20:37434994-37435313
  hypo

SEQ ID NO: 26554 - DNA, 117 bp, Homo sapiens; identical to SEQ ID NO: 7048
  chr20:37435487-37435604
  hypo

SEQ ID NO: 26555 - DNA, 31 bp, Homo sapiens
  chr20:37622329-37622360
  hypo
ttttttttttttttcacgttggctatttttc

SEQ ID NO: 26556 - DNA, 31 bp, Homo sapiens
  chr20:37622383-37622414
  hypo
ctagtggcttatgcatcggacagtacaaata

SEQ ID NO: 26557 - DNA, 31 bp, Homo sapiens
  chr20:39989812-39989843
  hypo
agggaaggctggaaggcgctgctggataagg

SEQ ID NO: 26558 - DNA, 31 bp, Homo sapiens
  chr20:39989850-39989881
  hypo
ctggggtgatgttccccgagttggtgggatc

SEQ ID NO: 26559 - DNA, 31 bp, Homo sapiens
  chr20:39989910-39989941
  hypo
gttggcttgccctggccgcacctgctcagcc

SEQ ID NO: 26560 - DNA, 31 bp, Homo sapiens
  chr20:39991104-39991135
  hypo
ctgtgacagctcctggcgcagggccagctcc

SEQ ID NO: 26561 - DNA, 65 bp, Homo sapiens; identical to SEQ ID NO: 7050
  chr20:40321458-40321523
  hypo

SEQ ID NO: 26562 - DNA, 34 bp, Homo sapiens; identical to SEQ ID NO: 7051
  chr20:40321598-40321632
  hypo

SEQ ID NO: 26563 - DNA, 31 bp, Homo sapiens
  chr20:42088630-42088661
  hypo
gatgttttaagatttccgagtctgaccaatc

SEQ ID NO: 26564 - DNA, 121 bp, Homo sapiens
  chr20:42088665-42088786
  hypo
ctttcaggattttatgcgacaagcaggtgaagtaacctatgcggatgcccacaaggaacgaacaaatgagggtgtaattgagtttcgctcctactctgacatgaagcgtgctttggacaaa

SEQ ID NO: 26565 - DNA, 31 bp, Homo sapiens
  chr20:42192720-42192751
  hypo
acatctgcctacccctcgggatcctggggag

SEQ ID NO: 26566 - DNA, 31 bp, Homo sapiens
  chr20:42192764-42192795
  hypo
gtgagaacctaatgaccgccccaggcagcaa

SEQ ID NO: 26567 - DNA, 54 bp, Homo sapiens
  chr20:42192810-42192864
  hypo
gggtgctctctgggaccgtttcttacgcagcaggagagtcgtgggccaaccagg

SEQ ID NO: 26568 - DNA, 31 bp, Homo sapiens
  chr20:42199169-42199200
  hypo
tcgcagccgcacagggcggggagcaggtgca

SEQ ID NO: 26569 - DNA, 31 bp, Homo sapiens
  chr20:42218633-42218664
  hypo
attgtggaaagcaacacgagttgtatgtgtt

SEQ ID NO: 26570 - DNA, 28 bp, Homo sapiens
  chr20:42229176-42229204
  hypo
cttgtgatccgcccgccttggcctctgg

SEQ ID NO: 26571 - DNA, 31 bp, Homo sapiens
  chr20:42314848-42314879
  hypo
gtgtgcacatgagaacgcgtgtgtctgttgt

SEQ ID NO: 26572 - DNA, 31 bp, Homo sapiens
  chr20:42314895-42314926
  hypo
ctggctcttgtggctgcgtatgttgtggttt

SEQ ID NO: 26573 - DNA, 31 bp, Homo sapiens
  chr20:42314973-42315004
  hypo
ctggctaggtcagcccgcgatgcctgctacc

SEQ ID NO: 26574 - DNA, 3 bp, Homo sapiens
  chr20:42833491-42833494
  hypo
ttt

SEQ ID NO: 26575 - DNA, 31 bp, Homo sapiens
  chr20:42931308-42931339
  hypo
tatattacaagacatacggggaaaaacagga

SEQ ID NO: 26576 - DNA, 31 bp, Homo sapiens
  chr20:42931346-42931377
  hypo
tagccataaaataacccgtatatgacaagtt

SEQ ID NO: 26577 - DNA, 60 bp, Homo sapiens
  chr20:42931388-42931448
  hypo
gaattacctactttcacgaagtgcgctgaggtttattgggctctgcgcttccttaagagt

SEQ ID NO: 26578 - DNA, 31 bp, Homo sapiens
  chr20:43019102-43019133
  hypo
cagtttccatggagaccgcctcccaccatcc

SEQ ID NO: 26579 - DNA, 38 bp, Homo sapiens
  chr20:43019162-43019200
  hypo
gattaactctgcccagcggccctcgcagggtctggggt

SEQ ID NO: 26580 - DNA, 61 bp, Homo sapiens
  chr20:43019237-43019298
  hypo
gaggttgtgcactgtgcgggaccccatagcagcaggaggaggatgtcggactggggccagg

SEQ ID NO: 26581 - DNA, 31 bp, Homo sapiens
  chr20:43047810-43047841
  hypo
tagttattattttaaacgcttgtacagcaca

SEQ ID NO: 26582 - DNA, 54 bp, Homo sapiens
  chr20:43356085-43356139
  hypo
aacaccaatattaacacgctgcctggtctgtctggatcccgaggtatggcagag

SEQ ID NO: 26583 - DNA, 48 bp, Homo sapiens
  chr20:43356237-43356285
  hypo
atatcaaacatgcacacgggcgagctttctctccgacttcccctgggc

SEQ ID NO: 26584 - DNA, 25 bp, Homo sapiens
  chr20:43961085-43961110
  hypo
ccactgtgcccggcctatatatata

SEQ ID NO: 26585 - DNA, 31 bp, Homo sapiens
  chr20:43963003-43963034
  hypo
taaaacatttcctgggcgactatgtgagatg

SEQ ID NO: 26586 - DNA, 103 bp, Homo sapiens; identical to SEQ ID NO: 7053
  chr20:43976985-43977088
  hypo

SEQ ID NO: 26587 - DNA, 40 bp, Homo sapiens; identical to SEQ ID NO: 7054
  chr20:43977172-43977212
  hypo

SEQ ID NO: 26588 - DNA, 74 bp, Homo sapiens; identical to SEQ ID NO: 7055
  chr20:44462766-44462840
  hypo

SEQ ID NO: 26589 - DNA, 18 bp, Homo sapiens
  chr20:44498388-44498406
  hypo
aagaagcctttcttgccg

SEQ ID NO: 26590 - DNA, 24 bp, Homo sapiens
  chr20:44537143-44537167
  hypo
aaataaaaaaataggccgggcaca

SEQ ID NO: 26591 - DNA, 23 bp, Homo sapiens
  chr20:44538962-44538985
  hypo
gtttgtttgccaggtgcggtggt

SEQ ID NO: 26592 - DNA, 28 bp, Homo sapiens
  chr20:44601782-44601810
  hypo
ctgggcgacagagcgagaccctctttca

SEQ ID NO: 26593 - DNA, 31 bp, Homo sapiens
  chr20:44601894-44601925
  hypo
aggtatgtccttcctccggaaatgtcacctt

SEQ ID NO: 26594 - DNA, 31 bp, Homo sapiens
  chr20:44601962-44601993
  hypo
acaagagggagtaaggcgctctggtttttgt

SEQ ID NO: 26595 - DNA, 9 bp, Homo sapiens
  chr20:44602074-44602083
  hypo
cctaagcag

SEQ ID NO: 26596 - DNA, 42 bp, Homo sapiens
  chr20:44602322-44602364
  hypo
attgccttccagcctggggaacaacagcggaaactcttgtct

SEQ ID NO: 26597 - DNA, 37 bp, Homo sapiens
  chr20:44602404-44602441
  hypo
ataaggagaaaaggtccgggctcggtgggtcacacct

SEQ ID NO: 26598 - DNA, 54 bp, Homo sapiens; identical to SEQ ID NO: 7057
  chr20:44660646-44660700
  hypo

SEQ ID NO: 26599 - DNA, 31 bp, Homo sapiens
  chr20:45833393-45833424
  hypo
ggcaggcccacatcagcgacacttggaggaa

SEQ ID NO: 26600 - DNA, 31 bp, Homo sapiens
  chr20:45837914-45837945
  hypo
ggggtgggggaaggaacgggcaaacccaaaa

SEQ ID NO: 26601 - DNA, 22 bp, Homo sapiens
  chr20:45859283-45859305
  hypo
cccacctcggcctcccaaagtg

SEQ ID NO: 26602 - DNA, 12 bp, Homo sapiens
  chr20:45949183-45949195
  hypo
tgtgcatggtgg

SEQ ID NO: 26603 - DNA, 4 bp, Homo sapiens
  chr20:46013565-46013569
  hypo
tcag

SEQ ID NO: 26604 - DNA, 57 bp, Homo sapiens
  chr20:46013583-46013640
  hypo
tgttgtgatgagagtccggcgtgctccctgaatgccggtgcccgattcataacctag

SEQ ID NO: 26605 - DNA, 31 bp, Homo sapiens
  chr20:46013732-46013763
  hypo
agaatctttgccttcacggatgcctcctgcc

SEQ ID NO: 26606 - DNA, 31 bp, Homo sapiens
  chr20:47247200-47247231
  hypo
agtcctgactcctgagcgccccaccctgccc

SEQ ID NO: 26607 - DNA, 31 bp, Homo sapiens
  chr20:47252918-47252949
  hypo
tgggcaagggctccctcgacccggcctgggc

SEQ ID NO: 26608 - DNA, 47 bp, Homo sapiens
  chr20:47268238-47268285
  hypo
gggcaggagtacattccgccagagtagagaggcgagtggggaagtga

SEQ ID NO: 26609 - DNA, 70 bp, Homo sapiens
  chr20:47274232-47274302
  hypo
cccacccacctgcacacgccccaggcaaagccggaaggccccagggctgaatcctcggccagccacaccc

SEQ ID NO: 26610 - DNA, 40 bp, Homo sapiens
  chr20:47490311-47490351
  hypo
aaaagcacaacaacagcggaaaatacgtcaccatgctcct

SEQ ID NO: 26611 - DNA, 31 bp, Homo sapiens
  chr20:47490384-47490415
  hypo
aaacacttttcccaggcgtttacacacagag

SEQ ID NO: 26612 - DNA, 31 bp, Homo sapiens
  chr20:47490423-47490454
  hypo
tttgcccccttggtgccgagacagtcttgct

SEQ ID NO: 26613 - DNA, 31 bp, Homo sapiens; identical to SEQ ID NO: 7060
  chr20:47663142-47663173
  hypo

SEQ ID NO: 26614 - DNA, 26 bp, Homo sapiens
  chr20:47698960-47698986
  hypo
gtgattcaccacgcctggcctaggtt

SEQ ID NO: 26615 - DNA, 34 bp, Homo sapiens
  chr20:47699047-47699081
  hypo
cttgtttgttttgagacggagtcttcgctctgtc

SEQ ID NO: 26616 - DNA, 3 bp, Homo sapiens
  chr20:47816884-47816887
  hypo
cag

SEQ ID NO: 26617 - DNA, 22 bp, Homo sapiens
  chr20:47835277-47835299
  hypo
tttaattaaaaagtttcggggc

SEQ ID NO: 26618 - DNA, 31 bp, Homo sapiens
  chr20:47837098-47837129
  hypo
ggcagcgtctgggtcccgtacactgtcgcca

SEQ ID NO: 26619 - DNA, 31 bp, Homo sapiens
  chr20:47905349-47905380
  hypo
ttaaacattttgccaacgcaggtacaatatg

SEQ ID NO: 26620 - DNA, 54 bp, Homo sapiens
  chr20:47905425-47905479
  hypo
ggaagtttcccagctccgtttatcggtacttggccgtaccgataaaggggatgg

SEQ ID NO: 26621 - DNA, 31 bp, Homo sapiens
  chr20:47905516-47905547
  hypo
taccctaaacaagaagcggtatagaccagaa

SEQ ID NO: 26622 - DNA, 31 bp, Homo sapiens
  chr20:47905572-47905603
  hypo
ctttcttagaaactggcgatggaatatgaga

SEQ ID NO: 26623 - DNA, 31 bp, Homo sapiens
  chr20:48157030-48157061
  hypo
ctgtcagggctggccacgcaaggcaggcatt

SEQ ID NO: 26624 - DNA, 31 bp, Homo sapiens; identical to SEQ ID NO: 7061
  chr20:48195046-48195077
  hypo

SEQ ID NO: 26625 - DNA, 31 bp, Homo sapiens
  chr20:48350400-48350431
  hypo
aaacaaacaaaggtaacgcctgcctaggtta

SEQ ID NO: 26626 - DNA, 31 bp, Homo sapiens
  chr20:48673064-48673095
  hypo
acttagcagtatactccggccctctctgcaa

SEQ ID NO: 26627 - DNA, 39 bp, Homo sapiens
  chr20:48673853-48673892
  hypo
cttcctcctgcccctccgcttgtgcggctgaatccagga

SEQ ID NO: 26628 - DNA, 89 bp, Homo sapiens
  chr20:48673895-48673984
  hypo
ttcccttgacttgccccgcacagtgaggcctggcattttcttcccgctccccatgctggcacgtgacacagccccgggcacatgggagg

SEQ ID NO: 26629 - DNA, 26 bp, Homo sapiens
  chr20:48707850-48707876
  hypo
gggattacaggcgtgaatcaccacac

SEQ ID NO: 26630 - DNA, 13 bp, Homo sapiens
  chr20:48708210-48708223
  hypo
tgagttaccacgc

SEQ ID NO: 26631 - DNA, 28 bp, Homo sapiens
  chr20:48720798-48720826
  hypo
tagggccagactccgtctcaaaaaaaaa

SEQ ID NO: 26632 - DNA, 42 bp, Homo sapiens; identical to SEQ ID NO: 7062
  chr20:48771161-48771203
  hypo

SEQ ID NO: 26633 - DNA, 43 bp, Homo sapiens; identical to SEQ ID NO: 7063
  chr20:48771236-48771279
  hypo

SEQ ID NO: 26634 - DNA, 31 bp, Homo sapiens; identical to SEQ ID NO: 7064
  chr20:48771291-48771322
  hypo

SEQ ID NO: 26635 - DNA, 20 bp, Homo sapiens
  chr20:48771340-48771360
  hypo
attccatacaggcagccggg

SEQ ID NO: 26636 - DNA, 31 bp, Homo sapiens
  chr20:48791884-48791915
  hypo
caaatgtgcaacaccacgcctggctaattaa

SEQ ID NO: 26637 - DNA, 40 bp, Homo sapiens
  chr20:48853283-48853323
  hypo
ggaattgctgcatcaacggggatcacgaggtcaggagatc

SEQ ID NO: 26638 - DNA, 31 bp, Homo sapiens
  chr20:48887085-48887116
  hypo
ttgggggtatcttgtccgatggttattgttt

SEQ ID NO: 26639 - DNA, 31 bp, Homo sapiens
  chr20:48916106-48916137
  hypo
aaaaaaaaatggaggccggtcacggtggctg

SEQ ID NO: 26640 - DNA, 31 bp, Homo sapiens
  chr20:48916376-48916407
  hypo
tgacagagcaagactccgtctgaagaaaaaa

SEQ ID NO: 26641 - DNA, 52 bp, Homo sapiens
  chr20:48968283-48968335
  hypo
gcctggagggtagctgcgactcagcctccacggggaacgcatcccagtcatg

SEQ ID NO: 26642 - DNA, 31 bp, Homo sapiens
  chr20:48968393-48968424
  hypo
caatttttaggccaggcgcagtggctcacac

SEQ ID NO: 26643 - DNA, 31 bp, Homo sapiens
  chr20:48975510-48975541
  hypo
gccttatactcatcatcggagacctgatgat

SEQ ID NO: 26644 - DNA, 31 bp, Homo sapiens
  chr20:48975789-48975820
  hypo
gctgacaagaatcagacgtggttcctgccct

SEQ ID NO: 26645 - DNA, 31 bp, Homo sapiens
  chr20:48988162-48988193
  hypo
actggcaaagccctggcggtggtgtggtagc

SEQ ID NO: 26646 - DNA, 55 bp, Homo sapiens
  chr20:49008037-49008092
  hypo
tggtcagcaggagcttcgtcctaggcctcttcactcccctcgctctgacctggtg

SEQ ID NO: 26647 - DNA, 31 bp, Homo sapiens
  chr20:49013290-49013321
  hypo
cctgcttacaattcaacgcagtgccctgagg

SEQ ID NO: 26648 - DNA, 31 bp, Homo sapiens
  chr20:49046545-49046576
  hypo
aaggggttttcttcagcgggtctagtgcagt

SEQ ID NO: 26649 - DNA, 48 bp, Homo sapiens
  chr20:49046593-49046641
  hypo
acttttgtaccctgggcgacatttgacaatgcccggaggcattttttt

SEQ ID NO: 26650 - DNA, 31 bp, Homo sapiens
  chr20:49054049-49054080
  hypo
gaggctgtgcctgtgtcgggggagggggtag

SEQ ID NO: 26651 - DNA, 31 bp, Homo sapiens; identical to SEQ ID NO: 7065
  chr20:49131961-49131992
  hypo

SEQ ID NO: 26652 - DNA, 31 bp, Homo sapiens
  chr20:49194286-49194317
  hypo
acatccacctcctcatcggaaaatggatggg

SEQ ID NO: 26653 - DNA, 31 bp, Homo sapiens
  chr20:49197047-49197078
  hypo
atgtgatagaggtgtccgctgaggtggtcag

SEQ ID NO: 26654 - DNA, 54 bp, Homo sapiens
  chr20:49204178-49204232
  hypo
tacaaagggtggaggtcggctctgtgccagggctgctaacggtgcccatcccag

SEQ ID NO: 26655 - DNA, 126 bp, Homo sapiens
  chr20:49204263-49204389
  hypo
gctgggtgtggcctctcgcagattctaagggccccaggcaccccgctgcgctgcacagtttgtgccactttttaccgaacgacagtgtggtttcccgggctgccgcccgcacggcctccaggtcag

SEQ ID NO: 26656 - DNA, 52 bp, Homo sapiens
  chr20:49204397-49204449
  hypo
aggctggcagtctggtcgatgctttcaatgccctgttcgagattaggagaaa

SEQ ID NO: 26657 - DNA, 31 bp, Homo sapiens
  chr20:49222908-49222939
  hypo
atctaaggccaattaacgcaatcttcctaaa

SEQ ID NO: 26658 - DNA, 49 bp, Homo sapiens
  chr20:49223730-49223779
  hypo
ctttgagaagctcagccgatgagcaggggacactcggttcagacccctt

SEQ ID NO: 26659 - DNA, 31 bp, Homo sapiens
  chr20:49224077-49224108
  hypo
agggtgtctgcagacccgcaggcaccctggg

SEQ ID NO: 26660 - DNA, 31 bp, Homo sapiens
  chr20:49224899-49224930
  hypo
ctctccccaggctggacgggactcacttcca

SEQ ID NO: 26661 - DNA, 130 bp, Homo sapiens
  chr20:49224950-49225080
  hypo
tgatggtacccaactccgtgatgtccaccacgatgacctgcggccgcgtcgtgaagaagtcggcgatgtcacacgtcactgcacccacagccagcgagcccaggccccgcaactccgtcacctgggggtg

SEQ ID NO: 26662 - DNA, 60 bp, Homo sapiens
  chr20:49225088-49225148
  hypo
agggtggtgtctgagccgaacacccaggcaccccagccctgcccccgggccccatcccca

SEQ ID NO: 26663 - DNA, 122 bp, Homo sapiens
  chr20:49225157-49225279
  hypo
ccaggttctcatgcagcgtggggatgaaggccttctcctcttcgtcccaggtctggctgtcatctgactcgatccgacccttgagcttccaacgctggcggcccagacgcatgagcacctgt

SEQ ID NO: 26664 - DNA, 31 bp, Homo sapiens
  chr20:49225315-49225346
  hypo
gtgtccccttgctgtccgcccagggccctcc

SEQ ID NO: 26665 - DNA, 31 bp, Homo sapiens
  chr20:49225975-49226006
  hypo
gccacaggcagagagacgcctccttggggcc

SEQ ID NO: 26666 - DNA, 47 bp, Homo sapiens; identical to SEQ ID NO: 7067
  chr20:49226026-49226073
  hypo

SEQ ID NO: 26667 - DNA, 61 bp, Homo sapiens; identical to SEQ ID NO: 7068
  chr20:49226085-49226146
  hypo

SEQ ID NO: 26668 - DNA, 89 bp, Homo sapiens; identical to SEQ ID NO: 7069
  chr20:49226147-49226236
  hypo

SEQ ID NO: 26669 - DNA, 31 bp, Homo sapiens
  chr20:49228230-49228261
  hypo
tccaggggccagggtgcgaccaacacaaata

SEQ ID NO: 26670 - DNA, 31 bp, Homo sapiens
  chr20:49230487-49230518
  hypo
cctaccctgcccaccccgaggccctctctgc

SEQ ID NO: 26671 - DNA, 35 bp, Homo sapiens
  chr20:49230521-49230556
  hypo
agccaggatacagagacggccgcttgtttgcttgc

SEQ ID NO: 26672 - DNA, 60 bp, Homo sapiens
  chr20:49236428-49236488
  hypo
agacaagacccatccacgcttccccaggaagagacagagaggaggcgaggtagaggaatg

SEQ ID NO: 26673 - DNA, 14 bp, Homo sapiens
  chr20:49244320-49244334
  hypo
gacagaatgacacc

SEQ ID NO: 26674 - DNA, 74 bp, Homo sapiens
  chr20:49244348-49244422
  hypo
gagcacaacagcagagcgttcaatcaaagtacagagcacaggctacacgctcatgaagccgcccttgggtacag

SEQ ID NO: 26675 - DNA, 31 bp, Homo sapiens
  chr20:49247322-49247353
  hypo
cggcccacgacccccacggcccctgtgtccc

SEQ ID NO: 26676 - DNA, 63 bp, Homo sapiens
  chr20:49262041-49262104
  hypo
aggtgaatggggactacgttagaaggaccctacgttagaagggtgaggcgctagggccatagc

SEQ ID NO: 26677 - DNA, 35 bp, Homo sapiens
  chr20:49264293-49264328
  hypo
caggcatgagccaccgcacccggccacctcattct

SEQ ID NO: 26678 - DNA, 31 bp, Homo sapiens
  chr20:49264413-49264444
  hypo
cagttactttcagttgcgaggacttgctctt

SEQ ID NO: 26679 - DNA, 25 bp, Homo sapiens
  chr20:49281971-49281996
  hypo
ttttgagatggagtctcgccctgtc

SEQ ID NO: 26680 - DNA, 78 bp, Homo sapiens
  chr20:49282238-49282316
  hypo
gagccactgtgcctgccgggtgggtttcttatggcgaatgatcccacaccacttttcagtgcacgtagttacatggag

SEQ ID NO: 26681 - DNA, 31 bp, Homo sapiens
  chr20:49285098-49285129
  hypo
aattaggggaaatggccgggcacagtggctc

SEQ ID NO: 26682 - DNA, 23 bp, Homo sapiens
  chr20:49287930-49287953
  hypo
tctcacatgagcacgcgcgcgtg

SEQ ID NO: 26683 - DNA, 31 bp, Homo sapiens
  chr20:49289682-49289713
  hypo
gggctgcttctgtctgcgtcccagcctccac

SEQ ID NO: 26684 - DNA, 31 bp, Homo sapiens
  chr20:49289765-49289796
  hypo
gacccctaggtgccacgcgcccatgcaatac

SEQ ID NO: 26685 - DNA, 44 bp, Homo sapiens
  chr20:49289819-49289863
  hypo
cctgtaatggtccctacgttagggaggggcggtcccaggcccag

SEQ ID NO: 26686 - DNA, 31 bp, Homo sapiens
  chr20:49294666-49294697
  hypo
accatgggtgctaaaccggtggctgatatag

SEQ ID NO: 26687 - DNA, 31 bp, Homo sapiens
  chr20:49318932-49318963
  hypo
ccctgagaaacatctgcggcaggggccgtgc

SEQ ID NO: 26688 - DNA, 17 bp, Homo sapiens
  chr20:49330735-49330752
  hypo
ttttgagatagagtctc

SEQ ID NO: 26689 - DNA, 40 bp, Homo sapiens
  chr20:49331493-49331533
  hypo
agcactctgagaggcacggggctgccggagagagaagagt

SEQ ID NO: 26690 - DNA, 26 bp, Homo sapiens
  chr20:49331544-49331570
  hypo
aggaaggtagccaggcgcggtggctc

SEQ ID NO: 26691 - DNA, 16 bp, Homo sapiens
  chr20:49331629-49331645
  hypo
tcgagaccagcctgga

SEQ ID NO: 26692 - DNA, 35 bp, Homo sapiens
  chr20:49345550-49345585
  hypo
ccttatacaacccaggcgcacgggttgaaataatt

SEQ ID NO: 26693 - DNA, 77 bp, Homo sapiens
  chr20:49345670-49345747
  hypo
gggagagaggatgtgacgacacctccaggaatgcagggcccacgcaggtgcactggcacccacgaacttcctgataa

SEQ ID NO: 26694 - DNA, 31 bp, Homo sapiens
  chr20:49346556-49346587
  hypo
agtacccgctgggagtcgggttctgtgccac

SEQ ID NO: 26695 - DNA, 45 bp, Homo sapiens
  chr20:49346593-49346638
  hypo
ccagcaaagcacaagccgtccctgcgccttcgggagctttcattc

SEQ ID NO: 26696 - DNA, 31 bp, Homo sapiens
  chr20:49346728-49346759
  hypo
agtgttaggaggcctccgaggtgggcaggga

SEQ ID NO: 26697 - DNA, 20 bp, Homo sapiens
  chr20:49350869-49350889
  hypo
aaactaggtagtgtgccggt

SEQ ID NO: 26698 - DNA, 25 bp, Homo sapiens
  chr20:49358098-49358123
  hypo
ttttgtggagtggggacggagtcta

SEQ ID NO: 26699 - DNA, 14 bp, Homo sapiens
  chr20:49358362-49358376
  hypo
gtgagccaccgcgc

SEQ ID NO: 26700 - DNA, 59 bp, Homo sapiens
  chr20:49378012-49378071
  hypo
gtgtgcagaaagtgagcgtctgaaaactccaggcggagtttttgcgctaggttatctac

SEQ ID NO: 26701 - DNA, 31 bp, Homo sapiens
  chr20:49398687-49398718
  hypo
cccacctgtccacttgcgtgtgtctcacctt

SEQ ID NO: 26702 - DNA, 31 bp, Homo sapiens
  chr20:49399781-49399812
  hypo
gacacacatgttatctcggtttccctgggtc

SEQ ID NO: 26703 - DNA, 63 bp, Homo sapiens
  chr20:49467236-49467299
  hypo
tgagtgggcccctgagcggcgtccctgcccagccagcatctggcctaccgtgctcactcttgg

SEQ ID NO: 26704 - DNA, 31 bp, Homo sapiens
  chr20:49467312-49467343
  hypo
gtttgagtctcccccccggtagagcacatag

SEQ ID NO: 26705 - DNA, 31 bp, Homo sapiens
  chr20:49467399-49467430
  hypo
cagatttcttagggggcgtgtccaggcactg

SEQ ID NO: 26706 - DNA, 31 bp, Homo sapiens
  chr20:49468872-49468903
  hypo
gagtggccaggccttgcgctttttgtggctt

SEQ ID NO: 26707 - DNA, 31 bp, Homo sapiens; identical to SEQ ID NO: 7072
  chr20:49574742-49574773
  hypo

SEQ ID NO: 26708 - DNA, 31 bp, Homo sapiens
  chr20:49810091-49810122
  hypo
ccttgactgacttatacgttgctcatttcct

SEQ ID NO: 26709 - DNA, 42 bp, Homo sapiens
  chr20:49948350-49948392
  hypo
gtggcctcctgccaaccgagtgggattcggtacattggttta

SEQ ID NO: 26710 - DNA, 78 bp, Homo sapiens
  chr20:50199882-50199960
  hypo
cacctggtatttctttcgtctggaagttcgcggcttgctttggcacgttttaggttcagtaccgcggggtggctgagc

SEQ ID NO: 26711 - DNA, 24 bp, Homo sapiens
  chr20:50266158-50266182
  hypo
aatcgcacagctaggccgggtgca

SEQ ID NO: 26712 - DNA, 31 bp, Homo sapiens
  chr20:50293890-50293921
  hypo
gttaaattaaatacagcgcccaccctcccta

SEQ ID NO: 26713 - DNA, 82 bp, Homo sapiens
  chr20:50294009-50294091
  hypo
ggtgaatgctggtctacggggcccagcggcttctaatggaaggtgactggggaaaggcgtggcttgccgtttgtgcctctgg

SEQ ID NO: 26714 - DNA, 31 bp, Homo sapiens
  chr20:50296832-50296863
  hypo
aggcaggaccacaaatcgatcttctacacat

SEQ ID NO: 26715 - DNA, 31 bp, Homo sapiens
  chr20:50309616-50309647
  hypo
acatggccaactactgcggccatcctctcag

SEQ ID NO: 26716 - DNA, 18 bp, Homo sapiens
  chr20:50316471-50316489
  hypo
gcccggccaacactactg

SEQ ID NO: 26717 - DNA, 31 bp, Homo sapiens
  chr20:50326110-50326141
  hypo
tagaaatttagcagggcgtggtggtgtgcac

SEQ ID NO: 26718 - DNA, 42 bp, Homo sapiens
  chr20:50346532-50346574
  hypo
ccacgcatcaaggccacgcccacgcatcgaggctgtgctcat

SEQ ID NO: 26719 - DNA, 297 bp, Homo sapiens; identical to SEQ ID NO: 7076
  chr20:50383734-50384031
  hypo

SEQ ID NO: 26720 - DNA, 105 bp, Homo sapiens; identical to SEQ ID NO: 7085
  chr20:50384933-50385038
  hypo

SEQ ID NO: 26721 - DNA, 31 bp, Homo sapiens
  chr20:50390635-50390666
  hypo
ttggaaagaaaaagaacgtcttaggttgaga

SEQ ID NO: 26722 - DNA, 31 bp, Homo sapiens
  chr20:50405411-50405442
  hypo
tttggtggtaaaagctcgcccacaaatgttg

SEQ ID NO: 26723 - DNA, 35 bp, Homo sapiens
  chr20:50405456-50405491
  hypo
ctctccagtgtgagtccgctcgtggatctgaagag

SEQ ID NO: 26724 - DNA, 31 bp, Homo sapiens
  chr20:50407492-50407523
  hypo
ccaggctgcaggtcaccgggcaaggagccac

SEQ ID NO: 26725 - DNA, 31 bp, Homo sapiens
  chr20:50411962-50411993
  hypo
aacagataaaaatgttcgtcaattcccagaa

SEQ ID NO: 26726 - DNA, 31 bp, Homo sapiens
  chr20:50430800-50430831
  hypo
acaggcatgagccaccgcgcccggccaataa

SEQ ID NO: 26727 - DNA, 39 bp, Homo sapiens
  chr20:50441825-50441864
  hypo
aataaggactccaagccgggcgtggtggctcgcacctgt

SEQ ID NO: 26728 - DNA, 31 bp, Homo sapiens
  chr20:50462772-50462803
  hypo
gatttactgatctaggcgcccgccaccacgc

SEQ ID NO: 26729 - DNA, 31 bp, Homo sapiens
  chr20:50468578-50468609
  hypo
ctaatatagtaaaatacgaccatatttcaca

SEQ ID NO: 26730 - DNA, 27 bp, Homo sapiens
  chr20:50556883-50556910
  hypo
aatttgtgggccgggcgcggtggctca

SEQ ID NO: 26731 - DNA, 31 bp, Homo sapiens
  chr20:50557513-50557544
  hypo
ccctcagttttaagttcgtggtaatgttaca

SEQ ID NO: 26732 - DNA, 43 bp, Homo sapiens
  chr20:50591573-50591616
  hypo
cttagtataaaaatggcgatttcggccgggcgcagtgcctcac

SEQ ID NO: 26733 - DNA, 35 bp, Homo sapiens
  chr20:50805265-50805300
  hypo
ttcaataaagacatagcgggtagatcatgaggtca

SEQ ID NO: 26734 - DNA, 31 bp, Homo sapiens
  chr20:50805902-50805933
  hypo
tccagcctggtgacagcgagacttcatctca

SEQ ID NO: 26735 - DNA, 31 bp, Homo sapiens
  chr20:52214964-52214995
  hypo
cccttgggtggttcagcgcctggaagtcaag

SEQ ID NO: 26736 - DNA, 31 bp, Homo sapiens
  chr20:52275977-52276008
  hypo
ttttttttttttgagacggagaccccgtcgc

SEQ ID NO: 26737 - DNA, 35 bp, Homo sapiens
  chr20:52305007-52305042
  hypo
gactgtttctacaggccgggcgcggtggctcacgc

SEQ ID NO: 26738 - DNA, 31 bp, Homo sapiens
  chr20:52374170-52374201
  hypo
cagggagcaggcagtgcggctggctccccgg

SEQ ID NO: 26739 - DNA, 31 bp, Homo sapiens
  chr20:52374209-52374240
  hypo
tggatcgttcattcagcgagtgcgcatgcct

SEQ ID NO: 26740 - DNA, 31 bp, Homo sapiens
  chr20:52401840-52401871
  hypo
tgactttctttcttgtcgtttcctgaataat

SEQ ID NO: 26741 - DNA, 31 bp, Homo sapiens
  chr20:52429880-52429911
  hypo
gaatcctggtaggtaccgtgggaatctagct

SEQ ID NO: 26742 - DNA, 47 bp, Homo sapiens
  chr20:52481242-52481289
  hypo
agagggaggagaggatcgtgactgaggaaaagcgttctgacagaaat

SEQ ID NO: 26743 - DNA, 49 bp, Homo sapiens
  chr20:52481376-52481425
  hypo
cacagcaattttttatcgagaacctaacaggagccgcacattggattaa

SEQ ID NO: 26744 - DNA, 22 bp, Homo sapiens
  chr20:52758813-52758835
  hypo
atgtggccggttccttacaggc

SEQ ID NO: 26745 - DNA, 47 bp, Homo sapiens
  chr20:52758896-52758943
  hypo
ttctaagtcataaagtcgttagtaatttcttacgtagcagcagaaaa

SEQ ID NO: 26746 - DNA, 31 bp, Homo sapiens
  chr20:52758944-52758975
  hypo
taatataagtaccttacgttgtatctacacc

SEQ ID NO: 26747 - DNA, 168 bp, Homo sapiens; identical to SEQ ID NO: 7089
  chr20:54934125-54934293
  hypo

SEQ ID NO: 26748 - DNA, 35 bp, Homo sapiens; identical to SEQ ID NO: 7090
  chr20:54934305-54934340
  hypo

SEQ ID NO: 26749 - DNA, 26 bp, Homo sapiens
  chr20:55198511-55198537
  hypo
cttttttttttgagaccgagtctagc

SEQ ID NO: 26750 - DNA, 50 bp, Homo sapiens
  chr20:55685507-55685557
  hypo
gctgtgctaagtcttccggctgggcgtgtgcggggcgctgtgctaagtct

SEQ ID NO: 26751 - DNA, 31 bp, Homo sapiens
  chr20:55692779-55692810
  hypo
caccccatcaaagcaccgcccacccacccca

SEQ ID NO: 26752 - DNA, 104 bp, Homo sapiens
  chr20:55692828-55692932
  hypo
caccccatcaaagcaccgcccacccccaccccatcaaagcaccgcccacccccacctaagcaccgcccactctcccgcacctgcagcaccgcccaccccacccc

SEQ ID NO: 26753 - DNA, 40 bp, Homo sapiens
  chr20:55797061-55797101
  hypo
gtggacccagctaaatcgatggaaacgtaaagagagcaga

SEQ ID NO: 26754 - DNA, 31 bp, Homo sapiens
  chr20:55925380-55925411
  hypo
tagtaagagtagttcacgtatgatttcactt

SEQ ID NO: 26755 - DNA, 31 bp, Homo sapiens
  chr20:56271494-56271525
  hypo
ttcaaatcctgctctgcggtgtgctgggcaa

SEQ ID NO: 26756 - DNA, 31 bp, Homo sapiens
  chr20:56271544-56271575
  hypo
ctccacctcctccatgcgatggggttgccat

SEQ ID NO: 26757 - DNA, 35 bp, Homo sapiens
  chr20:56271640-56271675
  hypo
tagggttcaaaaagccgcgacgtcaccggcaagaa

SEQ ID NO: 26758 - DNA, 31 bp, Homo sapiens; identical to SEQ ID NO: 7103
  chr20:56784986-56785017
  hypo

SEQ ID NO: 26759 - DNA, 47 bp, Homo sapiens; identical to SEQ ID NO: 7104
  chr20:56785103-56785150
  hypo

SEQ ID NO: 26760 - DNA, 43 bp, Homo sapiens; identical to SEQ ID NO: 7105
  chr20:56785202-56785245
  hypo

SEQ ID NO: 26761 - DNA, 31 bp, Homo sapiens
  chr20:56977724-56977755
  hypo
gggtctaaggcataggcgaggaagggttggt

SEQ ID NO: 26762 - DNA, 31 bp, Homo sapiens
  chr20:56977769-56977800
  hypo
tgagaaagatgccaggcgcaatggctcacac

SEQ ID NO: 26763 - DNA, 40 bp, Homo sapiens
  chr20:56977809-56977849
  hypo
aaggattttgggactccgaggcaagcgaatcagttgaggc

SEQ ID NO: 26764 - DNA, 10 bp, Homo sapiens
  chr20:56977864-56977874
  hypo
agcctgggca

SEQ ID NO: 26765 - DNA, 58 bp, Homo sapiens; identical to SEQ ID NO: 7106
  chr20:57224814-57224872
  hypo

SEQ ID NO: 26766 - DNA, 19 bp, Homo sapiens
  chr20:57225060-57225079
  hypo
cggcttcgcgtctccccgg

SEQ ID NO: 26767 - DNA, 123 bp, Homo sapiens; identical to SEQ ID NO: 7108
  chr20:57225218-57225341
  hypo

SEQ ID NO: 26768 - DNA, 250 bp, Homo sapiens; identical to SEQ ID NO: 7109
  chr20:57225343-57225593
  hypo

SEQ ID NO: 26769 - DNA, 132 bp, Homo sapiens
  chr20:57268844-57268976
  hypo
ccctctacctgaactacgccaccgtggctgccctgccctgcagggtgagccggcacaacagcccctcggccgcccacttcatcacgcggctggtgcggacctgcctgccgcccggagcgcatcgctgcattg

SEQ ID NO: 26770 - DNA, 61 bp, Homo sapiens
  chr20:57577806-57577867
  hypo
ctcttcctggagcagccggtggctggtttgtcccctcccacctgaccgacccaccctaggt

SEQ ID NO: 26771 - DNA, 212 bp, Homo sapiens
  chr20:58507851-58508063
  hypo
catcaggcccagctgcgcggaggggctggcggcctcaaccgcaaggagaggccgcaggtggggacggcgggagggagagaagggactgaaggcgccgagcaggaggaaggttttgcgcgcactcccttcttccctaagtggaaccggcagtggcaacaacgaggccgaaggcgaagtccctgctcccaccgccggcacggtgacccttttcc

SEQ ID NO: 26772 - DNA, 132 bp, Homo sapiens; identical to SEQ ID NO: 7111
  chr20:58514096-58514228
  hypo

SEQ ID NO: 26773 - DNA, 288 bp, Homo sapiens; identical to SEQ ID NO: 7112
  chr20:58514241-58514529
  hypo

SEQ ID NO: 26774 - DNA, 55 bp, Homo sapiens
  chr20:60477305-60477360
  hypo
gcagaaaaggtcaagccggggcctctgaaaccaggacccccggggcctccattcc

SEQ ID NO: 26775 - DNA, 31 bp, Homo sapiens
  chr20:60477379-60477410
  hypo
tgcccttcaccagccacggagacccggggtc

SEQ ID NO: 26776 - DNA, 35 bp, Homo sapiens
  chr20:60477502-60477537
  hypo
cagatccacagaggagcgtgcggggccccaccttc

SEQ ID NO: 26777 - DNA, 35 bp, Homo sapiens
  chr20:60477544-60477579
  hypo
tttgcaggcaaatgagcggccgttgacacagggac

SEQ ID NO: 26778 - DNA, 50 bp, Homo sapiens
  chr20:60494964-60495014
  hypo
cgtgattatgtggaagcgtggtgtcacggtgattgcgtggaagcgtgttg

SEQ ID NO: 26779 - DNA, 31 bp, Homo sapiens
  chr20:60541625-60541656
  hypo
cctgggagctcgttctcgtggctggctgggt

SEQ ID NO: 26780 - DNA, 31 bp, Homo sapiens
  chr20:60543270-60543301
  hypo
ctcctgctgtcgcaagcgttccactgcgggg

SEQ ID NO: 26781 - DNA, 154 bp, Homo sapiens; identical to SEQ ID NO: 7113
  chr20:60552007-60552161
  hypo

SEQ ID NO: 26782 - DNA, 141 bp, Homo sapiens; identical to SEQ ID NO: 7114
  chr20:60552203-60552344
  hypo

SEQ ID NO: 26783 - DNA, 31 bp, Homo sapiens
  chr20:60552376-60552407
  hypo
aaactaagttctgctccgatggtgaaagctg

SEQ ID NO: 26784 - DNA, 98 bp, Homo sapiens
  chr20:60563834-60563932
  hypo
ctgggtcctccaggtccggcgttctcgatactccacgtacctcccagccccacaccccggcccttctcatgagtgaggacgcacgagctcccttactc

SEQ ID NO: 26785 - DNA, 31 bp, Homo sapiens
  chr20:60635092-60635123
  hypo
tctgttctgctgagcccggtctgtgctgctc

SEQ ID NO: 26786 - DNA, 31 bp, Homo sapiens
  chr20:60772928-60772959
  hypo
tgtcgtcggtcctgtcgcggtaccagggttt

SEQ ID NO: 26787 - DNA, 95 bp, Homo sapiens
  chr20:60772976-60773071
  hypo
ggagtaaaaactgcttcgggcgcagtggcgccgtcctctacatccgggtgagccgagactgccggacctggccctgtccccgttgttctggatca

SEQ ID NO: 26788 - DNA, 31 bp, Homo sapiens
  chr20:60773074-60773105
  hypo
agctcctgggggccaccgtgtgacccacggg

SEQ ID NO: 26789 - DNA, 63 bp, Homo sapiens
  chr20:60773278-60773341
  hypo
gagggagcccacggcacggacgcttcctccgtctctgaccccatgagccgacctctgactgag

SEQ ID NO: 26790 - DNA, 65 bp, Homo sapiens
  chr20:60773344-60773409
  hypo
ggccactggcacccagcgggcctgcgtctccttcgcgagctgaattcactcgtctcttagatgtt

SEQ ID NO: 26791 - DNA, 31 bp, Homo sapiens
  chr20:60773419-60773450
  hypo
cttcagttcacactaacgttttagaaacact

SEQ ID NO: 26792 - DNA, 39 bp, Homo sapiens
  chr20:60773472-60773511
  hypo
gtcagaagggtgtgtacgcagccccgtgaaagccctgga

SEQ ID NO: 26793 - DNA, 82 bp, Homo sapiens
  chr20:60773520-60773602
  hypo
ccttttccttgtgctccggagctgttggcagaggtgagtggggcgggcagctgcccggggcacagtccgctcttgtcttctt

SEQ ID NO: 26794 - DNA, 31 bp, Homo sapiens
  chr20:60773678-60773709
  hypo
ctgttccccaggtccccgtgggcacgctggt

SEQ ID NO: 26795 - DNA, 48 bp, Homo sapiens
  chr20:60781271-60781319
  hypo
gtctgtatgcagtgcccgggtcggcgctggccccgggatggaggcctg

SEQ ID NO: 26796 - DNA, 76 bp, Homo sapiens
  chr20:60781350-60781426
  hypo
ctcatcagtgaacacacgtgccggggacctgtcctggtgccgctaaagaggctgcagagccgcggggtgcggcagt

SEQ ID NO: 26797 - DNA, 56 bp, Homo sapiens
  chr20:60781649-60781705
  hypo
tcaccctgtgtgttggcggtggggccacgagtctgcacgtgcgaaagaatcctgtt

SEQ ID NO: 26798 - DNA, 31 bp, Homo sapiens
  chr20:60781718-60781749
  hypo
aggctgggaagatgaccggctctgaaggtgg

SEQ ID NO: 26799 - DNA, 31 bp, Homo sapiens
  chr20:60781760-60781791
  hypo
gggagagccactgaaccgcacacttcagata

SEQ ID NO: 26800 - DNA, 31 bp, Homo sapiens
  chr20:60842461-60842492
  hypo
tctcttcaaggtggcccggagtcctttacaa

SEQ ID NO: 26801 - DNA, 31 bp, Homo sapiens
  chr20:60842500-60842531
  hypo
tcaggcctatcctgtgcgtttactgtttggg

SEQ ID NO: 26802 - DNA, 50 bp, Homo sapiens
  chr20:60842567-60842617
  hypo
aattcaggaccacagccgggctctcaggaggccaccggggtagtcttatt

SEQ ID NO: 26803 - DNA, 34 bp, Homo sapiens
  chr20:60866894-60866928
  hypo
cacacacacctggggacggcggggaggccccaca

SEQ ID NO: 26804 - DNA, 41 bp, Homo sapiens
  chr20:60905901-60905942
  hypo
tgggtcagcgggaggccgggcggcagcgggatcacctggca

SEQ ID NO: 26805 - DNA, 60 bp, Homo sapiens
  chr20:60905950-60906010
  hypo
ggatgatgggctggggcggctttgggaagcgcgagggcagacaggcggcactggtgagag

SEQ ID NO: 26806 - DNA, 31 bp, Homo sapiens
  chr20:60912468-60912499
  hypo
cgcggacacccctgcacggcatgtgaacaag

SEQ ID NO: 26807 - DNA, 56 bp, Homo sapiens
  chr20:60912906-60912962
  hypo
gcagtgcctgtgtagccggggcggcagcggcacaaacctcccgccccacagagctg

SEQ ID NO: 26808 - DNA, 44 bp, Homo sapiens
  chr20:60913135-60913179
  hypo
aggctggcataggcagcggccggcctcatcgcagccctcgggca

SEQ ID NO: 26809 - DNA, 52 bp, Homo sapiens
  chr20:60913468-60913520
  hypo
cctcaggtgtccacctcgagcgcaggtagaggttgagcggggagaggggact

SEQ ID NO: 26810 - DNA, 51 bp, Homo sapiens
  chr20:60925490-60925541
  hypo
aggggcccagggctcccgcctctgctcggcactggccgtgagaatgggagt

SEQ ID NO: 26811 - DNA, 52 bp, Homo sapiens
  chr20:60925846-60925898
  hypo
tcccagctgcctcccccggaacaggtgctcctgaggccgggctggggtccca

SEQ ID NO: 26812 - DNA, 50 bp, Homo sapiens
  chr20:60925907-60925957
  hypo
cccattcccaggaaaacggcccagcgtgtgttaggcgctcaacatacagc

SEQ ID NO: 26813 - DNA, 55 bp, Homo sapiens
  chr20:60925960-60926015
  hypo
tggctgaaagaaccaacgaagggagggaggaaaggacggacgtgccctggggttg

SEQ ID NO: 26814 - DNA, 31 bp, Homo sapiens
  chr20:60926143-60926174
  hypo
tgccctcggctgcccccgaaagcaggcacac

SEQ ID NO: 26815 - DNA, 84 bp, Homo sapiens; identical to SEQ ID NO: 7116
  chr20:60941670-60941754
  hypo

SEQ ID NO: 26816 - DNA, 40 bp, Homo sapiens; identical to SEQ ID NO: 7117
  chr20:60941797-60941837
  hypo

SEQ ID NO: 26817 - DNA, 31 bp, Homo sapiens; identical to SEQ ID NO: 7118
  chr20:60941840-60941871
  hypo

SEQ ID NO: 26818 - DNA, 31 bp, Homo sapiens; identical to SEQ ID NO: 7119
  chr20:60941883-60941914
  hypo

SEQ ID NO: 26819 - DNA, 70 bp, Homo sapiens
  chr20:60953408-60953478
  hypo
ttctgccgtgcgggcacgtccagcccgacgctctcagaagcagctgggatgggctcggggaggtgggggt

SEQ ID NO: 26820 - DNA, 69 bp, Homo sapiens
  chr20:60953479-60953548
  hypo
gagcaggagtcccagccgccttcctctggggcccatcccaggctcccggctgggcgccagcagggctcc

SEQ ID NO: 26821 - DNA, 128 bp, Homo sapiens
  chr20:60953553-60953681
  hypo
tgagggggcctcacaccgttgcctctggacgtgccgtgcccgaaatcccgccattcccactgggcatgccgggccctcgaatcctccatgactccagggaagcgactccgtcccgcttggcctcagtc

SEQ ID NO: 26822 - DNA, 31 bp, Homo sapiens
  chr20:60970998-60971029
  hypo
tattcagcctctcctccgtgctcccaacaaa

SEQ ID NO: 26823 - DNA, 99 bp, Homo sapiens
  chr20:60982951-60983050
  hypo
tcagaacctgtgagcccgtggcaccgggatggtcagggcctgcctctggagcccgggagcctgtctgcagtctggaggggaacccgctgtatctttgtg

SEQ ID NO: 26824 - DNA, 31 bp, Homo sapiens
  chr20:60983979-60984010
  hypo
agttcttctttgctggcgctaagctagactt

SEQ ID NO: 26825 - DNA, 31 bp, Homo sapiens
  chr20:60984025-60984056
  hypo
aatgctgaggaaggaacggggtctcttcctg

SEQ ID NO: 26826 - DNA, 126 bp, Homo sapiens
  chr20:60984068-60984194
  hypo
ccccttgctaggctcccgctgccagtcttctcccctccccagggtgtcgatgggtggccaaaagccaacctggcctgcgggcagtgtgtagggaacacacggcttttgtttcgtgtgattctggag

SEQ ID NO: 26827 - DNA, 31 bp, Homo sapiens
  chr20:61024982-61025013
  hypo
tcccagtgaattctggcggccactgaggaag

SEQ ID NO: 26828 - DNA, 31 bp, Homo sapiens
  chr20:61270287-61270318
  hypo
gagcaggaagcagaagcgcaggaaagccaat

SEQ ID NO: 26829 - DNA, 31 bp, Homo sapiens
  chr20:61275876-61275907
  hypo
ctaagcccagagaggccggctctcctcgggg

SEQ ID NO: 26830 - DNA, 65 bp, Homo sapiens
  chr20:61288091-61288156
  hypo
ctgcaggtcctcaacacgcccaagggcatcctgttcttcctgtgtgcggccgcattcctgcaggg

SEQ ID NO: 26831 - DNA, 307 bp, Homo sapiens
  chr20:61288186-61288493
  hypo
catcacctccctggagcgccgctatgacctgcacagctaccagagcgggctcatcgccagctcctacgacattgccgcctgcctctgcctcaccttcgtcagctacttcgggggctcagggcacaagccgcgctggctgggctggggcgtgctgcttatgggcacggggtcgctggtgttcgcgctgccccacttcacggctggccgctatgaggtggagttggacgcgggtgtcaggacgtgccctgccaaccccggcgcggtgtgtgcggacagcacctcgggcctgtcccgctaccagctggtc

SEQ ID NO: 26832 - DNA, 31 bp, Homo sapiens
  chr20:61288503-61288534
  hypo
gccagttcctgcatggcgtgggtgccacacc

SEQ ID NO: 26833 - DNA, 31 bp, Homo sapiens
  chr20:61297786-61297817
  hypo
gaacaagctcaggctccggggctccgcggtc

SEQ ID NO: 26834 - DNA, 55 bp, Homo sapiens
  chr20:61297824-61297879
  hypo
tctgcctgttctgcaccgttgtcagcctgctgggcatcctcgtcttctcactgca

SEQ ID NO: 26835 - DNA, 31 bp, Homo sapiens
  chr20:61305618-61305649
  hypo
tgtggcactgagcatccgtgtggaggtgtcc

SEQ ID NO: 26836 - DNA, 44 bp, Homo sapiens
  chr20:61412186-61412230
  hypo
agagcccaggtgccaccgagggaatgcaacgtgccacaccccaa

SEQ ID NO: 26837 - DNA, 31 bp, Homo sapiens
  chr20:61412267-61412298
  hypo
actccgggcacagcctcggacaccctgcccg

SEQ ID NO: 26838 - DNA, 31 bp, Homo sapiens
  chr20:61471156-61471187
  hypo
cccctccatgcacgcacgctgctctctgggt

SEQ ID NO: 26839 - DNA, 124 bp, Homo sapiens
  chr20:61472145-61472269
  hypo
gcgggggtgtggcaggcgggtgacgtccaggagagggagcgcccctggctgcccctcggccgccgactggacgcgcgggccttgccagcgagcaccctcatcgggctgtcgcctgacagcatac

SEQ ID NO: 26840 - DNA, 31 bp, Homo sapiens
  chr20:61472340-61472371
  hypo
gttgtgtacaactccacgaggtgaaaaatat

SEQ ID NO: 26841 - DNA, 58 bp, Homo sapiens
  chr20:61482262-61482320
  hypo
agcagcaccttccacccgcaaggccctgctcccactgtcttcacgtttactcgtcccc

SEQ ID NO: 26842 - DNA, 114 bp, Homo sapiens; identical to SEQ ID NO: 7123
  chr20:61492901-61493015
  hypo

SEQ ID NO: 26843 - DNA, 31 bp, Homo sapiens
  chr20:61506075-61506106
  hypo
gtgccgccgtcctgcccgggactcaccacca

SEQ ID NO: 26844 - DNA, 146 bp, Homo sapiens
  chr20:61506184-61506330
  hypo
caaatatgtttccctacgaaaacctgcggaaaatgtgtggaaatcgatgttgagagtgcgggatctgggtgggaggaatataagcttgcgtaagtggacagggactcagatacgagattctggatttgatgcgttggagggaacgg

SEQ ID NO: 26845 - DNA, 66 bp, Homo sapiens
  chr20:61506505-61506571
  hypo
ggaggtcaccccttcacgaggattgtgaggagtgaattcatcggggagccccgcaccctcacctgc

SEQ ID NO: 26846 - DNA, 64 bp, Homo sapiens
  chr20:61567397-61567461
  hypo
gaatgttaaggaatgtcgccttaaggcgctagcactcaagctttctgctcgtgcatccccttgc

SEQ ID NO: 26847 - DNA, 31 bp, Homo sapiens
  chr20:61576608-61576639
  hypo
aaatacaggaaaagcacgaatcatgattctg

SEQ ID NO: 26848 - DNA, 31 bp, Homo sapiens
  chr20:61765375-61765406
  hypo
caggtaacaaagctgtcggcatccccagagc

SEQ ID NO: 26849 - DNA, 31 bp, Homo sapiens
  chr20:61765607-61765638
  hypo
gctcctgtgccagctccgggcacttgaccat

SEQ ID NO: 26850 - DNA, 31 bp, Homo sapiens
  chr20:61819883-61819914
  hypo
cccacctccaactccacggactctactgccc

SEQ ID NO: 26851 - DNA, 62 bp, Homo sapiens
  chr20:61819940-61820002
  hypo
cttgtgcctgggacagcgaccacccccaggacagaaacaccccctcccgggactcctctagg

SEQ ID NO: 26852 - DNA, 31 bp, Homo sapiens
  chr20:61820007-61820038
  hypo
ctgtcccatgtgggaccgttccacaggtgct

SEQ ID NO: 26853 - DNA, 31 bp, Homo sapiens
  chr20:61835627-61835658
  hypo
gaacagaccccaagctcgctgattactcagc

SEQ ID NO: 26854 - DNA, 59 bp, Homo sapiens
  chr20:61838285-61838344
  hypo
agtcctggtcacagtgcgtgggagacaactggaaacgcacagttcgggctgcctggaaa

SEQ ID NO: 26855 - DNA, 23 bp, Homo sapiens
  chr20:61838525-61838548
  hypo
acagctgcattaaccccgggcac

SEQ ID NO: 26856 - DNA, 56 bp, Homo sapiens
  chr20:61895762-61895818
  hypo
cattttctggttgcttcggctgctggctgtagtggggacggcggctgtgagccttc

SEQ ID NO: 26857 - DNA, 38 bp, Homo sapiens
  chr20:61909561-61909599
  hypo
acttgagagctggggacgcctggcgtgggccaggccca

SEQ ID NO: 26858 - DNA, 31 bp, Homo sapiens
  chr20:61973524-61973555
  hypo
cttcttttcaaggctgcgtggaaccctgatg

SEQ ID NO: 26859 - DNA, 41 bp, Homo sapiens
  chr20:61973561-61973602
  hypo
gaccatatgctgaacccgataacaagcgtgaaggatttgaa

SEQ ID NO: 26860 - DNA, 35 bp, Homo sapiens
  chr20:61982303-61982338
  hypo
gggagtccactgcacccgcccgtcatggaacaggt

SEQ ID NO: 26861 - DNA, 65 bp, Homo sapiens
  chr20:62032328-62032393
  hypo
cggagttggcgtgtggcgatggcgatgtgcacgtgcctgcctggtagccccggggaccggcccct

SEQ ID NO: 26862 - DNA, 31 bp, Homo sapiens
  chr20:62058718-62058749
  hypo
ttctgatgtcacacccgcgcttgtaggcgtt

SEQ ID NO: 26863 - DNA, 23 bp, Homo sapiens
  chr20:62114930-62114953
  hypo
cgggcgcgggggcccacgcctgt

SEQ ID NO: 26864 - DNA, 31 bp, Homo sapiens
  chr20:62126218-62126249
  hypo
gtggccgggttgtagccgatcttcttgatgt

SEQ ID NO: 26865 - DNA, 31 bp, Homo sapiens
  chr20:62127228-62127259
  hypo
tgttcttgatgaagtcgcggtggccgggggc

SEQ ID NO: 26866 - DNA, 43 bp, Homo sapiens; identical to SEQ ID NO: 7127
  chr20:62152086-62152129
  hypo

SEQ ID NO: 26867 - DNA, 157 bp, Homo sapiens
  chr20:62153150-62153307
  hypo
cgcctgtggcctggctcgggacgccccgaggaagcagcccggcggtcagtccagcacagccagcgctgggcccccgtcctgacctgagcggttaccaccagccccaggcctgcggaggcgctagtccaccagagcccctccccgcccctctccccac

SEQ ID NO: 26868 - DNA, 29 bp, Homo sapiens
  chr20:62155932-62155961
  hypo
gacagattaaactgggcgcagtggctcac

SEQ ID NO: 26869 - DNA, 57 bp, Homo sapiens
  chr20:62165578-62165635
  hypo
ggctgaggaaggacaccgcctcgttcaggtgcagccggcccccggcacgccgccaga

SEQ ID NO: 26870 - DNA, 55 bp, Homo sapiens
  chr20:62165641-62165696
  hypo
agtgccgcacagcctgcgtgtcccgcactgggagggagagcgtgagctgtgtggc

SEQ ID NO: 26871 - DNA, 50 bp, Homo sapiens
  chr20:62172262-62172312
  hypo
tgagcacgtagacctccgccgggcaggcagccgggcgcggcagccggtac

SEQ ID NO: 26872 - DNA, 58 bp, Homo sapiens
  chr20:62179511-62179569
  hypo
ctttcatgcagtaaaacgagatgctgattgcagggagctcggccgcaggccaggcacc

SEQ ID NO: 26873 - DNA, 38 bp, Homo sapiens
  chr20:62179571-62179609
  hypo
gatgccccatgctgcccgatgaccggcttctgagtcag

SEQ ID NO: 26874 - DNA, 31 bp, Homo sapiens
  chr20:62179624-62179655
  hypo
tacccaaaggccactgcggggaagtggaggc

SEQ ID NO: 26875 - DNA, 100 bp, Homo sapiens
  chr20:62204275-62204375
  hypo
ggtggcctgcttaaagcgggccagcaggatctcgcgggagcagtcatgctccaccctacggaggacgtaggtgctttcattgagccgctgggtgcagcgg

SEQ ID NO: 26876 - DNA, 84 bp, Homo sapiens
  chr20:62221318-62221402
  hypo
ttggttctgcagaccacgtgacccacctgcccgagccagccctgcggcctctgcccgctccctgctgccgcggctgagagacag

SEQ ID NO: 26877 - DNA, 47 bp, Homo sapiens
  chr20:62221625-62221672
  hypo
ttgaacaccgtgctaccgtcctgcacggcggccgtgctcaggaccgt

SEQ ID NO: 26878 - DNA, 123 bp, Homo sapiens
  chr20:62221899-62222022
  hypo
actgggtgagcacctgcgaggccatggcggccggtcctgatgtggcacgtgcaagccggggccgcttcacaggcggtggcagggagaccggcgtcagcgtcatgagcacgttgctgaggtgct

SEQ ID NO: 26879 - DNA, 31 bp, Homo sapiens
  chr20:62266230-62266261
  hypo
gattagaggtatgagccgctgcacctggcct

SEQ ID NO: 26880 - DNA, 71 bp, Homo sapiens; identical to SEQ ID NO: 7128
  chr20:62273399-62273470
  hypo

SEQ ID NO: 26881 - DNA, 31 bp, Homo sapiens; identical to SEQ ID NO: 7129
  chr20:62273486-62273517
  hypo

SEQ ID NO: 26882 - DNA, 31 bp, Homo sapiens
  chr20:62281596-62281627
  hypo
agttaaaaacaattctcgcagtgagctgggc

SEQ ID NO: 26883 - DNA, 43 bp, Homo sapiens
  chr20:62320910-62320953
  hypo
cctcccgtaccccccacgcatggacccccgggttgtcctcaag

SEQ ID NO: 26884 - DNA, 90 bp, Homo sapiens
  chr20:62321017-62321107
  hypo
tggggctggggtaaggcggtctggtgactgagcccccgccccgtggccaagggagcccccgtgaccgagccgcctcgccccacagttcct

SEQ ID NO: 26885 - DNA, 85 bp, Homo sapiens
  chr20:62321110-62321195
  hypo
tgggcaggagtggtaccggcagcaggcgtccagggctgtgaaccaggccatcgggcgagtgatccggcaccgccaggactacgga

SEQ ID NO: 26886 - DNA, 31 bp, Homo sapiens
  chr20:62321327-62321358
  hypo
ggctactcggggtcagcgtggggcccctgca

SEQ ID NO: 26887 - DNA, 53 bp, Homo sapiens
  chr20:62321969-62322022
  hypo
ccctacaggcagagaacgccccaggcaaggatgccccccgaggctgagactcc

SEQ ID NO: 26888 - DNA, 44 bp, Homo sapiens
  chr20:62326588-62326632
  hypo
tggctgctcctggcagcgccccaaccgcacgcagccctgggagt

SEQ ID NO: 26889 - DNA, 31 bp, Homo sapiens
  chr20:62326672-62326703
  hypo
gtctccaggcccctcacggtccgagaagacc

SEQ ID NO: 26890 - DNA, 31 bp, Homo sapiens
  chr20:62329295-62329326
  hypo
aacatcaagtcaggtccggtccatctgcagg

SEQ ID NO: 26891 - DNA, 86 bp, Homo sapiens
  chr20:62331798-62331884
  hypo
gtgatgtccctctgccgcggcggccggtgcacattccgcacgacacacttcaccatccactcgatgccctcgcgcacccctttgct

SEQ ID NO: 26892 - DNA, 31 bp, Homo sapiens
  chr20:62331899-62331930
  hypo
gtgaggcggggggtctcggtccccaaagccc

SEQ ID NO: 26893 - DNA, 196 bp, Homo sapiens
  chr20:62383136-62383332
  hypo
catgaagccccgcccccggtgggtctccccatgaagccccgccccccggtgggtctcccatgaagccccgccccccggtgggtctcccggtggagctcggctcctgcaggtccgctccggaacctgctgactctcctgcgattcctaaactggcagcgatgctccagagcctcttccgccccgacagcagccccac

SEQ ID NO: 26894 - DNA, 90 bp, Homo sapiens
  chr20:62383405-62383495
  hypo
tgcgcctcggggtgggcgttccaggactccccgaacccttggggccgccccgctctgggctgcctgtgccccacccgcctcactggttga

SEQ ID NO: 26895 - DNA, 31 bp, Homo sapiens
  chr20:62383501-62383532
  hypo
ccacttgagatgccctcgccaggcctttttt

SEQ ID NO: 26896 - DNA, 31 bp, Homo sapiens; identical to SEQ ID NO: 7133
  chr20:62383685-62383716
  hypo

SEQ ID NO: 26897 - DNA, 103 bp, Homo sapiens; identical to SEQ ID NO: 7134
  chr20:62383849-62383952
  hypo

SEQ ID NO: 26898 - DNA, 126 bp, Homo sapiens; identical to SEQ ID NO: 7135
  chr20:62384089-62384215
  hypo

SEQ ID NO: 26899 - DNA, 36 bp, Homo sapiens
  chr20:62440398-62440434
  hypo
aagacctgggagctggcggctcggtgctccggtgct

SEQ ID NO: 26900 - DNA, 31 bp, Homo sapiens
  chr20:62487799-62487830
  hypo
aatacagagaaaagcacggagccgccggcgt

SEQ ID NO: 26901 - DNA, 58 bp, Homo sapiens
  chr20:62488292-62488350
  hypo
tgccctgtgtctgcagcggggagaggtctggagcccgtgtgtccgacagcagaagtgg

SEQ ID NO: 26902 - DNA, 61 bp, Homo sapiens
  chr20:62488385-62488446
  hypo
ttgcaggcctgtgctgcgagactgcagtggcgctcaggacacacctcggagaagagcaagc

SEQ ID NO: 26903 - DNA, 31 bp, Homo sapiens
  chr20:62560382-62560413
  hypo
gggctggccttggtgccgctgaacttagatg

SEQ ID NO: 26904 - DNA, 31 bp, Homo sapiens
  chr20:62562831-62562862
  hypo
ccgatcgtcatacagccggcatccgccaccg

SEQ ID NO: 26905 - DNA, 31 bp, Homo sapiens
  chr20:62576161-62576192
  hypo
ctgaggccgcctggtccgtgggcctggccag

SEQ ID NO: 26906 - DNA, 44 bp, Homo sapiens
  chr20:62576243-62576287
  hypo
gtgtctgcacctggtccgtgggcctggcccgagccacttcccca

SEQ ID NO: 26907 - DNA, 60 bp, Homo sapiens
  chr20:62578921-62578981
  hypo
gcccagcacagtgcctcggcctggcctctctggctgtcagagtgccggatgggggaccct

SEQ ID NO: 26908 - DNA, 54 bp, Homo sapiens
  chr20:62583700-62583754
  hypo
cactgtgctggccaggcgagggacggaggagcccaggcacgcagctgtgaatgg

SEQ ID NO: 26909 - DNA, 31 bp, Homo sapiens
  chr20:62583764-62583795
  hypo
ccccaccctggaatcacgtcgcctcgctgca

SEQ ID NO: 26910 - DNA, 67 bp, Homo sapiens
  chr20:62583953-62584020
  hypo
agaactcccattcccacgccacccacaggtgctgatgccgcgctggggtaagcgctgcccagagcac

SEQ ID NO: 26911 - DNA, 34 bp, Homo sapiens
  chr20:62598912-62598946
  hypo
tagcaccgcctaccaccggcggctgcacaggccc

SEQ ID NO: 26912 - DNA, 31 bp, Homo sapiens
  chr20:62608160-62608191
  hypo
gaaaagacagattctgcggagatgaagaaca

SEQ ID NO: 26913 - DNA, 31 bp, Homo sapiens
  chr20:62608210-62608241
  hypo
ggagaaactagacagacgaaaacaacagcaa

SEQ ID NO: 26914 - DNA, 31 bp, Homo sapiens
  chr20:62608255-62608286
  hypo
gagtgtggggaagagacgctctgaggcaggt

SEQ ID NO: 26915 - DNA, 20 bp, Homo sapiens
  chr20:62631470-62631490
  hypo
caccacgcctgaatccacca

SEQ ID NO: 26916 - DNA, 31 bp, Homo sapiens
  chr20:62646173-62646204
  hypo
aatttattgaatgctacgatgaaagtgaaaa

SEQ ID NO: 26917 - DNA, 99 bp, Homo sapiens
  chr20:62662172-62662271
  hypo
gagtgtgaaattattccgtttggcaactgagacgaacccgaacagctgcccggagtggaggctcctcgtgttgtctcttgactacggtgcctctggctc

SEQ ID NO: 26918 - DNA, 31 bp, Homo sapiens; identical to SEQ ID NO: 7136
  chr20:62674074-62674105
  hypo

SEQ ID NO: 26919 - DNA, 69 bp, Homo sapiens; identical to SEQ ID NO: 7140
  chr20:62694647-62694716
  hypo

SEQ ID NO: 26920 - DNA, 35 bp, Homo sapiens
  chr20:62705148-62705183
  hypo
gaagggaacccagagtcggccgtaggaggcggcgg

SEQ ID NO: 26921 - DNA, 57 bp, Homo sapiens; identical to SEQ ID NO: 7141
  chr20:62733447-62733504
  hypo

SEQ ID NO: 26922 - DNA, 109 bp, Homo sapiens; identical to SEQ ID NO: 7142
  chr20:62733593-62733702
  hypo

SEQ ID NO: 26923 - DNA, 159 bp, Homo sapiens; identical to SEQ ID NO: 7143
  chr20:62733703-62733862
  hypo

SEQ ID NO: 26924 - DNA, 31 bp, Homo sapiens
  chr20:62859481-62859512
  hypo
gctctcatacgctacacgttgatacctgtga

SEQ ID NO: 26925 - DNA, 39 bp, Homo sapiens
  chr21:16383776-16383815
  hypo
tgggattgcaagcgtgagccaccacgcccagagtactgg

SEQ ID NO: 26926 - DNA, 34 bp, Homo sapiens
  chr21:16408139-16408173
  hypo
gtgctgggattacaggcatcgtgatgtatatgac

SEQ ID NO: 26927 - DNA, 57 bp, Homo sapiens
  chr21:16408236-16408293
  hypo
aatacaataatgttaacgatttcttattttctgaaattactgcgaaaatggcaaatt

SEQ ID NO: 26928 - DNA, 31 bp, Homo sapiens
  chr21:16747502-16747533
  hypo
tgcaggctgccaggctcgcaaagcacctcca

SEQ ID NO: 26929 - DNA, 52 bp, Homo sapiens
  chr21:16747562-16747614
  hypo
ccccatgtggaggctccgcattgcaggctgccaggctcgtaaagcacctcca

SEQ ID NO: 26930 - DNA, 31 bp, Homo sapiens
  chr21:16747619-16747650
  hypo
acaggggcttccacagcggggaagagtgtgg

SEQ ID NO: 26931 - DNA, 31 bp, Homo sapiens
  chr21:16747674-16747705
  hypo
ctcaactcagaagggacgccctccatttctg

SEQ ID NO: 26932 - DNA, 31 bp, Homo sapiens
  chr21:17092853-17092884
  hypo
agccaccacgcccggccgaaaattggtttta

SEQ ID NO: 26933 - DNA, 84 bp, Homo sapiens; identical to SEQ ID NO: 7147
  chr21:17102747-17102831
  hypo

SEQ ID NO: 26934 - DNA, 31 bp, Homo sapiens
  chr21:18824915-18824946
  hypo
cataagccaccactcccgaacaagactgaaa

SEQ ID NO: 26935 - DNA, 31 bp, Homo sapiens; identical to SEQ ID NO: 7152
  chr21:18885607-18885638
  hypo

SEQ ID NO: 26936 - DNA, 278 bp, Homo sapiens; identical to SEQ ID NO: 7153
  chr21:18885657-18885935
  hypo

SEQ ID NO: 26937 - DNA, 31 bp, Homo sapiens
  chr21:18913417-18913448
  hypo
ttaggattgatgaacccgtattgacataaca

SEQ ID NO: 26938 - DNA, 31 bp, Homo sapiens
  chr21:18936385-18936416
  hypo
gcaaggcacaatgaaacgagtatggctgtat

SEQ ID NO: 26939 - DNA, 31 bp, Homo sapiens; identical to SEQ ID NO: 7154
  chr21:18985139-18985170
  hypo

SEQ ID NO: 26940 - DNA, 31 bp, Homo sapiens
  chr21:19274378-19274409
  hypo
catgtttttccaagtgcggcatttctaggat

SEQ ID NO: 26941 - DNA, 31 bp, Homo sapiens
  chr21:19274827-19274858
  hypo
ctgtagtactcagttacgtaaccaaacacca

SEQ ID NO: 26942 - DNA, 56 bp, Homo sapiens
  chr21:19274868-19274924
  hypo
cactgtgaaggtatttcgtagatgcaattaacatctacggtcggttgattttaagt

SEQ ID NO: 26943 - DNA, 67 bp, Homo sapiens
  chr21:21132336-21132403
  hypo
gccatctctgggaccccggggacccggtgcgcacgctgagcagcaccaaggacggggcgcacggccg

SEQ ID NO: 26944 - DNA, 31 bp, Homo sapiens; identical to SEQ ID NO: 7156
  chr21:27011573-27011604
  hypo

SEQ ID NO: 26945 - DNA, 61 bp, Homo sapiens; identical to SEQ ID NO: 7157
  chr21:27011608-27011669
  hypo

SEQ ID NO: 26946 - DNA, 213 bp, Homo sapiens; identical to SEQ ID NO: 7158
  chr21:27011672-27011885
  hypo

SEQ ID NO: 26947 - DNA, 62 bp, Homo sapiens; identical to SEQ ID NO: 7159
  chr21:27011920-27011982
  hypo

SEQ ID NO: 26948 - DNA, 136 bp, Homo sapiens; identical to SEQ ID NO: 7160
  chr21:27011984-27012120
  hypo

SEQ ID NO: 26949 - DNA, 77 bp, Homo sapiens; identical to SEQ ID NO: 7161
  chr21:27012148-27012225
  hypo

SEQ ID NO: 26950 - DNA, 181 bp, Homo sapiens; identical to SEQ ID NO: 7162
  chr21:27012250-27012431
  hypo

SEQ ID NO: 26951 - DNA, 38 bp, Homo sapiens; identical to SEQ ID NO: 7163
  chr21:27012498-27012536
  hypo

SEQ ID NO: 26952 - DNA, 24 bp, Homo sapiens
  chr21:27245269-27245293
  hypo
caccgcgcccggccaggatcatct

SEQ ID NO: 26953 - DNA, 20 bp, Homo sapiens
  chr21:27341410-27341430
  hypo
gggaggcggaggctggcgga

SEQ ID NO: 26954 - DNA, 33 bp, Homo sapiens
  chr21:27456834-27456867
  hypo
gtgagcaccgcgcccggccgaagacaccatttt

SEQ ID NO: 26955 - DNA, 31 bp, Homo sapiens
  chr21:27783697-27783728
  hypo
ctcatctgcatacttacgtatagaacagggg

SEQ ID NO: 26956 - DNA, 26 bp, Homo sapiens
  chr21:30037460-30037486
  hypo
gccaggagtggcggcatgcacctatg

SEQ ID NO: 26957 - DNA, 35 bp, Homo sapiens
  chr21:30037523-30037558
  hypo
tgaggctgtggtgagacgtcgcgatctcatcactg

SEQ ID NO: 26958 - DNA, 31 bp, Homo sapiens
  chr21:30407640-30407671
  hypo
ttaaaacagatttttacgtcttaaaaatcat

SEQ ID NO: 26959 - DNA, 33 bp, Homo sapiens
  chr21:30407702-30407735
  hypo
ttttttttttttgagacggaatctttctgtcgc

SEQ ID NO: 26960 - DNA, 70 bp, Homo sapiens
  chr21:33057408-33057478
  hypo
ggtgcagcaggtggcacggcagagccatacattttcacgctgtcaccagactcggcgtttcctctagccc

SEQ ID NO: 26961 - DNA, 31 bp, Homo sapiens
  chr21:33057528-33057559
  hypo
tcttcatttataccagcgatagtagctaagg

SEQ ID NO: 26962 - DNA, 31 bp, Homo sapiens
  chr21:33253353-33253384
  hypo
ggggcatggcctcgtacgggacagttgctga

SEQ ID NO: 26963 - DNA, 31 bp, Homo sapiens
  chr21:33371339-33371370
  hypo
tccctatgatgggcatcggacagatgttaag

SEQ ID NO: 26964 - DNA, 31 bp, Homo sapiens
  chr21:33415198-33415229
  hypo
agcctcttggtggcttcgagaaaattagagt

SEQ ID NO: 26965 - DNA, 31 bp, Homo sapiens
  chr21:33523366-33523397
  hypo
tctctatatgattctgcgttaaatttggcca

SEQ ID NO: 26966 - DNA, 31 bp, Homo sapiens
  chr21:33688988-33689019
  hypo
ttaaggaggtcagccacgaccacagggtgtg

SEQ ID NO: 26967 - DNA, 54 bp, Homo sapiens
  chr21:33720324-33720378
  hypo
ccagttataccacaatcgcctgagacactccacctgccccggaaggactggact

SEQ ID NO: 26968 - DNA, 31 bp, Homo sapiens
  chr21:33721793-33721824
  hypo
tgtgaggacaagagcacgagcctcagcaggg

SEQ ID NO: 26969 - DNA, 31 bp, Homo sapiens
  chr21:33721850-33721881
  hypo
agtgacttccagggcccgtgttttcagagca

SEQ ID NO: 26970 - DNA, 43 bp, Homo sapiens
  chr21:33754388-33754431
  hypo
tgtgtggccctgcagccgggcttcaggacgggaagccctttcc

SEQ ID NO: 26971 - DNA, 31 bp, Homo sapiens
  chr21:33760540-33760571
  hypo
tacctcacctgtataacggaacaagaacaga

SEQ ID NO: 26972 - DNA, 31 bp, Homo sapiens
  chr21:33781920-33781951
  hypo
agcaattcagttttctcgcaagattccaaaa

SEQ ID NO: 26973 - DNA, 58 bp, Homo sapiens
  chr21:33791605-33791663
  hypo
agaacaattgctccctcgttacccacccctattgcctgacttgcgtactgctctcccc

SEQ ID NO: 26974 - DNA, 37 bp, Homo sapiens
  chr21:33791727-33791764
  hypo
tatccatactgatggccgggcactgtggctcacgcct

SEQ ID NO: 26975 - DNA, 95 bp, Homo sapiens
  chr21:33812565-33812660
  hypo
gtgatcctggcttcatcgccaagtggctctgcagtttgaggattacgctgtgtcccgaagaaaagaaaagaaaattgttccgtttagttgcttgg

SEQ ID NO: 26976 - DNA, 31 bp, Homo sapiens
  chr21:33812698-33812729
  hypo
taagtcagatggtgttcgctgcataactttc

SEQ ID NO: 26977 - DNA, 31 bp, Homo sapiens
  chr21:33824926-33824957
  hypo
cttgccctagtgtactcggaaaatcagattt

SEQ ID NO: 26978 - DNA, 12 bp, Homo sapiens
  chr21:33824995-33825007
  hypo
tggaggaggtgg

SEQ ID NO: 26979 - DNA, 12 bp, Homo sapiens
  chr21:33844218-33844230
  hypo
gagcaaccgcac

SEQ ID NO: 26980 - DNA, 31 bp, Homo sapiens
  chr21:33844372-33844403
  hypo
aggtaaatctgtaagccgaatggtttgtgtt

SEQ ID NO: 26981 - DNA, 31 bp, Homo sapiens
  chr21:33845959-33845990
  hypo
agctgcctcccctcttcgcttagcagccaga

SEQ ID NO: 26982 - DNA, 66 bp, Homo sapiens
  chr21:33849055-33849121
  hypo
cacccccagggctgcccgaggcctggctgccagtactcccgtatcctgcaccgcagtgggacacac

SEQ ID NO: 26983 - DNA, 31 bp, Homo sapiens
  chr21:33870159-33870190
  hypo
ttaaaccatcagatctcgtgagtccctttca

SEQ ID NO: 26984 - DNA, 42 bp, Homo sapiens
  chr21:33870191-33870233
  hypo
tatcaagacaacagcccgggaaagacccgcccctaagattca

SEQ ID NO: 26985 - DNA, 31 bp, Homo sapiens
  chr21:33875253-33875284
  hypo
taacagggttcccacccgatccataaacagc

SEQ ID NO: 26986 - DNA, 31 bp, Homo sapiens
  chr21:33875309-33875340
  hypo
agagccaaccctgtgccgtctctcctcaaag

SEQ ID NO: 26987 - DNA, 34 bp, Homo sapiens
  chr21:33876125-33876159
  hypo
tgacttttaattattccggcggtccctggggtag

SEQ ID NO: 26988 - DNA, 31 bp, Homo sapiens
  chr21:33876169-33876200
  hypo
ggtgtcttagaataggcgtactatgaacagc

SEQ ID NO: 26989 - DNA, 45 bp, Homo sapiens
  chr21:33876229-33876274
  hypo
aaacaggtataaacttcgacccaagcggatcgaaggttctgagga

SEQ ID NO: 26990 - DNA, 4 bp, Homo sapiens
  chr21:33879875-33879879
  hypo
gtgt

SEQ ID NO: 26991 - DNA, 31 bp, Homo sapiens
  chr21:33879916-33879947
  hypo
tacatgtgtgtacatgcgtatctgtgtgtgc

SEQ ID NO: 26992 - DNA, 6 bp, Homo sapiens
  chr21:33879990-33879996
  hypo
tgtgca

SEQ ID NO: 26993 - DNA, 28 bp, Homo sapiens
  chr21:33880055-33880083
  hypo
gcatatgtgtttgcgtgtgtgtgcatgt

SEQ ID NO: 26994 - DNA, 21 bp, Homo sapiens
  chr21:33880311-33880332
  hypo
tgtgtacgcatgcatgtgtgt

SEQ ID NO: 26995 - DNA, 31 bp, Homo sapiens
  chr21:33884693-33884724
  hypo
gcaagtccatagttaccggctgtggcaccct

SEQ ID NO: 26996 - DNA, 23 bp, Homo sapiens
  chr21:33898640-33898663
  hypo
tggagtctcactctgtcgccagg

SEQ ID NO: 26997 - DNA, 24 bp, Homo sapiens
  chr21:33913567-33913591
  hypo
gttaagaagtccaggccgggcgcg

SEQ ID NO: 26998 - DNA, 77 bp, Homo sapiens
  chr21:33924143-33924220
  hypo
attagagagactcaggcgtgcaccaaggaaacgtctagctatgctcttctccagcctctcaccgggctgcaggtctt

SEQ ID NO: 26999 - DNA, 31 bp, Homo sapiens
  chr21:33924229-33924260
  hypo
tatcactggggtgtcccgggcttttgtttga

SEQ ID NO: 27000 - DNA, 84 bp, Homo sapiens
  chr21:33983235-33983319
  hypo
tcaggaagtatcatcccgtcaagttcaaaaactatgctgtctaatgcggcagctactcgctccacttggcgatttaaatttatt

SEQ ID NO: 27001 - DNA, 31 bp, Homo sapiens
  chr21:34498740-34498771
  hypo
catttaacttgttcaccgccaactcaagaaa

SEQ ID NO: 27002 - DNA, 31 bp, Homo sapiens
  chr21:34498778-34498809
  hypo
tttccctcaaaaccagcgttccctcccttga

SEQ ID NO: 27003 - DNA, 59 bp, Homo sapiens
  chr21:34498858-34498917
  hypo
tgtttgctgcagtcctcgttcgagggagaacagcaggagaaatccgagcaaatggcaag

SEQ ID NO: 27004 - DNA, 31 bp, Homo sapiens
  chr21:34710939-34710970
  hypo
aagttatattatgaaacggatttcatgaagt

SEQ ID NO: 27005 - DNA, 26 bp, Homo sapiens
  chr21:34711331-34711357
  hypo
gccaccgagcccggccaataatgatt

SEQ ID NO: 27006 - DNA, 31 bp, Homo sapiens; identical to SEQ ID NO: 7185
  chr21:34776440-34776471
  hypo

SEQ ID NO: 27007 - DNA, 31 bp, Homo sapiens
  chr21:34921349-34921380
  hypo
gtaacttttaatttaacgtgaggtgttatac

SEQ ID NO: 27008 - DNA, 37 bp, Homo sapiens
  chr21:35045296-35045333
  hypo
gaggcaccacgcctggcggaaacgatttaataagtgt

SEQ ID NO: 27009 - DNA, 42 bp, Homo sapiens
  chr21:35453129-35453171
  hypo
atttgctatgatacagcgtgttgacctcgtgctagtagtttg

SEQ ID NO: 27010 - DNA, 37 bp, Homo sapiens
  chr21:35453174-35453211
  hypo
acaagtcagtgcacttcgctcacgctgggtgagttgt

SEQ ID NO: 27011 - DNA, 31 bp, Homo sapiens
  chr21:35453253-35453284
  hypo
caggtaatcttgtttccgtaaaataatttaa

SEQ ID NO: 27012 - DNA, 31 bp, Homo sapiens
  chr21:35533044-35533075
  hypo
catgagccaccacacccggccaccattttct

SEQ ID NO: 27013 - DNA, 31 bp, Homo sapiens
  chr21:35559282-35559313
  hypo
taggtgcaaggcacaacgctgggctgctacc

SEQ ID NO: 27014 - DNA, 31 bp, Homo sapiens
  chr21:35938134-35938165
  hypo
agtatctcttccccagcgaccatgtatacac

SEQ ID NO: 27015 - DNA, 111 bp, Homo sapiens; identical to SEQ ID NO: 7187
  chr21:35986868-35986979
  hypo

SEQ ID NO: 27016 - DNA, 31 bp, Homo sapiens
  chr21:36026851-36026882
  hypo
tcttacgtcatgactgcgaggaattattact

SEQ ID NO: 27017 - DNA, 53 bp, Homo sapiens
  chr21:36073673-36073726
  hypo
ctcactaattgaggctcgttaaaaggcaccctgcactccgtaattgtctgctc

SEQ ID NO: 27018 - DNA, 38 bp, Homo sapiens
  chr21:37514441-37514479
  hypo
atccatgggccaggtgcggtgactcacgcctgtaatcc

SEQ ID NO: 27019 - DNA, 31 bp, Homo sapiens
  chr21:37527927-37527958
  hypo
cacaagtggcccacttcgggttggctggagc

SEQ ID NO: 27020 - DNA, 73 bp, Homo sapiens; identical to SEQ ID NO: 7190
  chr21:37528251-37528324
  hypo

SEQ ID NO: 27021 - DNA, 236 bp, Homo sapiens; identical to SEQ ID NO: 7191
  chr21:37528389-37528625
  hypo

SEQ ID NO: 27022 - DNA, 58 bp, Homo sapiens
  chr21:37612231-37612289
  hypo
ctcaagcaggagaactcggccggtgagcagcctgcacaggacccgagggtgagggagg

SEQ ID NO: 27023 - DNA, 76 bp, Homo sapiens
  chr21:37750030-37750106
  hypo
caggtccagttggtgacgctgcctgtgatctcagacgcttgattcttgctgtcacatgagacgtcttaaacttggg

SEQ ID NO: 27024 - DNA, 31 bp, Homo sapiens
  chr21:37750133-37750164
  hypo
ttctcacctctggctgcgtagtagaattact

SEQ ID NO: 27025 - DNA, 41 bp, Homo sapiens
  chr21:37758515-37758556
  hypo
aggatccacagactggcgtctgccggcgtggacaccaatgt

SEQ ID NO: 27026 - DNA, 31 bp, Homo sapiens
  chr21:37758569-37758600
  hypo
ggcagagatagacatccgggaacactgcttg

SEQ ID NO: 27027 - DNA, 19 bp, Homo sapiens
  chr21:37788316-37788335
  hypo
gctgcgattacaggcgtga

SEQ ID NO: 27028 - DNA, 31 bp, Homo sapiens; identical to SEQ ID NO: 22814
  chr21:37795934-37795965
  hypo

SEQ ID NO: 27029 - DNA, 4 bp, Homo sapiens
  chr21:37795966-37795970
  hypo
tgcc

SEQ ID NO: 27030 - DNA, 31 bp, Homo sapiens
  chr21:37811705-37811736
  hypo
atcttaaactggtttacgcacagggcaatgt

SEQ ID NO: 27031 - DNA, 31 bp, Homo sapiens
  chr21:37847274-37847305
  hypo
gatgggggaggaggtgcgggaggcttgagca

SEQ ID NO: 27032 - DNA, 31 bp, Homo sapiens
  chr21:37847324-37847355
  hypo
catccaggagaatgaccgcaggcctggacca

SEQ ID NO: 27033 - DNA, 80 bp, Homo sapiens
  chr21:37847367-37847447
  hypo
aagtgctagtcagtgccgggtgcaggtggggcaagtggtcctgcgggtaccatagactatcacgccggacagcctttccc

SEQ ID NO: 27034 - DNA, 31 bp, Homo sapiens
  chr21:37847450-37847481
  hypo
accatcaactgcactgcgagggtcccaagtg

SEQ ID NO: 27035 - DNA, 31 bp, Homo sapiens
  chr21:37848303-37848334
  hypo
tttaaagagtccaaaacggtttaacagagag

SEQ ID NO: 27036 - DNA, 80 bp, Homo sapiens
  chr21:37855512-37855592
  hypo
gcatcagctccttgcacggccaggtggtgttgtttctgactcggggtctgcatctctctctgcgccgctgggttcaggag

SEQ ID NO: 27037 - DNA, 31 bp, Homo sapiens
  chr21:37855836-37855867
  hypo
cctcataggaaccatgcggtgaaggaaccag

SEQ ID NO: 27038 - DNA, 31 bp, Homo sapiens
  chr21:38016439-38016470
  hypo
cccggaggtgcttccccgcctcccaagacag

SEQ ID NO: 27039 - DNA, 31 bp, Homo sapiens
  chr21:38040958-38040989
  hypo
cacggctgaagcacagcgctggcaaagggga

SEQ ID NO: 27040 - DNA, 20 bp, Homo sapiens
  chr21:38089993-38090013
  hypo
tgcctcggcctaccaaagtg

SEQ ID NO: 27041 - DNA, 28 bp, Homo sapiens
  chr21:38209182-38209210
  hypo
acatataaaaactgcacggcggctgggc

SEQ ID NO: 27042 - DNA, 74 bp, Homo sapiens
  chr21:38248310-38248384
  hypo
tagcctcagccttgcacggaggcagcacccgtgccagggcatggagctgcctgccccaccgcagcagccactgt

SEQ ID NO: 27043 - DNA, 67 bp, Homo sapiens; identical to SEQ ID NO: 7196
  chr21:38362191-38362258
  hypo

SEQ ID NO: 27044 - DNA, 31 bp, Homo sapiens
  chr21:38366029-38366060
  hypo
ttgttttaaggcaccccgtttgtagtacttt

SEQ ID NO: 27045 - DNA, 19 bp, Homo sapiens
  chr21:38385170-38385189
  hypo
ttttttttttttgagacgg

SEQ ID NO: 27046 - DNA, 27 bp, Homo sapiens
  chr21:38419290-38419317
  hypo
tccagctgaactggggcgagaagcctc

SEQ ID NO: 27047 - DNA, 31 bp, Homo sapiens
  chr21:38603337-38603368
  hypo
cacacccagggcagagcgcctctgatgagca

SEQ ID NO: 27048 - DNA, 24 bp, Homo sapiens
  chr21:38638500-38638524
  hypo
gagccaccgcgcgggccagatttt

SEQ ID NO: 27049 - DNA, 31 bp, Homo sapiens
  chr21:38673106-38673137
  hypo
ggaggtaggaggtggccgatgcttgttggat

SEQ ID NO: 27050 - DNA, 31 bp, Homo sapiens
  chr21:38673196-38673227
  hypo
gtaggggtttggatttcgggagaaatcattc

SEQ ID NO: 27051 - DNA, 85 bp, Homo sapiens
  chr21:38832659-38832744
  hypo
catggggaggcagtagcgaacaaaaggggtgggggagtcttgcggcgttcacatctcagaaatgttactgcgctatgagggagac

SEQ ID NO: 27052 - DNA, 31 bp, Homo sapiens
  chr21:38832783-38832814
  hypo
aaagttagagaaccaccggtcttcattcttt

SEQ ID NO: 27053 - DNA, 31 bp, Homo sapiens
  chr21:39654406-39654437
  hypo
catattctttgtgctacgaatcagaatagga

SEQ ID NO: 27054 - DNA, 31 bp, Homo sapiens
  chr21:39778090-39778121
  hypo
aaaaaaatcatcagtgcgcagaacctgaaaa

SEQ ID NO: 27055 - DNA, 31 bp, Homo sapiens
  chr21:39959230-39959261
  hypo
ggatgggggagggggacggtgcagtagatca

SEQ ID NO: 27056 - DNA, 31 bp, Homo sapiens
  chr21:40049305-40049336
  hypo
gagtcacagaaagttcgcgagctttggccga

SEQ ID NO: 27057 - DNA, 40 bp, Homo sapiens
  chr21:40056139-40056179
  hypo
cttcttatccgaagaccgtagtcatcgttcctgtcacctt

SEQ ID NO: 27058 - DNA, 44 bp, Homo sapiens
  chr21:40056229-40056273
  hypo
taaaaagattaagtaacgttccttgttgtcgctatcaggatgtg

SEQ ID NO: 27059 - DNA, 31 bp, Homo sapiens
  chr21:40056290-40056321
  hypo
ccccagaagggctgtgcggaatggtattgct

SEQ ID NO: 27060 - DNA, 31 bp, Homo sapiens
  chr21:40117755-40117786
  hypo
gaacatgtatgtttaacgatatatatatata

SEQ ID NO: 27061 - DNA, 31 bp, Homo sapiens
  chr21:40146603-40146634
  hypo
ctggcaggccactccccgccccaggccccag

SEQ ID NO: 27062 - DNA, 43 bp, Homo sapiens
  chr21:40146701-40146744
  hypo
ctagtacccttcaccccgagggcatggccgcctttctgacatc

SEQ ID NO: 27063 - DNA, 39 bp, Homo sapiens
  chr21:40146746-40146785
  hypo
ctgggagggggcaccccggctggccgaggtttaaggtag

SEQ ID NO: 27064 - DNA, 163 bp, Homo sapiens; identical to SEQ ID NO: 7201
  chr21:40177484-40177647
  hypo

SEQ ID NO: 27065 - DNA, 31 bp, Homo sapiens; identical to SEQ ID NO: 7202
  chr21:40177761-40177792
  hypo

SEQ ID NO: 27066 - DNA, 88 bp, Homo sapiens; identical to SEQ ID NO: 7203
  chr21:40177801-40177889
  hypo

SEQ ID NO: 27067 - DNA, 66 bp, Homo sapiens; identical to SEQ ID NO: 7204
  chr21:40178016-40178082
  hypo

SEQ ID NO: 27068 - DNA, 270 bp, Homo sapiens; identical to SEQ ID NO: 7205
  chr21:40178123-40178393
  hypo

SEQ ID NO: 27069 - DNA, 149 bp, Homo sapiens; identical to SEQ ID NO: 7206
  chr21:40178399-40178548
  hypo

SEQ ID NO: 27070 - DNA, 44 bp, Homo sapiens
  chr21:40208389-40208433
  hypo
gtcagaagaagattatcggccgggcgcggtggctcatgtctgta

SEQ ID NO: 27071 - DNA, 45 bp, Homo sapiens
  chr21:40278581-40278626
  hypo
gattacaggcgtgagccaccgcgccccaccgcgtctgccattctg

SEQ ID NO: 27072 - DNA, 31 bp, Homo sapiens
  chr21:40296633-40296664
  hypo
ttaatgggtgccagtccgggcccaaagggtt

SEQ ID NO: 27073 - DNA, 31 bp, Homo sapiens
  chr21:40316355-40316386
  hypo
ttatttatttttattccggtaccacctctca

SEQ ID NO: 27074 - DNA, 31 bp, Homo sapiens
  chr21:40316395-40316426
  hypo
actgtcaccccatcagcgccctctccaccct

SEQ ID NO: 27075 - DNA, 31 bp, Homo sapiens
  chr21:40316469-40316500
  hypo
ccaatatattatttatcgcctggcttttcta

SEQ ID NO: 27076 - DNA, 40 bp, Homo sapiens
  chr21:40316507-40316547
  hypo
aatgattctcaactggcggtgacatcgctcctcacttctc

SEQ ID NO: 27077 - DNA, 17 bp, Homo sapiens
  chr21:40335201-40335218
  hypo
ctgaagtgtagtggcac

SEQ ID NO: 27078 - DNA, 56 bp, Homo sapiens
  chr21:40340268-40340324
  hypo
ccttcttggtagaaatcgcctctctgggacttcatgacagccgcctttcctatggc

SEQ ID NO: 27079 - DNA, 31 bp, Homo sapiens
  chr21:40352340-40352371
  hypo
tactgagtgcaggatgcggacgggaaaggat

SEQ ID NO: 27080 - DNA, 31 bp, Homo sapiens
  chr21:40366395-40366426
  hypo
atgtgaaaagaaaaggcgccccacaggcttt

SEQ ID NO: 27081 - DNA, 31 bp, Homo sapiens
  chr21:40425094-40425125
  hypo
cccaaggtaatgcagacgtgaaaggctgaac

SEQ ID NO: 27082 - DNA, 41 bp, Homo sapiens
  chr21:40425339-40425380
  hypo
taagaccactcagactcggtcttggccggctttcccagccc

SEQ ID NO: 27083 - DNA, 31 bp, Homo sapiens
  chr21:40431170-40431201
  hypo
agtagactttctcccccgcaagtttctgcca

SEQ ID NO: 27084 - DNA, 55 bp, Homo sapiens
  chr21:40433690-40433745
  hypo
gggcgtcagtgtgacccgctctgagactccccagacctggcgtctcatttgacct

SEQ ID NO: 27085 - DNA, 31 bp, Homo sapiens
  chr21:40453330-40453361
  hypo
caagtgcggtggctcacgtctataatcccag

SEQ ID NO: 27086 - DNA, 47 bp, Homo sapiens
  chr21:40463108-40463155
  hypo
ctctctacatcagcttcgtccctgcaaaacagcggtaacacatctgg

SEQ ID NO: 27087 - DNA, 31 bp, Homo sapiens
  chr21:40465399-40465430
  hypo
actgctgtctgatgctcgccccacagtggaa

SEQ ID NO: 27088 - DNA, 31 bp, Homo sapiens
  chr21:40465598-40465629
  hypo
tcctcctggctgcctcgcgtttcctccacgg

SEQ ID NO: 27089 - DNA, 31 bp, Homo sapiens
  chr21:40488783-40488814
  hypo
atggaccctcagtaaacgcatgctgagtgga

SEQ ID NO: 27090 - DNA, 31 bp, Homo sapiens
  chr21:40488815-40488846
  hypo
agcacatggtctaggccgggaaggggtgagg

SEQ ID NO: 27091 - DNA, 37 bp, Homo sapiens
  chr21:40506467-40506504
  hypo
aacacacacaaactcacgaacacgtgctaacatgtac

SEQ ID NO: 27092 - DNA, 31 bp, Homo sapiens
  chr21:40506513-40506544
  hypo
cactcatacatacacacgaacacattcacac

SEQ ID NO: 27093 - DNA, 47 bp, Homo sapiens
  chr21:40510521-40510568
  hypo
ttttcactgttccccacgagtaagtaagtgaacggcaaatgtgcaag

SEQ ID NO: 27094 - DNA, 31 bp, Homo sapiens
  chr21:40510575-40510606
  hypo
aagtgtaaattcctcccggcccatataattg

SEQ ID NO: 27095 - DNA, 10 bp, Homo sapiens
  chr21:40510673-40510683
  hypo
cctataaaga

SEQ ID NO: 27096 - DNA, 31 bp, Homo sapiens
  chr21:40525157-40525188
  hypo
cctctgtggctggagacgtccaagccaggta

SEQ ID NO: 27097 - DNA, 47 bp, Homo sapiens
  chr21:40525202-40525249
  hypo
tattcatcatagtgaccgtgtagaagtcaccacggacactgaattag

SEQ ID NO: 27098 - DNA, 31 bp, Homo sapiens
  chr21:40525269-40525300
  hypo
cacaggaaaatatgtgcgtatattcagtata

SEQ ID NO: 27099 - DNA, 31 bp, Homo sapiens
  chr21:40525328-40525359
  hypo
ttaaatcctaagacaacgcacccaagtagat

SEQ ID NO: 27100 - DNA, 28 bp, Homo sapiens
  chr21:40646951-40646979
  hypo
cagagctagactccgtctcaaaaaaaaa

SEQ ID NO: 27101 - DNA, 31 bp, Homo sapiens
  chr21:40697453-40697484
  hypo
ataggcataagccaccgcgcctggaccccct

SEQ ID NO: 27102 - DNA, 31 bp, Homo sapiens
  chr21:40820652-40820683
  hypo
gatgaggggttagttacgtatttttgcatta

SEQ ID NO: 27103 - DNA, 31 bp, Homo sapiens
  chr21:40820699-40820730
  hypo
aagcagaaaccagcttcgaaaaagcatagcc

SEQ ID NO: 27104 - DNA, 31 bp, Homo sapiens
  chr21:40820749-40820780
  hypo
aatttccaactgaccccgatagactgcctga

SEQ ID NO: 27105 - DNA, 47 bp, Homo sapiens
  chr21:40820799-40820846
  hypo
tccctccctcagtatgcgcccccacccccaaacgccttgcagaccta

SEQ ID NO: 27106 - DNA, 31 bp, Homo sapiens
  chr21:40904966-40904997
  hypo
tttaactaacctttctcgtgatacaaatcat

SEQ ID NO: 27107 - DNA, 13 bp, Homo sapiens
  chr21:40905043-40905056
  hypo
ttttttttttttg

SEQ ID NO: 27108 - DNA, 31 bp, Homo sapiens; identical to SEQ ID NO: 7208
  chr21:40941232-40941263
  hypo

SEQ ID NO: 27109 - DNA, 31 bp, Homo sapiens; identical to SEQ ID NO: 7209
  chr21:40941272-40941303
  hypo

SEQ ID NO: 27110 - DNA, 31 bp, Homo sapiens
  chr21:40976657-40976688
  hypo
attctgcttcccagtccgccacttcctagtg

SEQ ID NO: 27111 - DNA, 31 bp, Homo sapiens
  chr21:41040611-41040642
  hypo
gcatacccttcacccccgggctctgttcgct

SEQ ID NO: 27112 - DNA, 31 bp, Homo sapiens
  chr21:41137924-41137955
  hypo
tttgcgatttatttgtcgcctccttcctccc

SEQ ID NO: 27113 - DNA, 19 bp, Homo sapiens
  chr21:41654219-41654238
  hypo
gataggtaatctaggccgg

SEQ ID NO: 27114 - DNA, 36 bp, Homo sapiens
  chr21:41711101-41711137
  hypo
cagcggtagactcccccgtcccggacctgggagctg

SEQ ID NO: 27115 - DNA, 31 bp, Homo sapiens
  chr21:41753050-41753081
  hypo
caggatgaggcaaaggcgatgaggaccaagg

SEQ ID NO: 27116 - DNA, 31 bp, Homo sapiens
  chr21:41931090-41931121
  hypo
tccagttaaagtaggccgggcacggtggctc

SEQ ID NO: 27117 - DNA, 61 bp, Homo sapiens; identical to SEQ ID NO: 7210
  chr21:42539439-42539500
  hypo

SEQ ID NO: 27118 - DNA, 66 bp, Homo sapiens; identical to SEQ ID NO: 7211
  chr21:42539637-42539703
  hypo

SEQ ID NO: 27119 - DNA, 36 bp, Homo sapiens; identical to SEQ ID NO: 7212
  chr21:42539862-42539898
  hypo

SEQ ID NO: 27120 - DNA, 153 bp, Homo sapiens; identical to SEQ ID NO: 7213
  chr21:42540273-42540426
  hypo

SEQ ID NO: 27121 - DNA, 75 bp, Homo sapiens
  chr21:42582371-42582446
  hypo
aggcaagggttgagccgcgtactctacacttagagaacggattctgttctcatggcacagcgtcttctttttctc

SEQ ID NO: 27122 - DNA, 36 bp, Homo sapiens
  chr21:42582449-42582485
  hypo
cagctaaaacactcaccggcccggagatcagccaga

SEQ ID NO: 27123 - DNA, 54 bp, Homo sapiens
  chr21:42582490-42582544
  hypo
atgactgcagctcatccgcccacagacgcagactgaccccgttccacagccatg

SEQ ID NO: 27124 - DNA, 21 bp, Homo sapiens
  chr21:42591071-42591092
  hypo
gccaccgcgcccagccaattc

SEQ ID NO: 27125 - DNA, 31 bp, Homo sapiens
  chr21:42676098-42676129
  hypo
ctcatagactggattcgcgactgcgctgttc

SEQ ID NO: 27126 - DNA, 31 bp, Homo sapiens
  chr21:42676134-42676165
  hypo
atccactgcgcctgcgcgggcgcctggctgg

SEQ ID NO: 27127 - DNA, 49 bp, Homo sapiens
  chr21:42676194-42676243
  hypo
cgccatctttttccaccgtgcgaaggcaggagcccgagactgggtgaga

SEQ ID NO: 27128 - DNA, 44 bp, Homo sapiens
  chr21:42676344-42676388
  hypo
cccaggttgcctgcaccggcggtttcccacgtgcccaggcacct

SEQ ID NO: 27129 - DNA, 43 bp, Homo sapiens
  chr21:42700240-42700283
  hypo
caaatgctatattcaacgtgttttcaggcgaatacctaggtaa

SEQ ID NO: 27130 - DNA, 52 bp, Homo sapiens
  chr21:42710364-42710416
  hypo
cctacaggttactcagcggaggtggcagaagcaagtacgccaaaatctgctt

SEQ ID NO: 27131 - DNA, 51 bp, Homo sapiens
  chr21:42710423-42710474
  hypo
aacctgtaagtaccagcgtttagaaggaaaataaagcgatcctactgattc

SEQ ID NO: 27132 - DNA, 31 bp, Homo sapiens
  chr21:42710517-42710548
  hypo
ggagagaaccatatgtcgttggtctcaggca

SEQ ID NO: 27133 - DNA, 31 bp, Homo sapiens
  chr21:42722012-42722043
  hypo
cacacaatagtgaagccggggcttacggtcc

SEQ ID NO: 27134 - DNA, 31 bp, Homo sapiens
  chr21:42896753-42896784
  hypo
aataagttaagccaaccgggcaatctcggat

SEQ ID NO: 27135 - DNA, 85 bp, Homo sapiens
  chr21:43026398-43026483
  hypo
acctgagtagggtgggcgctaagtccaaagactccggagaagcgacagacacagagacaggagaaaggcacgtgaaggtggaggc

SEQ ID NO: 27136 - DNA, 49 bp, Homo sapiens
  chr21:43026490-43026539
  hypo
gcagtgaggcagcccacgagccagggattacaggcgtgagccaccgcgc

SEQ ID NO: 27137 - DNA, 23 bp, Homo sapiens
  chr21:43038245-43038268
  hypo
cgggcgcggtggcccacgcctgt

SEQ ID NO: 27138 - DNA, 88 bp, Homo sapiens; identical to SEQ ID NO: 7220
  chr21:43067057-43067145
  hypo

SEQ ID NO: 27139 - DNA, 63 bp, Homo sapiens
  chr21:43090565-43090628
  hypo
tcccagccagggcctgcgtgcggggcgtgcccggctggttctgttgaccgagggtcagcacgc

SEQ ID NO: 27140 - DNA, 31 bp, Homo sapiens
  chr21:43098621-43098652
  hypo
ggctgtgagctctgggcgtttgcttccttcc

SEQ ID NO: 27141 - DNA, 31 bp, Homo sapiens
  chr21:43102335-43102366
  hypo
ctgggacagcctctgccggtcagtggcttct

SEQ ID NO: 27142 - DNA, 31 bp, Homo sapiens
  chr21:43102604-43102635
  hypo
gcagcgctccagggcacgggctctgggcccc

SEQ ID NO: 27143 - DNA, 62 bp, Homo sapiens
  chr21:43102645-43102707
  hypo
gcccaagctccagcctcgccgagcagctgaggcaagtcctttcacctcgtggtgcctctgat

SEQ ID NO: 27144 - DNA, 31 bp, Homo sapiens
  chr21:43102767-43102798
  hypo
ctcaccctgcctggcacgggcacacccatga

SEQ ID NO: 27145 - DNA, 45 bp, Homo sapiens
  chr21:43109375-43109420
  hypo
accgggtcaccctgcacgggccctcgtcaccgggtcatcccccac

SEQ ID NO: 27146 - DNA, 101 bp, Homo sapiens
  chr21:43109529-43109630
  hypo
catgggccctggtcaccgggtcgccccccacgggccctcatcactgggtcgccctgcatgggccctcgtcaccgggtcatcccccacgggccctggtcacc

SEQ ID NO: 27147 - DNA, 31 bp, Homo sapiens
  chr21:43112993-43113024
  hypo
ttacatggacaaaagacggataaacaggaga

SEQ ID NO: 27148 - DNA, 31 bp, Homo sapiens
  chr21:43143548-43143579
  hypo
acaccccaagcatactcgctgccctgtgtgg

SEQ ID NO: 27149 - DNA, 31 bp, Homo sapiens
  chr21:43154177-43154208
  hypo
tccatgcaccccttcccgttcaccgtgaaga

SEQ ID NO: 27150 - DNA, 31 bp, Homo sapiens
  chr21:43160665-43160696
  hypo
agagtggatgcttccacgcctggggcttcat

SEQ ID NO: 27151 - DNA, 95 bp, Homo sapiens
  chr21:43160961-43161056
  hypo
gccccacgtggacccccggtctccgcaggcagccagctaggtcttgcttcgccgcaggagcgtggcggcggggccatggccgccctggaacttga

SEQ ID NO: 27152 - DNA, 354 bp, Homo sapiens
  chr21:43161086-43161440
  hypo
tgagcagagtctccaccgtctgtgcgtgccggccctgggcggccaggtgcagcgcgctgagcccctgctcgtcgaacaggtcaatgacatcggcgctgaccaactcctccaccacctccgagtgcccgtgggcggcagccaggtgcagcgccgtctggttcaggggtccccgggccagcacatcggccttctcctcgacaagcagcttgacagtggccaggtgtccgttgcgggcagccaggtgcagagcggtgtagccgtctgaggtcatggcctccttgccagcgccccgatgcaggagcagcctggcagtgctcgtgtgccccgtctccgcggccacgtgcaggggtgtct

SEQ ID NO: 27153 - DNA, 196 bp, Homo sapiens
  chr21:43161442-43161638
  hypo
gccagcaggctgcagacgttgacgtcggagcacaggtcgatgaggatgcgggccacgcggtagtgcccgcgctgtgcggccaggtgcaatggcgtcctcccatccagcgtctgggcgttcacactcacccccggctgcttggccagcagcttgacgatgggcaggtggccctgccaggcagcgtagtgcagtggca

SEQ ID NO: 27154 - DNA, 175 bp, Homo sapiens
  chr21:43161649-43161824
  hypo
ttgccctgcaggctcacgtccacgcctcggcgcagcaggatgcgcacgatattctcctgcccgtgctggcaggccacgtgcatgggcgtccggccctcaaagtccacctcgttgaccgaggcgttcttctccaacagcagccgtgtgctagactcgtccccgttctgggctgcaa

SEQ ID NO: 27155 - DNA, 47 bp, Homo sapiens
  chr21:43161914-43161961
  hypo
ccacggccatgtgcaacggggtggagcccctacggttgctcaggttg

SEQ ID NO: 27156 - DNA, 31 bp, Homo sapiens
  chr21:43161976-43162007
  hypo
agcagcagccacttggcgcactcctcttgcc

SEQ ID NO: 27157 - DNA, 35 bp, Homo sapiens
  chr21:43162541-43162576
  hypo
tggcacctgccacccacggacgccccaggcctagc

SEQ ID NO: 27158 - DNA, 31 bp, Homo sapiens
  chr21:43162617-43162648
  hypo
agctcttgccccacctcgaagtggcacctcc

SEQ ID NO: 27159 - DNA, 31 bp, Homo sapiens
  chr21:43162651-43162682
  hypo
cctggggaggttaagtcggaagttttctatg

SEQ ID NO: 27160 - DNA, 35 bp, Homo sapiens
  chr21:43164124-43164159
  hypo
agcctcttcccactgccggacgatggcagcttgga

SEQ ID NO: 27161 - DNA, 40 bp, Homo sapiens
  chr21:43164330-43164370
  hypo
agaccctgccatagaccgcatggcccgcccatgacacaaa

SEQ ID NO: 27162 - DNA, 57 bp, Homo sapiens
  chr21:43164376-43164433
  hypo
agagcaaggtgggccacgggagggagatgggggaggaaaggacggaccctggaagca

SEQ ID NO: 27163 - DNA, 44 bp, Homo sapiens
  chr21:43164439-43164483
  hypo
ataacctattggtcaccgagctcagaccccgcatcggcacagca

SEQ ID NO: 27164 - DNA, 88 bp, Homo sapiens
  chr21:43165931-43166019
  hypo
tccggggggcttttcacgtccagatcatgagcagtttctttcacttcgtcatcaggcttttcacacaggtcctcggtttcagaagtaa

SEQ ID NO: 27165 - DNA, 56 bp, Homo sapiens
  chr21:43166035-43166091
  hypo
aaggggacatgtcactcggatgatgacttctgcgtacacacgcgttccatataaac

SEQ ID NO: 27166 - DNA, 47 bp, Homo sapiens
  chr21:43166636-43166683
  hypo
tgtgcagggctcatttcggcccacctgttacacgccttgtttctcac

SEQ ID NO: 27167 - DNA, 42 bp, Homo sapiens
  chr21:43166733-43166775
  hypo
cacccacagaatgtggcggggagaccccggggtgctcacctt

SEQ ID NO: 27168 - DNA, 31 bp, Homo sapiens
  chr21:43166932-43166963
  hypo
tgccaagggaaggatgcgagtcaggggctct

SEQ ID NO: 27169 - DNA, 31 bp, Homo sapiens
  chr21:43169650-43169681
  hypo
agctcctggggaacagcgcctgtgtgcctca

SEQ ID NO: 27170 - DNA, 31 bp, Homo sapiens
  chr21:43175335-43175366
  hypo
agaacataagcagatgcgggaaaccaccaga

SEQ ID NO: 27171 - DNA, 31 bp, Homo sapiens
  chr21:43176653-43176684
  hypo
cagctctctcgggcaccgtgcggccccccac

SEQ ID NO: 27172 - DNA, 31 bp, Homo sapiens
  chr21:43256882-43256913
  hypo
agggaatgcgcccgggcgtcactcccagctt

SEQ ID NO: 27173 - DNA, 31 bp, Homo sapiens
  chr21:43259319-43259350
  hypo
agataaaccacgtgggcgggtctcgaggctg

SEQ ID NO: 27174 - DNA, 31 bp, Homo sapiens
  chr21:43282988-43283019
  hypo
cgagatcctgggcaggcgtgtggctcacgtc

SEQ ID NO: 27175 - DNA, 31 bp, Homo sapiens
  chr21:43296430-43296461
  hypo
cctctttctagaaatgcgagcacagagaagc

SEQ ID NO: 27176 - DNA, 29 bp, Homo sapiens
  chr21:43347889-43347918
  hypo
ttataagaaattctcgcaggggattgaga

SEQ ID NO: 27177 - DNA, 64 bp, Homo sapiens
  chr21:43347978-43348042
  hypo
ggggaagcctccaccacgtggggctcctgcgtcaacctgactccaaccccgcccccagcaacac

SEQ ID NO: 27178 - DNA, 31 bp, Homo sapiens; identical to SEQ ID NO: 7224
  chr21:43373717-43373748
  hypo

SEQ ID NO: 27179 - DNA, 76 bp, Homo sapiens; identical to SEQ ID NO: 7225
  chr21:43374032-43374108
  hypo

SEQ ID NO: 27180 - DNA, 34 bp, Homo sapiens; identical to SEQ ID NO: 7226
  chr21:43374331-43374365
  hypo

SEQ ID NO: 27181 - DNA, 31 bp, Homo sapiens
  chr21:43448738-43448769
  hypo
tgaataagaagggcaccgccacaccctgtgg

SEQ ID NO: 27182 - DNA, 66 bp, Homo sapiens
  chr21:43481097-43481163
  hypo
ctggtgtgggcggaggcggtggtccctggtgtgccctggctgcagccgcctcgctccccctccacc

SEQ ID NO: 27183 - DNA, 31 bp, Homo sapiens
  chr21:43501956-43501987
  hypo
caccttccatttagtccgcatgtctgcttaa

SEQ ID NO: 27184 - DNA, 31 bp, Homo sapiens
  chr21:43707199-43707230
  hypo
tgggccttagcaagaacgttactggagtggg

SEQ ID NO: 27185 - DNA, 31 bp, Homo sapiens
  chr21:43726027-43726058
  hypo
caccccacatccagagcgctccagaatccat

SEQ ID NO: 27186 - DNA, 31 bp, Homo sapiens
  chr21:43738581-43738612
  hypo
gtgtggcggtgtgggccgtcccaggagccct

SEQ ID NO: 27187 - DNA, 31 bp, Homo sapiens
  chr21:43772763-43772794
  hypo
ttcaggattcctgctgcgaccacctgaccca

SEQ ID NO: 27188 - DNA, 31 bp, Homo sapiens
  chr21:43772824-43772855
  hypo
actctcctggccctggcggaagcctgtgttg

SEQ ID NO: 27189 - DNA, 31 bp, Homo sapiens
  chr21:43772878-43772909
  hypo
cctgctcaggcccccacgcagggacactgag

SEQ ID NO: 27190 - DNA, 41 bp, Homo sapiens
  chr21:43772920-43772961
  hypo
ttgggaaaccattacacgagatgggacgtctgcaatagagt

SEQ ID NO: 27191 - DNA, 31 bp, Homo sapiens
  chr21:43790776-43790807
  hypo
catggtgacagtagggcggtaacctcgtcag

SEQ ID NO: 27192 - DNA, 31 bp, Homo sapiens
  chr21:43962934-43962965
  hypo
gacctgggtcacccagcgcacagcaccaaag

SEQ ID NO: 27193 - DNA, 43 bp, Homo sapiens
  chr21:43968300-43968343
  hypo
cgctcgggcctttcagcggctccaggtgcgttgatgtcgagtc

SEQ ID NO: 27194 - DNA, 44 bp, Homo sapiens
  chr21:43969267-43969311
  hypo
agactggggagaacttcgcacacaccttccgccctggaacacct

SEQ ID NO: 27195 - DNA, 31 bp, Homo sapiens
  chr21:43969330-43969361
  hypo
ttttctcacccaggggcggccaggcctgagg

SEQ ID NO: 27196 - DNA, 49 bp, Homo sapiens
  chr21:43986295-43986344
  hypo
gccttggtggggctggcggggctgcagcagcctgcgacctgccacctgc

SEQ ID NO: 27197 - DNA, 31 bp, Homo sapiens; identical to SEQ ID NO: 7227
  chr21:44013673-44013704
  hypo

SEQ ID NO: 27198 - DNA, 31 bp, Homo sapiens
  chr21:44015499-44015530
  hypo
attgggatccttggagcggggtgctggaggg

SEQ ID NO: 27199 - DNA, 25 bp, Homo sapiens
  chr21:44059406-44059431
  hypo
cacacacacacggaggccatatgtg

SEQ ID NO: 27200 - DNA, 31 bp, Homo sapiens
  chr21:44065442-44065473
  hypo
catgccgagaaggtcacgtgctacagcagag

SEQ ID NO: 27201 - DNA, 31 bp, Homo sapiens
  chr21:44065969-44066000
  hypo
gttaatcctcagctttcgggttgctcgttgt

SEQ ID NO: 27202 - DNA, 31 bp, Homo sapiens
  chr21:44082506-44082537
  hypo
ccctccatgccccttccgactgttgcagagg

SEQ ID NO: 27203 - DNA, 24 bp, Homo sapiens
  chr21:44082554-44082578
  hypo
catacacacatatacacgcacaca

SEQ ID NO: 27204 - DNA, 31 bp, Homo sapiens
  chr21:44095687-44095718
  hypo
gcgctgtgtggatacacgggcccgaacggcg

SEQ ID NO: 27205 - DNA, 31 bp, Homo sapiens
  chr21:44109121-44109152
  hypo
tagacatggccagtgccgtcctcagcgaggt

SEQ ID NO: 27206 - DNA, 31 bp, Homo sapiens
  chr21:44123456-44123487
  hypo
ggggccaggcctgagccggacggagaccgaa

SEQ ID NO: 27207 - DNA, 37 bp, Homo sapiens
  chr21:44176711-44176748
  hypo
gcccagggctgtggcccgtgagcgtggcctgcctcta

SEQ ID NO: 27208 - DNA, 31 bp, Homo sapiens
  chr21:44215220-44215251
  hypo
taatgaagacttcatcgcgggtgcaactggc

SEQ ID NO: 27209 - DNA, 88 bp, Homo sapiens
  chr21:44338322-44338410
  hypo
tgttagggtttggtgacgggttttcacctacggcgcgatgggttttatcagtccacttgcgggatatgcacaccgtccctcatactgg

SEQ ID NO: 27210 - DNA, 31 bp, Homo sapiens
  chr21:44338415-44338446
  hypo
taagtgtccaggactgcgggcattcctgagg

SEQ ID NO: 27211 - DNA, 31 bp, Homo sapiens
  chr21:44338486-44338517
  hypo
gggggaatgtctatcccgtcccacagccact

SEQ ID NO: 27212 - DNA, 45 bp, Homo sapiens
  chr21:44390975-44391020
  hypo
ttctttagaaaccacttcggtgctcaacaccgggaagagggcccc

SEQ ID NO: 27213 - DNA, 104 bp, Homo sapiens
  chr21:44799063-44799167
  hypo
tgtccaggaggggagtcggggcagggacatacagggcatctccgacctggaggaggtccccccgctgcagaggtctctggggatgaaagcggggagtccctgtc

SEQ ID NO: 27214 - DNA, 31 bp, Homo sapiens
  chr21:44799234-44799265
  hypo
tctttggcctctgaggcggtgccccatctgt

SEQ ID NO: 27215 - DNA, 31 bp, Homo sapiens
  chr21:44837063-44837094
  hypo
tgtggcagggcccgcccgaggagctgccagc

SEQ ID NO: 27216 - DNA, 31 bp, Homo sapiens
  chr21:44840272-44840303
  hypo
ctgggcgatggtgatgcgcctggcggggtcc

SEQ ID NO: 27217 - DNA, 31 bp, Homo sapiens
  chr21:44840931-44840962
  hypo
cccgctgtctcagcgtcggcaggttaggccc

SEQ ID NO: 27218 - DNA, 90 bp, Homo sapiens; identical to SEQ ID NO: 7228
  chr21:44847545-44847635
  hypo

SEQ ID NO: 27219 - DNA, 260 bp, Homo sapiens; identical to SEQ ID NO: 7229
  chr21:44847663-44847923
  hypo

SEQ ID NO: 27220 - DNA, 109 bp, Homo sapiens
  chr21:44866602-44866711
  hypo
tcttccctgccacagccggcccagcgggagccaggtcagggcctggagacacagcgccccccaccggagccactgcccggcccagcagcacctgcggagaatcccacca

SEQ ID NO: 27221 - DNA, 45 bp, Homo sapiens
  chr21:44866872-44866917
  hypo
agccagtgctcacttacgttcaccaagtcacgtcggtttgtggcg

SEQ ID NO: 27222 - DNA, 49 bp, Homo sapiens
  chr21:44881156-44881205
  hypo
cagagtgcttccgggtcgcagtgtcctcatgttgcggaggcctgagctc

SEQ ID NO: 27223 - DNA, 99 bp, Homo sapiens
  chr21:45078775-45078874
  hypo
cagtctcaactccacccgggggcccgggggctccacagttaaaaactccacgccacggagatcgcaggtaagctgctggctcaacgaggtgtgctaaat

SEQ ID NO: 27224 - DNA, 31 bp, Homo sapiens
  chr21:45140245-45140276
  hypo
ggcggggcctgcggtgcgggctggcctggga

SEQ ID NO: 27225 - DNA, 59 bp, Homo sapiens
  chr21:45140869-45140928
  hypo
acctcaggtggagcctcgaaaggatggcgctgctgttcctacctcgggtctccccagtg

SEQ ID NO: 27226 - DNA, 31 bp, Homo sapiens
  chr21:45170350-45170381
  hypo
cccacccgcctgtccccgcctgtcttccagg

SEQ ID NO: 27227 - DNA, 77 bp, Homo sapiens
  chr21:45187153-45187230
  hypo
ggacatgggaaccttgcgggcacacacatgcaaacacatgcgtacatgcgggcgcacacacacgcacacagggatgc

SEQ ID NO: 27228 - DNA, 31 bp, Homo sapiens
  chr21:45195297-45195328
  hypo
ttacagacgaggaaaccgagacacagggaag

SEQ ID NO: 27229 - DNA, 135 bp, Homo sapiens
  chr21:45224199-45224334
  hypo
taaggcctggattgcccggggtgagcgtgtgtgtggtgggaagacctggcttccgcgagagccttgttcctggaggcaggagcgccccgccatcctgggtacccgcgggtccgcaggctgcgcacctctttccct

SEQ ID NO: 27230 - DNA, 31 bp, Homo sapiens
  chr21:45224336-45224367
  hypo
gccaggtcaccctcagcgtcctccctgcccc

SEQ ID NO: 27231 - DNA, 50 bp, Homo sapiens
  chr21:45224390-45224440
  hypo
cctgtgagggaggtggcgggtccccactgtggcgacggagagctgacagt

SEQ ID NO: 27232 - DNA, 37 bp, Homo sapiens
  chr21:45224466-45224503
  hypo
acaagggcctgtctgccgccagcgctgtggccacagc

SEQ ID NO: 27233 - DNA, 50 bp, Homo sapiens
  chr21:45224507-45224557
  hypo
ataggtgacaaggggccgctgcgttgggttttgcccgcatcttctgttcc

SEQ ID NO: 27234 - DNA, 45 bp, Homo sapiens
  chr21:45224563-45224608
  hypo
gcccagccagccaggccgtgtgggatccagcgagaggccagggct

SEQ ID NO: 27235 - DNA, 73 bp, Homo sapiens
  chr21:45224661-45224734
  hypo
gaccctggactgcatccggttccccaaagccctgctgcattcgagtgtcccccaaccccgggcaggtggcacc

SEQ ID NO: 27236 - DNA, 31 bp, Homo sapiens
  chr21:45226070-45226101
  hypo
gctgagtgacatcccacggtacagacagtgc

SEQ ID NO: 27237 - DNA, 31 bp, Homo sapiens
  chr21:45230171-45230202
  hypo
tgcctcggagtcttcccgcagggaccatctc

SEQ ID NO: 27238 - DNA, 11 bp, Homo sapiens
  chr21:45276618-45276629
  hypo
tcagtgaaata

SEQ ID NO: 27239 - DNA, 31 bp, Homo sapiens
  chr21:45276646-45276677
  hypo
atgtctatgcctaaatcgccctgcctaagac

SEQ ID NO: 27240 - DNA, 31 bp, Homo sapiens
  chr21:45276688-45276719
  hypo
tgagaaaactccctttcgtgctaactcactg

SEQ ID NO: 27241 - DNA, 31 bp, Homo sapiens
  chr21:45279018-45279049
  hypo
cctcagacccaggccccgagcaaaggctggt

SEQ ID NO: 27242 - DNA, 51 bp, Homo sapiens
  chr21:45299400-45299451
  hypo
ggaagtgctgggtggccgtgggcttggaggctgggtcgtgggggtgtggcc

SEQ ID NO: 27243 - DNA, 31 bp, Homo sapiens
  chr21:45349805-45349836
  hypo
aacctcataaatgcagcggacactgggctgc

SEQ ID NO: 27244 - DNA, 79 bp, Homo sapiens
  chr21:45354854-45354933
  hypo
gccaccacgccacttacgccacccacgctactacccatgccacccatgtgccgtccaccacccacgccacccacaccac

SEQ ID NO: 27245 - DNA, 64 bp, Homo sapiens
  chr21:45358106-45358170
  hypo
ctaagttagttaacatcgctcattgggatagaaggaacgtactgaggaacgtactgaggattag

SEQ ID NO: 27246 - DNA, 31 bp, Homo sapiens
  chr21:45375048-45375079
  hypo
ccgtctcagaagcaccgcgctggaccggctg

SEQ ID NO: 27247 - DNA, 39 bp, Homo sapiens; identical to SEQ ID NO: 7236
  chr21:45381602-45381641
  hypo

SEQ ID NO: 27248 - DNA, 31 bp, Homo sapiens
  chr21:45396855-45396886
  hypo
atatatcatatgtgagcggcttaccctgtgt

SEQ ID NO: 27249 - DNA, 31 bp, Homo sapiens
  chr21:45403795-45403826
  hypo
atgaagaaaagtaaaccgagaacataattag

SEQ ID NO: 27250 - DNA, 82 bp, Homo sapiens
  chr21:45403951-45404033
  hypo
acacctgctcagagcacggctcctcgcaggggtgaaggggcagaccaacgaaaccagatgagaccaacgacaccatgcgaga

SEQ ID NO: 27251 - DNA, 31 bp, Homo sapiens
  chr21:45422610-45422641
  hypo
ctgagctgccatggggcgagccctgggcctc

SEQ ID NO: 27252 - DNA, 56 bp, Homo sapiens
  chr21:45546679-45546735
  hypo
gcaccccccagccagccgggagaccgcaggatgacttgcttcgtggggagagcagc

SEQ ID NO: 27253 - DNA, 31 bp, Homo sapiens
  chr21:45546746-45546777
  hypo
gtccagtgatcattaacggttcttttttccc

SEQ ID NO: 27254 - DNA, 31 bp, Homo sapiens
  chr21:45546778-45546809
  hypo
aggtgacatgagttctcggcacttcaaacct

SEQ ID NO: 27255 - DNA, 31 bp, Homo sapiens
  chr21:45546814-45546845
  hypo
cagggtgacctcactccgcttctctcccact

SEQ ID NO: 27256 - DNA, 54 bp, Homo sapiens
  chr21:45605770-45605824
  hypo
cctgcttgcaatggtgcgtcaggcagtggcccctggtgccggctgcttccccag

SEQ ID NO: 27257 - DNA, 31 bp, Homo sapiens
  chr21:45605848-45605879
  hypo
aagcccctgcctgccccgagatgccaagccc

SEQ ID NO: 27258 - DNA, 50 bp, Homo sapiens
  chr21:45605885-45605935
  hypo
ccaccagaactgccctcgctgcctatggccccgagcgcccaccctcgggg

SEQ ID NO: 27259 - DNA, 31 bp, Homo sapiens
  chr21:45628848-45628879
  hypo
cacctgcaaaaatgtccgcctgcacagatgt

SEQ ID NO: 27260 - DNA, 31 bp, Homo sapiens
  chr21:45628898-45628929
  hypo
cctgtgtccacatgcacgaatacccacctgc

SEQ ID NO: 27261 - DNA, 95 bp, Homo sapiens
  chr21:45628930-45629025
  hypo
cagatgcccacctgcacggatgcccacctgtacaaaggcctacctgcgtgaatgtccacctgcatggatgcccacccgcacggatgcccacctgc

SEQ ID NO: 27262 - DNA, 31 bp, Homo sapiens
  chr21:45629083-45629114
  hypo
ctcccagtcctacagtcgattgttcctagtt

SEQ ID NO: 27263 - DNA, 38 bp, Homo sapiens; identical to SEQ ID NO: 7238
  chr21:45660234-45660272
  hypo

SEQ ID NO: 27264 - DNA, 49 bp, Homo sapiens; identical to SEQ ID NO: 7239
  chr21:45660350-45660399
  hypo

SEQ ID NO: 27265 - DNA, 31 bp, Homo sapiens
  chr21:45704769-45704800
  hypo
ctccaggccatgcctgcggggccaccacagc

SEQ ID NO: 27266 - DNA, 49 bp, Homo sapiens
  chr21:45736415-45736464
  hypo
ccatcaccctgccctgcgtacgtgcgtgggtaagcgtggtgtgtgggtg

SEQ ID NO: 27267 - DNA, 31 bp, Homo sapiens
  chr21:45736468-45736499
  hypo
tgtgggcagtgtgcacgcgagcatggcacgt

SEQ ID NO: 27268 - DNA, 47 bp, Homo sapiens
  chr21:45750045-45750092
  hypo
cccgtggaggctggagcggcgttcaggtcctgcggtcactcggcgtg

SEQ ID NO: 27269 - DNA, 66 bp, Homo sapiens
  chr21:45750338-45750404
  hypo
gactgaccggcacactcggagaatctgagcagaggagccccgcctgtggacgcgtgtgtggcacct

SEQ ID NO: 27270 - DNA, 38 bp, Homo sapiens
  chr21:45753622-45753660
  hypo
tttccattctacagaacgtggacgcgtcagagaagaga

SEQ ID NO: 27271 - DNA, 85 bp, Homo sapiens
  chr21:45753784-45753869
  hypo
ctggagggctgcactcgcgtccggcaggcgcctcagaagggcggtcaccaggcccccatgggcagcctgccgtcctgagcccccc

SEQ ID NO: 27272 - DNA, 130 bp, Homo sapiens
  chr21:45754348-45754478
  hypo
gccccgcggcaggcacgcgcaccccccctcaacctctgggcgggcacgcgcaccccccccccccccccgctcaacctctgggcgggcacgcgcacccctgctcaacctctggactcgggctccatctcct

SEQ ID NO: 27273 - DNA, 31 bp, Homo sapiens
  chr21:45769038-45769069
  hypo
caccaggggctatgaccgccttcccaccact

SEQ ID NO: 27274 - DNA, 31 bp, Homo sapiens
  chr21:45787688-45787719
  hypo
tggtgagcgtgaggcacggctgcatcttttg

SEQ ID NO: 27275 - DNA, 31 bp, Homo sapiens
  chr21:45819155-45819186
  hypo
ggggctctcatatctccgcccaggggtcttc

SEQ ID NO: 27276 - DNA, 31 bp, Homo sapiens
  chr21:45848002-45848033
  hypo
ttctgttgtggacttgcgaatcatattttca

SEQ ID NO: 27277 - DNA, 31 bp, Homo sapiens
  chr21:45856840-45856871
  hypo
gggcctgacactgccccgccccaggcagggc

SEQ ID NO: 27278 - DNA, 57 bp, Homo sapiens
  chr21:45929336-45929393
  hypo
cagaggtgtgggggagcgggcgcagaggtgtgggggagggggcgcagaggtgtgggg

SEQ ID NO: 27279 - DNA, 41 bp, Homo sapiens
  chr21:46036604-46036645
  hypo
agtgagaatgagacaccgtgacaatgcggctgcgcaccgga

SEQ ID NO: 27280 - DNA, 39 bp, Homo sapiens
  chr21:46186207-46186246
  hypo
ggccttgcagattcagcgatgcatcggggcacggcgagg

SEQ ID NO: 27281 - DNA, 31 bp, Homo sapiens
  chr21:46193377-46193408
  hypo
tctaaagacaggatgacgcaaggctggagaa

SEQ ID NO: 27282 - DNA, 82 bp, Homo sapiens
  chr21:46193413-46193495
  hypo
gcagcctgggtgtccacggcagctcctgccaggaggctcgggccttacctgccagcatgctcaccaccgacagcaggatctt

SEQ ID NO: 27283 - DNA, 47 bp, Homo sapiens
  chr21:46193504-46193551
  hypo
ctgcacaggactccaccgctccgcgctgctctcgtagcccatggggt

SEQ ID NO: 27284 - DNA, 100 bp, Homo sapiens
  chr21:46238871-46238971
  hypo
gtccctcaggagtgcccgggtggtgccagccggggcgtggcggaggtctcatctgatggtgagcccggccgaaggcgggggaggccgcacttcaggctca

SEQ ID NO: 27285 - DNA, 31 bp, Homo sapiens
  chr21:46316854-46316885
  hypo
ctggtgaggaggggaccgtcatggccaccta

SEQ ID NO: 27286 - DNA, 31 bp, Homo sapiens
  chr21:46317320-46317351
  hypo
gggccctggtttcctgcgtgccattttgaag

SEQ ID NO: 27287 - DNA, 31 bp, Homo sapiens
  chr21:46326979-46327010
  hypo
tggagtcaggatcccccggccctgtgaagtt

SEQ ID NO: 27288 - DNA, 31 bp, Homo sapiens
  chr21:46329306-46329337
  hypo
ctgacttcctcagaaacgcccaaggacagga

SEQ ID NO: 27289 - DNA, 45 bp, Homo sapiens
  chr21:46330653-46330698
  hypo
agcagccccaccagggcgagcagtggggggcgcaggcccagcatg

SEQ ID NO: 27290 - DNA, 34 bp, Homo sapiens; identical to SEQ ID NO: 7243
  chr21:46351694-46351728
  hypo

SEQ ID NO: 27291 - DNA, 31 bp, Homo sapiens
  chr21:46353948-46353979
  hypo
caggtctgggtggggccggagactgtacccc

SEQ ID NO: 27292 - DNA, 45 bp, Homo sapiens
  chr21:46353983-46354028
  hypo
aaggtcccaggtgaggcggatgtggcctggcgctgtgtggctctg

SEQ ID NO: 27293 - DNA, 51 bp, Homo sapiens
  chr21:46354068-46354119
  hypo
cttgagacagctgtgacgcaggcaagccatttaccccgtttgtggggacat

SEQ ID NO: 27294 - DNA, 47 bp, Homo sapiens
  chr21:46373207-46373254
  hypo
tgaggtgtaggcaggtcgtggaggctgtcttgcgaggttccctaggt

SEQ ID NO: 27295 - DNA, 43 bp, Homo sapiens
  chr21:46397986-46398029
  hypo
cgccaaggatgcctggcgagtgggtggccgaggcaagttggag

SEQ ID NO: 27296 - DNA, 141 bp, Homo sapiens
  chr21:46398054-46398195
  hypo
tggcccttccctgacacgagcagacacggcatccacagagacagcccggacaccctccaaggccccggccgatgggacagacgggcgtacaggagccataggcagcagatcccacgctccctcggccggggccagcttggc

SEQ ID NO: 27297 - DNA, 40 bp, Homo sapiens
  chr21:46398204-46398244
  hypo
ccagctccttagagaacgggcttctcgcttcagaggagct

SEQ ID NO: 27298 - DNA, 31 bp, Homo sapiens
  chr21:46398246-46398277
  hypo
tcacaaaccagtggtcgcgacaaaaccattc

SEQ ID NO: 27299 - DNA, 35 bp, Homo sapiens
  chr21:46549425-46549460
  hypo
gctctgtggatactgacgagcgcccactgggcctc

SEQ ID NO: 27300 - DNA, 85 bp, Homo sapiens
  chr21:46677808-46677893
  hypo
gtcctcgtgggaaaccgcgggggcacgtggggcggctgcagggtccgcaaagccggctgtttgcgaagggcgcagctccacctgg

SEQ ID NO: 27301 - DNA, 31 bp, Homo sapiens
  chr21:46800405-46800436
  hypo
tccgtccgtgcacacacgctcacctcgcacc

SEQ ID NO: 27302 - DNA, 31 bp, Homo sapiens
  chr21:46811547-46811578
  hypo
acctactactgtaccacgcatacccggccag

SEQ ID NO: 27303 - DNA, 58 bp, Homo sapiens
  chr21:46827541-46827599
  hypo
aagaggactgtgtcaccggggcagttgctgatgcccatggccacgccaggagcctggt

SEQ ID NO: 27304 - DNA, 31 bp, Homo sapiens
  chr21:46839493-46839524
  hypo
cagcagatttatcaggcgttttgggtgtaaa

SEQ ID NO: 27305 - DNA, 38 bp, Homo sapiens
  chr21:46849578-46849616
  hypo
gctgggagcctgactgcgggtgacggacaggctctggc

SEQ ID NO: 27306 - DNA, 38 bp, Homo sapiens
  chr21:46900440-46900478
  hypo
ggcccttaaactgcagcgctgcccgatgtctgtgccca

SEQ ID NO: 27307 - DNA, 79 bp, Homo sapiens
  chr21:46900584-46900663
  hypo
tgtgactatctgtgttcgcccacgtccagggtcctcgaggcttccctggacctcccggaccccccggtgtcccaggcct

SEQ ID NO: 27308 - DNA, 37 bp, Homo sapiens
  chr21:46907666-46907703
  hypo
tcaagacaaaggaacacggggccgcatgccccctgaa

SEQ ID NO: 27309 - DNA, 31 bp, Homo sapiens
  chr21:46908632-46908663
  hypo
attctcagacttgggccgaaaagaggggcat

SEQ ID NO: 27310 - DNA, 36 bp, Homo sapiens
  chr21:46910556-46910592
  hypo
tccgtgtgcccactcccggagcgccaggagttaagt

SEQ ID NO: 27311 - DNA, 35 bp, Homo sapiens
  chr21:46910626-46910661
  hypo
cctcccaggccccagccggtcgggaaataaagaac

SEQ ID NO: 27312 - DNA, 31 bp, Homo sapiens
  chr21:46911595-46911626
  hypo
aaggttgtgttggttccggaaccttcctccc

SEQ ID NO: 27313 - DNA, 44 bp, Homo sapiens
  chr21:46913027-46913071
  hypo
tgggggagatgccagccgctcgggcctcacggcctggcctccat

SEQ ID NO: 27314 - DNA, 35 bp, Homo sapiens
  chr21:46913098-46913133
  hypo
acctgggctctaagggcgaacgaggctccccggga

SEQ ID NO: 27315 - DNA, 40 bp, Homo sapiens
  chr21:46915160-46915200
  hypo
ctgagcgtgggccggccgggcctggcgtggggctaacggc

SEQ ID NO: 27316 - DNA, 31 bp, Homo sapiens
  chr21:46916196-46916227
  hypo
ctgtgcacgactccagcgtgggatgaggtgg

SEQ ID NO: 27317 - DNA, 88 bp, Homo sapiens
  chr21:46918335-46918423
  hypo
cgccacggtcccctctcgccgccagggtcccctctcgccgccacggtccccgctcgccgccagggtcccctctcgctgccagggtcct

SEQ ID NO: 27318 - DNA, 31 bp, Homo sapiens
  chr21:46934129-46934160
  hypo
catcctgctagatctacgagcccaggaaatg

SEQ ID NO: 27319 - DNA, 37 bp, Homo sapiens
  chr21:46935738-46935775
  hypo
ggaattcagctgcctgcggggccggggcctgggccag

SEQ ID NO: 27320 - DNA, 105 bp, Homo sapiens; identical to SEQ ID NO: 7245
  chr21:46950777-46950882
  hypo

SEQ ID NO: 27321 - DNA, 31 bp, Homo sapiens
  chr21:46951699-46951730
  hypo
cgtggagaaggagactcggcccacagtgacc

SEQ ID NO: 27322 - DNA, 31 bp, Homo sapiens
  chr21:46973124-46973155
  hypo
tggtccttccaggcaccgcgcatccctccca

SEQ ID NO: 27323 - DNA, 31 bp, Homo sapiens
  chr21:47404097-47404128
  hypo
catctgggtgacgtcgcgccctgggacgggt

SEQ ID NO: 27324 - DNA, 51 bp, Homo sapiens
  chr21:47414105-47414156
  hypo
agggaagagaaggccccgttggtgtccctggagacccggtaggaagcgctg

SEQ ID NO: 27325 - DNA, 115 bp, Homo sapiens
  chr21:47426375-47426490
  hypo
attcgcactgcagctgcggccctggcgcgacaagggctggacttggccagcgggacggtccctcacggcgctgaggcccacactctgcgtggagcctccccgtgcccaggctacc

SEQ ID NO: 27326 - DNA, 31 bp, Homo sapiens
  chr21:47455820-47455851
  hypo
cactctacagggcccccgggaagtgactgcc

SEQ ID NO: 27327 - DNA, 31 bp, Homo sapiens
  chr21:47456092-47456123
  hypo
tcccggaggggtgaggcggcccagcctgcgg

SEQ ID NO: 27328 - DNA, 31 bp, Homo sapiens
  chr21:47457652-47457683
  hypo
gcacgtggcgcccacacgggcagaacacgcc

SEQ ID NO: 27329 - DNA, 31 bp, Homo sapiens
  chr21:47557369-47557400
  hypo
gcgcagcccccgctttcgccccacagagggc

SEQ ID NO: 27330 - DNA, 31 bp, Homo sapiens
  chr21:47565065-47565096
  hypo
gcctgttcccttgtaccggctgccatggcct

SEQ ID NO: 27331 - DNA, 31 bp, Homo sapiens
  chr21:47565102-47565133
  hypo
gtggggtcaccctggccgaaccctcaaaccc

SEQ ID NO: 27332 - DNA, 82 bp, Homo sapiens
  chr21:47565137-47565219
  hypo
gggcccaagcacttgccggggtgagggcggtgctggtggtcaaggtccagacagcggccagtggtgacgccctcaggcccct

SEQ ID NO: 27333 - DNA, 43 bp, Homo sapiens
  chr21:47565227-47565270
  hypo
ccagcccctccccagccggaggctgacccgcttctcactgggg

SEQ ID NO: 27334 - DNA, 31 bp, Homo sapiens
  chr21:47569329-47569360
  hypo
cggaatccacaagtcacgagagctaaatcag

SEQ ID NO: 27335 - DNA, 59 bp, Homo sapiens
  chr21:47602646-47602705
  hypo
attctccttcaggaggcgcacctgcttcttcaggtccgcgttctcgctcaggagccggc

SEQ ID NO: 27336 - DNA, 48 bp, Homo sapiens
  chr21:47602891-47602939
  hypo
caccctgcctgcccccgcgatggctcatggccccgttgaggcagtgaa

SEQ ID NO: 27337 - DNA, 31 bp, Homo sapiens
  chr21:47627574-47627605
  hypo
cccaccacagagcacccggtcagggcagggg

SEQ ID NO: 27338 - DNA, 34 bp, Homo sapiens
  chr21:47627712-47627746
  hypo
acacctgcagatctcacgacggacaggatggggc

SEQ ID NO: 27339 - DNA, 43 bp, Homo sapiens
  chr21:47634459-47634502
  hypo
agccaacccactacaccgcagcagctacgcgcacagctatggc

SEQ ID NO: 27340 - DNA, 37 bp, Homo sapiens
  chr21:47634530-47634567
  hypo
tgactctgtcaggaggcggccacgcaccagcacagcc

SEQ ID NO: 27341 - DNA, 45 bp, Homo sapiens
  chr21:47689555-47689600
  hypo
ggcagcatcctccccacgctgtggccactacgggcttgtggcaag

SEQ ID NO: 27342 - DNA, 116 bp, Homo sapiens
  chr21:47689608-47689724
  hypo
gcagcctccttggagccgctgccagaatgggcagcagagtgtgtgcgaggtgaggtggcgctctgtgcggtgggccgcggtcctggtcacattgcactgaacggaatcatgcaggg

SEQ ID NO: 27343 - DNA, 31 bp, Homo sapiens
  chr21:47746350-47746381
  hypo
gcgaagaggaagggctcggctgtcgatgcgt

SEQ ID NO: 27344 - DNA, 50 bp, Homo sapiens
  chr21:47746383-47746433
  hypo
gtccaggaggagagtccggtaaccaaggaggacagcgcactctgtggagg

SEQ ID NO: 27345 - DNA, 31 bp, Homo sapiens
  chr21:47771656-47771687
  hypo
gtcagtgcagcagtgacgtgcacctgtgtgt

SEQ ID NO: 27346 - DNA, 69 bp, Homo sapiens
  chr21:47771742-47771811
  hypo
taccagtggtgctgagcgtttgcctcggaaggacggttgagtgctgtccaagtgcgggctcacctggtg

SEQ ID NO: 27347 - DNA, 146 bp, Homo sapiens
  chr21:47774501-47774647
  hypo
gcagcatgagcaagcccggtgtcgggctccgggggacacacgggagggcagggaggagacgcaggggcagcaccgcgtggcttgttgcacggtggaaccagtggaggggaactcggggcatctgggctcagcggccaggagccctc

SEQ ID NO: 27348 - DNA, 31 bp, Homo sapiens
  chr21:47774724-47774755
  hypo
tgagttccctgcaaagcggaccccaacacag

SEQ ID NO: 27349 - DNA, 61 bp, Homo sapiens
  chr21:47774790-47774851
  hypo
gagaagggcaagggcccggctggaacaggcagccaggaccttcccacgagcaggccttgca

SEQ ID NO: 27350 - DNA, 31 bp, Homo sapiens
  chr21:47774883-47774914
  hypo
agccccaccaggcattcgtgtatcacctgag

SEQ ID NO: 27351 - DNA, 31 bp, Homo sapiens
  chr21:47774917-47774948
  hypo
caacccctgcctctgcgcgtgggtgtgacga

SEQ ID NO: 27352 - DNA, 31 bp, Homo sapiens
  chr21:47775408-47775439
  hypo
aggcaccagctggaagcgctggagtctcccc

SEQ ID NO: 27353 - DNA, 55 bp, Homo sapiens
  chr21:47775463-47775518
  hypo
tctcagacagatgctgcgtagagacttcagcattgggacacgagtggcgtctgga

SEQ ID NO: 27354 - DNA, 65 bp, Homo sapiens
  chr21:47775605-47775670
  hypo
cctgggtgcctgggttcgatccaagtcctccgtgaagcagctgagtgctccgacctcttcttctg

SEQ ID NO: 27355 - DNA, 40 bp, Homo sapiens
  chr21:47775695-47775735
  hypo
cctgatgagggtttggcgttagaggcggggtcactggctg

SEQ ID NO: 27356 - DNA, 109 bp, Homo sapiens; identical to SEQ ID NO: 7246
  chr21:47799168-47799277
  hypo

SEQ ID NO: 27357 - DNA, 131 bp, Homo sapiens
  chr21:47805828-47805959
  hypo
gggagaaccgggaaggcgcaaacctcctctccatgctcaaggccgacgtcaacctgtcccacagcgaaaggtcagtgtgtcctcggcaccgaggctgccttgtggccgccagcacccgctgggtcatgcag

SEQ ID NO: 27358 - DNA, 31 bp, Homo sapiens
  chr21:47833102-47833133
  hypo
aggcacgaggcccacccgggagaggctggac

SEQ ID NO: 27359 - DNA, 31 bp, Homo sapiens
  chr21:47833359-47833390
  hypo
ggtgaggagcacagtccgtgcctgcagtgac

SEQ ID NO: 27360 - DNA, 63 bp, Homo sapiens
  chr21:47833403-47833466
  hypo
cctttctgttctgtaacgagctgtccataactgttgtgaaatttcgtacgtgcttcatttaag

SEQ ID NO: 27361 - DNA, 31 bp, Homo sapiens
  chr21:47833516-47833547
  hypo
tggatttaactgtgctcgagggttagtcctg

SEQ ID NO: 27362 - DNA, 31 bp, Homo sapiens
  chr21:48018213-48018244
  hypo
ccgcgttttttgcttgcgttgccttttgatg

SEQ ID NO: 27363 - DNA, 31 bp, Homo sapiens
  chr21:48018510-48018541
  hypo
tcggcctcccaagctgcgctctttttattga

SEQ ID NO: 27364 - DNA, 31 bp, Homo sapiens
  chr22:16216477-16216508
  hypo
agagtacagtgggacccgcgacccgccctgg

SEQ ID NO: 27365 - DNA, 38 bp, Homo sapiens
  chr22:16216518-16216556
  hypo
tggaggacccctgcaacgccatgcgctagactatgcta

SEQ ID NO: 27366 - DNA, 31 bp, Homo sapiens
  chr22:17970197-17970228
  hypo
gctttgaacatttgtgcgcaagtctttgtgt

SEQ ID NO: 27367 - DNA, 31 bp, Homo sapiens
  chr22:18009974-18010005
  hypo
gcagtggtgccgcgcccggcacatgactgca

SEQ ID NO: 27368 - DNA, 31 bp, Homo sapiens
  chr22:18084141-18084172
  hypo
gctcccagggagtccacggcctagcagagaa

SEQ ID NO: 27369 - DNA, 61 bp, Homo sapiens
  chr22:18084184-18084245
  hypo
ccatcagttcagaaaccgacacaagtgactgacatggaaagatgcgcgcgatgtaactttg

SEQ ID NO: 27370 - DNA, 31 bp, Homo sapiens
  chr22:18110616-18110647
  hypo
cagttcataaagtgaacgaccttgtcaaaac

SEQ ID NO: 27371 - DNA, 31 bp, Homo sapiens
  chr22:18110658-18110689
  hypo
gcaggtctcttccctccgcactgtttcctat

SEQ ID NO: 27372 - DNA, 58 bp, Homo sapiens
  chr22:18265465-18265523
  hypo
aggcctgggcaggagccgctcccaggcgtgccgtgggcagggccgggtcagccttcag

SEQ ID NO: 27373 - DNA, 52 bp, Homo sapiens
  chr22:18295720-18295772
  hypo
ttcctgctgaatgctccgggggagtagaagtggggtgcgggaggaaaggggg

SEQ ID NO: 27374 - DNA, 31 bp, Homo sapiens
  chr22:18295775-18295806
  hypo
tgctctcagagacagacgcagcaaaactggg

SEQ ID NO: 27375 - DNA, 31 bp, Homo sapiens
  chr22:18301739-18301770
  hypo
ggtcactggctgtgatcggatgggagagtgc

SEQ ID NO: 27376 - DNA, 31 bp, Homo sapiens
  chr22:18301995-18302026
  hypo
tgctgcaggacttccccgtccttccagctgt

SEQ ID NO: 27377 - DNA, 31 bp, Homo sapiens
  chr22:18328237-18328268
  hypo
caagtaccatgagccacgtatgcactcatgg

SEQ ID NO: 27378 - DNA, 45 bp, Homo sapiens
  chr22:18363712-18363757
  hypo
agttgaacttctagttcgtggtgggacagtcgtgtttccatgatg

SEQ ID NO: 27379 - DNA, 40 bp, Homo sapiens
  chr22:18363819-18363859
  hypo
ttgcttccaccacaaacggtttctacgcatagcctttctt

SEQ ID NO: 27380 - DNA, 31 bp, Homo sapiens
  chr22:18371276-18371307
  hypo
agacaagataattccacgaaaagggacatcg

SEQ ID NO: 27381 - DNA, 31 bp, Homo sapiens
  chr22:18435777-18435808
  hypo
gacatcgggaaagtgacggcaacttcaacca

SEQ ID NO: 27382 - DNA, 31 bp, Homo sapiens
  chr22:18530298-18530329
  hypo
aagataggaacttgaacgaattgaacttcag

SEQ ID NO: 27383 - DNA, 31 bp, Homo sapiens
  chr22:18553592-18553623
  hypo
tcacctctgtcatgagcgattaggggaaggg

SEQ ID NO: 27384 - DNA, 31 bp, Homo sapiens
  chr22:18553828-18553859
  hypo
catcctcagtgagggacgataagagactggg

SEQ ID NO: 27385 - DNA, 58 bp, Homo sapiens
  chr22:18553892-18553950
  hypo
acaaactgggagtgtccgcagaaaactgaatgtgtctggacttcgccatcaaaaccca

SEQ ID NO: 27386 - DNA, 31 bp, Homo sapiens
  chr22:18620943-18620974
  hypo
ctccctcctacctcagcgtccagtgtgagcc

SEQ ID NO: 27387 - DNA, 31 bp, Homo sapiens
  chr22:18641800-18641831
  hypo
aaacttttcttgttatcgaactttttgtgtg

SEQ ID NO: 27388 - DNA, 98 bp, Homo sapiens
  chr22:18951682-18951780
  hypo
ccagggcctggctcctcgggactcagccagtcctgccggtggagtgcgcaggcgtgacgctgagtgctggactctgtttccacgcgaggccttggggt

SEQ ID NO: 27389 - DNA, 31 bp, Homo sapiens
  chr22:19011956-19011987
  hypo
gaagactgtccaggaccgtgtcactaggcat

SEQ ID NO: 27390 - DNA, 166 bp, Homo sapiens
  chr22:19020498-19020664
  hypo
tgctctctctcacctccgtgggagcactccggccaccccaccttgttcccgagtctacctccatagcctggcgctgcctgtccaggctgtgctccgagtctgctcgcctcgggcccccccaccgccggcagttgaagtgcagctgcagtgcgcggtagacaggcaa

SEQ ID NO: 27391 - DNA, 31 bp, Homo sapiens
  chr22:19048398-19048429
  hypo
tgtgtgtgcagggtaccgacacatgggcata

SEQ ID NO: 27392 - DNA, 57 bp, Homo sapiens
  chr22:19120093-19120150
  hypo
aggtgcaagtaaaattcgtcaattaaaccactattttgattacgttccattagcttt

SEQ ID NO: 27393 - DNA, 31 bp, Homo sapiens
  chr22:19120154-19120185
  hypo
cacttagcagcaaagacgttccttactgacc

SEQ ID NO: 27394 - DNA, 37 bp, Homo sapiens
  chr22:19584222-19584259
  hypo
gaggctgggttcctgccgccagcgagtgggacccctg

SEQ ID NO: 27395 - DNA, 109 bp, Homo sapiens
  chr22:19605267-19605376
  hypo
gccctttgcacagcccgcgaagggcacgtgggaatcctgctccattccaggtcccgggccagtagctccaggccgcgccagggtcggtgcagagcggcatttcccgccc

SEQ ID NO: 27396 - DNA, 31 bp, Homo sapiens
  chr22:19621108-19621139
  hypo
ggacagagggagaggacgatggcaataatgt

SEQ ID NO: 27397 - DNA, 31 bp, Homo sapiens
  chr22:19621145-19621176
  hypo
tgtggcccaccaggcccgcaccttggcaaca

SEQ ID NO: 27398 - DNA, 31 bp, Homo sapiens
  chr22:19624102-19624133
  hypo
gcacagaaaacagttccggacccttcctcta

SEQ ID NO: 27399 - DNA, 31 bp, Homo sapiens
  chr22:19683861-19683892
  hypo
atcatccagctggtcacgccgatgcctcccc

SEQ ID NO: 27400 - DNA, 31 bp, Homo sapiens
  chr22:19697756-19697787
  hypo
aggccagcatagggcacggtgggcctggagg

SEQ ID NO: 27401 - DNA, 35 bp, Homo sapiens; identical to SEQ ID NO: 7248
  chr22:19706535-19706570
  hypo

SEQ ID NO: 27402 - DNA, 50 bp, Homo sapiens; identical to SEQ ID NO: 7249
  chr22:19706571-19706621
  hypo

SEQ ID NO: 27403 - DNA, 64 bp, Homo sapiens; identical to SEQ ID NO: 7250
  chr22:19706632-19706696
  hypo

SEQ ID NO: 27404 - DNA, 37 bp, Homo sapiens
  chr22:19725675-19725712
  hypo
caggaggagtggcttccgggtccggctgtgggctcag

SEQ ID NO: 27405 - DNA, 31 bp, Homo sapiens
  chr22:19771789-19771820
  hypo
ctggggagtggagacacgcacagcacgtcaa

SEQ ID NO: 27406 - DNA, 31 bp, Homo sapiens
  chr22:19771858-19771889
  hypo
gctccggagcccttcccgggatcatctcccg

SEQ ID NO: 27407 - DNA, 65 bp, Homo sapiens
  chr22:19856432-19856497
  hypo
cactgggggcccccaccgtggtggctgtctggtcctcacggcggccctccgcgggtggggtggga

SEQ ID NO: 27408 - DNA, 31 bp, Homo sapiens
  chr22:19856507-19856538
  hypo
tctgagctggtgaaggcgggactcatccctg

SEQ ID NO: 27409 - DNA, 39 bp, Homo sapiens
  chr22:19856543-19856582
  hypo
tctgggcctcctggtgcggtcttccgccctgacatgcct

SEQ ID NO: 27410 - DNA, 31 bp, Homo sapiens
  chr22:19870366-19870397
  hypo
agcaaaggacctgccccggtgtgatgcccag

SEQ ID NO: 27411 - DNA, 56 bp, Homo sapiens
  chr22:19870406-19870462
  hypo
ccagaggatactgaggcggggagggcggggccaggtgggcccgaactagacctgcc

SEQ ID NO: 27412 - DNA, 31 bp, Homo sapiens
  chr22:19870468-19870499
  hypo
ccctgtggggacaggacggccccaaggccat

SEQ ID NO: 27413 - DNA, 56 bp, Homo sapiens
  chr22:19870814-19870870
  hypo
gcaggggccctggtcccgggacgcatgccgtacctccaccacgtcaccaatggcgt

SEQ ID NO: 27414 - DNA, 31 bp, Homo sapiens
  chr22:19882798-19882829
  hypo
tggggagcggccaacccgcctggcagccagc

SEQ ID NO: 27415 - DNA, 63 bp, Homo sapiens
  chr22:19882870-19882933
  hypo
gattctccatgcacctcggggagaccagagacagagcgtgtggctcgacgtgcccttacctat

SEQ ID NO: 27416 - DNA, 59 bp, Homo sapiens
  chr22:19891184-19891243
  hypo
aggcccctctgggcctcgggctcctcttggctgcacttggatcccgacccccagtgcct

SEQ ID NO: 27417 - DNA, 51 bp, Homo sapiens
  chr22:19891247-19891298
  hypo
ctgtaaaggagctccccggtgtgggctcaccatcctcgccttccacattcc

SEQ ID NO: 27418 - DNA, 31 bp, Homo sapiens
  chr22:19899722-19899753
  hypo
gtgctggtggaggaagcggatctcaaacagt

SEQ ID NO: 27419 - DNA, 31 bp, Homo sapiens
  chr22:19963989-19964020
  hypo
tagagataagtacccccgggccctgcccact

SEQ ID NO: 27420 - DNA, 50 bp, Homo sapiens
  chr22:19966500-19966550
  hypo
catcctgagtggggcacgatcacctcgtgggtcagcgtctgcaggccatg

SEQ ID NO: 27421 - DNA, 62 bp, Homo sapiens
  chr22:19966597-19966659
  hypo
gggtgcctgtggggtgcgattggccaatctgtgctgaccatatgcaccgcctgcctacctcc

SEQ ID NO: 27422 - DNA, 31 bp, Homo sapiens
  chr22:19967263-19967294
  hypo
accagtgacaagctcacggacctcgttgtcc

SEQ ID NO: 27423 - DNA, 87 bp, Homo sapiens
  chr22:19967296-19967383
  hypo
ggcagccctcagcaggcgcaccagggcaggcacaccaccgcagtcccggatggcggccttgttgtcagtgtcgcggccataggagag

SEQ ID NO: 27424 - DNA, 31 bp, Homo sapiens
  chr22:19967534-19967565
  hypo
gccttcacggggtccacggggtgccgcagca

SEQ ID NO: 27425 - DNA, 31 bp, Homo sapiens
  chr22:19969119-19969150
  hypo
acgcagcaggaaatgccggtccagggcacca

SEQ ID NO: 27426 - DNA, 76 bp, Homo sapiens
  chr22:19978173-19978249
  hypo
gccaggctgctgggcacgctccagctgtagggcaacatggcgccgctcctgctccagtgcccgtgtcagcctctcg

SEQ ID NO: 27427 - DNA, 31 bp, Homo sapiens
  chr22:20019038-20019069
  hypo
tcgactgctgcccacacggcctcctgttgtc

SEQ ID NO: 27428 - DNA, 31 bp, Homo sapiens
  chr22:20087955-20087986
  hypo
tctggggaagtgcttgcgtagaccctggccc

SEQ ID NO: 27429 - DNA, 31 bp, Homo sapiens
  chr22:20123637-20123668
  hypo
ggacctgccctccacccgtagcttggctgga

SEQ ID NO: 27430 - DNA, 41 bp, Homo sapiens
  chr22:20123929-20123970
  hypo
tccttgtgtgtcctcccgtgttcttgcgcaccctgagagtg

SEQ ID NO: 27431 - DNA, 36 bp, Homo sapiens
  chr22:20126323-20126359
  hypo
ggcctggatgaggcatcgtggcgcattttccatctg

SEQ ID NO: 27432 - DNA, 72 bp, Homo sapiens
  chr22:20126368-20126440
  hypo
cctccagcctgtgtaccgcccccgccccctaccccgccccagtcatggagcctaggtcgctggaatggggtg

SEQ ID NO: 27433 - DNA, 63 bp, Homo sapiens
  chr22:20126451-20126514
  hypo
gtgggcctctctgagacggctgccctgagaggttgccgggtcagggcacgggtagcccacatg

SEQ ID NO: 27434 - DNA, 31 bp, Homo sapiens
  chr22:20200274-20200305
  hypo
tgctgactgccatggacgtgcacctggctga

SEQ ID NO: 27435 - DNA, 31 bp, Homo sapiens
  chr22:20243597-20243628
  hypo
gctgcctcttggaaaacgaggtcagtgtatt

SEQ ID NO: 27436 - DNA, 45 bp, Homo sapiens
  chr22:20248010-20248055
  hypo
gggccaggagcaccagcgcagcacatcctgcgtgaccttgggcca

SEQ ID NO: 27437 - DNA, 60 bp, Homo sapiens
  chr22:20248056-20248116
  hypo
ctcctcagccctccctcgacagccgtgctggtagctggccaggcccgggtgagtgagttc

SEQ ID NO: 27438 - DNA, 35 bp, Homo sapiens
  chr22:20248137-20248172
  hypo
tctggggtaggggccacgcccgggggcaggtggcc

SEQ ID NO: 27439 - DNA, 82 bp, Homo sapiens; identical to SEQ ID NO: 7251
  chr22:20255236-20255318
  hypo

SEQ ID NO: 27440 - DNA, 182 bp, Homo sapiens; identical to SEQ ID NO: 7252
  chr22:20255327-20255509
  hypo

SEQ ID NO: 27441 - DNA, 84 bp, Homo sapiens; identical to SEQ ID NO: 7253
  chr22:20255583-20255667
  hypo

SEQ ID NO: 27442 - DNA, 1 bp, Homo sapiens
  chr22:20255668-20255669
  hypo
c

SEQ ID NO: 27443 - DNA, 31 bp, Homo sapiens
  chr22:20258984-20259015
  hypo
tgggctgacagggacacggttcagcctcctt

SEQ ID NO: 27444 - DNA, 31 bp, Homo sapiens
  chr22:20285991-20286022
  hypo
ttgaggcaaaggggccgcgagagggtaggtg

SEQ ID NO: 27445 - DNA, 84 bp, Homo sapiens
  chr22:20308709-20308793
  hypo
agtgaataatgacaagcgctcaggccactgccgtggagggcggtccacaacccagagctggtcatgcgccgggcaccctggcct

SEQ ID NO: 27446 - DNA, 34 bp, Homo sapiens
  chr22:20760012-20760046
  hypo
aaagttcccccaggtgcgccggcagcgcggggcg

SEQ ID NO: 27447 - DNA, 45 bp, Homo sapiens
  chr22:20765458-20765503
  hypo
acaataagaacatgaacggctgggcacagccgttcatgacacaga

SEQ ID NO: 27448 - DNA, 31 bp, Homo sapiens
  chr22:20788840-20788871
  hypo
ggctggcagaaaaggccgggtggtggtggca

SEQ ID NO: 27449 - DNA, 20 bp, Homo sapiens
  chr22:20851557-20851577
  hypo
gactccgtctcaaaaaaaaa

SEQ ID NO: 27450 - DNA, 31 bp, Homo sapiens
  chr22:20857333-20857364
  hypo
caataaaaatgaattgcggctgggctcaccc

SEQ ID NO: 27451 - DNA, 1 bp, Homo sapiens
  chr22:20857373-20857374
  hypo
c

SEQ ID NO: 27452 - DNA, 31 bp, Homo sapiens
  chr22:20929390-20929421
  hypo
tcctcaaagatgatcacggaagccttggccc

SEQ ID NO: 27453 - DNA, 113 bp, Homo sapiens
  chr22:20958607-20958720
  hypo
atatctggcgcaggtacgccagggcctcctccaggcactcgtccatcttctggacgctgtcctgccccatctcgcccaggtcatggctgaataggagccgttggtgtctgtgg

SEQ ID NO: 27454 - DNA, 31 bp, Homo sapiens
  chr22:20976181-20976212
  hypo
tgctggggaagagacccgcacacagaactca

SEQ ID NO: 27455 - DNA, 51 bp, Homo sapiens
  chr22:21058304-21058355
  hypo
gaggagatggccagggcggaccgagtgagcgcctgcgcgggtccgggcggg

SEQ ID NO: 27456 - DNA, 31 bp, Homo sapiens
  chr22:21101700-21101731
  hypo
tctttgggccaaggtgcggcttgcaccacta

SEQ ID NO: 27457 - DNA, 49 bp, Homo sapiens
  chr22:21101923-21101972
  hypo
tggccatggccagccccgtgtgctgggacagtcccgatacccagttctg

SEQ ID NO: 27458 - DNA, 42 bp, Homo sapiens
  chr22:21105243-21105285
  hypo
gaaaatcatgcttgtgcgacgcagactcgagaggctataaac

SEQ ID NO: 27459 - DNA, 31 bp, Homo sapiens
  chr22:21105304-21105335
  hypo
tctttggcagctaaaccgagaacacagctga

SEQ ID NO: 27460 - DNA, 31 bp, Homo sapiens
  chr22:21105362-21105393
  hypo
ggcttggaagacagagcgacctgggggcagc

SEQ ID NO: 27461 - DNA, 31 bp, Homo sapiens
  chr22:21150527-21150558
  hypo
tcatccaccaggtgctcgtcttggatgttgg

SEQ ID NO: 27462 - DNA, 54 bp, Homo sapiens
  chr22:21153866-21153920
  hypo
gacagaggcatgcatacgcacaatgccaggtgccccacacgagcctgctgagaa

SEQ ID NO: 27463 - DNA, 110 bp, Homo sapiens
  chr22:21153937-21154047
  hypo
gagacaggaataggggcgtacttgtcgctctcctgagagatgtagagccggttggacaggctggccaagaacgcctccacaatcactgggtccaccgtcaatccagcctt

SEQ ID NO: 27464 - DNA, 31 bp, Homo sapiens
  chr22:21214251-21214282
  hypo
ctagacaaatagtgtgcgggttaagagtttg

SEQ ID NO: 27465 - DNA, 31 bp, Homo sapiens
  chr22:21331193-21331224
  hypo
ggaggtgtctgagctgcggggccaggaggga

SEQ ID NO: 27466 - DNA, 31 bp, Homo sapiens
  chr22:21348153-21348184
  hypo
tctctgttctctggggcgagggtcctgtgcc

SEQ ID NO: 27467 - DNA, 31 bp, Homo sapiens
  chr22:21385763-21385794
  hypo
agctcgcccatggatacgtaggtgaacaggt

SEQ ID NO: 27468 - DNA, 31 bp, Homo sapiens
  chr22:21408212-21408243
  hypo
attcctatagcacaggcggatggctgcgaat

SEQ ID NO: 27469 - DNA, 37 bp, Homo sapiens
  chr22:21983043-21983080
  hypo
caagtgctcaggcccacgaaggcgtctgtccacctgt

SEQ ID NO: 27470 - DNA, 31 bp, Homo sapiens
  chr22:22044380-22044411
  hypo
cacagggatggccaggcgtggtggctcacac

SEQ ID NO: 27471 - DNA, 25 bp, Homo sapiens
  chr22:22063243-22063268
  hypo
tgagccaccacgcccagctgataca

SEQ ID NO: 27472 - DNA, 31 bp, Homo sapiens; identical to SEQ ID NO: 7259
  chr22:22221290-22221321
  hypo

SEQ ID NO: 27473 - DNA, 31 bp, Homo sapiens; identical to SEQ ID NO: 7261
  chr22:22307336-22307367
  hypo

SEQ ID NO: 27474 - DNA, 131 bp, Homo sapiens; identical to SEQ ID NO: 7262
  chr22:22862685-22862816
  hypo

SEQ ID NO: 27475 - DNA, 38 bp, Homo sapiens; identical to SEQ ID NO: 7263
  chr22:22862824-22862862
  hypo

SEQ ID NO: 27476 - DNA, 13 bp, Homo sapiens
  chr22:22863219-22863232
  hypo
ggggttaaattga

SEQ ID NO: 27477 - DNA, 38 bp, Homo sapiens; identical to SEQ ID NO: 7265
  chr22:22863269-22863307
  hypo

SEQ ID NO: 27478 - DNA, 31 bp, Homo sapiens
  chr22:23446549-23446580
  hypo
acctcctgctctgcctcgtgatcaggctgga

SEQ ID NO: 27479 - DNA, 234 bp, Homo sapiens; identical to SEQ ID NO: 7266
  chr22:23523109-23523343
  hypo

SEQ ID NO: 27480 - DNA, 31 bp, Homo sapiens
  chr22:23737248-23737279
  hypo
gaccccagctcagggccggcttcccacccca

SEQ ID NO: 27481 - DNA, 49 bp, Homo sapiens
  chr22:23737299-23737348
  hypo
aggcagcccctctgcacggggctctgacccaaggcgtcttaggagggtc

SEQ ID NO: 27482 - DNA, 31 bp, Homo sapiens
  chr22:23793189-23793220
  hypo
tgacaggtggcctcagcggactctgctgtgg

SEQ ID NO: 27483 - DNA, 50 bp, Homo sapiens
  chr22:23877155-23877205
  hypo
atgtgggaagcgagggcggcctctccttggttcctcggcagcctggaccc

SEQ ID NO: 27484 - DNA, 31 bp, Homo sapiens
  chr22:23877217-23877248
  hypo
aggtcctggtggccaccgcttgcagggccgt

SEQ ID NO: 27485 - DNA, 31 bp, Homo sapiens
  chr22:24061195-24061226
  hypo
ccttagcttggggctccgaacacacattctt

SEQ ID NO: 27486 - DNA, 31 bp, Homo sapiens
  chr22:24133890-24133921
  hypo
cttccctgtggtgctgcgacccttataatga

SEQ ID NO: 27487 - DNA, 109 bp, Homo sapiens
  chr22:24159864-24159973
  hypo
agggatgcctctgccccgtgcaccagatggagcctgggccgacttcttcccactgtggttctccgtggcactttactaagattttggaaaataacgtgggggaatcacc

SEQ ID NO: 27488 - DNA, 31 bp, Homo sapiens
  chr22:24205145-24205176
  hypo
aagtttccgtgttcagcggtgaagccttgag

SEQ ID NO: 27489 - DNA, 31 bp, Homo sapiens
  chr22:24212828-24212859
  hypo
tttatgtatattttcacgttctgggctaatt

SEQ ID NO: 27490 - DNA, 169 bp, Homo sapiens; identical to SEQ ID NO: 7280
  chr22:24552273-24552442
  hypo

SEQ ID NO: 27491 - DNA, 100 bp, Homo sapiens; identical to SEQ ID NO: 7282
  chr22:24552638-24552738
  hypo

SEQ ID NO: 27492 - DNA, 34 bp, Homo sapiens; identical to SEQ ID NO: 7283
  chr22:24552756-24552790
  hypo

SEQ ID NO: 27493 - DNA, 31 bp, Homo sapiens; identical to SEQ ID NO: 7284
  chr22:24552829-24552860
  hypo

SEQ ID NO: 27494 - DNA, 148 bp, Homo sapiens; identical to SEQ ID NO: 7285
  chr22:24552963-24553111
  hypo

SEQ ID NO: 27495 - DNA, 31 bp, Homo sapiens
  chr22:24560495-24560526
  hypo
gtcctccatgcttcagcggaccccagaccag

SEQ ID NO: 27496 - DNA, 89 bp, Homo sapiens; identical to SEQ ID NO: 7288
  chr22:24820073-24820162
  hypo

SEQ ID NO: 27497 - DNA, 31 bp, Homo sapiens; identical to SEQ ID NO: 7289
  chr22:24820223-24820254
  hypo

SEQ ID NO: 27498 - DNA, 94 bp, Homo sapiens; identical to SEQ ID NO: 7290
  chr22:24820266-24820360
  hypo

SEQ ID NO: 27499 - DNA, 31 bp, Homo sapiens
  chr22:24983097-24983128
  hypo
gtgccccttctgatgtcgattcttttagggt

SEQ ID NO: 27500 - DNA, 92 bp, Homo sapiens; identical to SEQ ID NO: 7291
  chr22:24989195-24989287
  hypo

SEQ ID NO: 27501 - DNA, 31 bp, Homo sapiens
  chr22:25097060-25097091
  hypo
atattcaatgccactgcgtgcacactttggt

SEQ ID NO: 27502 - DNA, 31 bp, Homo sapiens
  chr22:25251163-25251194
  hypo
agggtagtgagatgggcggccatctgctggt

SEQ ID NO: 27503 - DNA, 24 bp, Homo sapiens
  chr22:25285212-25285236
  hypo
caccgtgcccggccctcatagtca

SEQ ID NO: 27504 - DNA, 31 bp, Homo sapiens
  chr22:25347731-25347762
  hypo
tgggattacaagccaccgtgcgcagcctgtg

SEQ ID NO: 27505 - DNA, 68 bp, Homo sapiens; identical to SEQ ID NO: 7294
  chr22:25348311-25348379
  hypo

SEQ ID NO: 27506 - DNA, 295 bp, Homo sapiens; identical to SEQ ID NO: 7295
  chr22:25348388-25348683
  hypo

SEQ ID NO: 27507 - DNA, 184 bp, Homo sapiens; identical to SEQ ID NO: 7296
  chr22:25348802-25348986
  hypo

SEQ ID NO: 27508 - DNA, 58 bp, Homo sapiens; identical to SEQ ID NO: 7297
  chr22:25349110-25349168
  hypo

SEQ ID NO: 27509 - DNA, 31 bp, Homo sapiens; identical to SEQ ID NO: 7298
  chr22:25349197-25349228
  hypo

SEQ ID NO: 27510 - DNA, 235 bp, Homo sapiens; identical to SEQ ID NO: 7299
  chr22:25349271-25349506
  hypo

SEQ ID NO: 27511 - DNA, 31 bp, Homo sapiens
  chr22:25388947-25388978
  hypo
tttgaatttgagtctgcgcactgtggactac

SEQ ID NO: 27512 - DNA, 58 bp, Homo sapiens
  chr22:25461274-25461332
  hypo
atgaggaatgggtggccgcctggggtcctggagagtagtatttcggatgtctgggctg

SEQ ID NO: 27513 - DNA, 49 bp, Homo sapiens
  chr22:25461375-25461424
  hypo
catgccattcctgccccgtccccacataggaatgcgggccacttctcac

SEQ ID NO: 27514 - DNA, 31 bp, Homo sapiens
  chr22:25461434-25461465
  hypo
atggccttgctacatgcgagtcttctgatgt

SEQ ID NO: 27515 - DNA, 60 bp, Homo sapiens
  chr22:25462989-25463049
  hypo
actccccgggctgcctcggcccacgggtcagggtggtggtcagggcggccagagcaggat

SEQ ID NO: 27516 - DNA, 31 bp, Homo sapiens
  chr22:25463146-25463177
  hypo
gttggcacctgcccagcggtgctcccctccc

SEQ ID NO: 27517 - DNA, 31 bp, Homo sapiens
  chr22:25463395-25463426
  hypo
cccttgccctgcctgtcgctctcccatcaga

SEQ ID NO: 27518 - DNA, 31 bp, Homo sapiens
  chr22:25483616-25483647
  hypo
gagcagtgtctcaggtcgggttcccagaagc

SEQ ID NO: 27519 - DNA, 31 bp, Homo sapiens
  chr22:25492972-25493003
  hypo
cccttctcttgttgaccggcatttgagttga

SEQ ID NO: 27520 - DNA, 38 bp, Homo sapiens
  chr22:25505389-25505427
  hypo
actcagacgtgagccaccgcgcccggcccatcacttct

SEQ ID NO: 27521 - DNA, 47 bp, Homo sapiens
  chr22:25505428-25505475
  hypo
tattctgctaaccacacggaccaaccttgattcgttgtgggagggga

SEQ ID NO: 27522 - DNA, 31 bp, Homo sapiens
  chr22:25536599-25536630
  hypo
cctgggaggggcacctcggggtctgtcagcc

SEQ ID NO: 27523 - DNA, 26 bp, Homo sapiens
  chr22:25547084-25547110
  hypo
gccactgcgcccggcccctttgctta

SEQ ID NO: 27524 - DNA, 31 bp, Homo sapiens
  chr22:25548090-25548121
  hypo
tacgcccactttatttcgtcaggccctgaat

SEQ ID NO: 27525 - DNA, 31 bp, Homo sapiens
  chr22:25561923-25561954
  hypo
tgcaggtcccgcaggccgtaaccctttccct

SEQ ID NO: 27526 - DNA, 68 bp, Homo sapiens
  chr22:25562037-25562105
  hypo
agaagcacatacagggcgaaggatgccaggggaggtccctcggaagctgccgccgtgggtgaacagat

SEQ ID NO: 27527 - DNA, 60 bp, Homo sapiens
  chr22:25562118-25562178
  hypo
tggaaggaatgttgttcgagaaagagactttgaaggactgaggatcgatgcagtatggca

SEQ ID NO: 27528 - DNA, 31 bp, Homo sapiens
  chr22:25562187-25562218
  hypo
agagaggagggagcagcgctggcctcaggac

SEQ ID NO: 27529 - DNA, 31 bp, Homo sapiens
  chr22:25562220-25562251
  hypo
tcagtctggcattaggcggtggagggagaaa

SEQ ID NO: 27530 - DNA, 44 bp, Homo sapiens
  chr22:25573210-25573254
  hypo
gcctctcatctgtcaacgaagctgtgtaccgccaactgtgttgt

SEQ ID NO: 27531 - DNA, 83 bp, Homo sapiens
  chr22:25573312-25573395
  hypo
agcaaacctcagtcctcgactcaagtgccctcaagacccgggtgcagctcagcaagagaagccgccgccgggcccccatctcc

SEQ ID NO: 27532 - DNA, 20 bp, Homo sapiens
  chr22:25578126-25578146
  hypo
cagagcgggactccatctca

SEQ ID NO: 27533 - DNA, 38 bp, Homo sapiens
  chr22:25603310-25603348
  hypo
ggtcccccacccgccacgttcctcggcatcacttcctg

SEQ ID NO: 27534 - DNA, 43 bp, Homo sapiens
  chr22:25756561-25756604
  hypo
aggggctcacccttcccgcccagctcaacgccacctcatccct

SEQ ID NO: 27535 - DNA, 31 bp, Homo sapiens
  chr22:25826675-25826706
  hypo
ccagagggagcaaggccgagaataaaggccc

SEQ ID NO: 27536 - DNA, 31 bp, Homo sapiens
  chr22:26118123-26118154
  hypo
ccactgggggtggacacgtagggtgtgcttc

SEQ ID NO: 27537 - DNA, 31 bp, Homo sapiens
  chr22:26176160-26176191
  hypo
tccaggtgaggcctctcgggggatgtgcaag

SEQ ID NO: 27538 - DNA, 69 bp, Homo sapiens
  chr22:27019111-27019180
  hypo
ctgccagatcctggggcgagcccccaacctctcacccttcacgggactctgatgcggatctccaccttt

SEQ ID NO: 27539 - DNA, 41 bp, Homo sapiens; identical to SEQ ID NO: 7310
  chr22:27068933-27068974
  hypo

SEQ ID NO: 27540 - DNA, 42 bp, Homo sapiens; identical to SEQ ID NO: 7311
  chr22:27068978-27069020
  hypo

SEQ ID NO: 27541 - DNA, 31 bp, Homo sapiens
  chr22:27887474-27887505
  hypo
gcaaataagttcaattcgcaggttcccgaga

SEQ ID NO: 27542 - DNA, 31 bp, Homo sapiens
  chr22:27976916-27976947
  hypo
cagatcttcccaaaaccgattccttctcatc

SEQ ID NO: 27543 - DNA, 41 bp, Homo sapiens
  chr22:28371503-28371544
  hypo
aagtcacagtgctttgcggttgaagtcgcccacataccgct

SEQ ID NO: 27544 - DNA, 31 bp, Homo sapiens
  chr22:28371684-28371715
  hypo
tatagtggcataaaatcgtttgtagcgtttt

SEQ ID NO: 27545 - DNA, 31 bp, Homo sapiens
  chr22:28371720-28371751
  hypo
tctttgatctcagctgcgtctttagatagcc

SEQ ID NO: 27546 - DNA, 71 bp, Homo sapiens; identical to SEQ ID NO: 7316
  chr22:29075826-29075897
  hypo

SEQ ID NO: 27547 - DNA, 31 bp, Homo sapiens; identical to SEQ ID NO: 7317
  chr22:29279216-29279247
  hypo

SEQ ID NO: 27548 - DNA, 31 bp, Homo sapiens
  chr22:29435188-29435219
  hypo
acctccacgttccgggcggagcagggaagcc

SEQ ID NO: 27549 - DNA, 31 bp, Homo sapiens
  chr22:29435221-29435252
  hypo
aactttaagaaggccacgtggctaaatggct

SEQ ID NO: 27550 - DNA, 31 bp, Homo sapiens
  chr22:29435336-29435367
  hypo
tgcacctgcatcaaagcgcacaggtaccgcg

SEQ ID NO: 27551 - DNA, 49 bp, Homo sapiens
  chr22:29445950-29445999
  hypo
tgaccccttcatctaccgcagccggagcccctgtcgtgccagtgaggcg

SEQ ID NO: 27552 - DNA, 173 bp, Homo sapiens; identical to SEQ ID NO: 7320
  chr22:29468802-29468975
  hypo

SEQ ID NO: 27553 - DNA, 35 bp, Homo sapiens; identical to SEQ ID NO: 7321
  chr22:29469137-29469172
  hypo

SEQ ID NO: 27554 - DNA, 63 bp, Homo sapiens; identical to SEQ ID NO: 7322
  chr22:29469213-29469276
  hypo

SEQ ID NO: 27555 - DNA, 91 bp, Homo sapiens
  chr22:29482647-29482738
  hypo
tggtgcaagttcccaccgggcaccagtccgtatttgaaacccaacagggcgataggtgtgctatgtgaatatttgacggcactgtcatgtt

SEQ ID NO: 27556 - DNA, 16 bp, Homo sapiens
  chr22:29482768-29482784
  hypo
tagggtctcactccat

SEQ ID NO: 27557 - DNA, 21 bp, Homo sapiens
  chr22:29484600-29484621
  hypo
ggccaccgcacctggcctcag

SEQ ID NO: 27558 - DNA, 31 bp, Homo sapiens
  chr22:29533686-29533717
  hypo
ggttcttcagggcccacgtgccttgggcttc

SEQ ID NO: 27559 - DNA, 31 bp, Homo sapiens
  chr22:29534522-29534553
  hypo
actcttcttcataactcgtgctctcctcccg

SEQ ID NO: 27560 - DNA, 31 bp, Homo sapiens
  chr22:29607571-29607602
  hypo
tgtgtgtctgtgtgtacgtgctcactgccat

SEQ ID NO: 27561 - DNA, 13 bp, Homo sapiens
  chr22:29607988-29608001
  hypo
ttttgagacagag

SEQ ID NO: 27562 - DNA, 42 bp, Homo sapiens
  chr22:29627463-29627505
  hypo
gagagtgtgagggtcccgctgcttccccgaaatggtagatgc

SEQ ID NO: 27563 - DNA, 57 bp, Homo sapiens
  chr22:29686341-29686398
  hypo
ttcattggctgttaaacgtggaaactttttaacatgctttgtcgcatttatatgcta

SEQ ID NO: 27564 - DNA, 78 bp, Homo sapiens
  chr22:29686432-29686510
  hypo
atacttaaaaagtacccgtactcagtactcagccggcagcataatgaaaagtgggactagacacggtgtccatatgga

SEQ ID NO: 27565 - DNA, 18 bp, Homo sapiens
  chr22:29701035-29701053
  hypo
ggccgggaatgttaagac

SEQ ID NO: 27566 - DNA, 57 bp, Homo sapiens; identical to SEQ ID NO: 7324
  chr22:29702351-29702408
  hypo

SEQ ID NO: 27567 - DNA, 536 bp, Homo sapiens; identical to SEQ ID NO: 7327
  chr22:29702784-29703320
  hypo

SEQ ID NO: 27568 - DNA, 31 bp, Homo sapiens
  chr22:29714173-29714204
  hypo
catgaagccctgcaaacgtgccatgttccct

SEQ ID NO: 27569 - DNA, 31 bp, Homo sapiens
  chr22:29714206-29714237
  hypo
gagactctcacagcagcgttcctagcagcag

SEQ ID NO: 27570 - DNA, 31 bp, Homo sapiens
  chr22:29714242-29714273
  hypo
atttatcaagggcctgcgatgtgccaagcct

SEQ ID NO: 27571 - DNA, 31 bp, Homo sapiens
  chr22:29714293-29714324
  hypo
ctaaggctccctgggacgccatgattgggcc

SEQ ID NO: 27572 - DNA, 31 bp, Homo sapiens
  chr22:29845783-29845814
  hypo
agctcacgcaggcctccggagagtttaccca

SEQ ID NO: 27573 - DNA, 30 bp, Homo sapiens
  chr22:29977661-29977691
  hypo
cttaacaaggctgtccgggatgtgcagcag

SEQ ID NO: 27574 - DNA, 45 bp, Homo sapiens
  chr22:29977711-29977756
  hypo
atgggttcattttgcccgtttcccagacagcggatttatcaagac

SEQ ID NO: 27575 - DNA, 6 bp, Homo sapiens
  chr22:29977776-29977782
  hypo
ttaatt

SEQ ID NO: 27576 - DNA, 2 bp, Homo sapiens
  chr22:29977961-29977963
  hypo
tg

SEQ ID NO: 27577 - DNA, 32 bp, Homo sapiens
  chr22:29997159-29997191
  hypo
tgggttcccagtgtcacgcattttctttttcc

SEQ ID NO: 27578 - DNA, 31 bp, Homo sapiens
  chr22:30091070-30091101
  hypo
ccttcgtccaaggcaccggtgtgtgtgtgtc

SEQ ID NO: 27579 - DNA, 31 bp, Homo sapiens
  chr22:30091109-30091140
  hypo
cagagctgacctccaccgcccagcctgggaa

SEQ ID NO: 27580 - DNA, 31 bp, Homo sapiens
  chr22:30091182-30091213
  hypo
gccatcatccccaccccgcccagggttccgg

SEQ ID NO: 27581 - DNA, 31 bp, Homo sapiens
  chr22:30091270-30091301
  hypo
ggatcccaggccagcacgcctgccggcttct

SEQ ID NO: 27582 - DNA, 35 bp, Homo sapiens
  chr22:30158329-30158364
  hypo
cccaacccccaggccccggaacggtacgggtccat

SEQ ID NO: 27583 - DNA, 19 bp, Homo sapiens
  chr22:30250833-30250852
  hypo
ttctgaggtagactctcgc

SEQ ID NO: 27584 - DNA, 28 bp, Homo sapiens
  chr22:30379310-30379338
  hypo
ctttgttttttggagacggagtttcact

SEQ ID NO: 27585 - DNA, 28 bp, Homo sapiens
  chr22:30379457-30379485
  hypo
ccacaccctgctgcgaaggaggttattg

SEQ ID NO: 27586 - DNA, 35 bp, Homo sapiens
  chr22:30431159-30431194
  hypo
tggttgacggagcaagacaccgtctccagaaaaaa

SEQ ID NO: 27587 - DNA, 38 bp, Homo sapiens
  chr22:30624612-30624650
  hypo
tatggaattaagtcaacgaatgccgatgagatgagatg

SEQ ID NO: 27588 - DNA, 88 bp, Homo sapiens
  chr22:30624710-30624798
  hypo
gtgctgtacttcaaggcgccttactccccatgttccccggtgcctaaaattccagcattagtcactcgtttgccgtagggcactgaag

SEQ ID NO: 27589 - DNA, 87 bp, Homo sapiens
  chr22:30656575-30656662
  hypo
ccttggggctgggaggcggggccccacctgccctgctcttccttgagcgcctactgtgcaccaggcaccatgcggatgcagagacag

SEQ ID NO: 27590 - DNA, 38 bp, Homo sapiens
  chr22:30656664-30656702
  hypo
tcaagcaaagcagactcggtctccgtcctccatgctaa

SEQ ID NO: 27591 - DNA, 48 bp, Homo sapiens
  chr22:30656725-30656773
  hypo
aacaccacacagagtgcgtgctgccagaagggacggcacaaccaagtt

SEQ ID NO: 27592 - DNA, 31 bp, Homo sapiens
  chr22:30681972-30682003
  hypo
cccagccccccaacaccgggaacagccctca

SEQ ID NO: 27593 - DNA, 36 bp, Homo sapiens
  chr22:30682009-30682045
  hypo
cccaggggctgtccaccgatgcgcaccatcctccac

SEQ ID NO: 27594 - DNA, 29 bp, Homo sapiens
  chr22:30784249-30784278
  hypo
caagagtgaaactccgtctctaaataaat

SEQ ID NO: 27595 - DNA, 189 bp, Homo sapiens; identical to SEQ ID NO: 7328
  chr22:30792948-30793137
  hypo

SEQ ID NO: 27596 - DNA, 31 bp, Homo sapiens
  chr22:30934840-30934871
  hypo
catcaggattgggcagcgcagatagcacatc

SEQ ID NO: 27597 - DNA, 31 bp, Homo sapiens
  chr22:30951582-30951613
  hypo
ttgaagccgttggggtcgtagtagcgatccg

SEQ ID NO: 27598 - DNA, 26 bp, Homo sapiens
  chr22:30997773-30997799
  hypo
tttccagacacagtctcgctctgttt

SEQ ID NO: 27599 - DNA, 31 bp, Homo sapiens; identical to SEQ ID NO: 7329
  chr22:31002802-31002833
  hypo

SEQ ID NO: 27600 - DNA, 31 bp, Homo sapiens
  chr22:31049308-31049339
  hypo
tcctgctgccctatcccgactgccacaaccc

SEQ ID NO: 27601 - DNA, 51 bp, Homo sapiens
  chr22:31059625-31059676
  hypo
tacttcatgaggtaggcgaggcacagggcagctgagcggctcacaccagca

SEQ ID NO: 27602 - DNA, 31 bp, Homo sapiens
  chr22:31069874-31069905
  hypo
caggtgtgagccactgcgctgggccttggag

SEQ ID NO: 27603 - DNA, 63 bp, Homo sapiens
  chr22:31078360-31078423
  hypo
ctagcccaagacctgtcgtctcacgggtgaatgggaagggggttgtgtcggcaactgtaattg

SEQ ID NO: 27604 - DNA, 58 bp, Homo sapiens
  chr22:31078468-31078526
  hypo
gctggggagtgggcctcggaataataatctagaggtgggagttcggcttctatgactc

SEQ ID NO: 27605 - DNA, 17 bp, Homo sapiens
  chr22:31088961-31088978
  hypo
accgtgcccagctctgg

SEQ ID NO: 27606 - DNA, 15 bp, Homo sapiens
  chr22:31169317-31169332
  hypo
cgtgcctggcctctt

SEQ ID NO: 27607 - DNA, 31 bp, Homo sapiens
  chr22:31169372-31169403
  hypo
ccaggtcagcttcccacgtagtggaaagagt

SEQ ID NO: 27608 - DNA, 20 bp, Homo sapiens
  chr22:31176967-31176987
  hypo
atttttttttttgagacgga

SEQ ID NO: 27609 - DNA, 317 bp, Homo sapiens; identical to SEQ ID NO: 7332
  chr22:31198694-31199011
  hypo

SEQ ID NO: 27610 - DNA, 93 bp, Homo sapiens; identical to SEQ ID NO: 7333
  chr22:31199058-31199151
  hypo

SEQ ID NO: 27611 - DNA, 31 bp, Homo sapiens
  chr22:31220229-31220260
  hypo
aagcctggggaggaggcggctcaggaagttg

SEQ ID NO: 27612 - DNA, 31 bp, Homo sapiens
  chr22:31225040-31225071
  hypo
attgacagtgtggaggcgatggggctgggac

SEQ ID NO: 27613 - DNA, 46 bp, Homo sapiens
  chr22:31250070-31250116
  hypo
tctagggtttacagtacgcatttttaacttacggcagtctccttcc

SEQ ID NO: 27614 - DNA, 31 bp, Homo sapiens
  chr22:31260513-31260544
  hypo
gagaaaggatatggggcgttggtgggtgctg

SEQ ID NO: 27615 - DNA, 31 bp, Homo sapiens
  chr22:31260801-31260832
  hypo
gacacccatgaggggacgggtccctgctgga

SEQ ID NO: 27616 - DNA, 85 bp, Homo sapiens
  chr22:31260845-31260930
  hypo
accctggaggagctcacgggcagtgagggcaaagttagtttccccgaaacaagcaagcaagtggggtggccgcagggcctctgcc

SEQ ID NO: 27617 - DNA, 138 bp, Homo sapiens
  chr22:31264324-31264462
  hypo
gtctactgacctctaccgtgaggcccagagcaacagcttacggagccagtggcccagaccctggcccagcccgtgtggcctccagacgtctgggggccgcagttgggcttctgagtgcagacacgctgtggcctctca

SEQ ID NO: 27618 - DNA, 31 bp, Homo sapiens
  chr22:31264531-31264562
  hypo
gaagccatgctcaggccgcctggctggccac

SEQ ID NO: 27619 - DNA, 72 bp, Homo sapiens
  chr22:31266611-31266683
  hypo
gaaggtggtgaatgagcgggccaccctcttccgcatcacatccaatgctatgatcaacgtgagtacccaccc

SEQ ID NO: 27620 - DNA, 31 bp, Homo sapiens
  chr22:31266927-31266958
  hypo
tatttacttcatgcctcgataaggaaggtcg

SEQ ID NO: 27621 - DNA, 31 bp, Homo sapiens
  chr22:31271735-31271766
  hypo
agtaagtcagcagccccgtcatgaactcagg

SEQ ID NO: 27622 - DNA, 31 bp, Homo sapiens
  chr22:31276138-31276169
  hypo
agaccctgactctctgcgatctcaccgctca

SEQ ID NO: 27623 - DNA, 51 bp, Homo sapiens
  chr22:31279749-31279800
  hypo
gcacccagagggataccgtccccctgcctccgccaccgcccttacacccac

SEQ ID NO: 27624 - DNA, 35 bp, Homo sapiens
  chr22:31279915-31279950
  hypo
tgtgggtgaagcaggacggccgctgtaggactcca

SEQ ID NO: 27625 - DNA, 31 bp, Homo sapiens
  chr22:31365680-31365711
  hypo
cggcttggaggcctggcgccacccttcgggg

SEQ ID NO: 27626 - DNA, 22 bp, Homo sapiens
  chr22:31397072-31397094
  hypo
gccaccacgcatggccaagttt

SEQ ID NO: 27627 - DNA, 95 bp, Homo sapiens
  chr22:31494667-31494762
  hypo
ggaccaggccagcccacgggccggcagcctggcggcgctcgagaaacggcaggccgagaagaagaaagagctgatgaaggcgcagagtctgccca

SEQ ID NO: 27628 - DNA, 31 bp, Homo sapiens
  chr22:31494765-31494796
  hypo
cctcagcctcccaggcgcgcaaggccatgat

SEQ ID NO: 27629 - DNA, 31 bp, Homo sapiens
  chr22:31532734-31532765
  hypo
agcatgttggtaacctcgggtgggctgtgga

SEQ ID NO: 27630 - DNA, 31 bp, Homo sapiens
  chr22:31532982-31533013
  hypo
ctggtccaggtggcggcggaagctgcggcag

SEQ ID NO: 27631 - DNA, 31 bp, Homo sapiens
  chr22:31609769-31609800
  hypo
acagagtccttcaactcgaatgatttccagt

SEQ ID NO: 27632 - DNA, 45 bp, Homo sapiens
  chr22:31744072-31744117
  hypo
agaaagagaaaggggccgggcgcggtggctcacgcctgttatccc

SEQ ID NO: 27633 - DNA, 30 bp, Homo sapiens
  chr22:31942753-31942783
  hypo
tactttttcatgagacggcaagaatatgtg

SEQ ID NO: 27634 - DNA, 72 bp, Homo sapiens
  chr22:31942825-31942897
  hypo
atgattttttttttgccgtagattttactatgagcagcgattactacggaaggtcttcgaagaatggaaaga

SEQ ID NO: 27635 - DNA, 31 bp, Homo sapiens
  chr22:32001194-32001225
  hypo
tttcctccctgcttcacgcctacaaaattca

SEQ ID NO: 27636 - DNA, 45 bp, Homo sapiens
  chr22:32009373-32009418
  hypo
ggaggagaaagaaggcgcggctgcagtgggcgctccaggcctacc

SEQ ID NO: 27637 - DNA, 31 bp, Homo sapiens
  chr22:32009429-32009460
  hypo
ctccaggagggtgccacgcggctcctgcgct

SEQ ID NO: 27638 - DNA, 35 bp, Homo sapiens
  chr22:32356771-32356806
  hypo
aagagcaaaaactccgtccccgccccccccccccc

SEQ ID NO: 27639 - DNA, 31 bp, Homo sapiens
  chr22:32914021-32914052
  hypo
gcacttacttgagatgcggatggggtggtgc

SEQ ID NO: 27640 - DNA, 31 bp, Homo sapiens
  chr22:32914203-32914234
  hypo
tgctgctgtggagatccggactgggggctca

SEQ ID NO: 27641 - DNA, 31 bp, Homo sapiens
  chr22:33215184-33215215
  hypo
gcttggccttgcaggccggtgctgggtttca

SEQ ID NO: 27642 - DNA, 31 bp, Homo sapiens
  chr22:34061439-34061470
  hypo
gttcagtgatgagaatcggatttcaaatgag

SEQ ID NO: 27643 - DNA, 54 bp, Homo sapiens
  chr22:34242011-34242065
  hypo
tttctacagagttttccgctgtctgaattttcatgacagcgtctctgtttgtca

SEQ ID NO: 27644 - DNA, 31 bp, Homo sapiens
  chr22:34242132-34242163
  hypo
gatccaagttctgttgcgggaagtcagggac

SEQ ID NO: 27645 - DNA, 68 bp, Homo sapiens; identical to SEQ ID NO: 7340
  chr22:34316493-34316561
  hypo

SEQ ID NO: 27646 - DNA, 31 bp, Homo sapiens
  chr22:35730461-35730492
  hypo
ctggtcccctgcagttcgggtggctctcggg

SEQ ID NO: 27647 - DNA, 31 bp, Homo sapiens
  chr22:35742199-35742230
  hypo
cccaggaggaggagggcgggtgccagtcatg

SEQ ID NO: 27648 - DNA, 64 bp, Homo sapiens
  chr22:35742276-35742340
  hypo
ccagactcagcttctccgtccagggctcctaccgcagcatctgccaccccgtctctgggcacca

SEQ ID NO: 27649 - DNA, 31 bp, Homo sapiens
  chr22:35742355-35742386
  hypo
cttcaggcccagaagccgccttctgcaggtg

SEQ ID NO: 27650 - DNA, 31 bp, Homo sapiens; identical to SEQ ID NO: 7341
  chr22:35746850-35746881
  hypo

SEQ ID NO: 27651 - DNA, 58 bp, Homo sapiens
  chr22:35758434-35758492
  hypo
gtgggaccacaacccacgtctcctgccctgccaatttccactgcggggaacagaaggg

SEQ ID NO: 27652 - DNA, 41 bp, Homo sapiens; identical to SEQ ID NO: 7342
  chr22:35768081-35768122
  hypo

SEQ ID NO: 27653 - DNA, 69 bp, Homo sapiens; identical to SEQ ID NO: 7343
  chr22:35768165-35768234
  hypo

SEQ ID NO: 27654 - DNA, 28 bp, Homo sapiens
  chr22:35768761-35768789
  hypo
aagagcaagactccgcctcaaaaaaaaa

SEQ ID NO: 27655 - DNA, 91 bp, Homo sapiens; identical to SEQ ID NO: 7344
  chr22:35777143-35777234
  hypo

SEQ ID NO: 27656 - DNA, 31 bp, Homo sapiens
  chr22:35804287-35804318
  hypo
gacccccataaattgccgctggcaacgtctc

SEQ ID NO: 27657 - DNA, 31 bp, Homo sapiens
  chr22:35842581-35842612
  hypo
cccccagtgagcactacggcatgtggagggg

SEQ ID NO: 27658 - DNA, 31 bp, Homo sapiens
  chr22:35848323-35848354
  hypo
tgtcacaccctggaaccgtgtggtgtttctg

SEQ ID NO: 27659 - DNA, 31 bp, Homo sapiens
  chr22:35848357-35848388
  hypo
tctgcctacagtaggacgtaggctccacgcc

SEQ ID NO: 27660 - DNA, 31 bp, Homo sapiens
  chr22:35848706-35848737
  hypo
atcagtccgactcctccgctggggtggtggt

SEQ ID NO: 27661 - DNA, 31 bp, Homo sapiens
  chr22:36003113-36003144
  hypo
agccaagggccactcccggttcccagggtga

SEQ ID NO: 27662 - DNA, 58 bp, Homo sapiens; identical to SEQ ID NO: 7348
  chr22:36424336-36424394
  hypo

SEQ ID NO: 27663 - DNA, 40 bp, Homo sapiens; identical to SEQ ID NO: 7349
  chr22:36424418-36424458
  hypo

SEQ ID NO: 27664 - DNA, 52 bp, Homo sapiens; identical to SEQ ID NO: 7350
  chr22:36425194-36425246
  hypo

SEQ ID NO: 27665 - DNA, 44 bp, Homo sapiens; identical to SEQ ID NO: 7351
  chr22:36462013-36462057
  hypo

SEQ ID NO: 27666 - DNA, 67 bp, Homo sapiens; identical to SEQ ID NO: 7352
  chr22:36462100-36462167
  hypo

SEQ ID NO: 27667 - DNA, 31 bp, Homo sapiens
  chr22:36491796-36491827
  hypo
ggtggttgcagtgagccgagatcaagccact

SEQ ID NO: 27668 - DNA, 31 bp, Homo sapiens
  chr22:36588478-36588509
  hypo
agttaaagtcatcttccgatgctctttagtg

SEQ ID NO: 27669 - DNA, 55 bp, Homo sapiens
  chr22:36684291-36684346
  hypo
ccttacctgcagcttccgcagctgtttgatggcttcgtcccggttcttgttggcc

SEQ ID NO: 27670 - DNA, 31 bp, Homo sapiens
  chr22:36860908-36860939
  hypo
gctgcctgcaggtgagcgtgcctgcccagag

SEQ ID NO: 27671 - DNA, 4 bp, Homo sapiens
  chr22:36880505-36880509
  hypo
gact

SEQ ID NO: 27672 - DNA, 55 bp, Homo sapiens
  chr22:36885621-36885676
  hypo
agcttttgttttaaagcgcttgccacaaactcttaagatgcggatgggtttcccc

SEQ ID NO: 27673 - DNA, 31 bp, Homo sapiens
  chr22:36885678-36885709
  hypo
tgaagcactccacaggcgggatgcaggccca

SEQ ID NO: 27674 - DNA, 62 bp, Homo sapiens
  chr22:36885731-36885793
  hypo
agaggagcacttgagacggggcagaactgggctggcctggggctcagcgacagctccattgc

SEQ ID NO: 27675 - DNA, 51 bp, Homo sapiens; identical to SEQ ID NO: 7353
  chr22:36902361-36902412
  hypo

SEQ ID NO: 27676 - DNA, 57 bp, Homo sapiens; identical to SEQ ID NO: 7354
  chr22:36902414-36902471
  hypo

SEQ ID NO: 27677 - DNA, 36 bp, Homo sapiens
  chr22:36907686-36907722
  hypo
atgcagatgtcaatgacgcagcgtaaaatgccccag

SEQ ID NO: 27678 - DNA, 31 bp, Homo sapiens
  chr22:37121761-37121792
  hypo
gctgggcttaggatgccgacccatggtttac

SEQ ID NO: 27679 - DNA, 31 bp, Homo sapiens
  chr22:37367530-37367561
  hypo
gcaagcgtttgcacatcgttataaattatgt

SEQ ID NO: 27680 - DNA, 31 bp, Homo sapiens
  chr22:37367592-37367623
  hypo
ctctgagcaggcattccgcatgctcattaca

SEQ ID NO: 27681 - DNA, 60 bp, Homo sapiens
  chr22:37367643-37367703
  hypo
agctgcacatctgcaccgtagtgtagctccctgtccccgggtgaccgattggaactaggt

SEQ ID NO: 27682 - DNA, 112 bp, Homo sapiens; identical to SEQ ID NO: 7356
  chr22:37414959-37415071
  hypo

SEQ ID NO: 27683 - DNA, 37 bp, Homo sapiens; identical to SEQ ID NO: 7357
  chr22:37415083-37415120
  hypo

SEQ ID NO: 27684 - DNA, 37 bp, Homo sapiens; identical to SEQ ID NO: 7358
  chr22:37415245-37415282
  hypo

SEQ ID NO: 27685 - DNA, 63 bp, Homo sapiens
  chr22:37509139-37509202
  hypo
gggacactcttgtcctcgcagcaaagagacacgttcacatagatggaacggaagccttgttgc

SEQ ID NO: 27686 - DNA, 31 bp, Homo sapiens
  chr22:37509251-37509282
  hypo
aggaaaaagaagcctccgggaggcctggtga

SEQ ID NO: 27687 - DNA, 31 bp, Homo sapiens
  chr22:37902175-37902206
  hypo
ctccacaatcttgacccgctcaccttgaggc

SEQ ID NO: 27688 - DNA, 37 bp, Homo sapiens
  chr22:37902354-37902391
  hypo
gtactgcaactggatccggtcacggctctggatggcc

SEQ ID NO: 27689 - DNA, 66 bp, Homo sapiens; identical to SEQ ID NO: 7360
  chr22:37915036-37915102
  hypo

SEQ ID NO: 27690 - DNA, 42 bp, Homo sapiens; identical to SEQ ID NO: 7361
  chr22:37915114-37915156
  hypo

SEQ ID NO: 27691 - DNA, 56 bp, Homo sapiens; identical to SEQ ID NO: 7362
  chr22:37915160-37915216
  hypo

SEQ ID NO: 27692 - DNA, 84 bp, Homo sapiens; identical to SEQ ID NO: 7363
  chr22:37915222-37915306
  hypo

SEQ ID NO: 27693 - DNA, 31 bp, Homo sapiens; identical to SEQ ID NO: 7364
  chr22:37915402-37915433
  hypo

SEQ ID NO: 27694 - DNA, 107 bp, Homo sapiens; identical to SEQ ID NO: 7365
  chr22:37956435-37956542
  hypo

SEQ ID NO: 27695 - DNA, 396 bp, Homo sapiens; identical to SEQ ID NO: 7366
  chr22:37956635-37957031
  hypo

SEQ ID NO: 27696 - DNA, 9 bp, Homo sapiens
  chr22:38002843-38002852
  hypo
aaaaataaa

SEQ ID NO: 27697 - DNA, 31 bp, Homo sapiens
  chr22:38002908-38002939
  hypo
ctataagtatacactacgttacagcttttgt

SEQ ID NO: 27698 - DNA, 31 bp, Homo sapiens
  chr22:38021053-38021084
  hypo
acggtgatgccacagccggctccatccctgg

SEQ ID NO: 27699 - DNA, 1 bp, Homo sapiens
  chr22:38064609-38064610
  hypo
g

SEQ ID NO: 27700 - DNA, 31 bp, Homo sapiens
  chr22:38064659-38064690
  hypo
gtgtggtcctgggagccgttgcagccattct

SEQ ID NO: 27701 - DNA, 31 bp, Homo sapiens
  chr22:38208854-38208885
  hypo
cccacaggcatcaacacgtgtctcactcatt

SEQ ID NO: 27702 - DNA, 31 bp, Homo sapiens
  chr22:38208910-38208941
  hypo
agaagcaaaaatagcccgcttccaccagcgg

SEQ ID NO: 27703 - DNA, 57 bp, Homo sapiens
  chr22:38209274-38209331
  hypo
tcttactagagcagggcgctggtccagcccggcactgagacacgggggccccagaga

SEQ ID NO: 27704 - DNA, 31 bp, Homo sapiens
  chr22:38209351-38209382
  hypo
tctctacccagaggagcgccctggctggcag

SEQ ID NO: 27705 - DNA, 31 bp, Homo sapiens
  chr22:38209392-38209423
  hypo
tgatttgctggagtcccggtcaagggagaag

SEQ ID NO: 27706 - DNA, 31 bp, Homo sapiens
  chr22:38209433-38209464
  hypo
ttaaatgatggctctacgctcactgcctccc

SEQ ID NO: 27707 - DNA, 127 bp, Homo sapiens
  chr22:38209473-38209600
  hypo
tgctgaccccagaggacgcagtcctgtcggacgagctgaaccatgcctccatcatcgacggcatccggctgtgcaaggcccacaagtaccgctatcgccacctggacatggccgacctagaagccaa

SEQ ID NO: 27708 - DNA, 57 bp, Homo sapiens
  chr22:38209606-38209663
  hypo
ggaggcccaggtggggcgacgcctgggtccaccctcagcctccgcctggggaaggaa

SEQ ID NO: 27709 - DNA, 66 bp, Homo sapiens
  chr22:38211828-38211894
  hypo
ccaagacccagaggtgcgactcccagcagggcaggctcgggggcggagagacgtggtgagagccag

SEQ ID NO: 27710 - DNA, 31 bp, Homo sapiens
  chr22:38212284-38212315
  hypo
tgcccggctggcctctcgcatggcggatgac

SEQ ID NO: 27711 - DNA, 58 bp, Homo sapiens
  chr22:38329054-38329112
  hypo
gcagaacctggagcagcgccaggctgatgtcgagtatgagctccggtgcctcctcaat

SEQ ID NO: 27712 - DNA, 31 bp, Homo sapiens
  chr22:38424122-38424153
  hypo
gccccttttgacatcccgcagcttgttctgt

SEQ ID NO: 27713 - DNA, 31 bp, Homo sapiens
  chr22:38424178-38424209
  hypo
tgagagagagagactgcgctagagatggagg

SEQ ID NO: 27714 - DNA, 56 bp, Homo sapiens
  chr22:38424263-38424319
  hypo
ccaggattggaggctgcgtgggctgctttcctgctgcacggcgatgctttagggtg

SEQ ID NO: 27715 - DNA, 35 bp, Homo sapiens
  chr22:38486387-38486422
  hypo
ggattacaggcgtgagccaccgagcctggcctaaa

SEQ ID NO: 27716 - DNA, 41 bp, Homo sapiens
  chr22:38507181-38507222
  hypo
cgcgctgcctgtccacgcggagtccccggcctctctgggtg

SEQ ID NO: 27717 - DNA, 31 bp, Homo sapiens
  chr22:38507270-38507301
  hypo
ccctccttgggcctgccgggggtatgtgggc

SEQ ID NO: 27718 - DNA, 44 bp, Homo sapiens
  chr22:38512226-38512270
  hypo
aaatgaggcaggaggacggctgagccacccgcccatccaccttt

SEQ ID NO: 27719 - DNA, 31 bp, Homo sapiens
  chr22:38512317-38512348
  hypo
cactccaacctctgttcgggataggtgggct

SEQ ID NO: 27720 - DNA, 15 bp, Homo sapiens
  chr22:38531777-38531792
  hypo
tgggcgcggtgtctc

SEQ ID NO: 27721 - DNA, 31 bp, Homo sapiens; identical to SEQ ID NO: 7374
  chr22:38578022-38578053
  hypo

SEQ ID NO: 27722 - DNA, 50 bp, Homo sapiens; identical to SEQ ID NO: 7375
  chr22:38578102-38578152
  hypo

SEQ ID NO: 27723 - DNA, 30 bp, Homo sapiens
  chr22:38578708-38578738
  hypo
caccacgcccggctccgaaatttttaacat

SEQ ID NO: 27724 - DNA, 31 bp, Homo sapiens
  chr22:38593045-38593076
  hypo
actggtcctcagcctgcgatttggggacccc

SEQ ID NO: 27725 - DNA, 31 bp, Homo sapiens
  chr22:38595405-38595436
  hypo
agcctgtgggagggaacggaaagaagccata

SEQ ID NO: 27726 - DNA, 31 bp, Homo sapiens
  chr22:38618659-38618690
  hypo
tatgttggcactgcccgcggccaaaccccgg

SEQ ID NO: 27727 - DNA, 31 bp, Homo sapiens
  chr22:38618695-38618726
  hypo
agcagggcaaggggggcggggagagaagcca

SEQ ID NO: 27728 - DNA, 31 bp, Homo sapiens
  chr22:38723520-38723551
  hypo
cacccatcccttctcacggtggctgcctgtc

SEQ ID NO: 27729 - DNA, 31 bp, Homo sapiens
  chr22:38776947-38776978
  hypo
ttcgcaggtgcctcctcggttgctcctttaa

SEQ ID NO: 27730 - DNA, 60 bp, Homo sapiens
  chr22:38827316-38827376
  hypo
agattgggcatcccctcgccagcagtgcccactcctccccattatcgagtgcccagggtc

SEQ ID NO: 27731 - DNA, 31 bp, Homo sapiens
  chr22:38827391-38827422
  hypo
caatcctcagccccagcggcaacactcactc

SEQ ID NO: 27732 - DNA, 31 bp, Homo sapiens
  chr22:38827444-38827475
  hypo
cctccacagtgcagcccgatggggacatggt

SEQ ID NO: 27733 - DNA, 31 bp, Homo sapiens
  chr22:38864954-38864985
  hypo
aacagatccagagccacgaaaggctgccaga

SEQ ID NO: 27734 - DNA, 35 bp, Homo sapiens
  chr22:38885380-38885415
  hypo
gagaagtccccacacacgctcgctctgtgaactgg

SEQ ID NO: 27735 - DNA, 31 bp, Homo sapiens
  chr22:38894491-38894522
  hypo
ggccactaagagccaacggaaatccctggca

SEQ ID NO: 27736 - DNA, 31 bp, Homo sapiens; identical to SEQ ID NO: 7379
  chr22:38966130-38966161
  hypo

SEQ ID NO: 27737 - DNA, 31 bp, Homo sapiens
  chr22:38995554-38995585
  hypo
tctcatggccagttcacgaggctggctctag

SEQ ID NO: 27738 - DNA, 50 bp, Homo sapiens
  chr22:38995589-38995639
  hypo
ggaactaagatgagcacgattctgaccctgaggctcgcaccactggccac

SEQ ID NO: 27739 - DNA, 31 bp, Homo sapiens
  chr22:39026304-39026335
  hypo
ggagctctctgagccccgctctttgctttgt

SEQ ID NO: 27740 - DNA, 31 bp, Homo sapiens
  chr22:39105317-39105348
  hypo
tagagcacattttccccgctttttgaacttt

SEQ ID NO: 27741 - DNA, 31 bp, Homo sapiens
  chr22:39122030-39122061
  hypo
tctccaacgttacaggcgagaacctagatct

SEQ ID NO: 27742 - DNA, 31 bp, Homo sapiens
  chr22:39122076-39122107
  hypo
caacctcctctccccccgcaccagctacagg

SEQ ID NO: 27743 - DNA, 53 bp, Homo sapiens
  chr22:39122132-39122185
  hypo
ttgatgacacctactccgtcccggtaagtggctctgggcgggtagctgggtgg

SEQ ID NO: 27744 - DNA, 31 bp, Homo sapiens
  chr22:39132263-39132294
  hypo
aagcagggctagtgggcgggctccccatgca

SEQ ID NO: 27745 - DNA, 43 bp, Homo sapiens
  chr22:39175178-39175221
  hypo
ctctaccctgtcacaccgccccaccccacgtctcccacacaga

SEQ ID NO: 27746 - DNA, 31 bp, Homo sapiens
  chr22:39530872-39530903
  hypo
actccttcccatgccacggctggccatcacc

SEQ ID NO: 27747 - DNA, 52 bp, Homo sapiens
  chr22:39530912-39530964
  hypo
cccagcccagagagtgcgccccgggcaaccccagggtcggccagctcagccc

SEQ ID NO: 27748 - DNA, 40 bp, Homo sapiens
  chr22:39530973-39531013
  hypo
gccccacagagcactcgcgtcccagcgtttactcctttga

SEQ ID NO: 27749 - DNA, 40 bp, Homo sapiens
  chr22:39571320-39571360
  hypo
cactttgggctggtttcgggggttgcgagggtggcagcac

SEQ ID NO: 27750 - DNA, 48 bp, Homo sapiens; identical to SEQ ID NO: 7381
  chr22:39638592-39638640
  hypo

SEQ ID NO: 27751 - DNA, 49 bp, Homo sapiens
  chr22:39690670-39690719
  hypo
acccatgaaggctccccggaggaagcaggcctggcgctgagtcacagga

SEQ ID NO: 27752 - DNA, 31 bp, Homo sapiens
  chr22:39690774-39690805
  hypo
ttagcaagccagaatgcgcagggcatacagc

SEQ ID NO: 27753 - DNA, 70 bp, Homo sapiens
  chr22:39690811-39690881
  hypo
accaggcaagctgaggcgggggccaagtgggtagttcggggccaacccccatcagcggccaatggcctct

SEQ ID NO: 27754 - DNA, 31 bp, Homo sapiens
  chr22:39755184-39755215
  hypo
tgctgggtgtagaggtcgacagggtccttct

SEQ ID NO: 27755 - DNA, 75 bp, Homo sapiens
  chr22:39755261-39755336
  hypo
cacaccagcactgggtcgcccactccccttcatgatgagccagctcgaggccactttgcccgttcttcaaagatg

SEQ ID NO: 27756 - DNA, 31 bp, Homo sapiens
  chr22:39756396-39756427
  hypo
ccacacgcactccccacgggctctctcgccc

SEQ ID NO: 27757 - DNA, 77 bp, Homo sapiens
  chr22:39756557-39756634
  hypo
ggctgcagaatgtggacgccctcaccccgctcgccgcagaatgtggacaccctcaccccgctcgtcctctctttaat

SEQ ID NO: 27758 - DNA, 47 bp, Homo sapiens
  chr22:39773594-39773641
  hypo
cctggcagagcctgaccgcagccctggccgtgcggagattcaaggac

SEQ ID NO: 27759 - DNA, 66 bp, Homo sapiens
  chr22:39773665-39773731
  hypo
acactgttccctgcctcggcacagccgtaggcctccccggcttgcagaggccggcagccctgtatc

SEQ ID NO: 27760 - DNA, 60 bp, Homo sapiens
  chr22:39778979-39779039
  hypo
gactggcccgaggtcacggtgagtgagtggcaaagctggccctgacgcctgggtttcttg

SEQ ID NO: 27761 - DNA, 31 bp, Homo sapiens
  chr22:39779047-39779078
  hypo
tgcccagcaggtgcctcgattccctgccctt

SEQ ID NO: 27762 - DNA, 341 bp, Homo sapiens; identical to SEQ ID NO: 7385
  chr22:39853690-39854031
  hypo

SEQ ID NO: 27763 - DNA, 31 bp, Homo sapiens
  chr22:39872974-39873005
  hypo
catgttctgcagccaccgcctctacctgtct

SEQ ID NO: 27764 - DNA, 69 bp, Homo sapiens
  chr22:39877225-39877294
  hypo
gaacattcttccctggcgccctctcctgcgtggagtctgctcacgtcgcctcctcggtgagcctgccct

SEQ ID NO: 27765 - DNA, 54 bp, Homo sapiens
  chr22:39877308-39877362
  hypo
tcactggacataatgacgcactcgctcctgcccgttacccgctttgtctttctc

SEQ ID NO: 27766 - DNA, 31 bp, Homo sapiens
  chr22:39877367-39877398
  hypo
cacagcctctttgggcgcgcagttttctgag

SEQ ID NO: 27767 - DNA, 31 bp, Homo sapiens
  chr22:39877405-39877436
  hypo
gtgtgtttgtagtttacgcaggctccctacc

SEQ ID NO: 27768 - DNA, 42 bp, Homo sapiens
  chr22:39907958-39908000
  hypo
aacagggacatgaagacgggcctgagccggtccttgcagacc

SEQ ID NO: 27769 - DNA, 31 bp, Homo sapiens
  chr22:39908007-39908038
  hypo
cagactcctccaccttcgacacaggtgagaa

SEQ ID NO: 27770 - DNA, 36 bp, Homo sapiens
  chr22:39908232-39908268
  hypo
gcagatacattctgcccgccccggcccaagccagtg

SEQ ID NO: 27771 - DNA, 37 bp, Homo sapiens
  chr22:39908285-39908322
  hypo
agacttgaagaagtcacgactccgcatgtccctgcag

SEQ ID NO: 27772 - DNA, 31 bp, Homo sapiens
  chr22:39984783-39984814
  hypo
cttgggtactccccaacgttactgctcttct

SEQ ID NO: 27773 - DNA, 31 bp, Homo sapiens
  chr22:40033277-40033308
  hypo
gaccaatggggcttctcgcttcacagaggac

SEQ ID NO: 27774 - DNA, 74 bp, Homo sapiens
  chr22:40033408-40033482
  hypo
ggagggtactcttgatcgaggcaaccccactgctgcggtgtggcgtgtgggttagaaatcggagccccagcctg

SEQ ID NO: 27775 - DNA, 31 bp, Homo sapiens
  chr22:40083964-40083995
  hypo
ttgctaagaccccctccgagggcttcagggg

SEQ ID NO: 27776 - DNA, 54 bp, Homo sapiens
  chr22:40084044-40084098
  hypo
gaactcagcttgtggccgggctggtgagggtgtggggtgcgcccttcccttttg

SEQ ID NO: 27777 - DNA, 31 bp, Homo sapiens
  chr22:40084100-40084131
  hypo
ctgagggagagggggccgggaggggttgtca

SEQ ID NO: 27778 - DNA, 31 bp, Homo sapiens
  chr22:40367763-40367794
  hypo
gtttcaatgtgaggagcgaagtactgggaaa

SEQ ID NO: 27779 - DNA, 31 bp, Homo sapiens
  chr22:40607392-40607423
  hypo
tttcttttattctcatcgttcatgtgttagt

SEQ ID NO: 27780 - DNA, 31 bp, Homo sapiens
  chr22:40616086-40616117
  hypo
tccttgagaatcgctgcggtagtaggtgggg

SEQ ID NO: 27781 - DNA, 31 bp, Homo sapiens
  chr22:40912132-40912163
  hypo
gtttctgggctaggcacggtggctcatgcct

SEQ ID NO: 27782 - DNA, 58 bp, Homo sapiens
  chr22:41034464-41034522
  hypo
ggaggatgctaaggcacgtactgcggtgactgcaatgccaggccggtatcccaggtga

SEQ ID NO: 27783 - DNA, 15 bp, Homo sapiens
  chr22:41034524-41034539
  hypo
aaaacaggatgcagg

SEQ ID NO: 27784 - DNA, 26 bp, Homo sapiens
  chr22:41267748-41267774
  hypo
attactggggccaggcgcggtggctc

SEQ ID NO: 27785 - DNA, 17 bp, Homo sapiens
  chr22:41273931-41273948
  hypo
tgggtacagtggctcac

SEQ ID NO: 27786 - DNA, 31 bp, Homo sapiens
  chr22:41464151-41464182
  hypo
tgctgagaagactgagcgacggaatcacacc

SEQ ID NO: 27787 - DNA, 293 bp, Homo sapiens
  chr22:41634410-41634703
  hypo
ggcagagcctggagctcgttgtggtgtaggctgagccgtctcagggcgggcaggccagccagggcctcgggggccagcacgctgagcgcgttgtgcgacagccgcagccagcggacgcgcagtagcccctggaaggccatggcgggcaggtaaaccagggcgttgtgggccaggtttagcgtggccagcgcacccagtgccccgaacgtccccggccgcagctcctccagtgcgttcccctccagctccagccgccgcaacgagcccagcccgtccagcgcctcctggggcag

SEQ ID NO: 27788 - DNA, 37 bp, Homo sapiens
  chr22:41639287-41639324
  hypo
tttacaggtgtgagcccgcacccggcttcatctattt

SEQ ID NO: 27789 - DNA, 31 bp, Homo sapiens
  chr22:41664702-41664733
  hypo
caaccctctaggtggacgtgtgacgtggtta

SEQ ID NO: 27790 - DNA, 27 bp, Homo sapiens
  chr22:41664909-41664936
  hypo
ttagcatagtgacggggactttttaac

SEQ ID NO: 27791 - DNA, 80 bp, Homo sapiens
  chr22:41667942-41668022
  hypo
tgtgcagtgattcactcgagccactgcatctgtagcaggcgggaaggtgcatgcagcactcctaccggccaggctctccc

SEQ ID NO: 27792 - DNA, 50 bp, Homo sapiens
  chr22:41668077-41668127
  hypo
cagcctcagagctgcacgcagggcaaggccacgtacggcaaacaaggtgg

SEQ ID NO: 27793 - DNA, 31 bp, Homo sapiens
  chr22:41668137-41668168
  hypo
gcttgatcccatgtgccgaaagcaagctcag

SEQ ID NO: 27794 - DNA, 31 bp, Homo sapiens
  chr22:41676124-41676155
  hypo
ggaggaagtctataaacgttagaccttatgg

SEQ ID NO: 27795 - DNA, 31 bp, Homo sapiens
  chr22:41676163-41676194
  hypo
ggaacatgcatcagcacgctcccagctaccc

SEQ ID NO: 27796 - DNA, 31 bp, Homo sapiens
  chr22:41768560-41768591
  hypo
ctcctgacaccaggctcgtgtctacccatag

SEQ ID NO: 27797 - DNA, 46 bp, Homo sapiens
  chr22:41768603-41768649
  hypo
tgtgggtaccatgtctcgggtcgtagctcttcgtcacccagccact

SEQ ID NO: 27798 - DNA, 19 bp, Homo sapiens
  chr22:41776123-41776142
  hypo
tttttcctccttaccccgc

SEQ ID NO: 27799 - DNA, 31 bp, Homo sapiens; identical to SEQ ID NO: 7390
  chr22:42084265-42084296
  hypo

SEQ ID NO: 27800 - DNA, 31 bp, Homo sapiens; identical to SEQ ID NO: 7391
  chr22:42229857-42229888
  hypo

SEQ ID NO: 27801 - DNA, 31 bp, Homo sapiens; identical to SEQ ID NO: 7392
  chr22:42310829-42310860
  hypo

SEQ ID NO: 27802 - DNA, 64 bp, Homo sapiens; identical to SEQ ID NO: 7393
  chr22:42310874-42310938
  hypo

SEQ ID NO: 27803 - DNA, 37 bp, Homo sapiens
  chr22:42329320-42329357
  hypo
agtggggtcctcttcccgtgtgcggacagcggcaggg

SEQ ID NO: 27804 - DNA, 42 bp, Homo sapiens
  chr22:42395180-42395222
  hypo
agacgcgtgtgtccttcgaagagaggccggagctgaccggcg

SEQ ID NO: 27805 - DNA, 112 bp, Homo sapiens
  chr22:42667140-42667252
  hypo
caagagccctctgggccgggggcagcccaagacctagctggtcccgcctgggtccctggcagcccccgcccatgggttccaggtgtccgtggaggaacgacttgggtcctct

SEQ ID NO: 27806 - DNA, 40 bp, Homo sapiens
  chr22:42667255-42667295
  hypo
agcctcagtttccaccgcggaaaacgcgaggagggaggcc

SEQ ID NO: 27807 - DNA, 56 bp, Homo sapiens
  chr22:42667299-42667355
  hypo
tacctcacctgtaaaacggacgctccagctgccttctgctgcggcattaagaagct

SEQ ID NO: 27808 - DNA, 31 bp, Homo sapiens; identical to SEQ ID NO: 7398
  chr22:42670149-42670180
  hypo

SEQ ID NO: 27809 - DNA, 59 bp, Homo sapiens
  chr22:42706986-42707045
  hypo
aatacccaagaaaatacggcctggagggaggaacacttaggaaccgtatggctggccca

SEQ ID NO: 27810 - DNA, 31 bp, Homo sapiens
  chr22:42713565-42713596
  hypo
ggtggaaactgaggctcggagaggccaagtg

SEQ ID NO: 27811 - DNA, 31 bp, Homo sapiens
  chr22:42713628-42713659
  hypo
tctgctcctgcattcccgctgggggctgggg

SEQ ID NO: 27812 - DNA, 31 bp, Homo sapiens
  chr22:42733978-42734009
  hypo
ccagggaagcctttgacgggctcagatgggc

SEQ ID NO: 27813 - DNA, 31 bp, Homo sapiens
  chr22:42734071-42734102
  hypo
gtccagtgggggcatgcgtcccaggaagaaa

SEQ ID NO: 27814 - DNA, 46 bp, Homo sapiens
  chr22:42734123-42734169
  hypo
ctctgtacacaactcccgcctcggtctccacgcgtcccctgagatc

SEQ ID NO: 27815 - DNA, 59 bp, Homo sapiens
  chr22:42744708-42744767
  hypo
gcctggtgtaagggggcggtggctgccctggcaggcttccctcccgcagcctgccccat

SEQ ID NO: 27816 - DNA, 59 bp, Homo sapiens
  chr22:42744775-42744834
  hypo
ggctggacctccaggccgcagaggtggctgatctgtcacactggcggttgtgaagcagg

SEQ ID NO: 27817 - DNA, 31 bp, Homo sapiens
  chr22:42744870-42744901
  hypo
gcatttctgctttccccggttatcaaaacca

SEQ ID NO: 27818 - DNA, 29 bp, Homo sapiens
  chr22:42752216-42752245
  hypo
caagatgcaggttgagcgcagggcctcac

SEQ ID NO: 27819 - DNA, 132 bp, Homo sapiens; identical to SEQ ID NO: 7401
  chr22:42765053-42765185
  hypo

SEQ ID NO: 27820 - DNA, 61 bp, Homo sapiens; identical to SEQ ID NO: 7402
  chr22:42765320-42765381
  hypo

SEQ ID NO: 27821 - DNA, 35 bp, Homo sapiens
  chr22:42822799-42822834
  hypo
cacgacccatgactcacgaccgaagatgagcactg

SEQ ID NO: 27822 - DNA, 31 bp, Homo sapiens
  chr22:42822841-42822872
  hypo
tccctcactgtgccctcgagccctgtcccta

SEQ ID NO: 27823 - DNA, 31 bp, Homo sapiens
  chr22:42822900-42822931
  hypo
ggggtcccaggtgccacgccctgaggccatc

SEQ ID NO: 27824 - DNA, 31 bp, Homo sapiens
  chr22:42822969-42823000
  hypo
atgctgagcacccaggcgggggggctcgtgg

SEQ ID NO: 27825 - DNA, 31 bp, Homo sapiens
  chr22:42916272-42916303
  hypo
cctggagcaatacacacgggactggccatgg

SEQ ID NO: 27826 - DNA, 31 bp, Homo sapiens
  chr22:42918548-42918579
  hypo
gtcacttcactcacatcgcagcatctcagca

SEQ ID NO: 27827 - DNA, 31 bp, Homo sapiens
  chr22:42956684-42956715
  hypo
cagcttctggcacaagcgatttgtgtacttt

SEQ ID NO: 27828 - DNA, 31 bp, Homo sapiens
  chr22:42995219-42995250
  hypo
caccccagtgtctcagcgtttataaaactaa

SEQ ID NO: 27829 - DNA, 31 bp, Homo sapiens
  chr22:42995704-42995735
  hypo
atgtggtggagaaagccgcctgaggctgcaa

SEQ ID NO: 27830 - DNA, 31 bp, Homo sapiens
  chr22:43008439-43008470
  hypo
acctatgctccaggggcgttgtgtgcttcta

SEQ ID NO: 27831 - DNA, 31 bp, Homo sapiens
  chr22:43088995-43089026
  hypo
ctcttcttgttccacacgtggacagcatagg

SEQ ID NO: 27832 - DNA, 31 bp, Homo sapiens
  chr22:43096260-43096291
  hypo
ctgacacaggttcagccgacagcaggagctc

SEQ ID NO: 27833 - DNA, 31 bp, Homo sapiens
  chr22:43138071-43138102
  hypo
gatcaagagtgagccacggcacccagcctaa

SEQ ID NO: 27834 - DNA, 28 bp, Homo sapiens
  chr22:43159379-43159407
  hypo
aacacaaacgcaacgtacttcaggggtg

SEQ ID NO: 27835 - DNA, 40 bp, Homo sapiens
  chr22:43298925-43298965
  hypo
tcagttctcaatcctgcgagtcacacgagctctctccatg

SEQ ID NO: 27836 - DNA, 86 bp, Homo sapiens
  chr22:43298976-43299062
  hypo
gaatcaactcttagcacgtcatcagccagtaacttcatggccggcagaagagcaactcccggcgcttctgccgcattcctgagaga

SEQ ID NO: 27837 - DNA, 31 bp, Homo sapiens
  chr22:43351378-43351409
  hypo
ccaggcagtgatctaacggatggctggaaat

SEQ ID NO: 27838 - DNA, 31 bp, Homo sapiens
  chr22:43390395-43390426
  hypo
cacatgaatccagagccgtgtcctgcgccac

SEQ ID NO: 27839 - DNA, 90 bp, Homo sapiens
  chr22:43434408-43434498
  hypo
cactcctgtaagtcaccgggctaccgggagactgcatgggaacaaccacgctcgcgcagcctgtcccgcagccatcgctcctcccacagc

SEQ ID NO: 27840 - DNA, 35 bp, Homo sapiens
  chr22:43437049-43437084
  hypo
cattatcctcccaactcgggcggcagcaccaggac

SEQ ID NO: 27841 - DNA, 31 bp, Homo sapiens
  chr22:43517577-43517608
  hypo
ctctggctttgcggggcgtggaggtactggg

SEQ ID NO: 27842 - DNA, 31 bp, Homo sapiens
  chr22:43567693-43567724
  hypo
gcaggaactcaggaggcggctcctgggactg

SEQ ID NO: 27843 - DNA, 45 bp, Homo sapiens
  chr22:43567928-43567973
  hypo
catatgggttcttgagcggccttgtccctgcgagggaggtgccac

SEQ ID NO: 27844 - DNA, 68 bp, Homo sapiens
  chr22:43570246-43570314
  hypo
ctggggcagctcagtgcgcaggttgaaggttcggggcagccagggtgggccctcggggccacctgccc

SEQ ID NO: 27845 - DNA, 31 bp, Homo sapiens
  chr22:43581590-43581621
  hypo
ggcaggggacgtggcacggtggcgaccaccc

SEQ ID NO: 27846 - DNA, 47 bp, Homo sapiens
  chr22:43581710-43581757
  hypo
gagaacaggtctcagacgggcgagtgaccgcccgagggagggcgtgc

SEQ ID NO: 27847 - DNA, 31 bp, Homo sapiens
  chr22:43596547-43596578
  hypo
tgcgctttgctgtccacggagctcaccttgg

SEQ ID NO: 27848 - DNA, 31 bp, Homo sapiens
  chr22:43665129-43665160
  hypo
gaggttgggacagcgtcggggaagacgtgcc

SEQ ID NO: 27849 - DNA, 50 bp, Homo sapiens
  chr22:43689395-43689445
  hypo
gcgggacccagccctgcggtctggctgcagaacacgcgcctttggcccca

SEQ ID NO: 27850 - DNA, 31 bp, Homo sapiens
  chr22:43874752-43874783
  hypo
gacgtgatctagggagcgtgcgacactaccc

SEQ ID NO: 27851 - DNA, 49 bp, Homo sapiens
  chr22:44026050-44026099
  hypo
ttaaaaaattgagacccgtgctttgtccactttgcgtatacctgcaagg

SEQ ID NO: 27852 - DNA, 31 bp, Homo sapiens
  chr22:44232852-44232883
  hypo
ctttgccctccagcctcgcagagctggtcac

SEQ ID NO: 27853 - DNA, 46 bp, Homo sapiens
  chr22:44322830-44322876
  hypo
cctctcagatcttgtgcggaaggccaggagtcggaacattggcatc

SEQ ID NO: 27854 - DNA, 81 bp, Homo sapiens
  chr22:44322893-44322974
  hypo
cttaagcaagttcctccgacagggtctctgcaaatgcctcccggccaatgtccaccagctcatctccggcaaaataggcat

SEQ ID NO: 27855 - DNA, 50 bp, Homo sapiens
  chr22:44322988-44323038
  hypo
tgtctgatggggaaaacgttctggtgtctgactttcggtccaaagacgaa

SEQ ID NO: 27856 - DNA, 31 bp, Homo sapiens
  chr22:44402182-44402213
  hypo
tagtgcaggaatctgacgatacattagaaat

SEQ ID NO: 27857 - DNA, 31 bp, Homo sapiens; identical to SEQ ID NO: 7405
  chr22:44420412-44420443
  hypo

SEQ ID NO: 27858 - DNA, 31 bp, Homo sapiens
  chr22:44755575-44755606
  hypo
tgagtcccagttcagccgcttcctggtgggg

SEQ ID NO: 27859 - DNA, 19 bp, Homo sapiens
  chr22:44813100-44813119
  hypo
agagcgagattccctctca

SEQ ID NO: 27860 - DNA, 31 bp, Homo sapiens
  chr22:45069631-45069662
  hypo
gggagaagatcctgagcgtggctttggcttt

SEQ ID NO: 27861 - DNA, 50 bp, Homo sapiens
  chr22:45074548-45074598
  hypo
gctgcctcctgttcaccgcaggccaggcggacccacggccccctcagtgc

SEQ ID NO: 27862 - DNA, 31 bp, Homo sapiens
  chr22:45074794-45074825
  hypo
gacatcagggcacctgcgttaggggacagga

SEQ ID NO: 27863 - DNA, 104 bp, Homo sapiens; identical to SEQ ID NO: 7408
  chr22:45097904-45098008
  hypo

SEQ ID NO: 27864 - DNA, 345 bp, Homo sapiens; identical to SEQ ID NO: 7409
  chr22:45098036-45098381
  hypo

SEQ ID NO: 27865 - DNA, 31 bp, Homo sapiens
  chr22:45113076-45113107
  hypo
ttttttttttttgagacgtagtttcactgtt

SEQ ID NO: 27866 - DNA, 33 bp, Homo sapiens
  chr22:45113348-45113381
  hypo
ggcgtgagccaccatgcccggtatccaggagat

SEQ ID NO: 27867 - DNA, 38 bp, Homo sapiens
  chr22:45121860-45121898
  hypo
tattggtggcataacacggcctgcggacttttgtctgg

SEQ ID NO: 27868 - DNA, 41 bp, Homo sapiens
  chr22:45122234-45122275
  hypo
tgaccacctcctgtctcgtgacaacccggggttgggtcagt

SEQ ID NO: 27869 - DNA, 31 bp, Homo sapiens
  chr22:45122367-45122398
  hypo
ctggtggatggactctcgggggccctgctgg

SEQ ID NO: 27870 - DNA, 31 bp, Homo sapiens
  chr22:45123030-45123061
  hypo
acatcaggggtgggggcgggactcaaaccca

SEQ ID NO: 27871 - DNA, 98 bp, Homo sapiens
  chr22:45123131-45123229
  hypo
tgcaggttgggcttcccgtggccgagagcctcgggcagcagcagcagcgtgcgcatccttgcaggagcgagctgccctgggagcggggtcaggtgagg

SEQ ID NO: 27872 - DNA, 80 bp, Homo sapiens
  chr22:45123231-45123311
  hypo
gtccactcagttcccacggatgctgctttgctcgggctgtgctgggatcgggcctgcgctgtacccgtgtgttgagcacc

SEQ ID NO: 27873 - DNA, 44 bp, Homo sapiens
  chr22:45123856-45123900
  hypo
cgcccctcgcttgatgcggcacattctggcggtgcctgtacctc

SEQ ID NO: 27874 - DNA, 31 bp, Homo sapiens
  chr22:45123955-45123986
  hypo
cttgaaaggagctctgcgtgggacagccagg

SEQ ID NO: 27875 - DNA, 20 bp, Homo sapiens
  chr22:45128568-45128588
  hypo
cacatacttgtgcacacgca

SEQ ID NO: 27876 - DNA, 19 bp, Homo sapiens
  chr22:45128887-45128906
  hypo
cacacgtgcacatgcacat

SEQ ID NO: 27877 - DNA, 43 bp, Homo sapiens
  chr22:45175292-45175335
  hypo
tttgttcaacatattgcgagaccactcacgtcggtacgcgtgg

SEQ ID NO: 27878 - DNA, 31 bp, Homo sapiens
  chr22:45175810-45175841
  hypo
gggcttgtgtgaaacacgcctctgtgttctg

SEQ ID NO: 27879 - DNA, 31 bp, Homo sapiens
  chr22:45181175-45181206
  hypo
aagtgccacaacctggcggcttaagacaaca

SEQ ID NO: 27880 - DNA, 31 bp, Homo sapiens
  chr22:45181255-45181286
  hypo
cagagctgcactttcccgaaggctccagggg

SEQ ID NO: 27881 - DNA, 58 bp, Homo sapiens
  chr22:45181317-45181375
  hypo
ggtgtcccttggcttgcggccgcatcacactagtctgtgactccgtcctcacacaccc

SEQ ID NO: 27882 - DNA, 31 bp, Homo sapiens
  chr22:45210719-45210750
  hypo
cgcatcatggagggcccgtctccagggtgcc

SEQ ID NO: 27883 - DNA, 31 bp, Homo sapiens
  chr22:45220425-45220456
  hypo
tagtagggcttcaatacgtatttgcctgtgt

SEQ ID NO: 27884 - DNA, 31 bp, Homo sapiens
  chr22:45221873-45221904
  hypo
gggtctctggggttcccgccccagcttccat

SEQ ID NO: 27885 - DNA, 65 bp, Homo sapiens
  chr22:45242865-45242930
  hypo
agcaggtgaaggggctcgtggctgtgggagtgcgggagcgtgcggggcttcgaggaagttgggag

SEQ ID NO: 27886 - DNA, 78 bp, Homo sapiens
  chr22:45242971-45243049
  hypo
cacctccagatgcctgcgccacagtcctaggtcctggtgttccggggcacccccatcatgcaccgcaggccccccaag

SEQ ID NO: 27887 - DNA, 31 bp, Homo sapiens
  chr22:45395493-45395524
  hypo
atctgaccgtgtgccccggagtaacagtcca

SEQ ID NO: 27888 - DNA, 31 bp, Homo sapiens
  chr22:45593440-45593471
  hypo
gaggggacagcaggtgcgccagaaaggtgaa

SEQ ID NO: 27889 - DNA, 31 bp, Homo sapiens
  chr22:45593486-45593517
  hypo
agctctgggaaagctacggctccacccaaag

SEQ ID NO: 27890 - DNA, 73 bp, Homo sapiens
  chr22:45593642-45593715
  hypo
gctgcttccccacatccgccagcattacctgttaaaatccgatgcagcggcaacgtgacgtaggttaagtgtg

SEQ ID NO: 27891 - DNA, 35 bp, Homo sapiens
  chr22:45593856-45593891
  hypo
ccccacagcatgggacgcggcgggagcagcaggag

SEQ ID NO: 27892 - DNA, 31 bp, Homo sapiens
  chr22:45593921-45593952
  hypo
tctgctgaggccaggacgctccttaccaaca

SEQ ID NO: 27893 - DNA, 31 bp, Homo sapiens
  chr22:45593956-45593987
  hypo
cacaccagcacccacacgctccagagctgct

SEQ ID NO: 27894 - DNA, 31 bp, Homo sapiens
  chr22:45604144-45604175
  hypo
aacaacatatactgcccgattccaatgtatg

SEQ ID NO: 27895 - DNA, 31 bp, Homo sapiens
  chr22:45604183-45604214
  hypo
gaacaggcagaaccaccgactccacacacat

SEQ ID NO: 27896 - DNA, 72 bp, Homo sapiens
  chr22:45604237-45604309
  hypo
accgactccacatgcacgagctgtaagaacaggtagaacccgccaactccacacacacgagctgtgagaaca

SEQ ID NO: 27897 - DNA, 102 bp, Homo sapiens
  chr22:45604312-45604414
  hypo
agaacccaactccacacgcaggagctgtgagaacaggcagaaccaccgactccacacgcacgagctgtaagaacaggcagaacccaccgactccacatgcag

SEQ ID NO: 27898 - DNA, 35 bp, Homo sapiens
  chr22:45604421-45604456
  hypo
gagaacaggcagaacccgcccgggaagtttgagga

SEQ ID NO: 27899 - DNA, 30 bp, Homo sapiens
  chr22:45639340-45639370
  hypo
tggtcaggctggtctcgaactcctgacctc

SEQ ID NO: 27900 - DNA, 31 bp, Homo sapiens
  chr22:45653546-45653577
  hypo
gtttgggtcatgggggcggacaactcatgaa

SEQ ID NO: 27901 - DNA, 39 bp, Homo sapiens
  chr22:45653626-45653665
  hypo
tctggttgtttaaaagcgtgtggcatgctgggcgtggtg

SEQ ID NO: 27902 - DNA, 31 bp, Homo sapiens
  chr22:45695618-45695649
  hypo
ggcaagctttctgatacgccaagcaatgaat

SEQ ID NO: 27903 - DNA, 31 bp, Homo sapiens
  chr22:45821510-45821541
  hypo
ggcccacgcggggtgtcggcctaatccaagg

SEQ ID NO: 27904 - DNA, 31 bp, Homo sapiens
  chr22:45821689-45821720
  hypo
aagtctcccctccacccgactcctgctgccc

SEQ ID NO: 27905 - DNA, 31 bp, Homo sapiens
  chr22:45821721-45821752
  hypo
tagcatatcctcccctcgagggcccccagtg

SEQ ID NO: 27906 - DNA, 75 bp, Homo sapiens
  chr22:45821873-45821948
  hypo
aagaggacaacttggccgagatcaccaacctcctgcgtggggacctgctctccgagaacccgcagcaggcagcca

SEQ ID NO: 27907 - DNA, 31 bp, Homo sapiens
  chr22:45822397-45822428
  hypo
cctgctcagagaagggcgtggagcctggtga

SEQ ID NO: 27908 - DNA, 54 bp, Homo sapiens
  chr22:45822441-45822495
  hypo
aggagaggggcaggtacggaggcctcagaggcagacggtcgaggtcctggcagt

SEQ ID NO: 27909 - DNA, 37 bp, Homo sapiens
  chr22:45822510-45822547
  hypo
ttggcttcttctgtgacggagacggggaactctgcag

SEQ ID NO: 27910 - DNA, 73 bp, Homo sapiens
  chr22:45826805-45826878
  hypo
agacctggactgggaccggcggaggattcagggggctcgcgccaccctgctgtttgagcggcagcagtggcgg

SEQ ID NO: 27911 - DNA, 31 bp, Homo sapiens
  chr22:45882359-45882390
  hypo
agccaccgcacccagccgtttacagccatta

SEQ ID NO: 27912 - DNA, 18 bp, Homo sapiens
  chr22:45901939-45901957
  hypo
tgccggctggcagccctg

SEQ ID NO: 27913 - DNA, 31 bp, Homo sapiens
  chr22:45971082-45971113
  hypo
gcagagagccattaagcgctgattctgtgac

SEQ ID NO: 27914 - DNA, 31 bp, Homo sapiens
  chr22:45994947-45994978
  hypo
cacccactcccttacccgctaacccggatcc

SEQ ID NO: 27915 - DNA, 31 bp, Homo sapiens
  chr22:46023052-46023083
  hypo
atggaggcccaggcctcgctgcactaagaag

SEQ ID NO: 27916 - DNA, 21 bp, Homo sapiens
  chr22:46051558-46051579
  hypo
cctaggcgacacagtgagact

SEQ ID NO: 27917 - DNA, 31 bp, Homo sapiens
  chr22:46051604-46051635
  hypo
cagttactctaatcctcggtgacactcataa

SEQ ID NO: 27918 - DNA, 31 bp, Homo sapiens
  chr22:46051687-46051718
  hypo
aattaactttgcatttcggtcaaacccatat

SEQ ID NO: 27919 - DNA, 35 bp, Homo sapiens
  chr22:46153005-46153040
  hypo
gctggggctgtggaggcggacgactggggagtctg

SEQ ID NO: 27920 - DNA, 43 bp, Homo sapiens
  chr22:46312228-46312271
  hypo
agatggggatggtgtgcgcaggtccagccggcaagtggcccca

SEQ ID NO: 27921 - DNA, 43 bp, Homo sapiens; identical to SEQ ID NO: 27920
  chr22:46312299-46312342
  hypo

SEQ ID NO: 27922 - DNA, 61 bp, Homo sapiens
  chr22:46312349-46312410
  hypo
cttctttggccccagccgctctgacgagggcttccagggctgcagacgccacagggacctc

SEQ ID NO: 27923 - DNA, 31 bp, Homo sapiens
  chr22:46396013-46396044
  hypo
tgcttcccttccatggcggactggggatggc

SEQ ID NO: 27924 - DNA, 31 bp, Homo sapiens
  chr22:46399902-46399933
  hypo
agcatggaagaggctgcgaagaacagctggt

SEQ ID NO: 27925 - DNA, 31 bp, Homo sapiens; identical to SEQ ID NO: 7421
  chr22:46466169-46466200
  hypo

SEQ ID NO: 27926 - DNA, 59 bp, Homo sapiens
  chr22:46499692-46499751
  hypo
gctgttgggggggtgccgtggaaggtggagcggggagcagcctccgatccctggagcag

SEQ ID NO: 27927 - DNA, 31 bp, Homo sapiens
  chr22:46678246-46678277
  hypo
caggcagaggcagaaacgcctgcagaggcct

SEQ ID NO: 27928 - DNA, 31 bp, Homo sapiens
  chr22:46678310-46678341
  hypo
gggccctctggacagacggggctgcatcagg

SEQ ID NO: 27929 - DNA, 43 bp, Homo sapiens
  chr22:46755415-46755458
  hypo
cccctgtcacctgggccgggggagtcgacgccctgtggcttgg

SEQ ID NO: 27930 - DNA, 61 bp, Homo sapiens
  chr22:46785284-46785345
  hypo
cgtcattgccaaagagcgtgcccgtgtgctgtgtagcactgcgcagcgccctcaccagctg

SEQ ID NO: 27931 - DNA, 31 bp, Homo sapiens
  chr22:46790966-46790997
  hypo
gcattcactcacttggcgagcaagtattaag

SEQ ID NO: 27932 - DNA, 31 bp, Homo sapiens
  chr22:46791034-46791065
  hypo
cagagatagagtctggcgtttatggatgtgt

SEQ ID NO: 27933 - DNA, 31 bp, Homo sapiens
  chr22:46794794-46794825
  hypo
gcaactgtcccgcctccgtcaagggcacaac

SEQ ID NO: 27934 - DNA, 20 bp, Homo sapiens
  chr22:46797737-46797757
  hypo
ctttgggagaccaaggcggg

SEQ ID NO: 27935 - DNA, 43 bp, Homo sapiens
  chr22:46805976-46806019
  hypo
ggacgccaggccatcacggcagccggcccggtcacctggtgac

SEQ ID NO: 27936 - DNA, 36 bp, Homo sapiens
  chr22:46806030-46806066
  hypo
accctaggatcatgtgcgcctcgggttagctggctg

SEQ ID NO: 27937 - DNA, 31 bp, Homo sapiens
  chr22:46807447-46807478
  hypo
agcatgtttgggggtacggacccccagggcc

SEQ ID NO: 27938 - DNA, 31 bp, Homo sapiens
  chr22:46838111-46838142
  hypo
cccttcccctccaggacggggctctggggtg

SEQ ID NO: 27939 - DNA, 58 bp, Homo sapiens
  chr22:46838169-46838227
  hypo
ccctgcactcagattccgcctcccggcccagttccactgccctcgctggggcagcccc

SEQ ID NO: 27940 - DNA, 44 bp, Homo sapiens
  chr22:46838259-46838303
  hypo
ccatcagactgcccaacgcaggccatccccgaggggccatccca

SEQ ID NO: 27941 - DNA, 31 bp, Homo sapiens
  chr22:46857660-46857691
  hypo
cctttccagggacccgcggccacggcttctt

SEQ ID NO: 27942 - DNA, 40 bp, Homo sapiens
  chr22:46860031-46860071
  hypo
tcggtgtcgttctggacgttgaagacgaagacgtcgtcct

SEQ ID NO: 27943 - DNA, 31 bp, Homo sapiens
  chr22:46905650-46905681
  hypo
gggaggaggggtttcacgaggggatggctgt

SEQ ID NO: 27944 - DNA, 31 bp, Homo sapiens
  chr22:46905688-46905719
  hypo
aacagggtagcaggtgcggcagggcagtacc

SEQ ID NO: 27945 - DNA, 31 bp, Homo sapiens
  chr22:46930768-46930799
  hypo
cgtcggatgctgtcaccgccagcacgtactg

SEQ ID NO: 27946 - DNA, 31 bp, Homo sapiens
  chr22:46931121-46931152
  hypo
tcctcgcggtccagctcggcacacactgtga

SEQ ID NO: 27947 - DNA, 49 bp, Homo sapiens
  chr22:46931594-46931643
  hypo
gttctggccctggtcccggtccgtggcctgcactcgcagcacagccgtg

SEQ ID NO: 27948 - DNA, 162 bp, Homo sapiens
  chr22:46931878-46932040
  hypo
acgcgccccccaacacgcggtaacgcaagttggcgttgatgggcgagtcgcggtcgctggcgcggatggtcagcacctcgtagcccacctccaggttctcccgcacgcgctcgcggtactccgactgctcgaagaccgggctgtggtcgttggtgtctttga

SEQ ID NO: 27949 - DNA, 127 bp, Homo sapiens
  chr22:46932049-46932176
  hypo
tgatgtaggtggtggccgagcgcggcggcgtactgtagtccacggctttcaccctgaggacgtgcgtctccttggtctcgcggtccagtacgctgtccgtgctcacggcgcccgtggcagagtcgat

SEQ ID NO: 27950 - DNA, 82 bp, Homo sapiens
  chr22:47005072-47005154
  hypo
ccccagagacatacatcgcagaccgctgagtggcgctggttgctgtctgggccggcttggcctcaggcgatcctgttgccct

SEQ ID NO: 27951 - DNA, 59 bp, Homo sapiens
  chr22:47022882-47022941
  hypo
gtgtgggctggggtgtcgtccccgtcctctgtggccgggccaagcgtggactcaggcag

SEQ ID NO: 27952 - DNA, 31 bp, Homo sapiens
  chr22:47023160-47023191
  hypo
tgggagcgttgacatgcggatggagcagggc

SEQ ID NO: 27953 - DNA, 90 bp, Homo sapiens
  chr22:47069563-47069653
  hypo
cagctgcagacgacctcgtcacggagctacgtacccagcgcaccggccggcctgggtaaagaggaggacgccggtcgcttccacagcacc

SEQ ID NO: 27954 - DNA, 47 bp, Homo sapiens
  chr22:47075348-47075395
  hypo
ggagcgcggatcggcacgggctctgggctccccgtggagagaagctg

SEQ ID NO: 27955 - DNA, 31 bp, Homo sapiens
  chr22:47139210-47139241
  hypo
aaattgaaaataacaccgcctgaaggcatgt

SEQ ID NO: 27956 - DNA, 31 bp, Homo sapiens
  chr22:47139265-47139296
  hypo
aagagagggtgtggttcgggcacactggttc

SEQ ID NO: 27957 - DNA, 31 bp, Homo sapiens
  chr22:47172071-47172102
  hypo
tacctggggtgtggggcgtgttctgtagtca

SEQ ID NO: 27958 - DNA, 63 bp, Homo sapiens
  chr22:47172171-47172234
  hypo
gtgtttgggagcctggcgggtcgctggctacctgagaacagaggtgtgcgtggaagtagtggg

SEQ ID NO: 27959 - DNA, 31 bp, Homo sapiens
  chr22:47172249-47172280
  hypo
atggtgggatggtgtgcgtggaagcagtggg

SEQ ID NO: 27960 - DNA, 37 bp, Homo sapiens
  chr22:47172318-47172355
  hypo
ggagtgggcacagctgcggctgcgtggtgggatggga

SEQ ID NO: 27961 - DNA, 53 bp, Homo sapiens
  chr22:47197490-47197543
  hypo
ctggtgaatggtagtgcgatttggtaacatgtagaacacgcagtttcctgagg

SEQ ID NO: 27962 - DNA, 57 bp, Homo sapiens
  chr22:47327900-47327957
  hypo
cagattgattcattgtcgaggaatgccttattctgatgttacgcggtttctttcctg

SEQ ID NO: 27963 - DNA, 31 bp, Homo sapiens
  chr22:47418700-47418731
  hypo
agtatagaaacctgaacgaaatactactctg

SEQ ID NO: 27964 - DNA, 54 bp, Homo sapiens
  chr22:47441117-47441171
  hypo
gcacctggctgcacacgcggctgtgtgttcactgtccctcggactctgcgggaa

SEQ ID NO: 27965 - DNA, 31 bp, Homo sapiens
  chr22:47455003-47455034
  hypo
tgagaacatcaaggctcggccagggtaggtg

SEQ ID NO: 27966 - DNA, 59 bp, Homo sapiens
  chr22:47455055-47455114
  hypo
ctggtaagtagcaaagcgctgggggacaggccatgccgtgtgggcgcctccactgtctg

SEQ ID NO: 27967 - DNA, 63 bp, Homo sapiens
  chr22:47455155-47455218
  hypo
cacactggtgtgggtgcgcacgcgtctggtgtgggagccctttcttgacgctgtaagagagca

SEQ ID NO: 27968 - DNA, 50 bp, Homo sapiens
  chr22:47511003-47511053
  hypo
cctggcccctggatggcggcaccttctggagtgaacgttggccctgtcct

SEQ ID NO: 27969 - DNA, 31 bp, Homo sapiens
  chr22:47525963-47525994
  hypo
ccgggctccccccaagcgcagcccccttccc

SEQ ID NO: 27970 - DNA, 31 bp, Homo sapiens
  chr22:47526090-47526121
  hypo
ctacatgtctggataccgctgccttctggcc

SEQ ID NO: 27971 - DNA, 42 bp, Homo sapiens
  chr22:47540297-47540339
  hypo
cactggcgggacttcacgggtgcagcccgtgaaggtgcctgc

SEQ ID NO: 27972 - DNA, 31 bp, Homo sapiens
  chr22:47540352-47540383
  hypo
gggactgggtgcagcccgtgaaggtgcctgc

SEQ ID NO: 27973 - DNA, 31 bp, Homo sapiens
  chr22:47584841-47584872
  hypo
aggctgggaccagtgacggccagccagagac

SEQ ID NO: 27974 - DNA, 31 bp, Homo sapiens
  chr22:48025085-48025116
  hypo
ctgtgaggctgctgcacggctggctgtcccg

SEQ ID NO: 27975 - DNA, 31 bp, Homo sapiens
  chr22:49941832-49941863
  hypo
gggcactcccttctgtcggcagagtcgtgct

SEQ ID NO: 27976 - DNA, 31 bp, Homo sapiens
  chr22:49980188-49980219
  hypo
gtctgtgtgacatcagcgtgtttagtgcatg

SEQ ID NO: 27977 - DNA, 75 bp, Homo sapiens
  chr22:49980261-49980336
  hypo
gtctgtgtgacatcagcgtgcttagtgtatgacatcagcgtgtttagtgcatgacatcagcgtgcttggcacaga

SEQ ID NO: 27978 - DNA, 31 bp, Homo sapiens
  chr22:49980345-49980376
  hypo
aggtggcatgagtctgcgtgacgtcagcatg

SEQ ID NO: 27979 - DNA, 31 bp, Homo sapiens
  chr22:50119415-50119446
  hypo
aataacacctgaaaaccggaacccgggtcct

SEQ ID NO: 27980 - DNA, 53 bp, Homo sapiens; identical to SEQ ID NO: 7428
  chr22:50170509-50170562
  hypo

SEQ ID NO: 27981 - DNA, 31 bp, Homo sapiens; identical to SEQ ID NO: 7429
  chr22:50170582-50170613
  hypo

SEQ ID NO: 27982 - DNA, 65 bp, Homo sapiens
  chr22:50170704-50170769
  hypo
gcgtagttcccattctcgatgcaggagatcagctcactgcggtcctccagcgtgtgccgtcgcac

SEQ ID NO: 27983 - DNA, 31 bp, Homo sapiens
  chr22:50177268-50177299
  hypo
tctcctctgcgtccttcgtgactgtccagag

SEQ ID NO: 27984 - DNA, 31 bp, Homo sapiens
  chr22:50187008-50187039
  hypo
tctccttctagataggcggatttcttctcct

SEQ ID NO: 27985 - DNA, 37 bp, Homo sapiens
  chr22:50187089-50187126
  hypo
agacattctttggcaacgatcacggctgctacctacc

SEQ ID NO: 27986 - DNA, 41 bp, Homo sapiens
  chr22:50187130-50187171
  hypo
ctgcagaggagctggccggggaccctcggggcagacaaggc

SEQ ID NO: 27987 - DNA, 51 bp, Homo sapiens
  chr22:50191514-50191565
  hypo
gaggcctcttccaagccgatgctgtccacctcgcgccgggcctgcctcaga

SEQ ID NO: 27988 - DNA, 31 bp, Homo sapiens
  chr22:50191690-50191721
  hypo
cccttgagcttctaaccgtttcctcattgtg

SEQ ID NO: 27989 - DNA, 31 bp, Homo sapiens
  chr22:50228902-50228933
  hypo
ctgctgtctccttcctcggttatgggttgaa

SEQ ID NO: 27990 - DNA, 99 bp, Homo sapiens; identical to SEQ ID NO: 7430
  chr22:50246600-50246699
  hypo

SEQ ID NO: 27991 - DNA, 79 bp, Homo sapiens
  chr22:50305617-50305696
  hypo
cgatcagcctcggctgcgggatcaccctcggccccgggatcagcctcggccacgggatcaccctcggccccgggatcag

SEQ ID NO: 27992 - DNA, 109 bp, Homo sapiens
  chr22:50433173-50433282
  hypo
cagcactcaggtgagacgatgtccaggctccagagggtggctcagcggggaagccggagagcctacgtgacccacacgagaagtcttcaagggccgaccccatggccca

SEQ ID NO: 27993 - DNA, 31 bp, Homo sapiens
  chr22:50433332-50433363
  hypo
tggaatgtctgagaaccgcacatcccagcag

SEQ ID NO: 27994 - DNA, 90 bp, Homo sapiens
  chr22:50466961-50467051
  hypo
gtgggaatcagggaggcggcaacacctgcgtgccgtcataaagacccccaccatgccctcgtaaagacccccatcacaccgtcctgaaga

SEQ ID NO: 27995 - DNA, 8 bp, Homo sapiens
  chr22:50511908-50511916
  hypo
cagcactt

SEQ ID NO: 27996 - DNA, 18 bp, Homo sapiens
  chr22:50587384-50587402
  hypo
gcccgaccaaccccattt

SEQ ID NO: 27997 - DNA, 31 bp, Homo sapiens
  chr22:50601379-50601410
  hypo
tggcaggtgggagagacgcaagaagcaggtg

SEQ ID NO: 27998 - DNA, 31 bp, Homo sapiens
  chr22:50601431-50601462
  hypo
tgctcttgggcagagacgtggggagccagtg

SEQ ID NO: 27999 - DNA, 81 bp, Homo sapiens
  chr22:50601497-50601578
  hypo
ctcagcaatgatctggcgtgtgcccagggtggcaggagaccaggcggggtcattctataaaggactcggggcacctgtttg

SEQ ID NO: 28000 - DNA, 43 bp, Homo sapiens; identical to SEQ ID NO: 7431
  chr22:50623801-50623844
  hypo

SEQ ID NO: 28001 - DNA, 100 bp, Homo sapiens
  chr22:50626941-50627041
  hypo
cctcctggcttgtagacgggcccccgcggcgtccttacccgggggagcaagagctgcgtggcgtctcttccaggagtactaaccccgtcatgggggctat

SEQ ID NO: 28002 - DNA, 31 bp, Homo sapiens
  chr22:50627042-50627073
  hypo
cactcatgacctcatccgaacctgatcacct

SEQ ID NO: 28003 - DNA, 31 bp, Homo sapiens
  chr22:50628014-50628045
  hypo
gagatgtctgtccccccggaggggcagccag

SEQ ID NO: 28004 - DNA, 31 bp, Homo sapiens
  chr22:50695380-50695411
  hypo
cagcgtggatatactgcggggggcagaggat

SEQ ID NO: 28005 - DNA, 40 bp, Homo sapiens
  chr22:50695753-50695793
  hypo
acatccacactggcctcggtgtcctcgcagccccaccttg

SEQ ID NO: 28006 - DNA, 31 bp, Homo sapiens
  chr22:50721351-50721382
  hypo
gggaccagccccagcccgaccaggctggccc

SEQ ID NO: 28007 - DNA, 42 bp, Homo sapiens
  chr22:50721953-50721995
  hypo
cacccacccagtcacccggaaccccagcgtgggtactgaccc

SEQ ID NO: 28008 - DNA, 31 bp, Homo sapiens; identical to SEQ ID NO: 7433
  chr22:50745644-50745675
  hypo

SEQ ID NO: 28009 - DNA, 31 bp, Homo sapiens; identical to SEQ ID NO: 7434
  chr22:50745698-50745729
  hypo

SEQ ID NO: 28010 - DNA, 31 bp, Homo sapiens; identical to SEQ ID NO: 7435
  chr22:50765138-50765169
  hypo

SEQ ID NO: 28011 - DNA, 73 bp, Homo sapiens
  chr22:50874674-50874747
  hypo
ctgaccacagtagcagcgccccatcctcccggacccaggatgcacctgccggagcccccgggtgccctgcacc

SEQ ID NO: 28012 - DNA, 31 bp, Homo sapiens
  chr22:50877968-50877999
  hypo
ctccttgaggggctgacgggcactgcctggg

SEQ ID NO: 28013 - DNA, 31 bp, Homo sapiens
  chr22:50878183-50878214
  hypo
caggagtggtgagggacgtgggttccagtgt

SEQ ID NO: 28014 - DNA, 31 bp, Homo sapiens
  chr22:50882625-50882656
  hypo
aggaagacagatgccccgccagaaggagctg

SEQ ID NO: 28015 - DNA, 72 bp, Homo sapiens
  chr22:50882669-50882741
  hypo
agtgtgatgctgctgccgcccggccacggcccaccctggtcaggctgcctccttaatcgagaaaactacctg

SEQ ID NO: 28016 - DNA, 50 bp, Homo sapiens
  chr22:50884058-50884108
  hypo
caggtgccaggaacttcggtcaggcgccatctgtccggcctgagggaaga

SEQ ID NO: 28017 - DNA, 31 bp, Homo sapiens
  chr22:50884135-50884166
  hypo
gcccaccctcacatctcgcccaggtgtccca

SEQ ID NO: 28018 - DNA, 31 bp, Homo sapiens
  chr22:50884177-50884208
  hypo
ggggtgggggaggtggcgggaccatgctggg

SEQ ID NO: 28019 - DNA, 31 bp, Homo sapiens
  chr22:50884225-50884256
  hypo
ccatccttggcttcaacgtcccaccagggga

SEQ ID NO: 28020 - DNA, 31 bp, Homo sapiens
  chr22:50899211-50899242
  hypo
aggctccccttcccctcgcagccatgacaga

SEQ ID NO: 28021 - DNA, 55 bp, Homo sapiens
  chr22:50899268-50899323
  hypo
ctgtatctgtgtcacacgaaggcaagcgcttgtgtaaactcgaaatctcagtggc

SEQ ID NO: 28022 - DNA, 78 bp, Homo sapiens
  chr22:50899347-50899425
  hypo
aggcacacccaagacacggacttgagggccggcgccccaaggaaaggacaaggacccaaagaccgcacatcaaacagt

SEQ ID NO: 28023 - DNA, 31 bp, Homo sapiens
  chr22:50899453-50899484
  hypo
gccccagacatgcaagcgtaacaacagggcc

SEQ ID NO: 28024 - DNA, 121 bp, Homo sapiens
  chr22:50899510-50899631
  hypo
ttcatacaagaaagaccggtttgcaggagaaagaccagggcgggggatgagagccccacccgcgcaccgcgccccacctggaatgtgcaggagcgcagctggagcccgtcctgcaggagct

SEQ ID NO: 28025 - DNA, 75 bp, Homo sapiens
  chr22:50899633-50899708
  hypo
tccacaggggtctggacgctgatgcgcttctccttggtcagcgcagccaccgggaaggagcggaccaccacctgc

SEQ ID NO: 28026 - DNA, 81 bp, Homo sapiens; identical to SEQ ID NO: 7436
  chr22:50920027-50920108
  hypo

SEQ ID NO: 28027 - DNA, 31 bp, Homo sapiens
  chr22:50926292-50926323
  hypo
ctgccttctccttccccgccagcatgcccag

SEQ ID NO: 28028 - DNA, 31 bp, Homo sapiens
  chr22:50927879-50927910
  hypo
gtggggggaggggcaacgcagcccgtccacc

SEQ ID NO: 28029 - DNA, 72 bp, Homo sapiens
  chr22:50939072-50939144
  hypo
ccctaaaggaacacagcgctcatacgtgctatgacgtgggtgtggccttgaaaacaccgtgctgagtgaaag

SEQ ID NO: 28030 - DNA, 49 bp, Homo sapiens
  chr22:50942718-50942767
  hypo
ccttacccctgcaccccgggctccacaccccacccggtgcccagcctta

SEQ ID NO: 28031 - DNA, 205 bp, Homo sapiens; identical to SEQ ID NO: 7438
  chr22:50970576-50970781
  hypo

SEQ ID NO: 28032 - DNA, 86 bp, Homo sapiens; identical to SEQ ID NO: 7439
  chr22:50970820-50970906
  hypo

SEQ ID NO: 28033 - DNA, 75 bp, Homo sapiens; identical to SEQ ID NO: 7440
  chr22:50970908-50970983
  hypo

SEQ ID NO: 28034 - DNA, 31 bp, Homo sapiens; identical to SEQ ID NO: 7441
  chr22:50970986-50971017
  hypo

SEQ ID NO: 28035 - DNA, 31 bp, Homo sapiens
  chr22:51117959-51117990
  hypo
gattgcatgtgtgcaccgagtgtggatatac

SEQ ID NO: 28036 - DNA, 31 bp, Homo sapiens
  chr22:51149170-51149201
  hypo
ccaccttaattttcagcgacacctgaacttg

SEQ ID NO: 28037 - DNA, 31 bp, Homo sapiens
  chr22:51149219-51149250
  hypo
cttttttctgaacaaacgtttgactgagcca

SEQ ID NO: 28038 - DNA, 171 bp, Homo sapiens
  chr22:51149269-51149440
  hypo
tatctgtgtgtgtgtgcgtgtctgtgcgttggtgagcggacacgcgctgtctgcacctgcgtgcatgcggcacacatgtctgtgcgtgggtgagtggacacgtgctgtgtgcacctgcatgcgtgtggcacacgtgtgtgcatgggtgagcggatacgcactgtgtgcgcc

SEQ ID NO: 28039 - DNA, 42 bp, Homo sapiens
  chr22:51160331-51160373
  hypo
ggaggaggctgacacacgcagctccagcgacccccacctgga

SEQ ID NO: 28040 - DNA, 31 bp, Homo sapiens
  chr22:51160377-51160408
  hypo
acaagcaccatctccacggtgtccagcatgt

SEQ ID NO: 28041 - DNA, 82 bp, Homo sapiens
  chr22:51160506-51160588
  hypo
cccaagctcaagtccccgctggggaaggggccggtgaccttcagggacccgctgctgaagcagtcctcggacagcgagctca

SEQ ID NO: 28042 - DNA, 62 bp, Homo sapiens; identical to SEQ ID NO: 7444
  chrX:2846756-2846818
  hypo

SEQ ID NO: 28043 - DNA, 68 bp, Homo sapiens
  chrX:9214967-9215035
  hypo
tggtccctaattccagcgggacaaaccctaccgtactccaggctcaagtgattcgaatcaaagataaa

SEQ ID NO: 28044 - DNA, 31 bp, Homo sapiens
  chrX:9215050-9215081
  hypo
agagagcagagcatgacggcagaggtgtcag

SEQ ID NO: 28045 - DNA, 36 bp, Homo sapiens
  chrX:10085736-10085772
  hypo
cggatgtggcctcctgcggggcgagggttacctgca

SEQ ID NO: 28046 - DNA, 31 bp, Homo sapiens
  chrX:13740811-13740842
  hypo
tctatggaactttctgcgaggacagaaatgt

SEQ ID NO: 28047 - DNA, 31 bp, Homo sapiens
  chrX:20135283-20135314
  hypo
gcgtacgggcgtgcacgcgtccttacacgct

SEQ ID NO: 28048 - DNA, 54 bp, Homo sapiens
  chrX:20160917-20160971
  hypo
gccggttagctcataacgcagtcctttcactcgcccagccgggttgggagcctg

SEQ ID NO: 28049 - DNA, 31 bp, Homo sapiens
  chrX:21958399-21958430
  hypo
aataatggtaataatccgaatgggtttaact

SEQ ID NO: 28050 - DNA, 31 bp, Homo sapiens
  chrX:23825265-23825296
  hypo
gacggcagagcaagaccgtctcctcccaaaa

SEQ ID NO: 28051 - DNA, 31 bp, Homo sapiens; identical to SEQ ID NO: 7448
  chrX:27999797-27999828
  hypo

SEQ ID NO: 28052 - DNA, 31 bp, Homo sapiens; identical to SEQ ID NO: 7449
  chrX:27999837-27999868
  hypo

SEQ ID NO: 28053 - DNA, 31 bp, Homo sapiens
  chrX:44225041-44225072
  hypo
atagtgtacaagatgacgttctgcaatatgt

SEQ ID NO: 28054 - DNA, 31 bp, Homo sapiens
  chrX:44596042-44596073
  hypo
ggctctcaccaggaagcgaccacagaagtgt

SEQ ID NO: 28055 - DNA, 37 bp, Homo sapiens
  chrX:44760626-44760663
  hypo
gggacttgttttagtggcctaacgtggtttgtcacgg

SEQ ID NO: 28056 - DNA, 31 bp, Homo sapiens
  chrX:44922873-44922904
  hypo
tgtagcacatcaagaacgctgggaagtacag

SEQ ID NO: 28057 - DNA, 105 bp, Homo sapiens
  chrX:44922940-44923045
  hypo
gtggaagtaatggaaacgtgccttacctgcagcgaaacgcactcactctacctcataaccgcacaaacctgaccagcagcgcagaggagccgtggaaaaaccaac

SEQ ID NO: 28058 - DNA, 34 bp, Homo sapiens
  chrX:70442912-70442946
  hypo
gtgcaggctgggtgtccggcgctgggacacaagt

SEQ ID NO: 28059 - DNA, 31 bp, Homo sapiens
  chrX:71529505-71529536
  hypo
caagttcacatagccacgtggctgagtgttt

SEQ ID NO: 28060 - DNA, 26 bp, Homo sapiens
  chrX:100228483-100228509
  hypo
tcgggcggcggcggctgccttctatg

SEQ ID NO: 28061 - DNA, 52 bp, Homo sapiens
  chrX:107070115-107070167
  hypo
ccggcgtggctgcggacgccctgccggcggggaggcccggtgaaacttaatc

SEQ ID NO: 28062 - DNA, 59 bp, Homo sapiens
  chrX:150560242-150560301
  hypo
cctgctgggtgcaaggcgctcagtctgcagccagctctaggtcccgcccctttgcgttg

SEQ ID NO: 28063 - DNA, 41 bp, Homo sapiens
  chrY:5077816-5077857
  hypo
gtttaatttgtcaggccgggtgtggtggctcacgcttgtaa

SEQ ID NO: 28064 - DNA, 62 bp, Homo sapiens
  chrY:6790936-6790998
  hypo
cagaacgcgcgcaggccgagaccgcgcgcagccccggctcccgcccacgcttttacctccac

SEQ ID NO: 28065 - DNA, 33 bp, Homo sapiens
  chrY:7413995-7414028
  hypo
gaaataaaatgttggccgggcgcggtggctcac

SEQ ID NO: 28066 - DNA, 80 bp, Homo sapiens
  chrY:7525417-7525497
  hypo
tggcagcagggggtgcgcgacgggctacagggggcggggaacaggggatccagtccaggggcacacggggtcagccagga

SEQ ID NO: 28067 - DNA, 31 bp, Homo sapiens
  chrY:8147741-8147772
  hypo
tgcttcatcctgaggacgctgaggatgctgt

SEQ ID NO: 28068 - DNA, 91 bp, Homo sapiens
  chrY:8147819-8147910
  hypo
accagaggctagccaccgtggtagcccatccgatgacctgtgtgcactgcctttctggcgcagaggctctcgcactcgcagcaccggccgc

SEQ ID NO: 28069 - DNA, 31 bp, Homo sapiens
  chrY:10034277-10034308
  hypo
tggttggccctttgttcgtgtccccgggtgt

SEQ ID NO: 28070 - DNA, 31 bp, Homo sapiens
  chrY:14513074-14513105
  hypo
aggtctaaggggtacacgtgccggtttgtca

SEQ ID NO: 28071 - DNA, 31 bp, Homo sapiens
  chrY:14656910-14656941
  hypo
taaagcagctgaaacccggcatgatttccag

SEQ ID NO: 28072 - DNA, 31 bp, Homo sapiens
  chrY:18547039-18547070
  hypo
accactacacaatctacgcatgtaaccaaat

SEQ ID NO: 28073 - DNA, 31 bp, Homo sapiens
  chrY:21186957-21186988
  hypo
ttcctataaaactgctcgtttatttaataaa

SEQ ID NO: 28074 - DNA, 31 bp, Homo sapiens
  chrY:21208476-21208507
  hypo
ggtccatgggactgggcgccttggagcaggg

SEQ ID NO: 28075 - DNA, 89 bp, Homo sapiens
  chrY:21208604-21208693
  hypo
ggcaactaaggcctggcgataaatcaagcgcagcgcggatgggccagcgctgctggggtagccggcgcacactccgcagttgctggcct

SEQ ID NO: 28076 - DNA, 50 bp, Homo sapiens
  chrY:21208699-21208749
  hypo
taagctcctcactgcccggggctggcagggccagccgctcccagtgcggg

SEQ ID NO: 28077 - DNA, 34 bp, Homo sapiens
  chrY:21208767-21208801
  hypo
actcggaactctagctcgccggcaagcgccgcgc

SEQ ID NO: 28078 - DNA, 31 bp, Homo sapiens
  chrY:21210285-21210316
  hypo
acggcacaatttaagacgacagaagatgtga

SEQ ID NO: 28079 - DNA, 76 bp, Homo sapiens
  chrY:21226201-21226277
  hypo
aaagcagtagcaaggccgggcagaagcagccatggcggcacaatcagggactagcgtcacacgcacatcacaccct

SEQ ID NO: 28080 - DNA, 31 bp, Homo sapiens
  chrY:21226323-21226354
  hypo
cttcttctgtcccctacgctggagggcaatg

SEQ ID NO: 28081 - DNA, 31 bp, Homo sapiens
  chrY:21238027-21238058
  hypo
cttccggctgggatcccggcagctgcctgct

SEQ ID NO: 28082 - DNA, 36 bp, Homo sapiens
  chrY:22918546-22918582
  hypo
actgtcctttctcctccgatccggtattacccgtta

SEQ ID NO: 28083 - DNA, 19 bp, Homo sapiens
  AC026273.7_55222-119630:48504-48523
  hypo
cccccggccccaggacaca

SEQ ID NO: 28084 - DNA, 31 bp, Homo sapiens
  AC133920.2_61082-76843:11716-11747
  hypo
agccagcgaagatggccggccagccaaggca

SEQ ID NO: 28085 - DNA, 31 bp, Homo sapiens
  AC153808.1_1-20788:1300-1331
  hypo
gtaccagtccttggaccgcatctctccccag

SEQ ID NO: 28086 - DNA, 83 bp, Homo sapiens
  AC153808.1_1-20788:1384-1467
  hypo
tctgcttcacaatgagcgtctgatccaagaagtgagcctgtccgctgtgaccgtgagatgggcactaacgcacttcctccagc

SEQ ID NO: 28087 - DNA, 31 bp, Homo sapiens
  AC153808.1_1-20788:9793-9824
  hypo
aagagaatagagagcccggaaataaatcctc

SEQ ID NO: 28088 - DNA, 31 bp, Homo sapiens
  AC153808.1_1-20788:20323-20354
  hypo
gtgcccctcacctgcacggcaggtgtcttcc

SEQ ID NO: 28089 - DNA, 34 bp, Homo sapiens
  AC153808.1_1-20788:20357-20391
  hypo
agaccactcacctctccgccgagcatggtaactg

SEQ ID NO: 28090 - DNA, 52 bp, Homo sapiens
  AC153808.1_1-20788:20460-20512
  hypo
ttcactgagtccttaacgcctagggagggtgtcgccacgtgggcagctctga

SEQ ID NO: 28091 - DNA, 17 bp, Homo sapiens
  AC240459.2_22426-31906:3492-3509
  hypo
cagcactttgggaggcc

SEQ ID NO: 28092 - DNA, 31 bp, Homo sapiens
  AEKP01153556.1_1-5252:1025-1056
  hypo
ccataaccccgacagccgattccagggcacc

SEQ ID NO: 28093 - DNA, 75 bp, Homo sapiens
  AEKP01160137.1_1408-4031:1581-1656
  hypo
acacaccacacaggtacgcacacaccacacatacagcacacacgcacaccacacacaccacgcacacaaaacaca

SEQ ID NO: 28094 - DNA, 31 bp, Homo sapiens
  AEKP01166227.1_44013-111583:41309-41340
  hypo
aaccagggaaatacaacggaaaacaataagc

SEQ ID NO: 28095 - DNA, 31 bp, Homo sapiens
  AEKP01166227.1_44013-111583:41342-41373
  hypo
tctttccttggaagaacggctgaggggctgg

SEQ ID NO: 28096 - DNA, 31 bp, Homo sapiens
  AEKP01166227.1_44013-111583:41395-41426
  hypo
cctgtgaatggtcctccgctacaagttaccg

SEQ ID NO: 28097 - DNA, 31 bp, Homo sapiens
  AEKP01166227.1_44013-111583:53193-53224
  hypo
ggaggcccaggtgcagcgagcccctctgcac

SEQ ID NO: 28098 - DNA, 31 bp, Homo sapiens
  AEKP01166227.1_44013-111583:53245-53276
  hypo
tgtacacacatgtgtgcgtgcagatgtgtgt

SEQ ID NO: 28099 - DNA, 31 bp, Homo sapiens
  AEKP01166227.1_44013-111583:53296-53327
  hypo
gcccacagtgtggctgcggtcaaggagggag

SEQ ID NO: 28100 - DNA, 31 bp, Homo sapiens
  AEKP01166227.1_44013-111583:53329-53360
  hypo
taaagtgtaaccccaacgtgccatcttgaac

SEQ ID NO: 28101 - DNA, 31 bp, Homo sapiens
  AEKP01172922.1_98-3151:2029-2060
  hypo
tctctgtgtgtgccccgcgtgtgttgtgtgg

SEQ ID NO: 28102 - DNA, 31 bp, Homo sapiens
  AEKP01172922.1_98-3151:2079-2110
  hypo
tgtggtgtgtgtgtatcgtgagtggtgtgtg

SEQ ID NO: 28103 - DNA, 23 bp, Homo sapiens
  AEKP01172922.1_98-3151:2171-2194
  hypo
gtgtgtatcgtgagtggtgtgtg

SEQ ID NO: 28104 - DNA, 49 bp, Homo sapiens
  AEKP01184864.1_3582-5885:475-524
  hypo
aggacagtctgtctaccgtacgtatacatatacacgtaactatatgctg

SEQ ID NO: 28105 - DNA, 31 bp, Homo sapiens
  AEKP01184864.1_3582-5885:552-583
  hypo
ggctgtcccagagagccgaagtgtggaggag

SEQ ID NO: 28106 - DNA, 31 bp, Homo sapiens
  AEKP01184864.1_3582-5885:596-627
  hypo
ggtttgtgtaggtgcacgctgtgatgtttgc

SEQ ID NO: 28107 - DNA, 36 bp, Homo sapiens
  AEKP01209288.1_3835-9918:5049-5085
  hypo
gtggcggttccagtcccgtcacgtttgcaggtgagt

SEQ ID NO: 28108 - DNA, 100 bp, Homo sapiens
  AL162252.17_162460-176678:8536-8636
  hypo
caggcaggccctcaggcgggaagggatgcgtgcctgcgattccgggacataccgcgccagcccaggagaacccggaagcccgcagcgcctgtttctctgt

SEQ ID NO: 28109 - DNA, 31 bp, Homo sapiens
  CR856017.2_11887-39781:16722-16753
  hypo
tgtcagtgtgaatcatcgcagagacagcaaa

SEQ ID NO: 28110 - DNA, 113 bp, Homo sapiens
  FP565324.3_2001-29640:15326-15439
  hypo
tgtgtggccacccctccgcctgcccagggccgctgtgtggccgccgctcccgcctgcccagggccgctgtgtggctgccgctcccgcctgcccagggccgctgtgtggccgcc

SEQ ID NO: 28111 - DNA, 26 bp, Homo sapiens
  GL000204.1:44191-44217
  hypo
gcaatgcagagatgaccgtgcacatg

SEQ ID NO: 28112 - DNA, 25 bp, Homo sapiens
  GL000204.1:44336-44361
  hypo
acaccctcctcgttgttaaggacct

SEQ ID NO: 28113 - DNA, 28 bp, Homo sapiens
  GL000212.1:64461-64489
  hypo
ccaacgaggaagccgcccagggcatcgc

SEQ ID NO: 28114 - DNA, 31 bp, Homo sapiens
  GL000212.1:65199-65230
  hypo
tcgccaactgggactccgtccagggcctcgc

SEQ ID NO: 28115 - DNA, 23 bp, Homo sapiens
  GL000225.1:80182-80205
  hypo
ccagccagcggctcttataaagg

SEQ ID NO: 28116 - DNA, 31 bp, Homo sapiens
  GL339450.1:72631-72662
  hypo
gagcaggggcccaacacgcagacacccaacg

SEQ ID NO: 28117 - DNA, 63 bp, Homo sapiens
  GL383535.1:198018-198081
  hypo
agcgaggtgagggtggcgcccagctcctccacggtcagcgtgcccgcccggtatctgctcagc

SEQ ID NO: 28118 - DNA, 20 bp, Homo sapiens
  JH636052.4:2022609-2022629
  hypo
aaacaataaaacaggccggg

SEQ ID NO: 28119 - DNA, 45 bp, Homo sapiens
  JH806600.1:5064465-5064510
  hypo
cctcccctccctgccccgccccgcttctcccgcggctgctcccaa

SEQ ID NO: 28120 - DNA, 31 bp, Homo sapiens
  KB021645.1:514668-514699
  hypo
caggctgggcatgccccgagtctgagtctgg

SEQ ID NO: 28121 - DNA, 31 bp, Homo sapiens
  NW_001838014.1_249000-295694:12764-12795
  hypo
aaaccggagactcatccggggcggccctggg

SEQ ID NO: 28122 - DNA, 31 bp, Homo sapiens
  NW_001838014.1_249000-295694:13776-13807
  hypo
aaaggcctccgtttcacgctgtgtgagccag

SEQ ID NO: 28123 - DNA, 113 bp, Homo sapiens; identical to SEQ ID NO: 7464
  NW_001838402.2_289580-297926:6068-6181
  hypo

SEQ ID NO: 28124 - DNA, 31 bp, Homo sapiens
  NW_001839593.1_106153-129919:23228-23259
  hypo
tagcgcgtcagcctgccggacccttgcacgt

SEQ ID NO: 28125 - DNA, 31 bp, Homo sapiens
  NW_001840273.1_1-3087:1013-1044
  hypo
cttgattttggtttccgcgtggctttgcact

SEQ ID NO: 28126 - DNA, 31 bp, Homo sapiens
  NW_001840866.1_38854-140524:82622-82653
  hypo
accattaagaggtaaacgggtggggtccgcg

SEQ ID NO: 28127 - DNA, 31 bp, Homo sapiens
  NW_001840954.1_1-14936:6734-6765
  hypo
ccagcccaggggaggacgcatttaccggaga

SEQ ID NO: 28128 - DNA, 59 bp, Homo sapiens
  NW_001841138.1_67124-102688:28425-28484
  hypo
acacgacacaacaccccgtgacgggctcatcactcccgacccttcgagcccacctgcca

SEQ ID NO: 28129 - DNA, 79 bp, Homo sapiens
  NW_001842432.1_1-179261:39823-39902
  hypo
cacaacgcgcccagagcgtagggtcccactcacctgggagcgggggcacgtccctcccagtaggcgatggagttaagtt

SEQ ID NO: 28130 - DNA, 31 bp, Homo sapiens
  NW_001842432.1_1-179261:39971-40002
  hypo
agtaaatttgagcaaacgtttattagttttt

SEQ ID NO: 28131 - DNA, 60 bp, Homo sapiens
  AC241851.2_88-34049:15074-15134
  hyper
cggcgccgcggctttttgcggctttttgccgccgcgggtttttcctgccgcggcttcttg

SEQ ID NO: 28132 - DNA, 43 bp, Homo sapiens
  AC241851.2_88-34049:15553-15596
  hyper
gctttttgcccccgccaccgcggcttcttacccccgccaccgc

SEQ ID NO: 28133 - DNA, 260 bp, Homo sapiens
  chr1:10057121-10057381
  hyper
cgcgcggtgggcagagccaggagcaccgggctgaggcggccgggagcgcagcggcttctaggggtgagtgggacccacgcggccccacctgctcctcccgcgcgcggccccacccccctgccccgccccgcctggtttataggtcccggcccgagcctccggccgcccgccgggtttgtcccgcgatccccgaccatgcccgccgacctcagcggtacttggaccctgctcagcagcgacaacttcgagggctacatgct

SEQ ID NO: 28134 - DNA, 485 bp, Homo sapiens
  chr1:10057622-10058107
  hyper
ctgtccccacggccgtctctccacgccctctgttcccccggccgtcggtcccccacccgtccgtccctgagtgcccgcgtccagccccacgtccgtctctacccgcacgcggcacacctgcggagactgcagactcggggtccggccggggaggggggtccggccggggagggggcgcccgggaccgaagcctctgcccggccaccctccccgcagccgccttccgtgcaggccccggggccccgggcgcgctcccgcagcgaagtcccagcagcctcggcgcacccggagcgggtcggggatgcagaatcctggagccagcggacgacccttcaggtccgggcacccgcgggagtgcagagcctggttcggcccggggcgtgccccgaccgccgcctcccacgagggctgggtgcccgcggcgttcttgctcccgggggccccgcgctgtgcttcccgccctcatcgcggtgccaacggtgcgc

SEQ ID NO: 28135 - DNA, 112 bp, Homo sapiens
  chr1:110008905-110009017
  hyper
cggcgctgggcagtttgcaatccaggaaaatagggaaggataaacctgaagcctgtgcgtccaggtgcgcctggctagggtttccgacggccgcggtgtctcggtggggacc

SEQ ID NO: 28136 - DNA, 490 bp, Homo sapiens
  chr1:110009094-110009584
  hyper
cctttaaggtgcccggcgagcggagaaagggagcagagggggcgggaggagggttcgggagcgcacgccacgtgacccggcggccaagttcgctgcgagtttgacagaagtttgaatccgagtcgggggctttctgctgccggcggggcaccgcggcggccgcagcctctgagagcacgaacagcagcgcccccgcgtcccagccagccagccagccagactggactccggcccaccgacggccgctcgcgctccggccccgctcgcctgctctgccccggacctgcagctccccgctcccccgccgtgtccgccgcctcccggccagagagccaagccaccacgccgcgcccagcgctcgccgcgccagcatgtcctcgaccgagagcgccggccgcacggcggacaagtcgccgcgccagcaggtagtccctgcgcgcccaggactctcacccgcccctctccacctagatgtcgggctgcacactta

SEQ ID NO: 28137 - DNA, 156 bp, Homo sapiens
  chr1:112532952-112533108
  hyper
cggagtgtaccgacgcgggtgtgagcgcgtgtgccagcgagggtgggcacgggggtgagcgtggcaaggtgagctgggtttgggggtgggggaggagcagggagtacggcgtgagcgtaagttcgggggcgtgtgtggctggggacccacggagag

SEQ ID NO: 28138 - DNA, 700 bp, Homo sapiens
  chr1:113932580-113933280
  binary
cggaacctcggccggctcaggactccgcacgttgtcttccaatctaagcacaccggcccctctctgcgccccgcacaggctcagaggctccgcccgcgtctccgcctaactcgccggccacgcccccacttcggggagctcggtccctctcggattcgagttttcctcggctccagccgccgcgcagagggcctctcccggccctgcgacctacagccccttccactcccctgcccctcctctgcgccctccctcactctccaaacttcttttttccaccctctctaaacttcagtcattctagtgcccgcctcctccactcgcaccgaccaaccagtggtccccattctcgttggcggtccgcctcctgcccgccgggggccaatccctggcgcgagagtccagggccggggctcgttcccaagcgcccagcctgtgacggcagcgcgccgggcgccgcgcggcgggagggggcggggctctggatgagggatgggcgagggccgggggaagggaaaagggaggaggaggaggttgcggctggtttgaaagcggcagtttcctggcagcttgggcaggcgttggtctccgcgctacagctccgcagcggccacgatcgatcccgcgacgggtctacgcgcgcttctgcgcgccccccacggatttttcccgttcccggctcttcccccttcacctcccc

SEQ ID NO: 28139 - DNA, 764 bp, Homo sapiens
  chr1:113933305-113934069
  binary
cgctcgggcgctgagcccagggaccagccggcggcagtgaccccgcccgaagccccttctggaacctcctggggacaattcccttttcctttcttcagcctaacccgcggtggccctcgcggagtccggtcagccccggggagcgcagccgggaggggcgtccaaggggcgtctcgcgtctgggaacggccgggcccccagcgggctgtggtcgcggggtgggggccggagcggcgaggccccccttaccgggctgcgcgggccgcccagggcccccgggctgagacggggccggagcggcgccccggccgcccgcgcggggtctcccccatggtgcagcggggttcgggatgtcgaagacgctgaagaagaagaagcactggctcagcaaggtgcaggagtgcgccgtgtcctgggccgggcccccgggcgacttcggcgcggagatccgcggtggcgcggagcgtggcgagttcccctacctggggcggctccgcgaggagcccggcgggggcacctgctgcgtcgtctcgggcaaggcgcccagcccaggcgatgtgctgctggaggtaaacgggacgcctgtcagcgggctcaccaaccgggacaccctggctgtcatccgccacttccgcgagcccatccgtctcaagactgtgaaaccaggtacgccggccctgcgtatctgtctcggggtgttggggagaggggcttcagggtgggcgtcctgggagcggcggcacctccccaccgcgtattgtccc

SEQ ID NO: 28140 - DNA, 1132 bp, Homo sapiens
  chr1:116184428-116185560
  binary
cgaggtgagggggacgccggccgagccccgccctccgctgcaggtgggccggccccgcggcggggccggcagcgctagctgttcttggctcgcggccgcgccgggctcgcagggctgggctcgggctgcggggcggcgccgggacaggaagcggaaagcagcagtgcagcggcggcggcggcggggctctgcctctccaggagcccagcgcaggccgcagagccggggccgctgtgagccgagaccgcgggccgcggagctcgggcggccggcgcggaggtgagtcccgcgagaggccgagcgctgcgcggcggcggtccccggggcagaccgttggctgggagacgcccccacctcggaccccgcgtgcccctgcgccctcctcccgcattcgccccgccggacttcgaccccgggtggccggctcccgcctcgggccgggggctccctcccctcctccggagcgctccgggtagtgcttcctctgactccactcttctccccatgcgttgcgcccctcctggccctgccgtgcgatctccgccgcaccccactccttggggtcccggggttccctgctcacacctcggacgtccctttctccccgggctggcctttggagtgcgccccttcggtgcgcgtgccggggcggcgggcaggccggcagggagtggccgagcgttggaggcaccgggcggctgcagcagccgtgcagggcgggagccgggcgcgcaccggggttcccacccctggcggggctcgacccgggcgccgcctggcccttcgccaggaaccgggacagagctggtctgtgtgcacacctcgctcacaaaaaattgagccggccctggaggcctggggggcgagtccggttgcgcctcggagagcgcaacaggcaggtaggagtttactttcaaaaacgccggggtggagcagaggcgcctggcgggtctctgcccaaggtgtccctgctggaggaaatctcaccgcgccggggcagccttcgccaccggcaggacctcatttccttctgcagtctttgaactgccccaagcatcgcgcctagagaagtgtgaagctttataaaaatttaaacgcgtccgtggtggcggcagcagtggggcggagccgc

SEQ ID NO: 28141 - DNA, 99 bp, Homo sapiens
  chr1:116370923-116371022
  hyper
cgtggccgcgatcccacctgcggcgtccgcgtccgcccgctctccctgaggtctgcaccctgagaggaggggcgagcgagccaacttggggcagggatc

SEQ ID NO: 28142 - DNA, 204 bp, Homo sapiens
  chr1:116381944-116382148
  hyper
ttgtcccggcgggagctgcatctctgccggcaaagttcgggcgctcccggaaccggagctcggcaggctgcagctgtccccgggtggcctggccaagtccgggcatgtcggtgcttagccttcctctaacttaactgtgccctcttggaaacgccacctggccaggcttctctggggcgcctggagcactggcccggactgtgc

SEQ ID NO: 28143 - DNA, 201 bp, Homo sapiens
  chr1:117452644-117452845
  hyper
cggagccaggggcgcacgtacgccccagcgctgggatttatcggctcgcgaggagagcggagcaggcgcgcggcccaggcggaggagcgccgactctggagcagccggagctggaagaggaggaggaggagaggcggcggggaaggaggaggagggggagagtcgctcccgccgggcgagcatggggcgcctggcctcgag

SEQ ID NO: 28144 - DNA, 219 bp, Homo sapiens
  chr1:117453203-117453422
  hyper
tcaccttgaactcccggcccggaaggtgctgcggtcccggcccgggtcctcggctcgagagcggaaatgtgagcctttgatatgccccgccatagccgccgccggccgggtcgctcttcacccaacccgcgcggagttgcctttccagggaagcgagagaatcctccaacttccttccacgaaggtcacagggtggcccggagcgttacaatggaaatc

SEQ ID NO: 28145 - DNA, 508 bp, Homo sapiens
  chr1:15250613-15251121
  hyper
cgcgggactgagagccgttcccacgtgagaggctccgcggccgaattcctcgcgtgcagcaggcgcggaccgcccggcgtccggccggactgagagccctggtccggcgcgcgccgccggccgggcgggaggcgggggcgggctcggctgcgccccgatgcggcggcgacctccgggtctgtgagcccggcgcgcgccgtcggagcccctcgcgcagccgctggtagcgtccccccgggcacccggcatgcgggcggccgactcgggctcgtgggagcgcgtccgccagctcgcggcgcagggcgagccggcgccttcctgcggggcgggggccgggcccgcgcggcccccgggacccgcagcctgcgagcagtgcgtggacgcggcggggcccggcgatcggccccgcgccggggttccccgggtccgagcggatggcgactgcagccagcccggtaggtgcgcgcggggcggggcggggcgggcggcgcggacacaggcccaggag

SEQ ID NO: 28146 - DNA, 226 bp, Homo sapiens
  chr1:15251274-15251500
  hyper
tcgggggctgcaccggggggccaggaccgcgcttgccggagccaggcgatcccgcggcgcctggagacccagctccgggctggaccccgcgtctgctgggggaagcgtgggaaaggggccagccctgcgcgaagttggttcggccccctgggaccgcacctgtgagccatgtggcggcccccgcggagtgccgaggggagcccccttcaccgccgcccctccgagg

SEQ ID NO: 28147 - DNA, 80 bp, Homo sapiens
  chr1:15251580-15251660
  hyper
gagaaattgcagaggtggagacacaaacgcagtgatctaattgcgtttggttggcgaatccgccccaagtggagaacagc

SEQ ID NO: 28148 - DNA, 796 bp, Homo sapiens
  chr1:15478897-15479693
  hyper
cgtggacaccatatgtacccatgaattccgcctttggaagtgaacttgattgcagcctattttcgtctggaggcggtggattcccggtaggaggcgccttcagtcctcggctcgatcctgtgacgccagccagctgcctatcggcttctcagtgtttgaacttcaaagggctggacgctcacccaagaaggggaccccggcctgacctctctcggaattcaaaaaaatctaaggctcagagagggaatgggagctggctcttccctctgtgtttagcatccacgttttttggcggtctggctgaaaccagcccaccctagttcgggcgccagagcaacgcagttccgagggcagatctccaaggggcggaggcagagccgcgggtgagaggcttccgcgccgacttcgggtttgcactccccggagccagaactccgtggcggctccgggcctccgtggatccgagcagagactggctgcccgcctgccactcgcaggctgggaaaacgccagccggtgcctcgccgggaaagttctcggcaaagctggggatgagccctcagcagggcaggctcccggtgcagcgcgcccccatccattgcccgcgcgcaagaacccggaatgggccccacctgggccgggactcgggcgtgcgatcccgagggcgccctggggaccacgcatcgggtggggaccctggccgagggcgtgagctgactcagtttttaaaaactcgcttcctccttccctacttgtgccggtcactcacctcgctgggaaccagcccagggcagaa

SEQ ID NO: 28149 - DNA, 334 bp, Homo sapiens
  chr1:15479777-15480111
  hyper
tgcctcggcgtctgcgcctggtgtgggaggaaagcgggtctcccagctccacttaaacccctaaaacctgggacttctagcttgagacattccccgaccaccacccgtcacacacacgcgcgtgcgcgcacacacgcatgcacaccgattctctgggccctagggaggaggggggatcagggctctattttctcccgaccccctcttatccaactcggctggcaagggttggggagaacttaggcccagcccccggcacacgctcagcgcgctccagcggcatacgctggggagtgggtgcccgcctcgctcagctgcgatccctcgcctcggg

SEQ ID NO: 28150 - DNA, 368 bp, Homo sapiens
  chr1:15480226-15480594
  hyper
gcacgccggcgctcccaggccgcgcttcctgcgtccccaacccggtccctgagagggcagtgcgccctctccaccactgcgttccctcggctaagaatcccccgaaccccagccccgcgatcgcggcgcccaccgaggaggccgcccgggtggggcgcgggggtcgcgaagcccgcagtcccggaccgcccagccgagacggagccggacccgccgcctcccgggtgagtctcagccgccgcgccttgcgcccgctgcttcccgcggcgcgctgtcggttccccacagggccgtgtaagggggccgaggcccgtttgggtctcctgtccgtccgtctgtccgccgagcgcttcccgcctggggtcgac

SEQ ID NO: 28151 - DNA, 239 bp, Homo sapiens
  chr1:15573761-15574000
  hyper
ggtgccgggtgcgagctggagactccgcgggagcgcggccgggaggcttcgccccggagctggcccgacgcctcccgagctggcagggctctcggcggaggtcggagcgtgggcttcctcctcccgccaggtgagtgcggcgcgggaaggggtggcgggccgagaccggggaccggaaggggcggcccagcgaggactagccctggcaggaggaggggtggctccccggccccatcctc

SEQ ID NO: 28152 - DNA, 73 bp, Homo sapiens
  chr1:15574029-15574102
  hyper
ccccagtagctaccccaacaccagcccctcctttccagatgcaggccccaccccgcccgcggaggaagccccc

SEQ ID NO: 28153 - DNA, 147 bp, Homo sapiens
  chr1:156646447-156646594
  hyper
cgacgtctccatgtgtgccacgcgctcctggtagccgcgcactgccccgcgccacgcctcgcccagtcgccttgccagctcctctacctccggggccggcgcgggaggcccgcggggcggcgcggggcagcggggggcacaggcagc

SEQ ID NO: 28154 - DNA, 403 bp, Homo sapiens
  chr1:156646856-156647259
  hyper
acgagggcccgcagggccgccagctcgtcgtcggcatgcgcccgccaggaggtgtccgcggattgtgcccggagccccccgagctccgcgctgagcagctcattctgctcctccagcgccttgacccgggccaggtaggcctccaggcgccgattgagctcccacatctgaaacgactcctcccccatgcagccctccatcctgctcgtctgacccactgaggatggacagacgcggggcaccgggagaagggagcggctcgcagagcttttaggacggaagagaaaagagaccgacggggacaatgacggggcggggcggggtgggagtagcctgagcgactgagagtcgggagtgggagcgaggctattcatactcccgccaggcgggcgggaagaggggc

SEQ ID NO: 28155 - DNA, 903 bp, Homo sapiens
  chr1:162039148-162040051
  binary
cgaaaacaaaacaataaacacggcccctcccccctctccaaaaacaaaaacaaaaacttcaaggccatgccgccgcggccatcagtagctccggctcagaatttgaccgttaaaaaaaggaaactaggctgagctagggcacctcagatcccggcagtctggggccggggcgaagttgccggcgtcgcgcggccgggggcgcgggcagggccgggcgcgactctcccggggactttcacctgctcggctggcagcgcgggcagcgcgggggcggacccggcggcgggcggggcctctgagcccggcgggaggagccggcctgggcccgccccacaggaggagccgctcgctggcggctgatccagcgtctccgtgacaggcaccctgctccgccgccaccgccaccgccaccgccaccgtcgccttttcttcttcgtcccgggcggtgcgttccactgctctggggccggcgccgcgcccagtcccgcttcgggccgcaagccccaccgctcccctccccgggcaggggcgccgcgcagcccgctcccgccgccacctcctcccctgccgccctcctagccggcaggaattgcgcgaccacagcgccgctcgcgtcgcccgcatcagctcagcccgctgccgctcggccctcggcaccgctccgggtccggccgccgcgcggccagggctccccctgcccagcgctcccaggccccgccacgcgtcgccgcgcccagctccagtctcccctccccggggtctcgccagccccttcctgcagccgccgcctccgaaggagcgggtccgccgcgggtaaccatgcctagcaaaaccaagtacaaccttgtggacgatgggcacgacctgcggatccccttgcacaacgaggacgccttccagcac

SEQ ID NO: 28156 - DNA, 104 bp, Homo sapiens
  chr1:165204594-165204698
  binary
ccaggggactctccctttcagcacaagcgctcacacgtgcgctcgcgcggacacacacacacacactcacactcacacacaaataaatccccagcacctgcctc

SEQ ID NO: 28157 - DNA, 94 bp, Homo sapiens
  chr1:165204732-165204826
  binary
cggctccgccagcggagagcctttggatttaccgtggcattacttttaattaactctgcggcgcggcgcggggagcgcagggtgggccctaatc

SEQ ID NO: 28158 - DNA, 87 bp, Homo sapiens
  chr1:165205366-165205453
  hyper
ctggcaggggtgtaattcaaactgttgtgagcagacggcaggagggagttgccaaggtaacgggtgattcccacccgccgccctttc

SEQ ID NO: 28159 - DNA, 256 bp, Homo sapiens
  chr1:170633637-170633893
  hyper
gggacagagggcggggacccgtgtagggcagctagagcccgtccgcggccagaaagacaaggtcctgggaccaggagaggtgatggcagacttcaaaggaagggccagtcacaggggaaaccagatgagaaaagcgggtctcggccgagggcatagccaaggaggacgctggagagaggctccaaggtccggggacactccgaggccctgcggtctcaggcagggactctgtccgcggcggactctctttacttcg

SEQ ID NO: 28160 - DNA, 694 bp, Homo sapiens
  chr1:178062419-178063113
  binary
cgcggacagggcgcagggcgcagaccctgtgcatatcccagaatcccggacccactgccactccactctgggaaggaagaaggcgctcccccttgggtgactgtaagataaagcagcttcttcgatctctttgtccaataagaaagaaacgttggcccataaagaaagaaagaaacaaataaataggaaaggtgtgagaaggaagggaagctcctttcttttctgtttaaatttcccgcacccttttacctccccgccttctcaaacggtctttactttgagcagcagagacccggaccgctcaatacccggctatccctgggagggtacttggaaagtaggcgggacaggccggatgaataattcggtgtccgacttttcctgcctgcggcgcagtccctccccggcttcgttactcgagtgcacacgcggccgggctctcggccctcgattgcttcagcctatcaccctgggatgccgcctgccgctgccgccgccgccgccgccgccaccgccaccgccaccgccaccgccaccgccgtggctgccgggtttgtgggatccgccgcggagcaggagccagagctgtggccggagctgtggcctgagagtcagggggcgggcaggctcattccagaagtgggggccgaggacaggcgggctagaacccggggccaccgccccctacccctcc

SEQ ID NO: 28161 - DNA, 476 bp, Homo sapiens
  chr1:178063150-178063626
  binary
ggcggcggcgggagccggtcagagggggcggcccctggcggcgacgcccccaagcccagccctgcccggccccgctccatccccagccagagcctggtctgaccgcgagagacgccggcggggctgaagaaggcggctccgaggaggtgggagggcgagcctcccctcccgggttcttctgcgtcctctcccgggagggacccacacacacctgagcccggacccacccttggtcggggccacgctggatcctcctcccggcctgggtcccgcccgccgactgcaggtgggctgcatcgcccgagcctcgggcagtgggcgacggggaaggaggtgagaggtgtccgcgccggctgccgctcgggtccctgccctcgctgcgcgctctcctcctccccttaccgcaggcagggcgcggagccgcgcgccagcccgccccgaagccgccgcctcgtccccctcccgcctcggggcac

SEQ ID NO: 28162 - DNA, 112 bp, Homo sapiens
  chr1:178063733-178063845
  binary
cggttgtcccagtcagtggagccgtcgccggtggcatgttggatcggatccttctggagtccgtgtgccagcaacagagctgggtccgggtgtacggtaaggaccacaggcc

SEQ ID NO: 28163 - DNA, 210 bp, Homo sapiens
  chr1:19043143-19043353
  hyper
aatacctccagcctgggtcctctctccacccactccattctctcaaaccctcatttccctctttgcctgcctcctcccatagctggcctcgcctctacccattctcttccccctaatctctctcattctcctctcctctctcattccgcacccaacaaacacctcttccccctccatcttcagcccctgcgcgccccccttgcccttgcc

SEQ ID NO: 28164 - DNA, 43 bp, Homo sapiens
  chr1:201252452-201252495
  hyper
cgagcaggaaggcgcccagcgtcccacacaggggactcgcagc

SEQ ID NO: 28165 - DNA, 134 bp, Homo sapiens
  chr1:201252816-201252950
  hyper
cgcctcccgccaccatgaaccactcgccgctcaagaccgccttggcgtacgaatgcttccaggaccaggacaactccacgttggctttgccgtcggaccaaaagatgaaaacaggcacgtctggcaggcagcgc

SEQ ID NO: 28166 - DNA, 207 bp, Homo sapiens
  chr1:201368376-201368583
  hyper
cggctccctccggcgctcacctggacagcgcggaccagtccttcctgctgacagccatgctgcaggagccccgcgtggccgcccgcgccccgccggccgccgcctcacctggcgcccctccccttccagcccaggtgggatcacatggccgcttatctcacccccgcgcgccccggccgcgctccgatttgccgacccgggaatggc

SEQ ID NO: 28167 - DNA, 122 bp, Homo sapiens
  chr1:201368727-201368849
  hyper
ctgcccggggcgagggcgggagacttcctgctcagaaccagtccgaccagcttggcgctgggacgcctccccgcgctgtgccgcggcccggggtgccgaggagctgggctgggggcggggac

SEQ ID NO: 28168 - DNA, 375 bp, Homo sapiens
  chr1:204042250-204042625
  hyper
cgcagcagcgagccgcgagcgcccttctccagtcccggcttggaactgaactgtgtgagcacgggtcctggaacccgggcccagaaccggcgagcccaggtctgagcccagagctcagcggtcagcctcgtaggccctgactcggaatcgagccgaggcgctgaggttggagccggagagcgtgagagccgaagagcagggagggcgggccggctgcgcgtccgacgagtcgcagagcaggaccgcggaaggcagggagacggccgcaagcccagggcagagggcagagggcagagagcggcctggctcggcggagagggcgccgcccggccggaaccaagctcgccgcccgggacggcgggccccgtggggcgc

SEQ ID NO: 28169 - DNA, 245 bp, Homo sapiens
  chr1:204042692-204042937
  hyper
cccagcctccccaacccggcccgcccgccgcgtcgcgggggcatgtgagcgggaagcctaggctgccagccgcgaggaccgcacggaggaggagcaggagcgcggagccgcgagccccgagccccgagcccggcgcctggctgagtagtaagtgcacccctccccgccatgatcgcgccgtcgcgcccatttccccagctctctgaagtttgacacttgcgcccctacgtttctgggcacccacc

SEQ ID NO: 28170 - DNA, 75 bp, Homo sapiens
  chr1:204042966-204043041
  hyper
tgcaaagtttttcgaggagagacggaccctcacctacccccaacaacgctgggcagtggcggctcctccctggcc

SEQ ID NO: 28171 - DNA, 358 bp, Homo sapiens
  chr1:204654218-204654576
  hyper
agtctccggctcccccgcaggcgtctcggcggaaggcagcggccggccctcctctggcccccacccgggtcaggcggagctgcggtgccggggcaggagccaggagccctgaggcggctgctccggccgctcccgccgcgtacgcctcggccacgccagcgacctcggtgtccacgattccccggcggcggcggcgctgcccaggtcagccccgaagctgcacactcaccccgtgggcgccgggcaccgtctgccgtctgctgcccgcgcggccgcgctccgctcgccttccgcccggggccgggctggggacgctggtccgcgccctcccgccgcgcgcgccgtctgcacaggccgg

SEQ ID NO: 28172 - DNA, 73 bp, Homo sapiens
  chr1:204654769-204654842
  hyper
caggccctcgcggcgcccggcaccccctccacgcgcgcccctcttcccggcttcgcgctcgccctcctcactc

SEQ ID NO: 28173 - DNA, 259 bp, Homo sapiens
  chr1:20810336-20810595
  hyper
cgcggtgaaacagctccatcctccgtccctgccaggggtcccttccctgctttcctctgaaccacccaccaccctctatcctccagcctgcgtcccagctccattctgagaaaaggaaacagagggcgccaacccagccgctcctgctgcagccagggcgcgcactggcccgcgtcctccccgcaccaggcgcactaatttagacagaaatgtctggagctgggataggagagggagccaaagtctttgggtctcggga

SEQ ID NO: 28174 - DNA, 260 bp, Homo sapiens
  chr1:20810930-20811190
  hyper
gtctctgtctctccctgtctaaggtgtcggtcgcccttattgtttcggcggcttctgcgtcctccccaaacgcgcgtcctcggctctgtctctcccgcttcagctcccctctcgggagctttgtctcggtctctgccaccctcggtctcccgcgtaccccctcccctccatccctgcgtctcagtctctctctgcagccgtcggtccccctcattgtccccgcgtctctggagctcctctcggagcctctctgcgtctcc

SEQ ID NO: 28175 - DNA, 68 bp, Homo sapiens
  chr1:20811219-20811287
  hyper
cggatcgcccaggcctggcaaaccccctcccaagccaagtaacaatgaaaagcccgtgcgacccgaac

SEQ ID NO: 28176 - DNA, 234 bp, Homo sapiens
  chr1:214724215-214724449
  hyper
cgttcccaaaacgcagaagggaatggagagaggggaccagggtgtgggtttaaccacaaactccccagactgcgctcaccttccagctcgctcccgggaccagctttgcgcctcaccgcgggcagctcccaccgcgagataacacccctgcggcccggccaccccgcgccccaggctgccctgccaggcgtcccggggcgccaatcgcaagttggcgttgccagcgtctgccca

SEQ ID NO: 28177 - DNA, 45 bp, Homo sapiens
  chr1:214724487-214724532
  hyper
caacctcgggcccaactcccggcttggacggggcttacctgctta

SEQ ID NO: 28178 - DNA, 183 bp, Homo sapiens
  chr1:214724561-214724744
  hyper
cgcggaaaggctgtccttcgcggcggcggagccgattccccacggaattgattccagtgactggcggaggaggggcgaagggaaggagccgcaggaggcgaaaggggagggaggtttccgccgcgatcccggcgcgagagtccgagcagaggcgcaccgggggagaaaaggagaaaaacctaa

SEQ ID NO: 28179 - DNA, 428 bp, Homo sapiens
  chr1:214724786-214725214
  hyper
agctgggaggggaaggagcgccagtggccacttgatgtctgtctagggctccccgaggacctgagccaggagagcaggcggctgagcccggagaagcacagcaacctgcccccgagtctgcgcccgctgcgctcactccgccgagaaaaagttggaaagaactttgaggggccgggagagccagagcggcaggaaatgcgagcggccgggagaggagggaggaaggggccgtgcgagtgggaggggacggagcaggcgccggcggccacggctcccccaccccagagccgggctccgcggccctgggggccgggaggcggagggagcgctgggcgcgcggccgggggcggggaggaatgcggcccgggagggcgcgcgccgggggcgccgcgggcgcgcgctgaaacgtggagccccagctcccgagc

SEQ ID NO: 28180 - DNA, 239 bp, Homo sapiens
  chr1:214725561-214725800
  hyper
atagtccaccttatattggggaaccctccaagcaggacgtttcatgcagccaccccacaggggaaaacagaccaggagaaagtaaggtggcctcaccaagtaggcaatctcagagatctctccctagaatctctgggtactggacccggtgtcttagccttctctccctgccccctcccgccccgtaggaatgataaaaagcagcctgtgtgctgagagttggaaaatgtcgttttccc

SEQ ID NO: 28181 - DNA, 592 bp, Homo sapiens
  chr1:216774207-216774799
  binary
cgccgcgctctggttggacgcaggctgcatcctgtttcccggacacatttattcagcccaatctttcctgtctgaacacagactgttgatgataaaatagcatctcaaattatgagggagaaagagctgcttcggcgttcctccccggttctctgcctggattgggctcccgtgggttgctgaggccctcgcggaggcctaggaagcccggcagcgcgggcggcagcagcgggttggggagcaaggccggcttggaacgcgggctcctgcccactgccacccgcaggctgccccgggctcccgggcgggcgctcggccaggggctctgctcgctccatggacagctgggtggaaaggacgccccgtgaaggacacccggccgtcggaccgcgcccacccctgggcctcccaggggctccctccgcagactcccagggacttcctgggagccaccgcggagggcgctgcgcgcgtccggagccgacgccgggcttcaaacagaaaccaaagcccgctccaacgccgcgaaggaggggggctccaagcatcctagaaaagaaagctggagggagcgcatcagagacacaagtgc

SEQ ID NO: 28182 - DNA, 134 bp, Homo sapiens
  chr1:220863507-220863641
  hyper
cgcgccgtagtctgcacagtttggccggcaggtgggatgaagggcggggctggcggagcgcgcccgccgcctggtaggccagttcggagcggagccaacgctatcccgggccccacggccagggggcgctgcgg

SEQ ID NO: 28183 - DNA, 199 bp, Homo sapiens
  chr1:220921368-220921567
  binary
cgacctgccagaaaaagtcgttcccaaatgtttgtaaatcctccgttgggcaacccgccttcacgttctgcggtgatcttgtcgagcgactaagcgtgcagtattagcagagaagggggtggcagagtgctggcgctgaaggtcatgttgcatgggtaactgtcgtgttgtaggggcggggaagagggaggagacactg

SEQ ID NO: 28184 - DNA, 115 bp, Homo sapiens
  chr1:220922060-220922175
  hyper
acccggtgaaatcctgcaaaggggtgccggtgagcgaggctgagtgcacggccatggggctgcgcagcggcaacctgcgggacaggtacagcacagcgcgggcgcggggcagcgc

SEQ ID NO: 28185 - DNA, 166 bp, Homo sapiens
  chr1:225117651-225117817
  binary
ctccccacccagctgctgtgggagcgcctccgagtccccgcgcggaaccctcaccaggcagatgctggcgcatccaccaggcgccggcgccgccacgccggtagccccgaccgcaggagctctcaacgcgaggttcttcttagttgctctccctcaggcaggccgc

SEQ ID NO: 28186 - DNA, 261 bp, Homo sapiens
  chr1:227505256-227505517
  hyper
cgtgcaacgtaatcctgaaacgaatccggttgcatcattaatgaataaagtccgatttgcatcagcaattcacttcccgggaagaagaaaaacagaaaagggaggaaaaaaacagaatgcatagaagggggagggaaaaccaaaaatgttgctgcaaatcctcccaaccaccacttggataatgcatcagcggcaatttctccagcgggaaagggagggggcgaggtccctgaagcagcccctcggctcggagcacgccaa

SEQ ID NO: 28187 - DNA, 154 bp, Homo sapiens
  chr1:227505859-227506013
  hyper
ggtgcttctctgaattcaaaggacacaagcagcagcagctgcggcggcggcgcgggcggctctggcagctacttctcccccttcttcacacccctgggctaagggcatctttccacagcgaggagggaggcggcccggcgcaggaggaggggtc

SEQ ID NO: 28188 - DNA, 212 bp, Homo sapiens
  chr1:227506042-227506254
  hyper
cggcagcccggctcccaaccactcccttcctctcccttccagccctcccccgccttccctctcctctcgcgctcgcgccctgggctcagcgaggctcctccagtcccgccgcacagaggcggaggcttgcggacgagtctggatccaatatggcggcctggccccccggccccggcacacgcgcgcgcacacgccctccactccccgccccc

SEQ ID NO: 28189 - DNA, 254 bp, Homo sapiens
  chr1:228646941-228647195
  binary
ttggcgtgcgccgtgcaggtgaggagtgcgggtcacctccccccaaaagaccctgtgccaacctccccaaccctacccgccccccatgggcgaggccagacgtggcgcaagaccacgggctctgaggccatgggtgttgtcactttcccctggcggtggtgcctggctctgcatttgcttaagacttttccatccctgcctggaccagacagacatgtttagatttaagcaatgaacattccgggaggatattt

SEQ ID NO: 28190 - DNA, 117 bp, Homo sapiens
  chr1:228647317-228647434
  binary
ttatgggagtgggggtgggggaaggggttaatttaggaggaaaagaattccctttttctgagcaaatgtagctgcctccctctttagccacattattttctgcgaggcgttagcaac

SEQ ID NO: 28191 - DNA, 98 bp, Homo sapiens
  chr1:228870708-228870806
  hyper
cgatcagctgcagttagacttaaggaaaaaagctgtctgttaattcaatctcattcgcaggacaggcctccaggacacttcatttttccccctgggtg

SEQ ID NO: 28192 - DNA, 329 bp, Homo sapiens
  chr1:228870899-228871228
  binary
cagtcgcgcggtggtcaccctcttgggagctggggaggaggctgcggaggctggcccggctccttcgggcgtcgcttcccggaccgggtgcgcggggtcccccggaacgtgtgttccaggtcctcccgcgccagtgttcgcagtccccgcctggtcgcggcggcgcctcgggcgcgggtgcaggcgcgcggcgcgcaggcggggggcgctgtggtcttggcgcggggaccgagccgctcggccagacccgcctcttttccctccccgccagcccgcccgcctgcccgccccccacgcgtcgtgtcgccgggaagccgggcggagacaga

SEQ ID NO: 28193 - DNA, 270 bp, Homo sapiens
  chr1:228871596-228871866
  hyper
ggggggccgggggcgtgcggggggtgccgaggggcgcggcgtcaagtgcgtgctggtcggcgacggcgcggtgggcaagacgagcctggtggtgagctacaccaccaacggctaccccaccgagtacatccctactgccttcgacaacttctccggtgagctggccggggggccggggccgggggcgcgtggccgcggtccacccaggggaaggaaggtggcgcgagggtcgcgaggttcccaagggggctgcagggccccgggcgcggc

SEQ ID NO: 28194 - DNA, 252 bp, Homo sapiens
  chr1:228872003-228872255
  hyper
tgccaaaaaaaaaaaaaaaaaaaatctcacaatttaagcaacagataagtaggagtgaaacaggttgagttcagggtgcccggtcagtttgttgcatagagcaaagtttcctgagggcgacgtcgctggcgccgctgcagagtttcaatcagaaggtgacgcgcaggtgcctttacctgagcgtcgctcctttgcttttaggcggctcagctcacaaggggcgtctccgctttaaagagccgcggagacgcc

SEQ ID NO: 28195 - DNA, 618 bp, Homo sapiens
  chr1:230561973-230562591
  hyper
ccgccgccaccgccgccaccaccgccaccaccgccgccgctgcgtctcctcggcgcccgccgcctccctgcccgccctctccacggcctccggcgctcggctgccgaccttcccgggcgcgagccgccagaggcgggccctgccgcccctcacctcccgcccgccggccaatggggagcccggcccggacagccgcgggggagctgggcgggcccggcgcggggaacgcccccaccctcctccgcggggcggggcggggcgcgcggccggggctggcggttagggggagggccgccggcggcagtgccggtctcctcctacagggacgcgcagcccgggaccgccacgcgcagcgcgggagggggagggcgggaccggggaacaggaggggagggggacccgggtgcttccagcggtccgggcccgcggacggagtgcgggccgatcccgctcactgtccccttccgcagtccgcgtgcagctccagggagctgtccgccccggtggttctgaaccaggcgccgccgaaacgctccaggtaggcggcgggcccgaggtcaccacacccgcggcggcggctgctgccgaggtttcctgggggtcactgccagctgcgcc

SEQ ID NO: 28196 - DNA, 156 bp, Homo sapiens
  chr1:232765040-232765196
  hyper
cgggaagacccggagaggcccaggagctggcaaagtgggaagaaaggtcgcggtgagtgagaagagcgctcgccggaggctcccggtcttacaaagagggatccgtcccggtgagggcgcgcgctccgggcgcaccccctctagaaggggaattag

SEQ ID NO: 28197 - DNA, 163 bp, Homo sapiens
  chr1:232765375-232765538
  hyper
aacaggcggcggcggctcctcttccagccggggatcgggagcgcgggcgcatctgcgtctacaagccggaccctgcgccgcgaccctcgcacccccgcgcccctcgcacccctcgccgccgtcagccccccaaagcgccccgaagggcatccccttccccttc

SEQ ID NO: 28198 - DNA, 411 bp, Homo sapiens
  chr1:232765595-232766006
  binary
cggattccccgacacgaaccttcgcaacgccgtccgccggaacctgctacagcctgtgcgcgccgggcggcgcgtacccgggctgccgcctcgccgcccgccgctgcccggggctgcccatcggcccggactctccccgcgccgggctccggcggaggcggcccggacccgctggctgcggctggagctctcggcctgcgctcgggcggccggcgggggcgcggtgctcctcctccgtcctcctcctcctctcgctccgccagctcctcccgggctcccagtctgccgcgccggctcccgatgccaccgcccgcccgcccagcggcaccgccccccgcccgctctgcgggctcccattggtcgctgcctgcaggccccctcggccccgccccacgattgggcgcggacgcc

SEQ ID NO: 28199 - DNA, 323 bp, Homo sapiens
  chr1:233749409-233749732
  hyper
cgcgcgcgaacacacacacacacacacgcacacgccgcgcgcggtcagctagagtttggctactggacccaggaagggagggagcgggaggagctggtggctgtcgggtcggggtctgggcgccaccgagcgcccgccccacctctggagtgcgcagaaggcggtgcgtcccgggccccggcagcccagcccaggcgctctggccaagtttgcgcgcggtctccgctgactctcgggttacctgagccggcaaccacgtcagcgccacatcatctgggctttttatattgcaaggaaacaggaaaagaaggaagaaaaacatc

SEQ ID NO: 28200 - DNA, 315 bp, Homo sapiens
  chr1:233749768-233750083
  binary
cggaggagcggggcgggcgggcgcgcgggggagcgggcggcgggcgggagccaggcccgggcgggggcgggggcggcggggccagaagaggcggcgggccgcgctccggccggtctgcggcgttggccttggcggcggcggtggagaagatgctgcagtccctggccggcagctcgtgcgtgcgcctggtggagcggcaccgctcggcctggtgcttcggcttcctggtgctgggctacttgctctacctggtcttcggcgcagtggtcttctcctcggtggagctgccctatgaggacctgctgcgccaggagc

SEQ ID NO: 28201 - DNA, 181 bp, Homo sapiens
  chr1:233750511-233750692
  hyper
gagaggtgactccagacgtgacttggttgttgccgtccgtaactctggggaagtggtccctaacttcggcctgggtggctgcaggtgcttcctccccttgagttcttttttcgcaacccactaagccaaactgtcgggtttgaatgtgtagcagcacctggccgccgtgcggcaaggcagc

SEQ ID NO: 28202 - DNA, 98 bp, Homo sapiens
  chr1:236850212-236850310
  binary
ctgtgctgtcctgtgccctcgcagccccgggggccccttaggaaagaggacacgtccggggacaggcaggacactgggcgtcgtgtgtgtgcgcgcgc

SEQ ID NO: 28203 - DNA, 37 bp, Homo sapiens
  chr1:237205188-237205225
  binary
cctagcccagtccaggaggaaggggcgtcgtgccggc

SEQ ID NO: 28204 - DNA, 392 bp, Homo sapiens
  chr1:26372144-26372536
  hyper
atctgggctgcgccccaagggagagacggtccttgggccacagcccattatcttcgttccctcacctcaccccacccctcctgcatggtcccagctcaagccgcagccaaaaccaaccactgctaggatggcaaatgcggaggtgcgtcggctgccgccaaaattcccgcccgtccccaggctctcgccttaccggattgccggcctggcgtccaacagatgctgcttctccttggcctccatgcagtcccgcgccgagtcccggcagccgcgcagccgccccgccgagtgcgccctgaaagttgcgcgcgggactccgggtggcgctcacccacctgccccgagggccccgcgaggtgcgctcactccggcccggctcctgcggcccctga

SEQ ID NO: 28205 - DNA, 299 bp, Homo sapiens
  chr1:26372565-26372864
  hyper
tccggctctggctccgcgtgccaagcgctcccgtgtctcgggtcagccgctgcgccccgcggccgccggctttatccggccctcgccaacccgtgtgaagctgccgtcggcgcgtcgtgtgcaaaagcccgcggggaagggggggcggtcgccggctgcaaaaggcccggctgtggccccgcacacctgtgcctgcgcccatggggcccgcggagcccacctgccggccgcgagaagtttgccagccttcgcccggcgcggcgccgggtgttgctgagtgaggacggggtgacgcctgc

SEQ ID NO: 28206 - DNA, 639 bp, Homo sapiens
  chr1:33896186-33896825
  binary
ggtccccggagaaagcgagtcactgacgggaccttggcccgttcccgttccggttcccgttcccggcaagcctcggccccaggctctccgcagccctcctcgctgcgcgttcccggcccgggggcgccgcgctctgccggtcgccggccgggactgcgggctcccagcgcgggccccacgccgcggaccaggggtcaggccgcctgccgcccgcctgtccgtgcccatggcaatgccccgccccgcgcggcccgtcccggccgagcgctccggcccgaccgtgacagctgggtgcccaaagggttaagccggcagcgcggcggccggtgtcccccgcgcgctgcccgtcagccgcgagctggccccagcgcgcacgcgcccgcccgttacctgcggtcgcctccgcgctcctcctccacctggccgctctctcccgggggccgcccctcagcccgccccctcggctcggcgccgcgcaccctgctggctgctcggacgctgcccgcggaggaggggcgagggcgctattaccatatattagcataccagcgcgcgtcacgtggccgctccagccaatggtcaccctagaagggcggggattgggcggaacacgccttagtgctgctcccagcctgaacc

SEQ ID NO: 28207 - DNA, 225 bp, Homo sapiens
  chr1:34629913-34630138
  binary
cctcctagctccgagcgccgagggaggggtagcatttgaggagggggatggcggccgcagtctgcagtcggttccagagggggcaccggtttcaattggagaaaatgggcgggggcagggaagggcagaccttgcagacgcagaaatggggagggggcgcacggttcctctccagcccccaggaccagcgtgcctggcagaatcaggagccgggggagtagggct

SEQ ID NO: 28208 - DNA, 355 bp, Homo sapiens
  chr1:35247173-35247528
  hyper
gccaccagcccctccggaggctggcccgggagcgcctggcagcgtcgggtctaggagccggctccctcctgctccctcctccgcgccgcccggggtgtgcccgccgtctgtgtgcaccactgctgagcccagctccggcgccctcgcctctgctgtgggccccggggacgcggggtcaggccaccgcgttggccaggccgctgcaggtaagtgctggacggggcggggcgaggctgggcgggaccctcaggggcgccaagcgctcctggcgaccccctgcggcagggctggggcttgagcctgccagtgcgctgggatggggcgcgaagcgggggtgcggggagcccgccacccc

SEQ ID NO: 28209 - DNA, 132 bp, Homo sapiens
  chr1:40158183-40158315
  hyper
cttctaaggatctgtcgaaagtcggggcggacggctggggattggcctaatcggagcgcggacgctgaagagcagcggtgagaggcggggcttctgtccgcgcggcgaaggtagaggtgggctgggcggggc

SEQ ID NO: 28210 - DNA, 561 bp, Homo sapiens
  chr1:48175235-48175796
  hyper
cgggagctggcgagctgaaagcccgggataattagcgctaattacatgtgtgcaaacagccgcggcagagggcgcgggctaggccgcggggccgcccctcccccggcctgaccctggcagtcccaccgcagtggaggggctctgctggcgcagctcgagccgaccgctaggggagagcgcgcaggagcacccacgagacccgggaatcggggtgcgccgtcagtgcccagagccaccgagccccgaccacacacgcgggcgcgcgttgcggcccggcaatctcgggatggcgggttacagtcgggccagaggctgagcccagaactgggggccgaacacccgctgcccttcgctgcccttcagcggggaccgggcggggtggggctgagcattctggcccctaggcttctccgactgttttggcctccggagcaacccggtgtctgcggaagattggaagcgactctccagcaccccgccgccgaggcccgctctcccaggccatgccggctggcgccgaggccgcgggacctggaagggtcggagtctggtgctggtgcc

SEQ ID NO: 28211 - DNA, 677 bp, Homo sapiens
  chr1:48462497-48463174
  binary
ggcggcgcccctcagcggggcggggagcccccagttgggcacggagtttcctctggagcacggggctccagccgcaggatgctgggcgccctctggggcgtggctgactgtccctgtcggacctgggggtttctctggggccgggctccgtctgttggaagagggagaccctctagggctgggcccctcccccgggcgctcaacctcgctggccgagcccccgggtgctgagggcgtgttggggtccgggggcgcgcggggtcccggagctgcgtcgcggtccaggggcgcgcggggttcctggggcagaaccgagaacccggggtgcgcaagggtcccggggttatgctgggcacccggggcacgcaagggtcccaggggtgcgcggcgctccaggaggcgcgcagtgggacaagtgcggcggaaggcgcggcaggggtggggggcggctctggggcgaccggctgcccccgagcccggctcagaggggcggcgggcggccgcgcggccgctgcccgggctccgccatgctgctccgcggccgggagggagggagagaggagggcgggagagcggcgcggagccgggccgggctgggggctggggccgctggggcgggggaggggaggacctggcgcggggggcgggggggcgaggggccggggccgcgccgggcc

SEQ ID NO: 28212 - DNA, 38 bp, Homo sapiens
  chr1:48463421-48463459
  binary
cgccaggcgcgaccgggccgcagcttccccgtgcggcc

SEQ ID NO: 28213 - DNA, 836 bp, Homo sapiens
  chr1:48937304-48938140
  hyper
cgcgccgcgcacatacactctctctcactggaaagttaggagcgaggaaagaactctgaagtgatttgggaacgatctgaaagcgcgcaagttggaagtcgggttgaagccagcatagcggagcaggggtcaggcctctgcgtggccggagtgggagagcgcttctgagaacaagatggggcaggaccgaaggggcgtgaggtcgacgctccctagggatgattcggagggtgaaggaggtttgggggtggttccgggctctcggaggtgactgagggagtccctgagccaatgcccgggggtgggaggcgctaccggtactcactgagctgatctccagcgccagggcgcactgcagcgccttcaccttcggcatccgtgcggggaggggcggcggggagtgaccccggccacgggcccgagtgaggcggggagacctggggctgggcggggacggggaggagacgaggtggcggcggcggtggcagcagtggcccccaggccggggcccgcggtccagcctgggttccgccggagaagcagctgagcgcggggcgcagactcgttgtcatggcagccaggaggggcggggccggaagagaggccgcgcggggcactccagggctacccgcgctgggacgagcgctggaggcggagcttgacgaacgccgagcgaggcggagtcgggcagggggcggggcttccgaaggggcggggtgaggcaaggcagctcttctgtgacgtcaaactgcgcccaaagccggacgaaagggagctgctgtttgtataatgggacggtgctctgttcagggagttggagttcctgtaaggccgtc

SEQ ID NO: 28214 - DNA, 355 bp, Homo sapiens
  chr1:55505162-55505517
  hyper
tggtggcgtgatctgcgcgccccaggcgtcaagcacccacaccctagaaggtttccgcagcgacgtcgaggcgctcatggttgcaggcgggcgccgccgttcagttcagggtctgagcctggaggagtgagccaggcagtgagactggctcgggcgggccgggacgcgtcgttgcagcagcggctcccagctcccagccaggattccgcgcgccccttcacgcgccctgctcctgaacttcagctcctgcacagtcctccccaccgcaaggctcaaggcgccgccggcgtggaccgcgcacggcctctaggtctcctcgccaggacagcaacctctcccctggccctcatgggca

SEQ ID NO: 28215 - DNA, 50 bp, Homo sapiens
  chr1:55505559-55505609
  hyper
tgctgctgctgctgctcctgggtcccgcgggcgcccgtgcgcaggaggac

SEQ ID NO: 28216 - DNA, 121 bp, Homo sapiens
  chr1:57110528-57110649
  binary
cgctcccgacatgcgaggcccgtctcttcttccagtttgacttccaagtctttccattccctaggatcgggccccagtctcaccccctattttcacccccttcggttttcctcagaaaggg

SEQ ID NO: 28217 - DNA, 169 bp, Homo sapiens
  chr1:57110714-57110883
  binary
cggaccccgcgcatctggcgcagcccctcccgcactcccgcccagcgccccgcgtccccggcccccgctgtcgctgcttcgggttccgccgcaggagcctctcactcccgggagcgggcgcctcgcgctccctccctcggccccgccccgcccgccgctcgcccgttgc

SEQ ID NO: 28218 - DNA, 206 bp, Homo sapiens
  chr1:62784150-62784356
  binary
cgccctcggcggcgtctagagcactcggagctgccccattgcctccgcccaaggtcgcggcccaaagggagccctggaaagttcagccaggggccgaggagtgccagggttggcactacggggagacttttgcgacaggagagagactaagagctcgattccaggtagcagtgggagcccgcggcaaagaacgcccagtcccgcag

SEQ ID NO: 28219 - DNA, 225 bp, Homo sapiens
  chr1:62784646-62784871
  hyper
tgggcgaggcgggtggcagaggcaagaggagagtggtcgagcgccggggccaacactcgggtcgcgcagggcgggtgttgaacaccccagcagacgcactgcgggggactggggtcgcagagtcccttaccttggcgagctgcggaagtcctgcgcgaggcggcccgcggtgcacggggccggggcagctaggcgcacaccccggcttcggagcgcacgcaacct

SEQ ID NO: 28220 - DNA, 394 bp, Homo sapiens
  chr1:65774903-65775297
  hyper
cctcccaacccacgtcgtagtagtcccctcccccgaccaccccgccccgtttcccttcaacccccctcctcacgaacctcccctcccttcctacctccctttccttccctccccgcgggccagcggctttggcgctgccctgctgcgcggcggggcgacgcggcgacacctataggattgcttccgggcactcctcagccaggaggtgctggcctggggcccggagctcggcagggccgggcggctccgcggcgttggcccagaggacgcgcgcccccgcccggccgcgtctccttccctccctccctcctcccggcgccccgagccgagctcagcccagggcggcggcttcgcctcgcccggcgaagcttctctccggtggccgctccttctt

SEQ ID NO: 28221 - DNA, 446 bp, Homo sapiens
  chr1:65775326-65775772
  hyper
ttaatttttttttttttttaattccttcttcagccctttccaccttccatctcccttttcgcttcccaggttgattattttctcttttctccgggcttgcccatgagcctcctcgggagctaccggaaaaagaccagcaacgatggttatgaatctttgcagctggtggacagtaacggggacttaagtgcgggaagcggcggggttggcggcaagcagagagtgaacgccggggcagcggcgcggagtcccgcccgacagcctccggaccgcgccagcaccatggacagctcaggtagcgctgcccgaggggagtgcagcgctgagccccgcgcggcctccggagcctcccagtcgcccggcccgaggcccccccgtggtcccccagccccggtttgcgagagagccgggctggaggcgaaggcttctaataccacctgggtgtc

SEQ ID NO: 28222 - DNA, 713 bp, Homo sapiens
  chr1:68298601-68299314
  hyper
ggggcctcccaacccggcgcggggcgcacggccgcaggctggcgaggaggcaagcgagctcaaggggagacctttccttccacccccagccctagccccagccacagccgtgggggcggcttcccgcaacctcgggcggccgcccgtcgagggcgcgcgcgccgtttctgcctctgggtctcggtgtcccttggccccttcctccccctccccccggtctccggcgcccagcgcccagaccagtccccgccctccagcaggacactcttccctccttccttccttcctccgctccctccctccatctcgcttcccagcacccgggactcggaggcggcccccgaactcgctggccgacgccccgcgccgcgccccgaccccgcggggacccgactcaccacccgcgcccgccgcttggtactcacccgcctgccggtgcgctgccccgccgtcgccgccgggactcggtctctaagggctcctggagacggctccgacctctcctcctcctcctcctcttgctcctccgggcgccggctccgcctcgctggggtgggcggggcggcggcggccccgggctccttcctccgcgccgggccctgcctcccgcccggacgccctggctgtgctgtcccgggccggggagcccgcgttgtggccccgcaggaggaggggcgaggcctggcctgtggaagctcggtggacgtctggtc

SEQ ID NO: 28223 - DNA, 132 bp, Homo sapiens
  chr1:8085554-8085686
  hyper
cggcattaccatcgtcgctgtgagattaggcagagggagcggggctgaccgccagagaaccggtaccaaccaccgcaagcaatcgccgagcctcccaccccagctttcaagacaggatttacgggtacacgg

SEQ ID NO: 28224 - DNA, 378 bp, Homo sapiens
  chr1:8085715-8086093
  binary
acaaataaaaaaaaaatcaaacaagcccccaggcccgaagacgctcatccccgccgggcaaccccgcgagcgcaggctgcgggacgaggaccttcatgctcgccgctcccgaacccccgtccgctcctgcggtcccggtgctgcggggacgtatcccgggcgctcgggtgcatggccccggccagccgaggggccgcgcgacgaccacagccggcgtggagaaggcggcgggcgccggcacttcgcggcgtccccaggcccgggctgcgccgccggggagggtcccgctctccacacctcaatggggagaagcccgcgagcgaccggccggcctctccctccatcccagagactccgcgtcgcggcgaccctccccgc

SEQ ID NO: 28225 - DNA, 401 bp, Homo sapiens
  chr1:8086401-8086802
  hyper
cataggccgccgggccgtgaggtcgccgcgtcccgccccgcctcctcccgcagccaatcagggcgcgcgccgcttaaaggggcgatgccgtggccgaggcgttgcgccgggcccaccgtggcgtatcgcggcgctgcagggagccggctttgtctcccggagaggcgtctccgggctgaccgcggccgcagctccgctcctctgcctgagccgtgcggcagccctgggagcctctcaacgccgagctttcctcagaagcccgcggcgacccgggcctcggccgctgttcctgcccgaactgagggcacatcgcgcttcgcgcgggatttcccataaattcaggctccgggcaagattgtgtgttttttcctctccgcgggccgccgctggccgtgtgggcc

SEQ ID NO: 28226 - DNA, 143 bp, Homo sapiens
  chr1:82266277-82266420
  hyper
cgagccgctggtcatccccctgcgctcagcctcggagcgccgcgcttcgcggcgctctcccaaatactcttcacccactccagaaataaaataaatgtttttaaagtgcatgtgtgtggacaggatggagagcgcgcgccggc

SEQ ID NO: 28227 - DNA, 327 bp, Homo sapiens
  chr1:82266440-82266767
  hyper
cgcgcagtgagtggagtttgggggtgggctaggggttagcggttgaatgggtgtgttaatggggggagctggaggcagagctcggggacctgggggtagggggagcgcgaaccgactgggaggggagagaaggggaggggcgcgagctggcgcaggccgcctccggggcgcgttccacggccgtgcgcgcgcgtccctcgccgccaccgccgcccggacagccctgcggccgccccgccggcggagccggggccggcctggtcctcgggcggctgcttggccaccgccaccgccgtccgaagggctcgagcccgtaagtatcccctt

SEQ ID NO: 28228 - DNA, 296 bp, Homo sapiens
  chr1:82266855-82267151
  hyper
gattatctgctccacgttttgtacttagctgcctgtaatcttcttttgagtttgcccgagccccttgctggaaaactcaggagggagagatttgtcctttgacgctgtacacgctagtatgtttatatgattagcccaactggcggggagggcggatttgggggaaggaggaggaggaggctggaggtgactccagttcagacctcgcggagagtctgtgtcaggacttcgcattcccccgtctctctctctctccctctcgctccctctcactctctctccgctcacacacacgc

SEQ ID NO: 28229 - DNA, 51 bp, Homo sapiens
  chr1:82267185-82267236
  hyper
gaattccttgggattgttggggggcatctcccctccgctgctgtgtgtggc

SEQ ID NO: 28230 - DNA, 370 bp, Homo sapiens
  chr1:82267247-82267617
  hyper
cggctactccttgcttccccgagcccgagtctgcgccgccagccttccttggggcagcggccaccgctcagccccggccgggagatccgaaatgtgaggaggggtcgccgccgcctcccgccccaggccgcagggtcggcgcgagggatgctattccggccgggcgctcggggggctgaggggcttcgcctgacaaactgagttggcctcgcgcccccggcgccctcccgcccgtcgcttcgaagggactcccaagtctgcgcacctctgtcaggcttttgcttccaccacccctttcgctctgattcccgatttttttttcctaagggagcgtgcggtctgggggtgtgtgcgtgtgtgtgaaagacct

SEQ ID NO: 28231 - DNA, 150 bp, Homo sapiens
  chr1:82267739-82267889
  hyper
cgccgtgtccggccggggagctgcggcgctgcctcccgcgcggactcggcggccgaggacccgctcgcggccggcctcggccctctccggccggggtagccgctgccctccgcgcctgtccccgcgcggcccccacgccagacggccctc

SEQ ID NO: 28232 - DNA, 202 bp, Homo sapiens
  chr1:85358969-85359171
  hyper
ttcccactggagagcgtccccaacctgcaaggccgcgagctgcgctcaaaggggcccgtgcgagccgcgggagggcagcgctcttgcagacgcgttcctgcctgggatcgtccccaggtgggtggtcggccggccccgagagggaaaagcgcccactaaaggaccgctagtacccacaagcctcacggagccatacctcgga

SEQ ID NO: 28233 - DNA, 61 bp, Homo sapiens
  chr1:91185065-91185126
  hyper
aaaaaaaaaaaaaaaaaaaaaaacagcactacttggagggtgggttgagctgtttctcatc

SEQ ID NO: 28234 - DNA, 502 bp, Homo sapiens
  chr1:94702434-94702936
  binary
cgggaatagaatccaggcaagaacacagacccatagtgatcaggagcacggattccggagcaaaagcgcctgggtttaggtcctgacgctgccaaccactagtctgtgtgcttgggcaggtttttaacctcggtttccccgtgtgaaccgagtcgaacaatcatggagtgttctgaacattaaaagagttaaaatgtgcaaaggcttcagaacagcaggcggacccgttgtacgcgctgtgtgctaactttaattacgatcgtcaccgtctgctcccggccaccgctggcgtcctccccagctcgtccgcgcctccctcgccgggcgcgcccctagccccggccggacccttcccgtggactccagtcctggctcgaggacacccgtccctagcgcagcctgccaccgcttccactcggggccgccccgcgggcctcccggaccctggacggcaattcgcgggcgctcgcgcgggcaaccccagcccggagccacgaccgcc

SEQ ID NO: 28235 - DNA, 89 bp, Homo sapiens
  chr1:94702990-94703079
  binary
gccggacgcggacgcccgccccacacctacggccgccgccaccgccgagggctggagctcgctgcccccatcccccacggcctgcggac

SEQ ID NO: 28236 - DNA, 222 bp, Homo sapiens
  chr1:94703103-94703325
  binary
cgcagccgcagccacagccacaggcaccaccaccactgcagccgccaccgcccctgcagctaccgccacggccgcaccgcccgcccgccagccccgccccctggagcccagcccattggcccgcgctcccgggggcggggccggcgaccgcggcaggtacgggaggcaactagctcgcgcgcagaacgcgaccgtcagttgcgcgcggccggacgctgtccc

SEQ ID NO: 28237 - DNA, 157 bp, Homo sapiens
  chr1:94703357-94703514
  binary
cttgcaggggacaggcagagcgactcagagaaaagtcacctgaggactagatgcggctaatggccagatgagcagctacatttcttatgagacacttctgtggatcgcctttttcctccctcttccaggggttagggcctggggaagggcgccacac

SEQ ID NO: 28238 - DNA, 283 bp, Homo sapiens
  chr1:94713022-94713305
  hyper
cggaccctggacggcaactagccggcgcccgcgcgggcgaccccagcccggagccaccaccgccgcggccgaagcgagcgccacctcctcacactcaccacggcgctccatcccgcgtcccggacgcggacggccgccccacacctacggccgccgccaccgccgagggctggagctcgccgcccccatcccccacggcccgcagacgcccggccaagtggcagccgcagccacagacaccaccaccaccaccaccacagcggccgccgcctttgcagctacc

SEQ ID NO: 28239 - DNA, 657 bp, Homo sapiens
  chr1:95285602-95286259
  hyper
cgaccacccgcccaaggtcgtggcggcgccggctcagctttagtcgtcaaagtgcacatcctgggagccgctgcctcgaggtggttgaggcgagagggcagggaagcgtctgagcctcttcctcccaccagagcaggaccccagctgacagcgggtgagctgggcagaaacccatgccgggaagaggcggacccagtggaccgcagcgcccgcagtcgccgggccaggcgcagaggcgaacgggaggcggcgctgcaccgtgcccgcccctccccggcccggccccggctccagccccagccccagccccagccccggccccggccccggctcgcgggcgctgcgtctccgcgtacaggaggcggcggcggctcccagtcaccggcccccgccggcgagcgcacgatgcactgcctgggcgccgagtacctggtaagcgctcgcagcctcggccctcgggggaggagccccggggaagggtcgagtcccccgccttcacgcaccttccctgccggacgcttccgcctttcccgcgcctcggggatcccgcccccgcttagtaccttggggccacctggcggggaggaacctggaccctgctccagtgctggggcggaggcgggggagacgcgggccgcggggcgcaaacttggggtc

SEQ ID NO: 28240 - DNA, 760 bp, Homo sapiens
  chr1:99126872-99127632
  binary
cgggtgccttccagcctcgctgtggatcccgcgaagtggacggttcgcttcgtggcttcttcccagaccccgccactgcggaaaccgtcactcggtggcccccgactgggtcaatgcgaggacgcccacctcctacctttgagtctctcctcttctccagggtacagccaaccctttctccaacgtagccggagtccgagagtcccagttccgcccctccagcccgccccaggccaggtggggatgcgcccggcccgggccagcgctggtcccggcagttccgcgtctgcgcagcgggcgaggggctggagcggggccggccggggaggtgcaggagacgtgggagccaatgggcacgctcgggggagccgggctggcggcggcggtggcggccggctgggcgcgcactctcgggatggagggcgagcgccgggcatcgcaggcgccctcctcgggcctcccggccgggggcgccaacggggagagcccggggggcggcgccccctttccgggcagcagtggctcttccgccctgctgcaggcggaggtgctggatctggacgaggacgaggacgacctggaggtgttcagcaaggtgagggcggcggcggcgagtcccgggaaacttccaaggcaactccgggcgttgccagcattgcgccgacggctgcctctggcgcgcttgccctcccggggcggtggctctgagctggggacgagtgaggtcccccgggctgctggaccccgcctgccagctctg

SEQ ID NO: 28241 - DNA, 325 bp, Homo sapiens
  chr1:99127671-99127996
  binary
cagccgctccctcctccgcactttgaccttccgttcggcggggctgtggcttagtggagtctgcaaagttgtgatttgttttccctttctgcttctctgacacagacatcttcctcgcggcagctcccgaacctgggaggctggtggctcaaaaccgctcccgccagctgcttttcgggcgaggccagccctgaactctgggagagcagccaagtttagagaaattattcttaatttagtgttgttgcttgtggatttgagacttgggtgagtctcgggtcttgtgggaataggttctaggaaatctccctgaacaggagaaaac

SEQ ID NO: 28242 - DNA, 31 bp, Homo sapiens
  chr10:100992012-100992043
  hyper
cgaacacacagacacacgaacacacagatac

SEQ ID NO: 28243 - DNA, 59 bp, Homo sapiens
  chr10:100992740-100992799
  hyper
cccacaaacctccgtgcaggaggtgaaacctgccttgtttctctcagaccaggcccggc

SEQ ID NO: 28244 - DNA, 386 bp, Homo sapiens
  chr10:102489864-102490250
  hyper
ggcctgcggcctcagcgcgagagccctggcccccttcccgccgcgggtcgcggtcgggaaagcgcgccctgcaagggggttttgtagataaacaaaagcgtttgctcttctggttttcttttattttctttattcgcctgtcccttccttcttaatctccctcttcgctcttgtttctttaacttatttcccttcctcattttccctttcttttcgttcgcttttccttgtcactctccttcttgttctcttctgtctctttctgtatctccctcttccattttggccccttctctgcctctgggtttccctttcccgggcccctcactcttcctgggctaggattgcgccgtctccctgcatcatttttcctggctccgctgcct

SEQ ID NO: 28245 - DNA, 331 bp, Homo sapiens
  chr10:102490316-102490647
  hyper
cgcagtgatttattcgcttcacccggcggaatcaggtgctgaaccgagccccggaacgagagaacagatttctcccaggaaaggttttgtgaactaaacgatgctaattacggggtgggggatgcgtcgcccgggaaggggaggcgcgcggggccgagcgcggcctgggaggggagagaccggggctggccgaggccctcccggggcgcctcccctgcacctctcgccctggctttcgcctttccctgggaactttcccgtctgagttaactattaaccaccggcgagaggcaattttcttcggaatttcagcgatttccttttcgcagtg

SEQ ID NO: 28246 - DNA, 61 bp, Homo sapiens
  chr10:102498764-102498825
  hyper
cacgcggacacacacacacacacacacacacacacacacacacggcccccatagccaccgc

SEQ ID NO: 28247 - DNA, 247 bp, Homo sapiens
  chr10:102988365-102988612
  binary
gccctgcgcgtgcttgtccgcggcggccagcaggtgcgccgccccgcacagcgagtaacttctccgcacagacggcttgttgaggatgtcctcgatgctgaacggcgtcagtggcttgttggagttggcaggcggaggcaggtggtccagcgggctgcgccgccgctcctcccccggcgccgccttgccgtcctccttggaagtcatctcggccttgttcggggtcccggccggggcggctcgggcc

SEQ ID NO: 28248 - DNA, 42 bp, Homo sapiens
  chr10:11060746-11060788
  binary
tctggtggccggggggaaagagctcttcttaccaaattaccc

SEQ ID NO: 28249 - DNA, 170 bp, Homo sapiens
  chr10:114711931-114712101
  binary
cgcgcagagcccggggccctggagaggctccttggctttctcttttgggcgactatgtatttagctttctagtggagattgctggctctcggccctccttcccccttcccctggaaggtcacacttcccagattggtcccaccgcaaacttgggggctctgaggcgtcct

SEQ ID NO: 28250 - DNA, 427 bp, Homo sapiens
  chr10:114712446-114712873
  binary
ggagtgggccgccgatcgccggccacccaactttgggggccccagggcagcgcggggtgccgggctcggggggcgcttcctgcagggtcggtcccgcgcccaaccctgacatttgttaatacggctcatcccctcccccaccggcctgtgccccctgccctcaccctgaaccccctcctcctcatccctccctccctcttctaagaagcctggattacgaatccctggacgcaagacgcatttgtgcccggcttcccggtattgtcattttacaccttctccagtttggtcccctaccccttatttacacacacgacttttgttttttctttttcggtaactctagatagcaatttgaaataatgcacccactgttcagcagccatggattcggtgctaatggccgagggcttgccggacgggagtc

SEQ ID NO: 28251 - DNA, 269 bp, Homo sapiens
  chr10:116163621-116163890
  hyper
ttggtgtgggggagcaaagaagggcttggagagaaacgatgacccgaacggcaggacgtttggggaggccccacctagcccggggagggtctgcgcgcccactccactgcccaagcgctttgccgggagcaggaagcccctagcccggcgggcgcccgggagaaaggactcaacagcccgaccctttgcccccagcagctcagcacggttcccaccttcttcggggcttcctcggccccaggcatctttcctgtgcggcgggactgagg

SEQ ID NO: 28252 - DNA, 208 bp, Homo sapiens
  chr10:116163919-116164127
  hyper
tcctgcaacaggtgagaagccccgccacgccccccactgacgaccccctccttccgcgcccgggaggatcaaagggctcgggccgcagcagccacctaggagcccacccgcccagtccgcggcgccgctgtcgccccctcttaggcccaggtccgggctgggtgggggcagtgggctctgcttatcccgagtcctggcaagacgagtc

SEQ ID NO: 28253 - DNA, 80 bp, Homo sapiens
  chr10:116164364-116164444
  hyper
gacctggcccccgccagggctcgcccccagcgcccctgtcccagcgcccctgtcccagcgccggagaactccggcccgcc

SEQ ID NO: 28254 - DNA, 916 bp, Homo sapiens
  chr10:116527415-116528331
  binary
cgtgctgcctcaagccctggatttcttccatagccgagctgcaaaatggtaactagaaaggaggaaaaaatacctcttcctccctcctggccagcccttccacagctcccggcagggcagccagcgcgagcccatcccccacgcctcccagcccagacgcgcggcgggcacaggtgagcggggcgccgactttggcccttaggctcgcccacatccggggatcaaggtcaagggcgagggcttccttcccctgcccccggcccccggcagccccgagcccggggatccgctgccaaagtttcaggccgggctggggccggcgcggctgtcgcagcccccccgccctcccgcacctgttcggcccgccggggtcagtggacggtgcccacctggtccccactcacctctggcggacatggtgcaggcagcgggagccggagctggaaggcgttggacagccccgcagggcgcggggaagaaggcagccccggagcgcccgcccggccccggccccctccggctcccggtgcggggacgccgcccgcaggacacctggccgcccgctccgcgcagcaaggccgacgggcggggacgcagcggccgcagggacccgccgggcgcggcagcgctgacacccgcggccgcgctgggcggggcgcgcctcccccgccccgagccgccggggcccacccgggtccagcagccgctctgccgcggcgccgggcggggctctgtccccgaggaacgagggtctgcgtcctcccctctccccgcccgtcttcttaataagaagaaaaataacgtgggtgctccgaatggctctccagctctctggtcccagagagagaaagcaagaaagggccgttcgttccttcccctaagtgatgcccttgacaggagagcgaagaccacggtc

SEQ ID NO: 28255 - DNA, 51 bp, Homo sapiens
  chr10:119001564-119001615
  binary
cttatgtttccccctgataatttcccgcatcctcttgcctgctttcactgc

SEQ ID NO: 28256 - DNA, 204 bp, Homo sapiens
  chr10:119302490-119302694
  binary
cgcctgcaaattcttctggaaggattttcccccctctcttcaggttgggcgcgtttggtgcaagattctcgggatcctcggctttgcctctccctctccctcccccctcctttcctttttcctttcctttcctttctttcttcctttccttccccccacccccacccccaccccaaacaaacgagtccccaattctcgtccgtc

SEQ ID NO: 28257 - DNA, 140 bp, Homo sapiens
  chr10:119303721-119303861
  hyper
ggatttgttttttctttcctgcttttcggaggcctggggaggggcgggaacccgtgcgggaggaaagctccagggcttggcgctctcgccgcgacctgcttaattggggcgccgagcagccacagcgggaaggcaggttc

SEQ ID NO: 28258 - DNA, 74 bp, Homo sapiens
  chr10:122739316-122739390
  hyper
cgcgcgcttaactctgcctgcccgcccgccccgccccgcccggccgttcctgcgcagccctgggtcggcctcgc

SEQ ID NO: 28259 - DNA, 210 bp, Homo sapiens
  chr10:123356997-123357207
  hyper
cggccccaccccagcggccccctcccgaaaaaggggtctccgcagggcctggatggtacggaagttcccaggacacacggatggggcacctcggagatgaccccgggaaccggcctgcggggctgtgccacgggcaggcgaaccttccgcccgtctgctctggggtcggagaaacgcgcccagtcagcgggaatgcgcccgccagggttt

SEQ ID NO: 28260 - DNA, 373 bp, Homo sapiens
  chr10:123357242-123357615
  hyper
tcagcatctggatgggggtagcagaggcagaacttccagaacgccggccgtcagcacgcacccacctcccccatcacctatgcagccacagagggaggacacggagcgtcctccacaatgctagtccttccgcgccccccgcccggaggacggtgcacccggcgtcccgggctcccgtggcgcccacgtccccggctggcgaagctccccgaggcgtcttgcgcggcgattaccttgaatggcaacgctcctccgcgacctgtgttgtccccgcgccccgcgtgggtcgggatggagaaagcgacgagcccggggttgcggggagcaactccaaacgcagaagagtggtccttgggtcttcgccggcgccaag

SEQ ID NO: 28261 - DNA, 107 bp, Homo sapiens
  chr10:123357660-123357767
  hyper
atgacgcccgcgggctgccctcggatttggggaacgagaggaagaaaggactcaggcttggcgttgcctccaccaaactttgctcgcgagttgcgaaggctcagagc

SEQ ID NO: 28262 - DNA, 376 bp, Homo sapiens
  chr10:123357893-123358269
  hyper
ccgcgcgcgctccctcgcccgctccgcacccgccgcccgcccgctcggctctccaccgcgctctcctccagccgccgcccgcgccgccgccgccgcccccgcctcctcgcggcgggtcacgcccccactgaaacccgagccgtttcctggacggcggcgccctctctgccaatcagcgccgcgcgcccgggccgccccgagtcccgcgcggctcccgacgcctccgagcagccggagacaccggcccgggaggcgagggctcggccgcgatgcggccgtagggatgcagcgacagcctccgaataaggcctggtcccgcgccccgcgccacctcctccctcctccccgggcgagcgaggctggccaacggctcgct

SEQ ID NO: 28263 - DNA, 275 bp, Homo sapiens
  chr10:124133662-124133937
  hyper
cgttgctgaaagaatttcgactaacccttctttaagtctctcttaccctcctgtactattaacaccattgtaagtaggcagtggagctacatttgcagggagagagaagagcgaaaaattggcgcgcagagctgtaaagcgtttttctccaggtcacaccgcagcctgtaaatttgtgacacttggaccgattatgggacagcttgcaaacaaattatctgcaaactaacgaagcctatttttaaagatccctgttcctcgcagctctaggcgat

SEQ ID NO: 28264 - DNA, 276 bp, Homo sapiens
  chr10:124134313-124134589
  binary
gaggccgcggtaaagtttagcttgaagaacgcggccgcgctggagcaggggtggtggacggggccaggcgcgaggtggcggcggctgcggggctgccgggctgctggagcgcggttcccgctgtggcgagcggggaggcgtccgcagaggggcggtgggtgctggtgagtgcggagccggcgccccctctgcgcacgtccgcgccacgcgccacagcacctggaggccgccgggccggctcacctgccctggcttggggcagcgggagggggcggc

SEQ ID NO: 28265 - DNA, 630 bp, Homo sapiens
  chr10:124221086-124221716
  hyper
cgaggccctcctgcactctccccggcgccgctctccggccctcgccctgtccgccgccaccgccgccgccgccagagtcgccatgcagatcccgcgcgccgctcttctcccgctgctgctgctgctgctggcggcgcccgcctcggcgcagctgtcccgggccggccgctcggcgcctttggccgccgggtgcccagaccgctgcgagccggcgcgctgcccgccgcagccggagcactgcgagggcggccgggcccgggacgcgtgcggctgctgcgaggtgtgcggcgcgcccgagggcgccgcgtgcggcctgcaggagggcccgtgcggcgaggggctgcagtgcgtggtgcccttcggggtgccagcctcggccacggtgcggcggcgcgcgcaggccggcctctgtgtgtgcgccagcagcgagccggtgtgcggcagcgacgccaacacctacgccaacctgtgccagctgcgcgccgccagccgccgctccgagaggctgcaccggccgccggtcatcgtcctgcagcgcggagcctgcggccaaggtactccgccgcgctcctgggcagctccccactctctccatcccagctcggacctgcttctgcgggactggtgggc

SEQ ID NO: 28266 - DNA, 318 bp, Homo sapiens
  chr10:124221921-124222239
  hyper
ctgagggcaaccacacagcgcggggaccccaggacaaataagaggaatgggggcataaaggaaggagagaagttcaggactgggaattggcgcctcgcagagcggcttcaggaccacaagaagtcatttcggttgctttttcttctatttacgtcctccgtcccctttaaaattcactgctttgatcacgggaccgctcagtgaaaactgtatgtaactcttttggaaaggaacagtgtttgccggcccgccccggagtttctccaaaaagtctaccccgagcagggaacggtttggcaccgctctcgtttcggcggc

SEQ ID NO: 28267 - DNA, 221 bp, Homo sapiens
  chr10:128076024-128076245
  hyper
gagtgacctggaagccaggaagaggggcagagaggaaactaaagaagtaggtaagagagtcagtttatgaaaatagagcctgctgtggagagcagcaggcacacctgcggaggagggggctgcctcacctgcggggccgctgcgcgcccccctaagtgtgttagcgggggaggcggggctggaaaggaaacctggtgaagggctggcccggagcctggggt

SEQ ID NO: 28268 - DNA, 775 bp, Homo sapiens
  chr10:128593891-128594666
  hyper
cgcggccgtcccgcctcccgccggcgctcccggcctttcccatccggcccgcgacgctccgcccgccccgtcccacatgacgccgcctccgccgcaaactttttcctccccatcctgtcgcggctcgaaaggaatggaaaatggcggcctagacgcggagtttcctgcccgacccgcggcggctccggcggcgccatgacgcgctgggtgcccaccaagcgcgaggagaagtacggcgtgggtgagcagcgccgccgccgccgcgcctctcgccccaagcccaggctccggcggggcgggtgtgccgggcgcctgttgccgccgccccgagcggccgccgggccggggagaggcgcttccgcccgcgcccgcgccgccgccccgctcgcaatgcccggcgaccccggccgccccgcgcccccggcggcgtcagctccagccccggggatgcgggtcgggaacacgagggggtggggtgggaatgggggcgggcgcgtccctccctagggtgtcccctccgacgcccgctcctctggacctctgccgtggagccccccgggctacccccaactccccggccccggccgctgctatctgcgcggctgggcccgtcagggaagcccaggggtcactgtctcgcggcggcttctgcttcttggatgaacttgcgtcccgcgtccgggctctgggtgggcgggctcaggtcggcgcggtcccagcggataattccgccctttcccggcggggaggagggggcgcgacctgggtggccagc

SEQ ID NO: 28269 - DNA, 89 bp, Homo sapiens
  chr10:133110981-133111070
  hyper
catcccgggtccacagcttcagtgcagcccctggcgacgcgcgctgacagctgggcagagacttccgtgcgctgtaaaccccttaggtc

SEQ ID NO: 28270 - DNA, 134 bp, Homo sapiens
  chr10:133999554-133999688
  hyper
cggccgcagcaagtccccgagggcagcccggcgtggcccaggcccgggacccccagcaggtagtggccgcgggacagaggccgtgggcccgggctcggactccccgagaccctcgcacccggaggacgccgggc

SEQ ID NO: 28271 - DNA, 207 bp, Homo sapiens
  chr10:134600998-134601205
  hyper
gcttcccccgtcgactccgcactcgattcgactgggattgggattcgattgggcgcggccgccccaccggtgatcggcccccgcggagcctggcccgggaacccccagcgcccgtccggccccgagacccgccccggcctgtcctgcgccccgctccctcggaggagacacgaggaagggccctcccgggtcgggttcgggcccctc

SEQ ID NO: 28272 - DNA, 128 bp, Homo sapiens
  chr10:134602414-134602542
  binary
gggggctgaggggcgacgggggaactccacagagggaaggagcctgcgttcgccttcggccgcccaggccatagagttcacaaactctgatttatcactgaggtgacttgtcccgcgcagccctaggc

SEQ ID NO: 28273 - DNA, 89 bp, Homo sapiens
  chr10:134902307-134902396
  hyper
ccttccagaggccatggaggctggcggggagcagggcgccacctgatcgcctccccctggacgcctcctccagcggcgctcacgcttcc

SEQ ID NO: 28274 - DNA, 452 bp, Homo sapiens
  chr10:134973438-134973890
  hyper
cggcccagcgaccgccccgccccccaccccgggccccgccccccaccccgggccccgcccggccctgcccaacgccgctgcagaggccaccccgggactgcggcagccccgcccggcagcagcgggggtgggacgggggcggcgggagccggcgagggggtctgcccgtccgagctttcctgggcgccggctccgcccctcgacccttggggcccaggtggggcgcagaccccgtggctccccgcggaggccacacgcctggctccgcccccggtgcctcccccaggaaggagcgacgttccctaggcgccgggtccggacagcgccgcgcagcccccgcgcaccccgcgccccccgcgccccccgggcccgccccgtatccctgaccgcgtcccctggagacactgcggcagcggcgggcgggcgggggcgggcgagggccgggcgcgtct

SEQ ID NO: 28275 - DNA, 71 bp, Homo sapiens
  chr10:20104635-20104706
  hyper
cgaaggggcgagctgtggttaaccctttcgtgcccagggagaccccgccagggtcggggcggggcgcgatc

SEQ ID NO: 28276 - DNA, 695 bp, Homo sapiens
  chr10:20104724-20105419
  hyper
cgaaggcggcccgggagccaggtgggtgtggggcgcagttggcggagctgcccagggcgtgcgagcaggctgcgaggatggcgccccggcggcgcggaggtaccgccccgcgctcccccgatagctccccggcctgtcccctctccccgcgctctggggcagccggctgcctggggcgcacggggctggagtggccctctccctccccttcgctaggctcccccggcttaatctgttggccgcgactcctcagccagccccgaggaaagtgcagccattggacaggtctgtgcgggctgccggtttcagggaggaaggtgggagaagcctggaggagcgaaggggagggcggagggaggagggaggagggtgcggcggcagatctggcaaattgcgagctgccttccctcctcaaagtgtggagaaggagcgcgggggagcgtggcgacggcagcgcctcctccgccaccaaactcctggggctccgcgggggcttggggccacctcctcctgagcccggaggaaccctctcccgataggttccagcgtgactccctcccactccacccttttcctttcttcttcctcttttttttttttttttttaaacacatttttttcctggcttcggacctcagactgctgcagccctaaccttcccagggctcagctctttggagctgcccattcctccg

SEQ ID NO: 28277 - DNA, 297 bp, Homo sapiens
  chr10:20106155-20106452
  hyper
cgcagctgaagacctctctggcactctcgtgctccctaccctctccccccaacatcacctatctgcccttgggaaacttattgcagttgcttttcggctaaacttaggcttcccaaatggggaaagagggttatcaagagaaggacgccggggactaggggttttcttgaggctttcgggcttacttcacctgggcggcagggggtggtactgtctccccaaagtagcccagggagggcttcagtgtgagagcaaagcttcttccgtggatacatctcctaggacctggcatctcca

SEQ ID NO: 28278 - DNA, 234 bp, Homo sapiens
  chr10:20106694-20106928
  hyper
caggtgggaaaggtggaggcgggctcgcctctggagacctacccctgctcccattgtcctccgcctgccagcttcacagacaggcctgaacgcgcagagagttccttggagtgccctgattttgtccccgagagggcccccaacctccgcatcctcttagtggctgtcctggcaggtgcgcgtcctgcggggagttgcgccccgggggctatcgccgagcgggagctgcctcct

SEQ ID NO: 28279 - DNA, 235 bp, Homo sapiens
  chr10:21462299-21462534
  hyper
gcgggcggatctgtggggcggggggcgggggtattgtggaacacgagtggaggtggagggggcgcggctcgccgaagtgcccccctgggtgcccagcctggtccctccggggtccggggctgcgcaccgccgtgcgccctccgcagaggctctgccgatgtcgcaccgccccgcaccgcgacaaaagcccttcccggttccaacatcacaatcgccaagcgtggtctctgacact

SEQ ID NO: 28280 - DNA, 300 bp, Homo sapiens
  chr10:21462671-21462971
  hyper
ggcccggcgccccctcgctcaccttatccaggcagttgactttctcggtgggatacacgacttttccgcaacgggcgcactgggggttcatgatcgcggttcccgggggcggcggcggcggcggctgctggctcccaggagccgctgtgacatcccccggcgagccccgcaccgcctcctggcaggcgggagggctgcgggcggcgggcgccgggtagggagtcggcgccgggccacgggtgagtgcacggggagggcgacggggcctggcgcctggggccggccgcgctctcgggctcg

SEQ ID NO: 28281 - DNA, 268 bp, Homo sapiens
  chr10:21463023-21463291
  hyper
gctcgcactccaggtacgggtgactcacacagtcactcgcgcccgcccctcgcgctcactcgctcccccgcctcgccgccgccgccgcgcaggccaaacccaccggcgcgcccggaccgaagtggcagggaacgtgcacgtcgggcaccctgggagggagggcgcagcgggggagggggcgggcagagacccggaaagctccgcagaccgccgtgggtgcgactgtgcggcctggggagtgagcctcgcgccaccgccgctgcaggcc

SEQ ID NO: 28282 - DNA, 628 bp, Homo sapiens
  chr10:25463893-25464521
  binary
gccgggaggcgggaacgacctgcggcgggtgagactatggagcagcgtcttcggcggccgcggcggcagcagcagcagcagcttctgaacgcgcctcaatgagagcggcggtggcggcagccgggccgagagacggactcgggctgactccagccgctgggagcgcgaggccatgtaacccgctcggctccaggctgcgaggtgcgtaatccccagccggcccctcgcgcagcgggcacggccagcgctgccacaggtgacttgatttctgcgacggtagcttagccacccggggccaatctcgaaacattcttattttcaagtcctttggactgggtgccatctggagaagggggaagactcctcgaaaaagtctgactgttgagaaactgacgatccaaatttaaaaagtgattcccccccctcccgttccctcctcttctctctgggaggcagatgggagccatggcttaccccttactcctctgcctcctgcttgctcagctgggattgggagctgttggcgccagccgcgacccccaaggacggccggattcccctcgagagaggaccccgaaggggaagccgcacgcccagcagccgggtcgagcctctgcctcggactcct

SEQ ID NO: 28283 - DNA, 187 bp, Homo sapiens
  chr10:25464915-25465102
  hyper
ggtcttcctccaggccacgcgcgaggagagccgcatcctgctccaagacctgtcctcctccgcaccccacctggccaacgccactctggagaccgagtggttccacggcctccggcgcaagtggaggccccacttacaccgccgcggccccaatcaggggccccggggcctgggccacagctggcgg

SEQ ID NO: 28284 - DNA, 64 bp, Homo sapiens
  chr10:25465600-25465664
  hyper
ggcgatgcgacaacttggcgagcgccgggtgtgtccgcggagtggcaagcctcagatgagaggc

SEQ ID NO: 28285 - DNA, 210 bp, Homo sapiens
  chr10:28031105-28031315
  hyper
catcatgtaaggtaaaaagacctcaggaaaagcacattcaaagggggaggaggcagaggcagccaggagcctggagcgtggcctggggcgctgcgctccctcacgggtccgggaggtgtcgcgcgcggccgccagcgagcccagccgctccccgaggcttgcgcgcctgcgccggagcctcctgggtttctgcctctttaaacactttga

SEQ ID NO: 28286 - DNA, 209 bp, Homo sapiens
  chr10:28032744-28032953
  hyper
cagtttgaatctgggagaggcatactccggactgcggagcgcgaccggcgtgaggccgcgcgtggttcttcaatcacagcagaagactaaagcctctaggaaccccaactcggggcgtcaggaggggttggatggaagggaagatttggggtaatgtgccaaccgtatccacaagaccccccagctcatgagtcccaggccataccggg

SEQ ID NO: 28287 - DNA, 79 bp, Homo sapiens
  chr10:30024003-30024082
  hyper
cgccttctggagctccactcggggtgccagggactgctggctgtcacccggggactaaaccactcccttcggggagccc

SEQ ID NO: 28288 - DNA, 735 bp, Homo sapiens
  chr10:30024793-30025528
  binary
cgcggggagcgggtccccgctcgggatgattcacttcgctccttacctggaggctcgcgcgtccccaccccttgcgacccgcgcggcggccgggagctggcgccctctgctgggccaccaggcgggagcaccctcggactgggcaaggatcgggcggagagggtggggacacagaggggggccaagcacaagcacccctgcctctctcaacgcgggcaccccttcccaaaacaggggccagtgcgcggggaccacgctgggacgactctcgggggaagcaccagagctgtccccacgccccaggacacgaactcgcgcccggagccgaccccctccacggccagcgggtccagccgcgtcctcggaggtggcccaaggaaaccgcgatgaatcggcataagcacgtcctatcttaaaacaccggaaaggcagattttactttgtttggaaactaagtttgtgtcctgtgtctcagtagctctcagggtggtggcagtcacgcccccccggtcccagggctgggaagatgcttgggctagcccccgctgcagccccggagatgcggggctttaggatcccaggggctggaggccagggccgccctatcgctctcccggccgggggtgtggctgtccaactcgctctgtcgcccgagtgaactcttccagcaggttggcctctcaggctgtcccctgaggacctgagcgaaactctggaggggaccaggaagaaggg

SEQ ID NO: 28289 - DNA, 586 bp, Homo sapiens
  chr10:33623220-33623806
  hyper
ctctgcctgtcacttaccgttgcgaaaagcgccggccggggcgaggacgagggcgagcacggcgcagaggagcggcagccccctctccattctcccttctccgggtccgcaggcagacgcgggagaacgaggacgtggggggaaatgcagcaaagaggagaatctaagcgatccgaagagccccaactccgcctagagctgtacaatcctcagcccgtcttggagaaaagaaagcagcgaggcaatgcctggatccgagaggaacgcttctctttttgtgtctcaagtcgcctgcatcctgtcatttagctccggcttcctctcccttttcccacacttgttcctcttccaggagccactgcccgggccatgtctcaaaaaaaaaaaaaaaaaaaaaaaaggccgggggggggctgtgggtgggagggggaggagggaggtagggcaacacacaccaaagccaatttccaggaagaaaaaaaaaaaatccggcttgtttctggacccgttggagccgcggagctggcgcccaggggaggtccgggtgtctgcgggaaggaggggaacgagcaatgaaaagatgagc

SEQ ID NO: 28290 - DNA, 216 bp, Homo sapiens
  chr10:33623838-33624054
  hyper
cgcctcccctcctgcggcctccccccactccggagcccttccctcgcttcctcccgcccctctccccgcttgggctcgcctgtaattgcctgacaggagactgggaggaacaactttccctccgagtgctctccccgtccgtctgtctgtctttcccagagaccctgcagggatctccgcgggaaggaaggcgctgggagtctgcgccccggtcgc

SEQ ID NO: 28291 - DNA, 46 bp, Homo sapiens
  chr10:33624447-33624493
  hyper
cgaagacagaccgcctgggcgggcgaggccgggctgcagccccacg

SEQ ID NO: 28292 - DNA, 139 bp, Homo sapiens
  chr10:33624560-33624699
  hyper
ttcccgagatttggtgcccgttcctctggggcagagggaacaccggagggtgggaggtgctgcgccttccaagcaggggggcaatcgccgcccgaccccgcccaaccttgtctgggagcccaggtgctagggaggggtg

SEQ ID NO: 28293 - DNA, 448 bp, Homo sapiens
  chr10:33624841-33625289
  hyper
tgccacccccacttcccacagcggctcgtgcccccagcccgctggatgccccccaggcccgtccccgagggttttccgagaagtgctgcaggaagcgtttgtagatgcgaaaagcaaggacatttctgggaagaaacaggttgcggtcaccgatcaggccccggagaagggtcagtgcccacggggcacctcccagggagtttgtgggtaaggtgaaaaggtcacacgcctcctggggattggcgtctacacacacagccaaagtacagcctgattcctacctggcacaaatagctggccaaagggaggtaggaatgctggcaaggagactctggtcaaaggttttggcggaagaaaaaggggcgggcagggagaaagcccaaggcgcgcgggccccaggccaggactgcgcgctcgcgactcgggctgggagcagtgacgtgcgccc

SEQ ID NO: 28294 - DNA, 256 bp, Homo sapiens
  chr10:33625870-33626126
  hyper
gccggggcggcctggagtctcggaggcccgcctgcgtcctggggggacccgacctccgcgctcgctccggagcgcccgtttggatagctctgagcctcggcggggtgagcgagggggcacacgagggagacttgagctgtgttgtttttagaaaactgccgccaatctctcttcccctttccctgctgagtgtgcattttccagcctagacccgccaggccagcaaataaagccaccggatcgtgcactccggagc

SEQ ID NO: 28295 - DNA, 63 bp, Homo sapiens
  chr10:35102985-35103048
  hyper
cggccccgcagcccagccacatggaaccagcccgggataggtaggagctgaggtcctcgcagg

SEQ ID NO: 28296 - DNA, 404 bp, Homo sapiens
  chr10:35103079-35103483
  hyper
tgtgctttccagagcccagcaagtgggatcagctcagtaaatgctcgcaagcgagtgccaagtgccagcggtggccctcccgggaacgcctccccgaccccaagccggcgactccccaaaccctgcagcccccggacgcgacgggccgcccctgccggcccctaccagcaggggacatggaggaaaagccccccgccgctgttccgcccccgcccgagtaagggagaggaggcagaaggctcgcaacccgcctctgtcggaagggcagtcacgaaactctcctcacaccaaaagttcccagtccccggcctgtgcccccggggcctgggagccgggaaaggcctggggctggatttcccggcctgcgccccccgcgcgctggctcggggcttggctgggtctgc

SEQ ID NO: 28297 - DNA, 545 bp, Homo sapiens
  chr10:35103534-35104079
  binary
cccgcgctaccgaggccggagctcccgggcggagggtgagggcgggggccgcgggacccggctgggtgtcccagaggctgcgccccggcccgcgcagagaactttggcgcccgcagtccggggcggggggcgcccgcgaggcccgaccggccgcactttccctttccccgcctccctgcgcctctcctcccccttccaggaagcgccatattgatcccggcgccgtccccgccgccgccccctccccgcccgcgcccccggcccctcaccttggcgatggccttccggtagcgggtcaccgcctgctggatgaggctgaaaactttcatgtggccgtccccgcacggcacgaccacccgggtccgtccgaagcacacggtcactttcatgccgccgccgccgcgggcgggcccgcgcccctcgccgagcgcagccggagcagccgaggccgggaccgaggacgctgggcgcggaggagccgctggggactcgggcgcgcgggcggctaggggcgcgggcaggcggcggcgacgccggggggccgc

SEQ ID NO: 28298 - DNA, 649 bp, Homo sapiens
  chr10:35104117-35104766
  hyper
tcgcttcgcccggggcttgcctcgcctctccccgccgcggcgcccgcagcctccggccacctgttcggcgtcgcggcgcgctcgccggcggctgcccggggctgtgtggcgctggcgctcgctcggggccgctgggggaggggacggcgggaggggaggggaggggaggggaggggagggggaggagcagggcagggcacacaacaccgcgcacatgcggcagggggaggcgcggccggctacccgcgcggggcggagcgcaggaccgcagctcgcgcccccgccaccgccctcgggggccgacctccttccctccttccctccctccctccctccctccgggggcgcgggacccctcgccccagtgccagcacgggcaggcggccgtctgcccccaccagccctggcccaggcgccccccagcccccttcaccccgcccgcccagcaccctgcagggctgcgtcgcccctcctcggggacgccccttccacgcctccagaagtctccacggagccccccttcccctttctttgtcacttttaatcccattcctcgaactggagggttttgggtgcaggcgctcccggggaaagcagtttgtgctcagtgcggtgagtcccctcctcaccgccccggaggctccagccc

SEQ ID NO: 28299 - DNA, 252 bp, Homo sapiens
  chr10:43572998-43573250
  hyper
ctcgggcgggagcggagcgcgggccgggccgcgggggtcggtgctcagaaccctagccatagccgcaggtctcaatctggccgcgccctgcgccaaagccgcgtcctggagcaaacgggacagccgtttcggggccgacctggcggacgggtcagggagccccgaaagcccgcgattcgtgcggagagttctgtttcggcaggagacggctccgtcctggtttccttttcccgctcagcgtccgtgcgttcc

SEQ ID NO: 28300 - DNA, 133 bp, Homo sapiens
  chr10:43725410-43725543
  hyper
cgggcgcgcgcctggcgctaggtgtgggggcgccgtaggtgccggggtgtgaggctggacggggcgtccgggatcggccgtgccgggggtcggtgctggcgcgcggggccggcgagggggcgcagcgtgggtc

SEQ ID NO: 28301 - DNA, 505 bp, Homo sapiens
  chr10:43761675-43762180
  hyper
cgttcctggggccggcaaggcctggggcaaagagagcgtggtccttcaaatgacccttgcccagcagggagagggagacacctggcatggccctggacctctcccccaaatgcagagctcaagccccaattcctcgccaaacagcaagggcgtgagataccacggcggggcccagaatgcagaagagcaaatggaaacttccaactgcgcagccctgagctcctccgattccccagcccccacccccacgccaggccccgggcagcgaacctgcccgcagtgcccacgcccgcccgccgcgtgcgctcctgccacgcccggcccggcccggcccggcccgccaggtgccctgaaggggcggagggtgcagggggtcctggcgccgtccagcccggggcggagttctcagcaactccgcgcgccgggatcccggccgccctccccgcgcgcgtcccccgccccgcgcccggagcccgcgccccggccccacgacggccgcgccggg

SEQ ID NO: 28302 - DNA, 217 bp, Homo sapiens
  chr10:44185124-44185341
  hyper
cggcgaggtccactgggccagaccctggcccgaggtggccccggagctgtgagcgggaggaagagggaagggcggagtctggagccctcacgccttccgccttgtgcgcggtgcaggctgccgagagcccggccgggcaagcctttccgccgtggtcagtgactcgtttgcacaaggactttttagggaagagagaagccaggccttcgctgtgggc

SEQ ID NO: 28303 - DNA, 78 bp, Homo sapiens
  chr10:44186043-44186121
  hyper
accggtgaggaccctgcacccagagtcgggggtccaggctgttgctggaacaggaggcagctcggtgtccacggttcc

SEQ ID NO: 28304 - DNA, 174 bp, Homo sapiens
  chr10:44879650-44879824
  hyper
cgtgtgaggctcggagggtccctgggcctctctcaggtgaacccgagaagagacaggaagacagcggctggacgcgcgcccaggtccgcgtcgctgcggaccgcggagctgtgcagaagcgcggcctggcgggtggcacaagcccgacagctgcgccgcgcagcccgcccgcgc

SEQ ID NO: 28305 - DNA, 296 bp, Homo sapiens
  chr10:62761026-62761322
  hyper
cgcgtccccatgagcctgcggatgtggggactgcgggtgggcagagagaccccccataatcccgcccaccctggcgcggctcctcccgggcgcgctcccgccccgccacgccccgcgacgcccgcgctacctggggacgctggaagctcccgcggcggctctgggtcccgccgggcggccgaggctggcgcgggctttgtaaagccgccgggacagcgccgaccccgccccgccccgccgaccccgccctctcccacctcggccgcctcccccgcctgcatcccgggccacagtcc

SEQ ID NO: 28306 - DNA, 76 bp, Homo sapiens
  chr10:62761372-62761448
  hyper
ggaccacgggtccctccacatcctcgcggcctgccggacagtcctgcgggcggggccccaacgcctaggcggtccc

SEQ ID NO: 28307 - DNA, 99 bp, Homo sapiens
  chr10:71333132-71333231
  hyper
gctctctctcgaggcgcggcggtgagaccgcagggatttcctgagcagcaagtcgtgtgccccttggcacgctttatctgcttcgcccgggccaggagc

SEQ ID NO: 28308 - DNA, 199 bp, Homo sapiens
  chr10:71389862-71390061
  hyper
cgccccatctccccgacccccagcaccccgcgccgcccccaaccctgggccgggcaggtgcaattcctcaggcggcctacagagggcgatgtgcgccgccactgggccgcgcccctccggcgcgcgcttcctgtgaggtcaggtgggaggaaaccgcctggagccgccgggagtggacgccgccgaggcccggagtcgc

SEQ ID NO: 28309 - DNA, 140 bp, Homo sapiens
  chr10:71390109-71390249
  hyper
agcccgggccgggacttggagccggtgtcgggctccagaggctggggctggcggccggggcagcgtccctcccgcccccggcccggaatgtcaggtgcgccgcgggccgggcgcgcgggtggcccaccgggcgggggcgc

SEQ ID NO: 28310 - DNA, 783 bp, Homo sapiens
  chr10:71812318-71813101
  hyper
cgcgaccatagcgcgtttgtgcccagttctggggaaagcctcatgttagcgagtggccctcggctcgtctcgcagatcggccaagtacgcggaggccgcgcggtttcaccattaatactcctgaaggacaatagctcatcaagccccaccgaaagccccggacccgtcgcggagcctgggctggcgggggatgaggctgagcaactcctcctagaggtggttatgtggagaaggagcaatcccttctccctcctcctcctccccccgctactatccgcggcccagagaactgccgcttgccgccattgacacgcacagatagaacccaaagaaaggcaaagagtcctgcccggcaccggcgccgcgtgggccaaacctgcgcccgtggaggggcgcgcagagggcaccgggcgccgggagcaggcggcgcagcaccaggtgagcccgccatggcgatggcattattgtttagggtgctccggggtctggaaacaaaacgcgccgccggggcagtgcaggggccggagagaaccacctctgcctctcccccgagcccctgcgggcgcaccctcgatagccgacccaccctctgcaaaaacaaattcttaaatccagctgcccaacttgcttccttgggcgataaagggggggctgctaaagaagtggtcaaattcctgcggccagcgaggggccgggggcgtcgagggtactgagaggggaaggaggagggatgcgaggttcagcagcgggccccaggcgaggctggacccggaggaagcggag

SEQ ID NO: 28311 - DNA, 239 bp, Homo sapiens
  chr10:734738-734977
  hyper
cgagaggaccaggacggcaaggccggagcccggcccggggggaggttgacgattccgcccagccctccccgcgcagcgcccgcgaacaatgggggtgggatcccccgggccgcgccaggaccgctgcacggcctgagccaccagagatcgaacccggggtccaacgacaagtttcgcattgaaatctggccgggcgttccaggccgaacccgccagcgaggaggtggcgcgcaccgcgc

SEQ ID NO: 28312 - DNA, 176 bp, Homo sapiens
  chr10:735049-735225
  hyper
ctgcgtccccgcgcggcgcccaggccccacagacacccccagggcgcggggggatcgcggccccacaaacatcccagggcgcgggggatcgcggccccacaaacacccccagagcgcgaggggatcccaggccccacagacacccccagggcgcggggaatcgcggccccacaaac

SEQ ID NO: 28313 - DNA, 884 bp, Homo sapiens
  chr10:735245-736129
  hyper
cgcggcctcacaaacgtccctagggcgcggggtctgggggtccgggggacgcgcacgctccgggctggggtcgcacctccccctccgggcccggcccccgccccgccgcaggccccgcgcccccagccctccgcgcgcggccctccccggtgacagcgcggcccggcccggggcgggggcccggttaccttccgacagctccagctccagctcggccaggcgcgcccgcacctccaggggcagcgccatgccctccaggctgcggtccgccatgctccgcgggcgccgcgccccgcacggcctcctctttgttcgcaggcggaggtctcggcggctcctcgcgcccggcggaaccgcaccgaggaggaggcggcggcgcgggcgcgggaggcgggcggcgggcgcgcagggacctccctcccctcggcgcctcctcagcgcggccccgccacggccgcctcgcgcgcccccgcgccccacggtccccggcccgccccgcgcgcgctcggcccctccccgcaggcgctgcggacccggacccggccctgctgctctcggccccggcccggcgggagcgtctctgcgcgcgcgcgtcacggggccgcgggggcagggcgcgcgcgcgcggggcgcgaggacgcgcaggagcgggagcgcgcgggggggcgcgcggccgcgtcggcgaagcgcgcgctcccgggggcgcgctcgggggcgggttgggggctcggggcccgcggggcggggcggggcggggcggtcttgtctgtcctgggctctgcgcgtccagcggagcctgcgggcccggccccagagcctggtccacccggctccctgcgaaaatcacgtcctggagccgcagcttgacgtctgcgcgaaaactc

SEQ ID NO: 28314 - DNA, 107 bp, Homo sapiens
  chr10:7708304-7708411
  hyper
tcgtgttctcccggttttcaggtgggaaaagctgaggctcccaggagtctagaactcctctcatattgcctttctccctggatcaactgggaatgatgataacagca

SEQ ID NO: 28315 - DNA, 346 bp, Homo sapiens
  chr10:77159582-77159928
  hyper
cgccgccgcagctaatccggccgtgtgccagccccgtgggtcccccttcggccgaggcgcccccggtgcccttgccaccgccgcccacgtcggtgtctttcttgtcgtccttgccctccggggcacccccggccgaggacagcatacctcccggcgagcaggccgaggcgctggagctcgggctgcctgtcctgggcgtgaatggctggcaggtggcgctcggtacccggaatcccgacttctccgacgaaacacccccgccgccgcccccgccaccgccaccgcctccaccgccgcctcccggctccttcttatccgagccgggtttggagtacggcttgaaact

SEQ ID NO: 28316 - DNA, 1016 bp, Homo sapiens
  chr10:77160017-77161033
  binary
cgccgcccccgttggaggcaaccgaggagagtttggaggagggcgaggggtcgggcttcccgatctgcgaacatgtttgcgccaacagcgccagcgggctcttcttggcatcgagctgcggggtcagacgatggggggggagcgtcacacagagaaagaagtggaaaccctttagaatcctggcttctggggttcaaatgcctctccgcaacagcccacgaagatcctcccagccccaaggcgcaattctaggcggcaccccctcttcaacacccactcacaaacattctcgccgttgggaaaggcagcagattgctccccccgcccaaccaccacccccagcagcatctttcctgccctctctgagcgctaactagatttttaaagagcaaaatgttttggttttcggttcctagacccagaactgtaccccctccccacaaacactccttaattcttcagagtaagggctcgggcggctggcgcctcagaggctgtgtgcacacactggcttctgcggatacgaaggacggcgactttggaaccgtatttcagacctccgcctgccttcggtgccgagtgaaggggcctgggtcggggtaggggctttcatatcgaaaggagaaacaagtattggcagccttgctccctagcatgcacgccccattccacttcctcccccttttccgccctagttttgaggtacggaagcagtagcctcttcccccattcgggagctgaatcactccgacccccccacctccgcccagatcccgagaaaaagaaagccctagggtggcagccagggtagtggtcccagtgcgatccagagagagggtccttacctcgatggggctgaccggcgtggaaggcaggggctgcaggtactcggggtgcaaaatgtggccagttcgtgccgtcagcatcttcagcaccttgattggcaggcggttggcctggcgcagggggtcagaggggggcacggcgtgcacaaaaggcttggtgctgccggccgg

SEQ ID NO: 28317 - DNA, 218 bp, Homo sapiens
  chr10:77161406-77161624
  hyper
agtgccgggcggctcgcggtgtccgcctcgggctgctcccctgcgctgcgttctcgcggccccgcgccggcgctgcgctctgcgatgcgagccgctgcgtgtccagccggggctctggcgaggaaactcacttcaaaagcagctgcaccaagggggagattaaagcctttgccgccttccaatcaaatgggagcccgaggtgattggagggtcaaggg

SEQ ID NO: 28318 - DNA, 1016 bp, Homo sapiens
  chr10:77161691-77162707
  hyper
gctccctcttcgccgcccccctgtgtgtcccctccctcgatttcgctgggaggacgagatggacatttattctacgtttgccatccgccgcctccctcttttttcctcctcgtcgttcttcctttccccagctcgaaaataaactgaaaccttcttttgaaggggggtgcgcgtgaggaacagactgcggggggtgtccagaaggagcaccggtgggagtgtggacaccggccggactgtcaactccaggggcgaagggaacctgcacacccagtgttttttccttcgcagtaatcgagatcccgcgcggcgcagcgcagccaccagggtaagaaggcaaggtggggagccggagctggaagaagcccgcccgcccgctctaatttcctcagattccgcggcggagaaaccagaagctagatgggcagtcgcagcggcggcggctcaacaccgcgaggagcgctgggctctccgcccttcccggccacgtgacgcccggggacgcgtagattggggcagcagcgggggtcacatgtttcctctgtttcaccctcagtctgtcccccaaccccccattcttactctcccaccctgttttcctccctcccccccttctttgggcatctccacccctccatcaattgtcaatgttcctcgaccgcaatcaatcagttatttgtcagctcttgtcaatcctcccgtgatttatgtcagcttttgttgctgattacaaggcgggtgcgacttgaagggaaaaagagagagggagagagagacggagaggaaggaggagattgagagggaactggaggaggggaaaagaggagcggcctcctgggatgggggtggggtgggggctctaagaaaaagaatgaaagaggcgcacggtgtcaggaaaatgaatagcgagagtaaagtgcgcaggtgcgcccagggcgccgagaggggcgcgcaggcctggagtgtgcgcctgccctctcggtgtcggagagacgcccttccacctctgggagcct

SEQ ID NO: 28319 - DNA, 325 bp, Homo sapiens
  chr10:77163338-77163663
  hyper
ggatgcccagtgtgtatgcatgcctgtggcgctgcgtgagttatcggggctctgatagcgtccggagcgggttcgagggtctcctccaggaactcgcagaaattagagggggtggggaggaggacacacccccttcctcggaacgacttagaagactttgaatctcccctcctccgcttttccgccccggctcttcttttgttgtcaagtccttttgataaatggtggggctgggagctctgggagtcgggagccagtctgtgcccgcgtggggggcgggggccgagcctggagacccggtttcgaccggcgcgcacctggggct

SEQ ID NO: 28320 - DNA, 86 bp, Homo sapiens
  chr10:77163726-77163812
  hyper
gcccatctcactcccctcccccacctgactcccctccccggcttctttctctgtctcccactccgcacgggtaccgagaactttcc

SEQ ID NO: 28321 - DNA, 311 bp, Homo sapiens
  chr10:77168785-77169096
  hyper
cgcgctcgggaggggaggctgtcaaaacccagtcatcgcggggactggatgggggacaattctccgacgccgcggcctggacccgcccccacccaaccggcgcaccacctcccaggcaccacggagcctgcgcaagctgcggggccgtaaaggaaccggcccccaatctccggggcttcagtcccgcccctctctccccccagtgccctgcagcgctcccagggtccgtgtctgccctccccaagcccccactgtcaatacaatccctgttaaaaaaaaaaaatctttttagagccaggcacgtgccgtcg

SEQ ID NO: 28322 - DNA, 364 bp, Homo sapiens
  chr10:77169218-77169582
  hyper
agggctggggagtgagaaggacagagagcaccgcccgacacaaccagacgcgcggacccggggcctcctctctggaccggtgctggggccctggtagaaccagctccgggagccgaaattgagccatgaagagtgggccgagggaggggcgaggggaacgggcctcaggagggaggggcgggcccggcggcacttccgttgggggtggggctgcgggctgccgcgccggtcccgcccctccgccgcgcgggcccgcccgctccaggccaggctccgcccccaccgactcggagctggatctcaggccacggcgcccccccagtcgcgcccccaaccccggaggcctcgggctgaaccgggtttc

SEQ ID NO: 28323 - DNA, 201 bp, Homo sapiens
  chr10:77190985-77191186
  hyper
cgttcagccaagaggcccctcctcgctgcagttgaggtccattatgtaacccagcttgcgaaatgcaggaaaggcccggctggctacagcccggctaacggctcagaaagggcgcccctgataggaatacccccacctcaggcgtggcccagacaaacgcgataaagctgtgggcatggagttttgggcattgggacatcc

SEQ ID NO: 28324 - DNA, 169 bp, Homo sapiens
  chr10:8092278-8092447
  hyper
ggctgccggcaaagctctggcccccggcctgcgacgtgcagaccgcggggccgcggacccggctggtgcggggtactggcgccggcctcgacacctttggcctccacttcctccccagactcacagcgacagcggccgcttcacaccgtttttattgaccgatcgcagc

SEQ ID NO: 28325 - DNA, 602 bp, Homo sapiens
  chr10:8092535-8093137
  hyper
ggcctttggtgtcgctccccgccccccagccccgcagattcccggcttcttttctgtctgcgcggccgggaccgcccaggcaggcgccggggctccggggctccggggggagggactcggcggctcggctcggctccgcttctttcttctgcctgcaaatatttgctgcctcgctggaaatccgacgatttcgcgcgcgctctgcttgcaaagtctttaagtaaacacgctcaaatgaccgccccgggcggcccgaggcacgctctctccccctccgcgggattagtaactttaggacttcgaccccggggctccgctttgcctgttacccaggtcgggcagcgcgcgggcgcccggggccgcttctcccggcacctcggccccgcggagctcgcctggaagcgccggttgcctggctctggtgggtggcccggccgcgagcatctccgcgccctgggtctgtagccctagggctgagccccagaaagccgcgcctccgctctgcgccatggcctctgctttctgtacccgactgggtttccccacttccactgggacagggtctcttcgcccctgggagggcgggtgggagggacttgcac

SEQ ID NO: 28326 - DNA, 103 bp, Homo sapiens
  chr10:83634159-83634262
  hyper
ccgggacccccgacgcagtctcccgcttccgtcccccacgctcaaccgggcagggcgccggggcgtgatttccgatcctctgcctgcttgttgggtccctcgg

SEQ ID NO: 28327 - DNA, 47 bp, Homo sapiens
  chr10:83634499-83634546
  hyper
tgcacctcaccgcccgggctcgcggagcagccgccgaagatcgcggc

SEQ ID NO: 28328 - DNA, 113 bp, Homo sapiens
  chr10:95753372-95753485
  binary
cgcccttcccggagccgggcgccccaggagcgctctctctggctcccgccagaaaggatggctcctaggggtcagggccaggggtctgggaaggggtcgcgccgccagcagcc

SEQ ID NO: 28329 - DNA, 373 bp, Homo sapiens
  chr10:95753760-95754133
  binary
gcaacgcggcgggcggcgggctcgcgcggcgggaggggcagcggcggcgcgcccgggctctacctcccgggctctgcctcccgggctctgcctctcgggcacttgcctggctcctgcgcgttcctgggcatcggctctgcagctgacacacagtagcggggacacccgacgccgctagcgacaggcgcgcggacggctggtcccagagggacgctgcgcttggggacgccggcgagactcgccaggagccaagaggtgaggaagcgactctgtagctcggttcctgaggactggagaaagggaaggatgggctggttctctcccaaggcagtcgacccgcctaagggagcagcccgactccgcgtacctggcg

SEQ ID NO: 28330 - DNA, 50 bp, Homo sapiens
  chr10:95754214-95754264
  hyper
acaccctgccagtgccttcactccagacgcctgcctcaggtcgccccttc

SEQ ID NO: 28331 - DNA, 162 bp, Homo sapiens
  chr11:100999159-100999321
  hyper
cggagacggcttcactggggccccggaccagtgagggctctcagaggccgggagcagcagctgccgggctggtgacaggccccggggcagcactttatgggcagctgccgtcccggagctgtctccaaccttgcacccggaccggctcatgagcggggacaa

SEQ ID NO: 28332 - DNA, 242 bp, Homo sapiens
  chr11:100999360-100999602
  hyper
aagttcggggccaaacaggcaccaagagctggtgacctcgcaggcgggagggctgggttggctctgcccgggacctgagggcgccaacagagtgtccaagacactgtccagcagtccgctgtccttttctgggggactagaactgctgcctccagcaccccttgtagcttcagctctggaatatgcgccctccacgtccgacagcgactgctggtcctgcgtcttttcgtcggaggggtcct

SEQ ID NO: 28333 - DNA, 804 bp, Homo sapiens
  chr11:101980831-101981635
  hyper
cgcccgcgttctccgcagacaccacagttcggacccggattggacccatcgtttgcggttcgcggggcagaatacggggcacgcttcgggcccctgcccggctgagcgcgggcgaagggcggaccgggccagggcgagcgggtcacgtgcggccgggagaggcgccgcgggccgggagtgtgcaggaatgtagcaacttgcagcgaaaagtttccctgcgctgccggccgggccgcggtgcgggcgggcgcgcagaggaaggaagagccgagaggaggcggggccgcggcggcgcgggcgggcgcttctcctaactttagttttggcgtttgaggcgagtttctgtctcagtcgggcgcagccgccgccagggaaaagaaagggaggaaggaaggaacaagaaaaggaaataaagagaaaggggaggcggggaaaggcaacgagctgtccggcctccgtcaagggagttggagggaaaaagttctcaggcgccgcaggtccgagtgcctcgcagcccctcccgaggcgcagccgccagaccagtggagccggggcgcagggcgggggcggaggcgccggggcgggggatgcggggccgcggcgcagccccccggccctgagagcgaggacagcgccgcccggcccgcagccgtcgccgcttctccacctcggcccgtggagccggggcgtccgggcgtagccctcgctcgcctgggtcagggggtgcgcgtcgggggaggcagaagccatggatcccgggcagcagccgccgcctcaaccggccccccagggccaagggcagcc

SEQ ID NO: 28334 - DNA, 612 bp, Homo sapiens
  chr11:101981964-101982576
  hyper
gagccgcggccgccagctctggtcaggggaggggggttgcgggaactctagctggggtgggggtcccgaggcgaagtggaactggagtcgtccactccgccgcggtgaccagctccccactcctcccagagtccggggctgagatttgtttttcccttctgagtttctctctgcggttgcagccccggggggcgtgctttccctccttcttcctttctttcttcccggggttcccgagaggttggcgggagtggaggaggggtggggaggaaggaagggggtggggaaaagtcgggcctgggccgcggtgggcttgcacaatgcgcgcgcctccgcgcgctccgcaccttcgctcccgccgggccgggctgggaaagggggaggggggcctctggcatttgtgtgtgggtgtgttgccagcggcggccgagtttgtgaagttgagccctgggcccctttcctttgcggcctctcggtccacttcagtctcctgggggagtcaaataattgttctcttgttttccagtgttgattagaggtgggggtagaaccggtccatttagttttttgctctttctttccttcccccctcccgtttcccctccccctccc

SEQ ID NO: 28335 - DNA, 502 bp, Homo sapiens
  chr11:113345738-113346240
  hyper
tccctcctcctctccccgtgacactgagtcgcccgccgctccatccggccggtgcttaccttcaagccatagggcgcccgggggcagagacggcgccggctgcttgaggcttccagctcccgccgcatccacgcgcggccgcccctccggcagccgtccggggccgccactctcctcggccggtccctggctcccggccccgccgcgccgttcagagccccggcgggcagcagctcggccggctctggcccgcggggagcagtggacgggccgcggcggggcggggcggggcggggccgggcgcggggcgggcgggcaggagggagcgcggggacggggcggaggcggcgcggtgcgcgcgtgaggctgccggttcggcactgaagctggacagctctgcggcgcccgagcgcggggagcgcgggagggaggtgccccggtccccgcccctgagacaggccccgcccccgccccccaccaaaggagctgtacctcctcggcg

SEQ ID NO: 28336 - DNA, 239 bp, Homo sapiens
  chr11:115374753-115374992
  binary
tgggtgcagccatccctggggactctcattcacacttagccgggcaggggagaaggggctcacagatgccctcagccccttccctctcagccctgagtttcctctccacactccctccgcttcggatgtaggaagtggggggaggttgtcatggaaacgtttcccccctctgtggccaaggctactggggtgccttcggagatttaggggccaaccggtcggtgcccacacctacctgt

SEQ ID NO: 28337 - DNA, 399 bp, Homo sapiens
  chr11:115375434-115375833
  binary
gctccagggggcgggtctagcttcttgtacacctttattaggaatgtttatagcaatcgctgtatcagaccgacgactggagaatctcccttaagagggtcctctgtcccgcacaccgagtgcatctggcctagcgaaccagacgttgcaaatttccgtcactcaccttgcaccgaaggaatagatctttgggaacgggggctgtgcgggagtggagagtaagaaggcaggtccccggattgacaaaacaatctgggagaagtgcatgcgtgctttgcacgtccggcggagcgggagagcccgctcaacagcctagcggtagactcggggatagttggagaaggcagccgtagagtcgggttctgagattttccagtcggtctttttgcggcagaatct

SEQ ID NO: 28338 - DNA, 301 bp, Homo sapiens
  chr11:115375894-115376195
  hyper
tggttttaatatataggtgtgtgttgaatatatgtgtgaaatatttgtaatattagatatttaagattacacaacaacggaaaaaattagtcaaggcttcaggtgaagagcgggggtggtgggagttggggagagggagtgtggtgaaggcagggtctgccgtgttcctccttcggggctcaaaccctctcactcctcctctgcgcccccagcccttcctaaggaagctggggaccaacaggtgctccgagcttcccctgtctctgggagagcctctcctgctaaagcgacttgcatctcc

SEQ ID NO: 28339 - DNA, 752 bp, Homo sapiens
  chr11:119455153-119455905
  hyper
cgattccctcttccgcggctccgcgcggcggagctcaggggcgcaggctcttagagctgcggtggggcgggggccgcgggacgtccgtttgttctccgcggaggaggcgacgcgccgccaacgaccgcagctccacgtcctggcgcttctgggagccgccccagcgggagccagggagaaaatgaatcgccttgagtgacacaggacatggcagattggatgtttaatttgggtatctctttagaacgccccccacgcccacctcctctgctcccacttagcatccagccggcgagaaagccctgctcctcacaaattgccttgtcggctcggagaaaaatgccagcgtgactgattgctaggtgggtccctccaagtgcgcgggaaggaaccggcacgaccgcacaatgctccttcctacagagacgcggcgtcgtgccagagccggagatttgagtcagacaccgggaaggactgcccgtggaggagggcggctcgtggggctgggggtttgtttaggggtctctcgggtccagagggagggccaggcgaccctggctggggtctggtggctgtggggggcctgcggggcccagaggaaaaggccggcacccggtccgcgagagggggcacgtacggggcgcagaggcagaacgcagcccgcagcagacggacagccttccccagactgcctggagctcggagcccggcgccgaaacctgcagatcacaacctgtcagtcgcgctttccc

SEQ ID NO: 28340 - DNA, 224 bp, Homo sapiens
  chr11:120110626-120110850
  binary
cgccactccgggcgcggtgaggaggtgctgccaggctgggttggagcaggcaggtgttccgcgggatcgagacccgccccggcagcacccccggccccctccccaggtccccagctccatgtatgcaaatcactgctttgcatgggcctggggccaggcgcggggctcctgccagggggcgtggccggcggcccccgccccgcgccgcgtgctcacctggggag

SEQ ID NO: 28341 - DNA, 155 bp, Homo sapiens
  chr11:120110967-120111122
  binary
ggagaccctggcttcgcaggggccccggctggggcagaggcgaggggcctgggggggcgctggctttggccccgcctggggcaggatggtgaatctggagtccatgcacacaggtgaggggcggagggaatgagctctgacaggtgtcactgcgc

SEQ ID NO: 28342 - DNA, 263 bp, Homo sapiens
  chr11:12030561-12030824
  binary
cctcaagcctctctcagcccctacctggggtggaccaagcacaggtcagccccctccccttggcgtcgggtcctactcgagcgccccgccccacatccaccaagagaggctgagctcagcagagtcgtcccctcccccgccgccgcccctcacccaccccgactggaccgagttgcgctgcgggccggactggatctgctcgctcccgccgggaggccgccgggctgcgggtgcagatgcgggagcggcgcggtgggcgggcc

SEQ ID NO: 28343 - DNA, 53 bp, Homo sapiens
  chr11:12031006-12031059
  binary
ctcacgccccacgccccacgccctcctcttctgcctcagcgaccagctctacc

SEQ ID NO: 28344 - DNA, 125 bp, Homo sapiens
  chr11:12131738-12131863
  hyper
cgtacacagtcggtactagaagtgccatgctgctcccccatgtccaaaaggggatgccgtgtcttgctttccagccgcctagaccaagaagcgtgaggcccaggccctcgccgctcccttgatac

SEQ ID NO: 28345 - DNA, 288 bp, Homo sapiens
  chr11:12132212-12132500
  binary
gcgcccgcggccagggccgaggcaggcctgacccggggccgggcagcccgcgcgactttcggtaaggcgggggcggcgctggcctcagggtggggagggcgggcgggcgcgggtggggaccgtgccagcctcggctggactctgcgccgtgtccaacgcccgggagggtcaggtgcggccgcagcatcccccgcctcaaacccacccggcggggcgcacagtgagcaggtggcgctgcgacgaagcccggggcggccctggccggcctctgaaccaattagaacgcaa

SEQ ID NO: 28346 - DNA, 418 bp, Homo sapiens
  chr11:123524977-123525395
  hyper
cagccccgcggctcctgcttcgtccgccctaactgcttctccagctgggcgtgaccccactcccgaagccgccggggccgcccgtctgggctacagaatgcgttccacgtcggtcccgtccacgcccgccctcggctccctggggaggtgcagcggggccgggaaggaagcggcagctcccgttcggccggcgatgtcagaggttggggggtgggtgtagaggcggagccccttcccgggagctcgcccccggatggtgcggggccccgaccctgggtggcaggtgatcagcaacccttctctaggcccccaggccgtgtgtgctgtcagccctgacatgcgcaggcggctctccgccaccaccaccgccccggaccctccccctagtgcacactccccaccccctgatgggcgtgcc

SEQ ID NO: 28347 - DNA, 137 bp, Homo sapiens
  chr11:123525473-123525610
  hyper
cgcgcgctcgctggtctctccaggtctccctctcgcgcctccgcacctcccccgagctcgggcgcaccgccgccctcggctcacgccctccaggcaaacccactccgctcccgcacggacttgccgggtgtagctcc

SEQ ID NO: 28348 - DNA, 56 bp, Homo sapiens
  chr11:12399222-12399278
  hyper
ctgtccccaagtctcccactcccaagtcgcccccgtcccgcaagaaagatgattcc

SEQ ID NO: 28349 - DNA, 345 bp, Homo sapiens
  chr11:12399383-12399728
  hyper
ggccgaggggccggggcactgggaccgggcgggagcgcgccgcgggtgcccggcgcggtggggcgcgcggcgatgcgtgcgcgcgcttcccgggtacgtcgggcaggagcgacgcgcaccccacactgagcccggggctcgcgggccatcgaggccaccccgcccgctcgcggtcgcccgggcgctgccctcctgggccggggaccaggccaacgcccccgccgggccgtgggcgggcgccgcttggcggccggaggcggcgggaccggagcccaggcggggccccagcccgcagacagtgcgatccagtaggccctgccccgccctctgcgcccgaaggctggc

SEQ ID NO: 28350 - DNA, 71 bp, Homo sapiens
  chr11:12399791-12399862
  hyper
tccttaaaatcaggtcgtttcctggacctgctgacgtcctctggcagcggcgtcgtggctttggcctcttc

SEQ ID NO: 28351 - DNA, 618 bp, Homo sapiens
  chr11:124932779-124933397
  hyper
cgagattagtcatgcagggccgctgagtgtgacttccagccctccagcgtctcgtgtcccgcccgtgtcggagcccatggctttttaggacaggaagcgctgcggggtagtgcgggcaggcaggcacgtcacaccggacagcgtcgagattgctgctttcggttccccagcgggtggtgaggcagaaagtgcagggcggaatgaggagccccagcacctcagagctgtcgggcagtggcggggaagcaaagcacaggagcgctgtggtgccagcggccgggctagggacgactggcgggtttgcgctggacccgaccccgagggcgggcgcaagggggcgggcgctgccgtactcaggccgcggggccagggcgggccggccggcggggcatttaaaccccgctgacagccagtccagcccgggacacgcgcccagctctgtagcctcctccgtcgactcagccttaggtaccggtcaggcaaaatgcggtcctccctggctccgggagtctggttcttccgggccttctccagggacagctggtgagcggggcaggggagggaggcgtgccgggacctcctgggctcggggcttgcaggggccgcggggggcctcgg

SEQ ID NO: 28352 - DNA, 234 bp, Homo sapiens
  chr11:12696746-12696980
  hyper
agccagaagttcggagcgagcgcgggcgggcagagccgccgcctcggagcccggagccggcctgcacccccctgctttcgccgccgccccccggcgccgggtacccccgaggccggcccgggtctgcgcagacttgtgccgctggcggggggttcgctccttcttctcaaagatgaaaaagggcacggtcgtctttgccgcttctccaggactgttgctgccgctgccgccgcc

SEQ ID NO: 28353 - DNA, 544 bp, Homo sapiens
  chr11:129148497-129149041
  binary
cgtcgtccaacatgcagcggcaacttcagtcaatcggaaagacgaggggggaactccacgggagcctaagggagcagagacctctggccccgcggggcccacgcacacctgggggcgggacccgcgatgtcgcccgcgggcagcggagggaaacgctcccgcggctcctccgggagcgccggtgtccctggagcccccactcggccgctcccaggagtcgcggctgccgcccgccttgggcccggggcggagagcgctgcggcaggccagaacgccgtccgaacgcccggctcgcggaggccgcggggagcgcggggcgcgggcgcgggaggcggtgggcccgcagcgccgtccgccccgggaggccggggagatggggccgggggcggggggacaaccgagaggctcctccgggagcatgcgatccggaaccctcactctaaaaagaatattttaagaaggaaagagaggccccccgcagccttccccgcggggcctgcccacgtcaccggcgcccccggccctcccgcgcgcccgccttacc

SEQ ID NO: 28354 - DNA, 820 bp, Homo sapiens
  chr11:129149096-129149916
  binary
cgtgtctgccctccgcgggccgggcccgacgccctccgcccgccgccgccgccgccgagcgccgcccgcgccgccgagcctagcgcctggccgccgagggcagccgcgggggctcggccgggcgtcccccgcgccagcgcctcatcccgcctcgcgccccgtcaggctcgggggcgggggcgccgggccgcggcctccaagtccccacctccggcacgcaccgcgctcgccctcccgcggcggagtcggcccccggggacgcgggtcctcgggctccagagcctctcaccctgacgccttcgggccgcccccgcagcgcccccgcccagctggccggcgcgtgcccccgccggagcccgccgcccgcccagcctccgcctcctccgctccgcctcctcctgcacccgcgacgcccgcagcggggagaagaggcgcgccgccgcggccgcgggcacgagcacgcgcgaggagggcgggcggcgggcggagcgcgcgcgcggccgagggggcgggggcgcgccgaagcctcgcctgctgttgtcccgggagcgcacgtgcgctgcggtggggcgccgaggggcgttcggcgggtgcccctaggggactgggggacagggaacgcgaagtgggtagagacgctgcctgagaggtcccgacgtaggctgttgcctcggccccggcattgtgctgcggtgcaaaaataaaaaaccggccgccgccgcagcagcagcagtagcaccgggaagaggcatcctccgagactacggcagtggctcctctctactcccagctgacccccagaacactgtcaccgcgccgc

SEQ ID NO: 28355 - DNA, 333 bp, Homo sapiens
  chr11:13031624-13031957
  hyper
atgacccaggagaaacagcggcgagtggtgcgcaaggcctttcgcaaactggccaagctcaaccggcggcgccagcagcagacaccgtcgtcctgttcgtccacttcgtcgtccactgcctcgtcctgctcttcgtcgccgcggacccacgagagcgcgtcggtggagcgcatggagacgctggtgcatctggtgctttcccaggaccacacaattcgccagcaggtgcagcggctccacgagctggaccgcgagatcgatcactacgaggccaaggtgcacctggaccgcatgcggcgtcacggggtcaactacgtgcaggacacttacttg

SEQ ID NO: 28356 - DNA, 345 bp, Homo sapiens
  chr11:13032312-13032657
  hyper
gcctttacattgggctgcggctcaacacggacctagaggccgtcaagtcggacttggattacagccagcagcaatgggacagcaagaagcgcgagctacagggccttctgcaaactttgcacactttggagctgacggtggcaccggatggggctcctggctctggcagtccctcgcgggaacctgggcctcaagcctgcgccgacatgtgggtggaccaggcccgtggactggccaagagcggtcctggcaacgacgaagactcggatacgggactgagctctatgcatagccaagactcggactccttgcccatgtgcgaatcccttgtgtaggggtgggggg

SEQ ID NO: 28357 - DNA, 242 bp, Homo sapiens
  chr11:134201549-134201791
  hyper
agcagaaagacggcggactctgcaccgctccacgacactggggacccgccccggccagacccgtcccctaccgagaccttgtccccgccccgcccccggccggggccccgccccgccagccccgcccccgccagccccctctcctaccgagacctcgtccccgcccaccagccccgccccgccccccccccgacagaggccccgccccggccccggccagccccgcccccgcttgcgcgagg

SEQ ID NO: 28358 - DNA, 236 bp, Homo sapiens
  chr11:134202154-134202390
  hyper
cagctgcttctttctgggagctccccaatacccccgagttcccctgcggctgcaggcactctactcctgccgcgcgatccaggcctctgggcgacacccggcgtgccctcgggagccggcgtctgtgccccgagccgcccaccccgccgcgcctgtgacgccgggctctgccccccgtggacgcccgcagccctccagccgtcagagccctctcagacgcaccccatcgcggcccc

SEQ ID NO: 28359 - DNA, 73 bp, Homo sapiens
  chr11:134281810-134281883
  binary
ccccggggactgtcgggctccgggcccccgggggccacttcatagccgcggggtccgcgcgcccgcccgcccc

SEQ ID NO: 28360 - DNA, 732 bp, Homo sapiens
  chr11:1410711-1411443
  binary
cggacgtggcagccggcgggctggaggctcccaggtcccggcctcgccctggcctcgcctcgccccctagagtctccccgagcgctcgtagcggcggggcggggtggggaggcgctgattggccggcgcgggcaccgcttgccgccgccacggcatcccgctgcgttcgtacaggctcgtgtcgactcggctccgttgcgcggcccggctcggctcccctcagctgcgctcgactccgctgttcggctcggctgttcggcttggctacagggctcggctgttcggcttggctacatggctcggctgcgcggctcggctctgttcggctcggctcggctgctgggctcggctgttcggctcagctgcgcggctcggctcgtctcggctctgttcggctcggctcggctgctgggctcggctgttcggctcagctgcacggctcggctcggctcggctcggctcggctgcgcggccgctgacgggcgtgcgctgggggcgcggggcgcggggcgcgggcctcggcggcggcggcggcggcggcggcggaagccaggtgcccccgcccgccctgtcctctcgacgaggcggaggcgtcgccgcgggccaggcctcggactgccgcgtcggagtggacgcggggggcggcggcgcgggcggacgcgggcggcgcgaagcagcggggcccgcgggggcgccccggccgggtcggcgcggacggcactcggcggacgc

SEQ ID NO: 28361 - DNA, 347 bp, Homo sapiens
  chr11:14665271-14665618
  hyper
cgcgcgcccaacggaccaggctggggccgtgaggtaactgttgcagccagcggaggtgggaggcgacactgagtctccagtcccgagaggtgcccgagggaaaaggaggcggcagctaaactggtcctggagagaagccccttccgcccctctcctcagccagcatgtcccggactccgccgctcctcagtccgcgcggtggggaccccgggccgtggcggccggcgcagccctgacgggttgcgaaccagggggcgccccgaacgcgggggttggggtctgggagcgcgagcggccgctacggtacgagcggggtgtgctgagtcccgtggccacccccggcccca

SEQ ID NO: 28362 - DNA, 299 bp, Homo sapiens
  chr11:14665651-14665950
  hyper
atgcggtccctgcagccgccggatggggccggctcgccccccgagagtctgaggaacggctacgtgaagagctgcgtgagccccttgcggcaggaccctccgcgcggcttcttcttccacctctgccgcttctgcaacgtggagctgcggccgccgccggcctctccccagcagccgcggcgctgctcccccttctgccgggcgcgcctctcgctgggcgccctggctgcctttgtcctcgccctgctgctgggcgcggaacccgagagctgggctgccggggccgcctggctgcggac

SEQ ID NO: 28363 - DNA, 32 bp, Homo sapiens
  chr11:14665995-14666027
  hyper
cgcctgtgccttcttcttcctcacctgcttcc

SEQ ID NO: 28364 - DNA, 441 bp, Homo sapiens
  chr11:14666056-14666497
  hyper
ggccggagctgcggctcctggtggctgctggcgctgcccgcctgctgttacctgggggacttcttggtgtggcagtggtggtcttggccttggggggatggcgacgcagggtccgcggccccgcacacgcccccggaggcggcagcgggcaggttgctgctggtgctgagctgcgtagggctgctgctgacgctcgcgcacccgctgcggctccggcactgcgttctggtgctgctcctggccagcttcgtctggtgggtctccttcaccagcctcgggtcgctgccctccgccctcaggccgctgctctccggcctggtggggggcgctggctgcctgctggccctggggttggatcacttctttcaaatcagggaagcgcctcttcatcctcgactgtccagtgccgccgaagaaaaagtgcctgtgatccgaccccgg

SEQ ID NO: 28365 - DNA, 308 bp, Homo sapiens
  chr11:14666531-14666839
  hyper
cagccagttactatggcagttgcaaaatattcaggagaccgtcgttgccttgtatttccagagaacaggtatgttagctggaaggcgaggtctgggacgcgagcgggttcgggtttaccgctgcagtttccgagttgaattcgcttatttcaaagcatgttaactttcagaatggaaaaagggtgtgttgcggggggggggggggaggaaataatgttttattctggaaaggattcttaaaatacaggaagccttttaaaaatgcagaagcaagtagcttttgtcattgaatagaaatcaaatagccc

SEQ ID NO: 28366 - DNA, 262 bp, Homo sapiens
  chr11:16626178-16626440
  hyper
tctagccctaaacttcaagcgcggccctcacagggtctcacacacaaaagcagcccaggacagcccatctcgctaacagcccagccccgccagttcagtcgaagacttatttttagtccccaaataggggctgcattcaatatctgacaattcacacaaaacaacattttcaaacttggtccgcctaagagaccgtaaataaaactcaaaacaagctggcgactgccaccttttatctgctccgaacacaccaattcttttt

SEQ ID NO: 28367 - DNA, 869 bp, Homo sapiens
  chr11:16626496-16627365
  hyper
tcagcagccccgggccgctcctcccggcatcggagcacaaccccagcagcctttgcacaagccctttcccttctctgcccggccctttaagggagaaggaagaaagcagctcccgcgggagcggccgggctcgggctgggtcccggggcgggtggcagcaccgccccctgccctgggccgagcccgggagcagcggaccgcggccccggctgcagaggaacggcgggtggcggggccccggcagggcgccgagaaggacggagggcgccggctgggctcagggacgcggggcggggaagaaacgtgccggcgaccgtgcgctcggccgggtgactccctggcgaagtccgcgcccggcggggctgaactacccctcgcccccgctcccgccaggtcaggcaccactgccctcgcggccagggtaaagaggaccacagatcagtcagccttggatttcggatgggcttggaattcggtttgtttattcctgaaaagatcattaaaaagtactgtccaaaaacggggggagggggaaggaagggcgacaagcggagggagctggaggcaactcgagcggtgtcccgaaaaagttgcggcggagcggcggtggggtgagggtgggaggagggagcgcaagcgttttctagcgacccgggttttcttcatgaactcctccgagtaaactttatcccggcgagagagcggcggagatcctcgactcccgcccgccctcaaccagtgtcaaccccacaaacagcctaagtttccaaaccgaaatgggggtggggtgggggtagcattaagaagcccagaagctcagcgggtcctcccgacctcccgcacccagagcctgggtgacactgaagcgc

SEQ ID NO: 28368 - DNA, 286 bp, Homo sapiens
  chr11:16627410-16627696
  hyper
cttttcaagaaaacaaaatatttgctaggaaacttactttgcatttagtctctattctttgggggatgcggtttaggtcggctcgcaagggaagcccgttttgtccaggttggatattgtctacgtatggatcagcccttggatgagggtttattttaatttatggcttatgcattcttttaaggtcgatttacatgacctccggctacaactaagacagccgaggagggcactccagtcgtcagtcggccaaacccacaattaaaacagccctccccctagtctc

SEQ ID NO: 28369 - DNA, 75 bp, Homo sapiens
  chr11:16628231-16628306
  hyper
cggacgaatacttaggatggcgataacagctttctgttgtcaaaggttgcgttgtgtccctgtccctgccctttt

SEQ ID NO: 28370 - DNA, 183 bp, Homo sapiens
  chr11:16628933-16629116
  hyper
tgcgctgcgccgcaggagtaaatggcattaaagaaaaagggaaagatacaaataaaaaaaattaaaaggaaggggagtcggtgctaggtcaattgtcacagtccggggagcaagggaacagaaccccccagcgccgcggccggcgtagcccgttaactcaagtctgcgggggtgtcccgcccc

SEQ ID NO: 28371 - DNA, 403 bp, Homo sapiens
  chr11:17742811-17743214
  binary
cgggaagagtgcggcggtgtcgagcctagactgcctgtccagcatcgtggagcgcatctccaccgagagccctgcggcgcccgccctcctgctggcggacgtgccttctgagtcgcctccgcgcaggcaagaggctgccgcccccagcgagggagagagcagcggcgaccccacccagtcaccggacgccgccccgcagtgccctgcgggtgcgaaccccaacccgatataccaggtgctctgaggggatggtggccgcccacccgcccgagggatggtgcccctagggtccctcgcgcccaaaagattgaacttaaatgcccccctcccaacagcgctttaaaagcgacctctcttgaggtaggagaggcgggagaactgaagtttccgcccccgccccaca

SEQ ID NO: 28372 - DNA, 37 bp, Homo sapiens
  chr11:17743245-17743282
  binary
agcacccttctcggagacccattgcgatggccgctcc

SEQ ID NO: 28373 - DNA, 128 bp, Homo sapiens
  chr11:1845553-1845681
  hypo
cggggctgacgtggagagagcgagtacgtgtgtgcgtgggtgagtgtgcacgtgcattgtgtgcacaggtgcgtagcagtgtgcccgtgcctggcgtgtgcgtgtgtgtgaggctgtgtgggtcaagc

SEQ ID NO: 28374 - DNA, 1266 bp, Homo sapiens
  chr11:19733708-19734974
  binary
cggggtcatggagcctctcccggcttcttcaggccactctaattacagagtctgtggtaggttgcgtggaggagctgtctcggggcgggaagcttccctgcgtattgtatttgcctataaatacttcaaatagttaagtgaaatgtgcagcctttgaaaactggagaggaagccgttgggaggccccccgcccagccggcctggaagagcaggcagagaaatggctggcgcgctcttaaagcgggagacgagcttcggccctgcccaagccagatgggggcagcgaggctgcgggcgtgactccggaagactcaaaccgttaaggtgaccggagcaatttgaaaaaggaaacaaacttccctcgagccgtgcccgcgtggctctggggcggacggttgcgttcgaaagggcatttttcaaaagaagggtttcaggaacgcaggggtgtgggccccccgggaggcgcgcggccggggcagtgccgcaaagcggccaccagcccgctttgtactcgcggccaagcgcggccccagagtttcggcggcggccagagtttaggccacaccctctttgcagtgagacccgcggccgctgattggcgcaccgtggaccaatgggcgcgccggggcggccccggctgtcagcgcgcgccgcagcagcgccggcagcagcctgtcctcccctgcgctgagccccgcagccagcgcagccttcccgggaagcgcggcggccgctcccgagcgcagccctgcccggcccgccagccgcgcgtcccggcgcccgcgccccacggccacagccttgcctctatctagctcacggagcatgtgcagacccgcaggcgctaaggtgctctcagtccgggggccttctgggcagcggtgactgtcaccccaagagagacctttcgggggctcttgccgcacctctgctgcgtcgcgggtgacactgcggtgctcgcgagcagggtggcagctgcctctcggtggagacgtcttgggacccttgcgcccttcttctctccttccttcgctgctgtctcctttccttccttggctgctcgctctttctctcgccggctcagacccgtagcctccggaacgggactcgtgggtcgccgccgcctctgtctcttccaaaggggcctcctcacttcggagatgcagtgacaagttaatatgggcgtccaagcctctgtttcccaggaggaaatttgcaagaggcggcagcccctgagcgcccagagctcttgaaaggccacccagg

SEQ ID NO: 28375 - DNA, 339 bp, Homo sapiens
  chr11:19735066-19735405
  binary
gcgctcgcccgattgcttcgagttccccgacctggggattttttttttagccgctggtggtgggcgcctcgtgggctaaggcccggcgcctgctctgctacccgcgctgcctttagcggtcgcccccgccgccgctgccagggacgtgctgggaaagcccaagccccgggagaagatgccggccatcctggtcgcctccaaaatgaagtcgggactgcccaaacccgtgcacagcgccgcgcccatcctgcacgtgcccccggcccgggcgggcccccagccctgctacctgaagttgggaagcaaggtggaggtgagcaagaccacctatcctagcca

SEQ ID NO: 28376 - DNA, 38 bp, Homo sapiens
  chr11:20619974-20620012
  hyper
tcctcatccccgaggccaggggttccccgagctagacc

SEQ ID NO: 28377 - DNA, 94 bp, Homo sapiens
  chr11:2290844-2290938
  hyper
cgctcgggcctggcgctcggctccgcgggctcctgggggcgcgacccgccgggcctgcccaccccgtccctccaccccggcccccggccctccc

SEQ ID NO: 28378 - DNA, 127 bp, Homo sapiens
  chr11:2465520-2465647
  hyper
ctcacccaggacatccctttcctccccccaaccccaactccggagtggctcagagggagggaaagtagatgccggcaccctaccccgcccctcctgcccccgctgtgccgttctcggtcgtggtatc

SEQ ID NO: 28379 - DNA, 158 bp, Homo sapiens
  chr11:2466019-2466177
  hyper
cggaggcagggccaggccggtccgtggggagagggcgggccaagccggtgggcgcgggcagggacgccctgtgcgcgccggaccggcgggggcggggcgtgcaggcgggggcggggcacgccgtcccatgggaccggccctcggccactgccccctcc

SEQ ID NO: 28380 - DNA, 251 bp, Homo sapiens
  chr11:2466191-2466442
  hyper
cgcccgggctgggccggcagcggccccccgcggcggggctggcagcagtggctgcccgcactgcgcccgggcgctcgccttcgctgcagctcccggtgccgccgctcgggccggccccccggcaggccctcctcgttatggccgcggcctcctccccgcccagggccgagaggaagcgctggggttggggccgcctgccaggcgcccggcggggcagcgcgggcctggccaagaagtgccccttctcgctg

SEQ ID NO: 28381 - DNA, 406 bp, Homo sapiens
  chr11:27740493-27740899
  hyper
gcgaaaactgccaccgggcttggctctgtggccggaacaaaaggcctgagaagggggtgggggtgagggttataggagtgtggagagcctggtggcccccgcccaggggcgcctaagtccctgagctccctgaagagtggcaagaggataacgcagccgcgcgttccggcagttcgctgtcccccgggggtgcaggcgggggcgggagaggtagaacacaggtctgggcggctccgcgccgcttctatctcacccgccaagcccctcacctccacccaccgccagtcccctgcccacccgggtggcggcggcggctcagcgactagccggccgccctccaccggcgcctccggacgcaacctcgccctggcagggcggtctgcgcgtccagctgattggtggctct

SEQ ID NO: 28382 - DNA, 178 bp, Homo sapiens
  chr11:27740986-27741164
  hyper
cggtccggaaaggaccttctactcccaggcggaggctcccctttccctgagttaccccgactgactcggacctgggctcagtgaggcatccggcccggctggggagcggagcgcggtctcggcagctccccttcccttgagaaagcgggaaccctctaagccagcgcccgaaactcgc

SEQ ID NO: 28383 - DNA, 81 bp, Homo sapiens
  chr11:280028-280109
  hyper
cgcagcctgccccacctccgacccttgtccccgcgctgtctcccgctgcgcccagagtacaagaagaagtaccgggagcac

SEQ ID NO: 28384 - DNA, 271 bp, Homo sapiens
  chr11:280472-280743
  hyper
cgcagcctggctgacctgatcctggaccagtgccccgaccgcggcgcgccggtgccgcagatgctggcccagccgcagcggctgctcttcatcctggacggcgcggacgagctgccggcgctggggggccccgaggccgcgccctgcacagaccccttcgaggcggcgagcggcgcgcgggtgctaggcgggctgctgagcaaggcgctgctgcccacggccctcctgctggtgaccacgcgcgccgccgcccccgggaggctgcagggcc

SEQ ID NO: 28385 - DNA, 413 bp, Homo sapiens
  chr11:2950407-2950820
  hyper
gctccacgcagtccaccttgaggatggagtggaagcgcagctccttggggcgcgcgcgggggctggcggggaacaggctcaggcggtcggaggtgagcaccccgcgcttcttcttccatagctggaagaggctgtcgctgcgcttctccaactcgccctcgcgtagcacctcgtcgggggatttcatgtcgtgccgagcgcgggactgggagcggcaatgcgggcggtgacggcgccggctctgctcctcgtggccccggcgcggcctttatagctgcccctccccgccccgcccctccccgccccgccccggccctcgggccaccccgcccgcctgagccccgcgcgccccgggccataccctccccaagcccagccgtccgggcccgcaccgtcgcgtccgcgctctggtc

SEQ ID NO: 28386 - DNA, 212 bp, Homo sapiens
  chr11:3186017-3186229
  hyper
cgcgtcggccgagctggggggacagaccccctgattggccagggtttgtggtggtcagacccagccaccttccctggcggtcccggctcctttaagccccaccaagtggggagccgagctgggcgcgccgcttcccactcgcgggccccacccgccccaacccgccaggcgccgacccgtcctggcccggggcgcccccaggctcccgcgct

SEQ ID NO: 28387 - DNA, 291 bp, Homo sapiens
  chr11:3186311-3186602
  binary
agctcctggatcccttcggccggccccccgcggccctcggttcgctccggccctgcccggcggggccctccggatccttcccagcccgccatccccccgccgccctgccgccccccgggccgccgcgctcctacctcctaccgtgccgcgagctcggtgctccgggccggccgggcgcgcgggggctccactggcggcgcgggcctggctgcaggaaatgccagcagatggtccccccgcgcgaggcggagcgagggcgcggcggagggaggaggcccagggagcccggag

SEQ ID NO: 28388 - DNA, 151 bp, Homo sapiens
  chr11:3663265-3663416
  hyper
cgccccccgccccaagtctccgcccccgactccccacaccccttcctcagagcctccagtctggggacctttccgagactgtaaaggcggggccgcagtttggctccgcctgagaggggagggccgggggcggaggacccacttgaaggct

SEQ ID NO: 28389 - DNA, 212 bp, Homo sapiens
  chr11:3663525-3663737
  hyper
cccccgcgctggtaacccgacacccctttcccagcgccgcacgcggggccgggagcgggcgcgccagggcagggactgaggagcaattccctttctcaaggcctgcggggtctttctgcgggaccctctttggctgtgagtgatggggaggaaacttgtgagactcggcctctccctcaggcgggccctgacccggtcggcccctggtcccc

SEQ ID NO: 28390 - DNA, 943 bp, Homo sapiens
  chr11:416597-417540
  binary
ggttcgacgctcagcacccagcaccctgcgggcgactcccgctcagctcggacgcgccgcccctccgctccccgtgcgcgctgggcccccagcgcctgtcctgaagcaggaacgtgggtaaaaggctgcggccccgcaggccgaggggctctggttcgctcccctaccccgcgcccacctgcgccctgggcgccctccaagtgaggagggcggagaacgaggacgcgcgcgggaggcgggcacgggggtgcggctcggggcgctcggccggggcagaggcgcgcggatggcggaagctccacccggcgccgggcgagctcgggccccagcctgactcttggtccgccctcggcgcctcaggaagcctcgagctgggatccaggcttgggcgaccgaggtgggatccctgcgcgcctcggcgctcctagccccgctctgttctgcgcgagggtcaccaaaaagccgctgaccacgtcgggcagaggaaagggtggcccccgcccccttcgcccactttcctcccttcccccagccctggaaagggccaggacgcgggcgagctcgggcttccgggcgacgcgggaacctccccggccccgagccatttcctgagagaccgcgcccagggacaagcagcgccccgggccccgactccaggcctgcagcggctctgggaggactgcgacctccactcaccttcgcgggtctgatggcgaccgccactcacctgctgccaggacctggggctcgcgccgggcgggggcggggcagctcacctgagccaggtgcgcagcggcaacagccccggcggcggcgtagccccggcagcggcagcaggtgcggccccgccccgcagtcagggcgggggcggaccccagcgtcccgctctgcgcccaaggctggcgctggaggctgcgctgctgcccgggagccgctgccgcac

SEQ ID NO: 28391 - DNA, 52 bp, Homo sapiens
  chr11:44337578-44337630
  hyper
cgctgcgcgagttatcagaaatccctggagccaaacactacgggggaccggc

SEQ ID NO: 28392 - DNA, 230 bp, Homo sapiens
  chr11:44338552-44338782
  hyper
cgatggaacctggtgccccgccctctctggcaagggcaaggccaagagcgcagggcggggagaggagctccggggacccgcggaaaacctggctcgaaagccctggaggcgagctctccaccgtgttcggtggccaccttaattcttgttgaaccgagaggaagttgttgaaaccggaagtcggcctctggggtctgagcccgtccaccctttgcagatcggtaacagcc

SEQ ID NO: 28393 - DNA, 586 bp, Homo sapiens
  chr11:46299162-46299748
  binary
cgtggcgccttggccagctgggctagccagccaggggttcccggtttcacagagaggaaagtgacagaagacgtgcggagggagacgcagagacagaggagaggccggcagccacccagtctcgggggagcacttagctcccccgccccggctcccaccctgtccggggggctcctgaagccctcagccccaaccccgggctccccatggaagccagctgtgccccaggaggagcaggaggaggtggagtcggctgaatgcccacggtgcgcccggggcccctgagcccatcccgctcctagccgctgccctaaggcccccgcgcgccccgcgccccccacccggggccgcgccgcctccgtccgcccctcccccggggcttcgccccggacctgccccccgcccgtttgccagcgctcaggcaggagctctggactgggcgcgccgccgccctggagtgagggaagcccagtggaagggggtcccgggagccggctgcgatggacgccgtcttggaacccttcccggccgacaggctgttccccggatccagcttcctggacttgggggatctgaacgagtcgga

SEQ ID NO: 28394 - DNA, 604 bp, Homo sapiens
  chr11:61347974-61348578
  binary
ccacacacgttgtccttgggctgttgaggggtgggggagaggtccttgtggggacactgcgaagccggtcccagacatccagcctggcagtgtccagactgcgggggaccggggtccgagccgctgccgctcgatcccgcgcccccggggctgggatgacccctgggggagcccgtgcggctccgggcggacaacagccccaggctggggctccgagacggcgtccggcgctgccgctgtcctgcccgccggtgcggggcgccccagcccgccggggccgcgcttacctgggctggccgcctccgggtcccggtacatggtcccctcgtcgccggttccctccgggctcctcagagccgcccgcggccgcgcgctgctccgccgccgccgctgggcatggggccgggcgacccccgggggcgggtccgagggcgggggccgagcgggctgcacctagccgcggagccggggagcgggggccgcccgccagccctcccgcccgcccgcggagcacgctgccgccgccgccgaacagcgccgagccgcctccctccggcctgcgcgccgcgtgtgcgcgccggagcgtgtgtgtgtgtacgaggcc

SEQ ID NO: 28395 - DNA, 217 bp, Homo sapiens
  chr11:61355118-61355335
  hyper
cgggggacgaggcgtctccgctcttaatagctgagcgcccgcaaacgcccggcctgggctcgaggcctgcccctccagcgacgggcgcccccaacattgaagtctttctctgcaacttggacggacccaccccgagcgccccgagtatccggcccggggcagagatgcgcgtgcgcggagggggtgccgcggagcccgcgtgagcagacaaattacc

SEQ ID NO: 28396 - DNA, 206 bp, Homo sapiens
  chr11:61684832-61685038
  hyper
tccacatcccggcgcctcggggcgcccaggcgtccgttcccagcgccgccgcgtcctcccagcgccgcgtccccgcccgccgccgactccgccaggggccgagccgccccaccgcctgtcagccctgcccgcggccggtcagtaggtctcagacgcctgggctcgcggcccccagcccagccccgaccctgccctgggcgggtcac

SEQ ID NO: 28397 - DNA, 128 bp, Homo sapiens
  chr11:61685087-61685215
  hyper
cgccggcccggcgctgggatccggcgcgcgctcccaaggcctggccccacccggcccgccgcgccgggacagggagaccacggcgctcggagggaacccggcccccaacatcccgcgggccgcgccgc

SEQ ID NO: 28398 - DNA, 224 bp, Homo sapiens
  chr11:66725377-66725601
  hyper
cgatggggacaacttgggctcccgatcctgacagacttgggttcgaaccctcagggacctcgcgcgaggcgctttagtcagtttctccatctgcaaaatgggcccgagagcaagaatgaggcagcccgcaggcggacgctgcggaggggcgctcgggggctgcagccgggggcgggtccgggggcgggtccagccggccgagcccccgcgcgagggggaggggc

SEQ ID NO: 28399 - DNA, 309 bp, Homo sapiens
  chr11:66725637-66725946
  hyper
ccgtcgctgtctcctccagccgtcactcgcggagcccgcgccgcctttgcgcgcgcgacccttacataagcgtccctcgcagcggtgccggcgcacgtccacccgctccgacccgccgcgggaagaggaccgtgcggagcgcggcggacactcacctcctcgccgtcgccagtcctcgccgccgcctctaccgctgctgcctccactgacagagaacagctgcggtctccgtgcaaccgaacttgctgcagtcccggccccgccttacggacttcctattggcccagacagcccaacccctcccgttat

SEQ ID NO: 28400 - DNA, 244 bp, Homo sapiens
  chr11:69452414-69452658
  hyper
cgggagtcgaggaattagaatcgcctttaaccctcaagagttgcgccttcagcctcgggatcccagatgcgtcgttggagccagggccgcccccctacctgttgggtttgcgttttaactccagcgcacaccttgccggcagccctcggagctaggggaggggtctcgtttccccgcagcccgccggacagacgactggggcacgggaggggcggtggcagggtggtctgtgtgtggctgaaac

SEQ ID NO: 28401 - DNA, 230 bp, Homo sapiens
  chr11:69589517-69589747
  hyper
cgggtgtccgcgtgcgcgccgccgatgcggccgtcggggagcgcctggaggtggaagccgatgcccacgttgcagtagagccgccgcagccgcttgatgcccagcaggtagtcgccggcgccgctctggacggccgcctccttgggctgcgctgccaccggcaggcgcgccaacgagagcgccaccaggctctcccagcggcgctccagctcggcctccagcgtgccgtt

SEQ ID NO: 28402 - DNA, 212 bp, Homo sapiens
  chr11:74022468-74022680
  binary
cgcagccgcgcctcctccccgcgcaggtaccgcctcagcagccccagcagccggcgctcgggcgccagggcgcgcgccacgctggtcagcgccgagaacgtgtcgccccgagccgcagccctttctgggtctcctgtcccgagcgccagcaccgccagcagcgccgccagccgcgccccaggacccatagccagcgctcgcgaacttcccct

SEQ ID NO: 28403 - DNA, 137 bp, Homo sapiens
  chr11:74022716-74022853
  binary
ccctcgcctgccccgcccctgtctccgccccctcccggctcaggccccgccctctggccccggcccggcccgtcccgtccaccgcccagtctcgctccacgccccctgactccttccttgtttcgacgcctcacctc

SEQ ID NO: 28404 - DNA, 162 bp, Homo sapiens
  chr11:74178245-74178407
  hyper
cgatcactgcgctcgggaggatcggggaggatccgggaggactagcttggtatttgcagcgcccacccctcccccactccccctcggttccacagtctcacggagagcgcgccgtggcccttggaagggaggcgggaagacccctcatttccaccccaggcc

SEQ ID NO: 28405 - DNA, 121 bp, Homo sapiens
  chr11:74178470-74178591
  hyper
cgtttgctcgctggacacggcgccctctgaccgagggtggcccaagcgctgcgaccctgtgcattccaccagccccgttccactccgcgggtgcccagcaccgcccagcgcgctctctggc

SEQ ID NO: 28406 - DNA, 325 bp, Homo sapiens
  chr11:74951799-74952124
  hyper
ggggaggcaaaccctgcccactcggctcggagcccggagcggccgcggaagccggaggccggcgcgcagggcgagggcaccgggggcggggggctccgctccccgtctgacccctcttgcccccggccagtcagccagtaagtgcggctcctcagactttcgagacagcgaacggaccgaccgggactgccagccgctccgggtcaaggactcgccccacccgtgccccccaccaggcgctcccaactcactggtgagcgcggcggcccgggcgctggatgcgggggcggccgcgatggccccgcgcgcgggacagccggggctc

SEQ ID NO: 28407 - DNA, 1276 bp, Homo sapiens
  chr11:77184258-77185534
  binary
cggactcggtcccggaccggtactcgtgtggcctcccggctccagcctggcctggccccgccccgccccttccctctcccaggtctctcgaatcgcccggcgtctgagacccgcgaccccgccggtacgcgcacagggggcctttgttggcccgacgggagcgggcctcgcggggcgccgcccgcctcaccttacctggcgcctcctcccgcccaggcgcccggccccgcaacgcgaaataaatgggcccagacccccactccacccgtccccacccccgcgccccagccctggcagcccgggacgcgaggggtactgggcggtaggcccgctctcaccttccgcgctcgctcagctcctctcggctcctcctcctcctcccggcggtgggtgccgcctagccgggagtgagggcgcgagtgtgcgcgagctaccgcttcactttctccctcctgccgccgccgccgcgctgcccgtggcggggctcccctcaggacaggggaactgcgagggaagggatgatgggggggcgggagggagcgaggcgacgcgggcggggggggaaggggggactgaggggcgaggtgcgaagggctcagatggcctctgaggcaggaggtggtaactggatgcggagaccaggttcctcgagggggctcacgaaagcgcggggctccgtggaaaagggaatgagagtccaagggggaaggcgtctgtgggggaggactgcagagcctgtgagggaagcgcgatgggcgagcgagggggcgggagcgtgtgggggaagccgtgagggggcgtctactgtgcagccaccaccttcggctccggctgcagccgcgggagggcagcctcccccgcccacagccgcgctattgtacgccgcccggcaggcctgaccgcctagttcactggctcccctactcctcctcctcccgcctcctcctcccctctgccctttccccttctccccctccccctcccccactccccctccccggcgcggcggcggcggctgcggctccggtggagccgtgcccgccccgcctcccgcaggtgagagggggcggggagggcctgaccgacccgtgggagcgaggccaaaccctggcccgcatgagggcgaacgcctgggattacgtcatcggcgcgtgacgccagaggctggggaatcacccgcttgctgcgtgacgtcatcgcgtcgcgtcactgttctcggtccgctgtccgtggcgggttgtttccgtgcagcctttctatcagacaattttgggac

SEQ ID NO: 28408 - DNA, 240 bp, Homo sapiens
  chr11:86382607-86382847
  hyper
cgcctctctccacgcataaaagggagaggagggacaagaaagccaaaccaagtcacaacaagcccctgcaaggcaaaaacagaaaaaccgctggaagggcgcccgggaggatcctttctgggtccagggggcggggcgcaattttccggcagccacgggatcgcaacgcgggccgtcctgccctctggcccattaccttgttgagatgagggttcctggtgacatcgtatccgcgcttct

SEQ ID NO: 28409 - DNA, 63 bp, Homo sapiens
  chr11:86383105-86383168
  hyper
ggcaggtgctcccaaagggttaaatgttccagcccccgccactcctcggctgccacctgctcg

SEQ ID NO: 28410 - DNA, 268 bp, Homo sapiens
  chr12:103351149-103351417
  hyper
cgccccgagcgcgccgcctgtttattcagccgggagtccggcacgcgccaggcgcacgcactgcaacaacaaacccagctgaatggagagtttgcaaggagcgggagaaaggaacgggagggggggagaggagaggaggagggggagtttagggagtgggtgggaggaagaggtaagaggaggggggggagtgggggctgcagccgctcgctgcagcagcggggagtggggggcgaggcggggccagggctgcgcgtggggctgggtg

SEQ ID NO: 28411 - DNA, 80 bp, Homo sapiens
  chr12:106975167-106975247
  hyper
cgggctctgtccagccggtaccgcgcgccgccttcttcctcccgcaccgtgaccttaactcggcacgtgctggcccctcg

SEQ ID NO: 28412 - DNA, 72 bp, Homo sapiens
  chr12:107486379-107486451
  hyper
cgagtgtttcaggtcgtcagtactctttggccagagaagtattaagtcaattctatttaatacttagggcac

SEQ ID NO: 28413 - DNA, 523 bp, Homo sapiens
  chr12:107486672-107487195
  hyper
ccttcagggcggggttgtcgtggagccggagcccctttcggaaccagtgcacggcgttcacccccatgccggggggcgcggcgggtcctccacggagaaattcaaggaaggaggctccggctcatagccgacaccttcgcttccaagagaattgcctcacccggggcgtgaggaaagggcggcagagggggaacaggaaaaaatgactccgaggaggggaccggagaaggcgggggcgccggaggcgcagtggaaagatgaatggaggttgcctagtcggcggagtccgggtgtgacgccctttaggagcccgcgcccgccgcaaccgcctggaggcgacgcataacttcgagggcctcggacctccggagcctgagcaagttccaggagctcgagccgccacgacggcccgagccggcacggacggccccaggagattcgtcacggaaacctcgccccaccaaggcggcccctaaagacaaaacggcccgcccgaggtgagtcaccgaggagaaccggaggg

SEQ ID NO: 28414 - DNA, 230 bp, Homo sapiens
  chr12:107711721-107711951
  hyper
cggctgaaagagggccgcactaattggtttgcgtacccgaagtgggaatagagagggaggaaaaccatgtttcaggtgttacggggggaaaaaagtgaaatgcgaaccgcaggggagagagcgaccgtcaggcagacaccttgtgaaccgcggtggagagcacacctaggtggggaggtcaccggcccaacccaccaccctccgggagaatgcgggcagggacagcagca

SEQ ID NO: 28415 - DNA, 723 bp, Homo sapiens
  chr12:107712337-107713060
  hyper
tctcagtcccacgaacaccgtggccggcgcccggtggctactgcgcccagcggggctcagggaagagcggtctagacactttttattttggaagaaaggggcaagccccggcgggagcttccttcccggcctggctcgctccccattgcgcccagctccggcccggactctggaagatgactccagggtctgctctgtatattccagcggcggcagttccgggaggcagccgaaagtactaacagttggtagcagcggctagtggaaaagtgagccaaggcggcgcggactcggctctccccgcgccccgcggcactcgctgctcctcgccgctccttccctttggctcccaggcggctgcagcatgaagtggcgcagcgatggccaggagaggtaagaagcccgtggtgagaacgctggaggatctgacgctggactcgggttatggtggcgcggcggactcggtgcgctcctccaacttgtctttgtgctgttccgactcgcacccggcgtccccgtatggcgggagctgctggccgcctctagctgactccatgcacagccggcacaacagctttgacactgtcaacactgccctggtggaagactccgaggggctggactgcgccggccagcactgctcgcggctgctgccggacctagacgaggtcccctggactctccaggagctggaggcgctgctgctgcgttcgcgggatcccc

SEQ ID NO: 28416 - DNA, 59 bp, Homo sapiens
  chr12:113905322-113905381
  hyper
cgcctcttccgcaccaggactcccccgaggcggggccgggccggattaggccgggaggg

SEQ ID NO: 28417 - DNA, 43 bp, Homo sapiens
  chr12:113906434-113906477
  hyper
tccgcgcgtctcagctagtacctgggtaagggtagggggacgc

SEQ ID NO: 28418 - DNA, 83 bp, Homo sapiens
  chr12:113914528-113914611
  hyper
ccactggcgctaggccgtggattgcttggtttccagaacatctctgcggggcgcagggccttcctgtcagttgaatcgtgctc

SEQ ID NO: 28419 - DNA, 358 bp, Homo sapiens
  chr12:120031899-120032257
  hyper
gcaggggagtccgcgcgctctctgcggctcccttcctcacggcccggcccgcgctaggtgttctttgtcctcgcacctcctcctcacctttctcgggctctcagagctctccccgcaatcatcagcacctcctctgcactcctcgtggtactcagagccctgatcaagcttcccccaggctagctttcctcttctttccagctcccagggtgcgtttcctctccaacccggggaagttcttccgtggactttgctgactcctctgaccttcctaggcacttgcccggggcttctcaaccctcttttctagagccccagtgcgcgccaccctagcgagcgcagtaagctcataccccga

SEQ ID NO: 28420 - DNA, 473 bp, Homo sapiens
  chr12:123380333-123380806
  binary
cgcggttccctggctcccgcaccccgccccaagcgcccccatttctagcccagtcccctcaacacgaccggaggcgccgcggtcgcctccgcctccggccaccgttcgaggagcgaaccccgctcgaggcctcacagccgccgccttaagcccagctcggctcacctcctccatcttctgcaccatctccgtcagctggccctcgtcctccagcagctcgttgagctgcaccagcgacagcccggcgaaccgggcttcgctcccggcgcccgccatccccacgtctcggccgtcgtcgccaccgccgctgcggccaccaggctccgccgaccggaagcgccgccctcaagggccgccccccgcgggggggacacgtgacgccagccctgggtcgtgacgtcatcaccgcgcgggcgggcggacgtgacgtaagtgtcgcggctcgcttggagtggaatgtgtcagggacagtc

SEQ ID NO: 28421 - DNA, 610 bp, Homo sapiens
  chr12:124779593-124780203
  hyper
ggaggaggaggcgcctagaaaaggaggcgcgggccggggaggtgcggagagggccgggcggcaacgtgcgcctcggggctgggccggcctgcgggatcgcagcgcagcgcagaggcgaggctgggcccggcgggcgggagccgcggagggcggagggcggagggcggcggcgctggcaggagcgcggcccacggcggcgagcaggctgcaggcccgcggggatccggggcgcggggggcgccgggcctgatcgccgcctctcgcggtgcccgcaggtccccgggcgcgcagctctcgccccgccgccgcctgccccgggccccggagcgcggtggagaagcccccggaggagcggggggcccgcgccccgcgccccccagacatggtgggccacctgcatctgcagggcatggaggacagcctgaaggagcagggccgggagggcttgctggacagccccgactccgggctgccccccagccccagccccagcccgcccttctactccctggcgcccggcatcctcgacgcgcgcgcggggggcgccggcgcctcctcggagcccccgggacccagcgaggccagagcggtaaggaggcgctctctctcc

SEQ ID NO: 28422 - DNA, 703 bp, Homo sapiens
  chr12:124979300-124980003
  hypo
cggcccccttgccccctggaagccaccccaatcctacccaatactgcggcagcgggggagcagaggtgaggctaggctgcaggaaagtgaatacagcaggagctccacattcgcgtgccaatcccactaccagtccagagagggcagagccccagctcagcctggccccagcctccatcttcccagctttaaaatgggagcaaagagattttatcagatattctggaaaaggcttcagacaccaggggtctctgtggcggcctcccctctgccctgggaggctcagagccacatgagcctggctcccaggagaaaggaaggggtgaagactcagtggaatggaagaagggtctcaaaggtagccccaggcgcacacatgtgcacccccttaccgtgtgcgtccgggcgatctgcactgggtaggaaaggctgtggggcgggtagcggggctcagtggccctccacgtctgtgccacaggctgtgtggatcccgacatggtggtgggggtcggcggggagctgctcccaggccccaataagctttctcttaatcaccaccaaggattaaaagccagtcctcgtcatcagctcacgggccaccccgtcactggcacctgcgggaaaacaagaaaagaaaaacaagatcagccacggggcagctggctcctccgtgcacaggtccccgagtcgttcctgtggtccc

SEQ ID NO: 28423 - DNA, 173 bp, Homo sapiens
  chr12:133195984-133196157
  hyper
ccagggtcgcctccggagccggcgccgcccctgcccgcaggtacgtattcatcgtgcagaaaagctaccaggagagcgagacgggccccgagagctccatcatcaccaaggtcaaggggatcaccacgtccgagcacaaagtgtgggacgtggaggagtacgtgaagcccccc

SEQ ID NO: 28424 - DNA, 1110 bp, Homo sapiens
  chr12:15941612-15942722
  binary
cgagggggtaaacgggggtgggaccctgccctaaagggtcattttgaaaagaacccctccccatttgaggcgggttggcagagcagcgcacaaatcccaagtctaacgtaataagccgagatcgggatactcggtctgcagtcgccccacggaccagatgagcgcaggtgtatctgcggaagctcaggttaccatgaatatcactgggccacggcgaaccctccctgcccagcctcccggagccctgggcgcgggtctgcacgggccccacagcttgcccggacccggcgagcggacgcctccggccgcagcgccctaccgcacctggctgccaacaccagttgaaagcagtcaaagtgaagggaggcggacgcggctcctggcaccgctccgattccagcacacaaaggcggatttttaaaatcgagaaagtcaaagccgccggaccccgggaccggcgcctttcgccaaggggctcttacctcggatccgccctcggggccacggctttccccggagacgccgcgagcccagacgaggtgggaggggaccgggagaaagccccccaatctgattcgcgcccagccagtcgtccgcgagccgcggagccgccttctgcacccagctaaagagcagcgatctccgaggcgagcacagcgccggcctcgcgccgggcgagaccgcctcgctagctgctgcctgtgaagtctggagccgcccgcccgctcgcagccagtgccaaccgcgcgccgcgcatgcccagtgcccgcgcgaggaacgagcgagcgggcgggcgggcgagtgcgcgccccgcagccaggagcgaaatccgctatccgggtcttgccggcagccgagccgcagagttctggtcgactccagcgcttgaggcgaagtggccggtgaggccgggtgggcgggagagggaccggaggaaaggagacggggcgctgcgccaagttatcaaggccgcgatcaaagtcggaccaaggcagcgagtcgacagcaggtttccagaagtgccctaacaggactgactagcagccaggaggcgcaggaaggggcaaagagcgtgtggagagcttcgcccccggcgaggatggacgcccc

SEQ ID NO: 28425 - DNA, 74 bp, Homo sapiens
  chr12:19282260-19282334
  binary
cgctgtgtttttgttgtttgaaagagagaaatcaggggcttgggcattattaggctccctttgatcgcgccctg

SEQ ID NO: 28426 - DNA, 841 bp, Homo sapiens
  chr12:19282363-19283204
  binary
gggcaggacgcgtttttttttttttttttttttttttttaatcgatcccggaaccttcgcgcggcggagggggcgggcgcgccgcaggggcccgagggaggggtctggggcgcggcgccgcttgcccatcccccgagcgcgcggcggggcggccggccggcggccgccgggatgcggaggggcggcgacgggggccggaccctgccggggcggcggggcgggcaccgcccgagggggtagggcgcgcgcgggggcgcgccgggccggggaggcgcgctcgctccgcgctcccttcgctcgctcgttccctcctccctcggcagccgcggcggcagcaggagaaggcggcggcggcggctagggatcagacatggcggcggatctgaacctggagtggatctccctgccccggtcctggacttacgggatcaccaggggcggccgagtcttcttcatcaagtaaagagccggggacggcacgggggcccgcgggggcgggagggcaggaggcgggcggctggcgacacgggggagagcccgggtctgtgctcctgcagcccctcggctcgcccccgcgtcccctctcacgctccgtgtctgccccttctctcacccctgcagcgaggaggccaagagcaccacctggctgcaccccgtcaccggcgaggcggtggtcaccggacaccggcggcagagcacaggtaacgccgggcccaaacggagttgggctccgcctggaggaggcggcagagcccgggccgcccggctccccgcaacctgccccgcgccgcgggccccgggaggcggcgaggcggggcggaggccgggcgggagcggccgc

SEQ ID NO: 28427 - DNA, 250 bp, Homo sapiens
  chr12:19283425-19283675
  binary
ggtgacccccagctgccgtcttgccccccagcaatcttcaggcagtccttacccactcccctccctgcagccccggaccccgatcgcccgccgggataacgtaaccacatcctccccctcctcccaggagcgctgcctcctgccgtgcagcttcctcctcctaggtgggacttgtgggtaggtggctgatgaaggaggaggaggaggaggagaggagttcgggggtgctgcgatcctctctgtgacaggg

SEQ ID NO: 28428 - DNA, 226 bp, Homo sapiens
  chr12:19283783-19284009
  hyper
cgccagccgcacggaggttgcacagactgccaggaggcggtgggcgtgcgagggggtgtcccgtatgggggcacccgggccctgtttggagggagtccgtggggaagcggctctctcgggtggctttgggagcttgtttgaatgctaagtgtgagtggagctggaaaaggctcctcgtagtttctgtactggtctgggtttcttttatcattctttgtttacattc

SEQ ID NO: 28429 - DNA, 91 bp, Homo sapiens
  chr12:2161370-2161461
  binary
cgtgctcggctgcctccaaggaattattaaacctgggtctaggaatctgttcagacatctgggcaccgctgcctcgcctaccaggctccgc

SEQ ID NO: 28430 - DNA, 1049 bp, Homo sapiens
  chr12:3186011-3187060
  binary
cgcgctgtcagcatctcgcacagtccgcccgaaacaccagggaaggggttcgtaggtgtgggggtggggtggcgaggccaggcagcctggcgcgagggagagagccgaggcctgggccaggaaggcccttgggtgccgtgtgggcgcagagcccaggagagcgcactgccaggcccggacctccccgcccctaccccgggaagaggcccgttcgccgcagggggaaggcgggatcatagcacctcggaggagcggccggtccgggcatgcgggcggcggggcggggagggaggcttccggaaccccgagagagcacccgtgcctcgcgggccccgtgccccgtccccgggctccccttcctctaacgcaggggacccagcccggggcagtgccgggcactggcgctggcgccccgctcagccctgcgatccttctccgccccgcccctccccgctccgccccgcccctccccgctccgcccccgggccgccccgccccgcaggctcgccattcccgggcaggccccgccccctgtttccgctggcggcggcggcggcggcggtgccggagcgcgagcagagcggagacccccaggtcctgcgggcgcggtgagtgcggcccgggcggcgggcggcgaggcgggtctcgagagcgtgcggagtcgcgcggccttgagccggcgccgggcgggctgggcacccccaggccgagacccgagaagggggagcggccgggggcgcccacgggaggcagtgtgggcagggcggcggtgggacgagaggacgaggaacagagtaggcgccgtgcgggaagcgggccgggaaggggagggtgggtgcggggcccgggcaccgagcgaagtggggtcctccaggggatggctccgaggaagaccgtttcagaaagggagtaacccggggccggcaagggtttccgactgtgtgaccccgtgcaccgcttgggacagtccatacaaggaccccagagagggccagggggccttcgggcagggctgggatatggcctgcagccccccggcacccgcgacc

SEQ ID NO: 28431 - DNA, 192 bp, Homo sapiens
  chr12:33049135-33049327
  hyper
cgcaccagtgaggggcgcggaccggcggagtagaaaaagaaaggggtgaaatcttgaagtgagttagttaacattgatagatatgtacaatatttaatatacataggtacctatatgacaaagctgagtaataggttatggaaaagagtgctttccacaagcaagtcggtcataccgaagacggcgagcaac

SEQ ID NO: 28432 - DNA, 235 bp, Homo sapiens
  chr12:33049390-33049625
  hyper
tgaccgggtgtggggcagggggcggcgccggggagcggcgggctccactcaccgttgcccacggagctgcggcccttccgggcgagggtctgctgcacctgctcctggatccgcaggctcttgactgtctggccgccgcggccgctgctccccgccagcttcagcttggcctcggagggcagcgccaggctggagctgtccagttgtcccaggatctgctggcccaggacggtcc

SEQ ID NO: 28433 - DNA, 350 bp, Homo sapiens
  chr12:33049652-33050002
  binary
cgggggctgccatggggccggtgggggcgaccgagctgctcgcctgcctctggactcgcgggcgaagccgccacggagctgggggcgctggcgcgagccccgccccgctcgagtccggccccgcccctggcccgccccccgcgccggtgagaggcccgggccgggggggagctcggcctcgtgggccggacgcccggccttccctgaggagggggcgcggctccggccgggcacgcgcagtcgggcccgggggcgggggcgggggcgggccggacccgctgagcgcgcggacacctggagacttgtacccgcccgcggggaggtggggagaggggcgcggttcgcctggg

SEQ ID NO: 28434 - DNA, 76 bp, Homo sapiens
  chr12:33050245-33050321
  hyper
ctggacctgagggtgagaaagggctatttggtcaggcggaaagggcaatatgagggaaatgtgccaagaagataac

SEQ ID NO: 28435 - DNA, 235 bp, Homo sapiens
  chr12:3600534-3600769
  binary
ggggagggggtcgggggcacgagaagaacttgaaaccgtgtgaaggaatccggagcagatgagaagggaggaaaataaaagaaagtggagactgcagaacagactccgctgtggctgactgtgccggccgacgctccagctgaggggctgggttggatttttttttttctcccatcctctcgctctctcttttaaagcgacaccagctctctctcctcctctactatctcggtat

SEQ ID NO: 28436 - DNA, 153 bp, Homo sapiens
  chr12:4140253-4140406
  hyper
cgcagcaatgcgcctccaagccgggcccaggccgagcgcctctcgccgccgcgcacattccggagggggaccgcggggctcaaagggcctgcggcgtaggtggctcagccctttccttggctttccctccagggccatacttgccgaaaccca

SEQ ID NO: 28437 - DNA, 195 bp, Homo sapiens
  chr12:53342685-53342880
  hyper
cgtgtccatgcccggttggccaccccgtttctggggggtgagcggggcttggcagggctgcgcggagggcgcgggggtggggcccggggcggagcggcccggggcggagggcgcgggctccgagccgtccacctgtggctccggcttccgaagcggctccggggcgggggcggggcctcactctgcgatataact

SEQ ID NO: 28438 - DNA, 39 bp, Homo sapiens
  chr12:53342911-53342950
  hyper
tcgtccgcaaagcctgagtcctgtcctttctctctcccc

SEQ ID NO: 28439 - DNA, 303 bp, Homo sapiens
  chr12:54332438-54332741
  binary
cgtgcgcagagcgggtcacgtgggcgcgggaggggtgctgagaggtggagagcgggagccggcggatttcttaatgaagtgtctccgcatgcgtagagggaatgtagggagggaggtggaagcactaggaggaggggaggggtggagagaaaagaggggagggatggggggaggggaaacaggagcgaggtgtctccctagctcgctgcctctggcaagtggagtttttaaaaagctccagcagatcatgtcatgacgacttcgctgctcctgcatccacgctggccggagagccttatgtac

SEQ ID NO: 28440 - DNA, 182 bp, Homo sapiens
  chr12:54366668-54366850
  hyper
cgcccatcccaccgcccaccccaccccaaccctctctctcctcctttgctcgtgctgtggtatggagagaaggggagtgacgagagaaaaacgaatacaaatctgcaattgattttcataatgtttctgcggtgtttgcaaaccaatcgcctgaacgtccccgatcttacctaagagagaac

SEQ ID NO: 28441 - DNA, 251 bp, Homo sapiens
  chr12:54388354-54388605
  hyper
aggccctgcacgcctctgcagctgccgggccgtgtccgggacgtctgaactgaggccgaccaatggtcacagcatgaaaaataaatgcaatggaaggtctttctgtcttttcttttccgcgtaaaaggtcctttcttttttctctctttcggatatacctggatttggtccagaccaggttgcccgcgggagggccccgcgagcggcagcgcgcgagggagggagagagagggagggcgagaaggagggag

SEQ ID NO: 28442 - DNA, 104 bp, Homo sapiens
  chr12:54393256-54393360
  binary
cgctccccttccctccttccctccctgtatctcagcttccccagtcccctcccaccctccctccctcaccgcccctgctgctcctgaaagaaatacatacatac

SEQ ID NO: 28443 - DNA, 60 bp, Homo sapiens
  chr12:56882380-56882440
  hyper
caagctgaggcgaagccggtgggggcgggaggcgctccccgggaacaccgtggggctgcg

SEQ ID NO: 28444 - DNA, 217 bp, Homo sapiens
  chr12:59313943-59314160
  binary
cagcgcgccccagcaccgcgcacagcagcagccccaaccccgcggcgcgcgcacggaggctcggcgcgctcatcgcggtccagcggcctaggtctctacccgaagctcccagccggcgcgcgctcggggcccggcacaaacttccagccgagggtgcacgcccgccctcgcggtcgcgtgcgcgctcctccctcgcgctgcccggtcaattccttct

SEQ ID NO: 28445 - DNA, 341 bp, Homo sapiens
  chr12:59314189-59314530
  binary
cccccaaacagcaggagggaaaccgaaaagaactgccaactgcaacagagttgcagcttgagcagcgtcggctcgccgaagccccttcttgtctgcaaaagaaactttttcgcctccaccccgcggcactgcgccaagtccccgcgcggcggagtagcaaggcgggcgggtagaggccgacgcgcgcccattggccgactcggctgcgggcgtccccgtggccacgtgacaataacaccgctccagccgggggcctacgcgcgggagaaagtggagctgagattgtaggaaattcagagttatattttccagcctctccagccagaagtctccactacgtc

SEQ ID NO: 28446 - DNA, 74 bp, Homo sapiens
  chr12:63327114-63327188
  hyper
cgggaaccaagcctgccccggggtatccgggccaccagaacagggtcagcatcaaggcgcccaggcattggaag

SEQ ID NO: 28447 - DNA, 552 bp, Homo sapiens
  chr12:63327326-63327878
  hyper
tccctggttcattaataaccttgaattctattctaaatgtctcctagttttcccgtttcgtacagctgaggtagtagatagaagggaaaacgttacttatcttaccattcataagatggttattaatagtcagtggaaaagtggccatggagctgggggaagggcaataaaatcctccacctctcctttcccgattccactctgggtcgtcaacctaactcagtcggttcctgaaatagctgatcagtcaaacgcaagcttaatcaccaaagcggattaccaaaatgttatattagacagttggaataagtttccccctccccaagggctgagggaaatagtactggcatttaccgaaagcgcagcattttactacctgctaaaggagaagcggaggaactcgcgggctgaaagtgagagaaactgagaccttcggaaatgtacaaccacgcactcggacacggccacctcccggaatcggacacaagctcccaggcgcagtgacatctcctccaagcctccacccccataaactcttcatcacgcgggggc

SEQ ID NO: 28448 - DNA, 112 bp, Homo sapiens
  chr12:63545006-63545118
  hyper
tattttttcctctccctacgtcggtgtttgtcctctgcatcactgtggagggggtggagctgggagactcgcagattcctcctcacagtaggtgggatcgtggcgctttccc

SEQ ID NO: 28449 - DNA, 242 bp, Homo sapiens
  chr12:6472613-6472855
  hyper
ggaagccgatcttccagtccttccagtccacctgggggttgttgtcccgcaagctggaggccacgctacgggctcgacgggccccgtgaggcgggggcgggaccctcaggcgctgcaaggggtgcggcagagtcccccgcaggtcgcgacggctgcgggagccggccacgagagtggtgaaggagctgtatttgtacaggtcaaagagcgtctgctctgtgatgcggtccagctcctccagc

SEQ ID NO: 28450 - DNA, 95 bp, Homo sapiens
  chr12:6472900-6472995
  hyper
caggccaggggccctggagcgagtgtctggcccctccggggtcagggtcctcatctgtgccccgggaggccggtccatcccggagaagcctgggc

SEQ ID NO: 28451 - DNA, 41 bp, Homo sapiens
  chr12:66136243-66136284
  hyper
gcggggggaggccgggccagggcgcgtctggggccggctcc

SEQ ID NO: 28452 - DNA, 123 bp, Homo sapiens
  chr12:66217380-66217503
  hyper
cggttgcctctagtctttcctggagaaaaaagttcaatgaagaagctggggcgctctgtgtgtgcacattgtttgcatgtgtctgcgaatgtgcatgtctatctgcgtgcctgtgtgtatgtg

SEQ ID NO: 28453 - DNA, 238 bp, Homo sapiens
  chr12:66217650-66217888
  hyper
gagggcattccgaggcggagtacggctgtcaggggacctctcccactccactgcagtcccttcccactcacagtgaaccggtgcgctgcctgaggtgcagcctagacgcttcctgcaaagtgttggctcggcacggtagaggcgcaggtaaaggccaagccccgaaacgtggctccgggacagtcacgttcccgcgccttcccaggacaactgcccaggggtgacctcgagaggcggg

SEQ ID NO: 28454 - DNA, 208 bp, Homo sapiens
  chr12:66217920-66218128
  hyper
tccccggcctgtccctttaaccccgccgccgggcgggagcacgtgagcggggctccgggtggcacccgggcgccgccgccgccgaggcagttgtatttcgaacgctgcctctggctagcagccaggcgccttggctcggcggtccgcctggcctccctcctcctcatacttttcttcctgcgcaaccccctcccctttatccgcccac

SEQ ID NO: 28455 - DNA, 236 bp, Homo sapiens
  chr12:66218548-66218784
  hyper
cgcagggtggggggaagaggaggaggaattctttccccgcctaacatttcaagggacacaattcactccaagtctcttccctttccaagccgcttccgaagtgctcccggtgcccgcaactcctgatcccaacccgcgagaggagcctctgcgacctcaaagcctctcttccttctccctcgcttccctcctcctcttgctacctccacctccaccgccacctccacctccggcac

SEQ ID NO: 28456 - DNA, 362 bp, Homo sapiens
  chr12:66219327-66219689
  hyper
gccccggggcgccagcaaccctccgggcggggaggtggggagccgcggcgggcggcccggggaaggcgggaggtggggtcgggcgaagcgcgtcctcggactttcgctattgtgcacggccccgagtggcgcggtgtcgcccagtgactggaagcgaccgggatccgacaaacccgggctcgcaggcgctttccgagttgcttttgcaactgcccgggaggaaggaggtgccggggacccgggcgcttcggccgatctgggctgaaggggctagagtcttgggggccggaggctctttctcccgcctcccggggctgctcgcgggtcgggggctggcgcgccgcagccgcccccttggcgcc

SEQ ID NO: 28457 - DNA, 119 bp, Homo sapiens
  chr12:66220194-66220313
  hyper
gagaacatttaaactccactttctcgggctttaaaacttgctctctgcttagtcttaaatcgcttccttcatggcaaacacgccgattagaaaataatcctagagtcccaaagttgtcc

SEQ ID NO: 28458 - DNA, 127 bp, Homo sapiens
  chr12:69326527-69326654
  hyper
cgcttccatcccttcctggcggtggtagttgaaatccagcgcagctaccaaaggcagcaacagccctagccagaggcacgggaagtccatgttctagagatgaataaaaataagaagaacctgagaa

SEQ ID NO: 28459 - DNA, 208 bp, Homo sapiens
  chr12:71833930-71834138
  hyper
ctcccaggtctggtgtgttgctgaggggctgccccacacactgtcattgcgagcccgacggcaggatgttgctcagggtggactgctccgacctggggctctcggagctgccttccaacctcagcgtcttcacctcctacctgtaagtacttccccacgtcactccgggagagagactaagaggggaaggaaggttcgtccaaggcga

SEQ ID NO: 28460 - DNA, 486 bp, Homo sapiens
  chr12:71834289-71834775
  hyper
tcgagtgcaacccgggaaagcgctgctgcgccgcagcttcccagtccagcgctagaaacatcgcagggcgaattcctgcaaatgcaggcatttgcgtgcggagtggacatttgtgacccagagcctggtacccaaaggcaggctgccatctggtccccgccccaaccgcctctctgcgtctagtcgcattccacgaaaagatggtctgtagaaagtttccccaaaggagaaacaacttgcccagctccaaagggtttttagtctgcatcccttgcactgtgacgtgatgtaacctttttggggttttttcctcttttcctcccttccttcctcccttcttccttccttccctccctcctttctttttattttctttcttttttaacggcgtgattaaaatgtggcaaccacaaaccccgattagagctgccagaacgttatctttacctttggctgcccgcgccgccctttgaagtgcccgcggcc

SEQ ID NO: 28461 - DNA, 386 bp, Homo sapiens
  chr12:81330352-81330738
  binary
gggactagagggtgtcctcctctgcagagccgtaggactcgagcgccttcatcactggacgctggagccaggaaggaaacccacacactcagggacaggtataaccccacaggggtgcaccagtgaggccccgatcgcagcggaggactccatccctgagcttgtgagggcgtcctggggaggaagcgaacactttccccgttcaagtcagagagcaggactcactgggtggcaggtcagaagttgaattttaacccgacctgcgctttgtccccgcgccttccgcagcctgggcgccgcggtggcaccgagctgggagaggacacgagaggctggcgcgggagaagccgagagttgctatcgaccgggagctgccggcggcggga

SEQ ID NO: 28462 - DNA, 313 bp, Homo sapiens
  chr12:81331319-81331632
  hyper
cctgcctgagcgcgtcccatgtcccgttgggaattggcaggcggggaagggaggaggggagaggggacgcggtggcctggcgagcgagccgctcccttacctctgtccagggtgagcggctggaccactgtcaatgtcgccatgtctgccgtgggagccgaagtgacgctcggcttcagcatcagcaaccgctcgtagtgagaaaaaaaggaggagattgggggcgggggtggagagggaagacggaaaggagggggaggagggggaaggaaggaaggtggtggtggtggagaagaaagcttgggtgggttgg

SEQ ID NO: 28463 - DNA, 369 bp, Homo sapiens
  chr12:82152624-82152993
  hyper
cgcggcgccgctccccctccgcgcccgggccacccggggtgtgtggggcgtccctccaaaagaaagcttggagaaaaggcgtgagaagtatctgggagagaagttctccacccagtctcccctcctggagcccctctggagtttaaggctaaccctgggagttagaaacctaaaggaaaacgagtccctagggatgcaaaaagcaggacaggtctcctcctggcccccagcctgtttccgcgcgctcccgtgtctcgtttcacttaaaggaggcgctttttctctggaaaggcaaacatcaccccacgccgtcccccggccccccttccctcccccccgccgcccccccgccgccacagcacacacacc

SEQ ID NO: 28464 - DNA, 88 bp, Homo sapiens
  chr12:85674884-85674972
  hyper
acgcgttgaatgtttgttaaacactaaagcacactaaatagcttcgggcaaaccatccccggcctaatcactcattcccagattctac

SEQ ID NO: 28465 - DNA, 294 bp, Homo sapiens
  chr12:88973866-88974160
  hyper
cggctcggctcgggatcacacaccacgccggcctcccccgcatcctcttgtctcacccggcaggcacagccctgcacgccccagctgcaagtcccagggagcgccggcttccccggggcaccgggcgcgatttttcctggagagcctgggagctcccgggcgcgccctactcacttgtgtcttcttcataaggaaaggcagcgctgcgatccagcacaaacagtggtgtggcgactccgtttagctgttctggagctccagcatattgcacgaacagcggcggcagatagtcca

SEQ ID NO: 28466 - DNA, 178 bp, Homo sapiens
  chr12:88974253-88974431
  hyper
tgctgagccgccggcgcttttatacagttcccgcccgcctgctccggacacgcctccttcccttccggagcccggggtaggcgagaagcaggcaagggcgcggagggaagaatcgggagggcggccagagcacggtaaatgccccagaagtttggcagattaggccaaccttgtccgc

SEQ ID NO: 28467 - DNA, 35 bp, Homo sapiens
  chr12:88974679-88974714
  hyper
accctgcctgccttagagaaataaagtttaattgc

SEQ ID NO: 28468 - DNA, 391 bp, Homo sapiens
  chr12:99287760-99288151
  hyper
cgcaaattggaatttcgctggaaacactgacccgaccttcaccgaagcagcaaatcgcagtctctgctgctctgctcctgctctccaaggcttaacattggaaagtccatgcccacgtccccctctaattaatcaatgtagaaagaaatacgagggaagagagagggagcacactccacaccaaccttgccagcttctattcttcctgctattccttaaaggcgatgcacagcgcacctggaaattacgtggacttggcatggctttttaatattaaagacaaacgacctttggaaaatatacactgttaaagtcaaaccatttggagagacacccagcaatttacctcctcaaactcctcggaaccccaagaatgaggaaaggaaatgga

SEQ ID NO: 28469 - DNA, 56 bp, Homo sapiens
  chr13:100620289-100620345
  binary
cgggcccgcgggacggttataaacgggactgggggcacgtgggtcaggaaaggggc

SEQ ID NO: 28470 - DNA, 112 bp, Homo sapiens
  chr13:100620374-100620486
  binary
ttgatcaatccgttccgggatcccggataacccccaaaagggagagcggcgtggcagggagggaaagaagtccggatgggccctctcagaacacaatgtccaatagctgagc

SEQ ID NO: 28471 - DNA, 106 bp, Homo sapiens
  chr13:100620515-100620621
  binary
cgggttggagtctgaacccgaggcgcctgcgtccctcccgcagggacccccacgctccaccgggtggggcccacgcggccgccgggagggggcaggaaatgcaacc

SEQ ID NO: 28472 - DNA, 220 bp, Homo sapiens
  chr13:100620916-100621136
  hyper
cttcacggtccctggatcctgccctgccgagaagtgctgggcacaggagcgagcagccggcttagcgggccagggcgtttttacgagagcctcctgggaagtttcttcctggaaaaatcattaaggcggactgatcccgattagagagaaaaggggctcctgggaaaacgtgctccccaccggccatcaggcggcccgcaggagccaagccaaggctccc

SEQ ID NO: 28473 - DNA, 351 bp, Homo sapiens
  chr13:100621366-100621717
  hyper
ctcaaagggggcacacgacccacaggagccatccaccgcctcgcgccgcagccgccctcctcagcgctgtgggatccccagaggcagggcttgaggtggggtgggagggtccccacgacgccggtggctccccaccaattccacgacagggtaggcctcaccgatggtgggaggctcgggtcctcctacaactagaaccttctctagaaaggcagatgtcaactccagcaccctccagggcgagtgtgatactgcgtgtgagagggcgcgtggggcgtgtaaatgatgtgagtgtgaggacacacaggtgtcgcgggaatggggtgcacgcgcaggaggatatgagtgtgt

SEQ ID NO: 28474 - DNA, 543 bp, Homo sapiens
  chr13:100623181-100623724
  hyper
ccgcgtaggtgccgctggcggagatgaacatgccggccgagtggggaggcggggccgggtgctggggggagccggtgccggaccgctgctcccctccgagcggggccccgtgcatggccgccgcgggggccgtggcggaaaggtccctccggaggacgaagtccctgctgtggcctttgccgctgctgccgccgccgccactgttggtggtggtgtagcccgagagggcaggaggaggaggaggcgggggagggggagggggtgaaggggtgggaggaagaggaggggctgggggcgggggcgcggagggctgcgcgccactgctgcccccgccgcaggggtagctgcccgcgccggggtgcgcgaccaaggctgcagcacgggcggcggctgccggagcctccgggtgtgccgggaacgcctgggagggagggctgaggcccagcgtgctcgcctgggccatgtgctcgggtccgagcggagtggtggccacgccggggtcagcgcccaggtcccgcaggcggaggtgcgcgacggcggccc

SEQ ID NO: 28475 - DNA, 67 bp, Homo sapiens
  chr13:100631544-100631611
  hyper
cgcttaagccgggagaggctgcctgagccggcgcaagagagcccgggttctgccagccatagtgagc

SEQ ID NO: 28476 - DNA, 242 bp, Homo sapiens
  chr13:100631642-100631884
  hyper
catttcagaacataattctgaaaaatttattattttctcttcgtttaattttatttcaactcctagagatttataaataaaagcagttctccaggccagccaggagaacacgcccgaggcgctggcctcaggctgtcccttcacacctccgcagcctctgggccctccgttccctctctagttacctcgggagcgcgagatttgggcggcgggacaggaaacgtccgcagcggtcagccagg

SEQ ID NO: 28477 - DNA, 493 bp, Homo sapiens
  chr13:100631937-100632430
  hyper
gctcctggagaaggagtggatggatatatatgctttctagaaggtttaagccctgccgtgtctgacggcttcttctcccgagaccctgagcctgacccgcagccaaactccggcctgagtctcgcttggtctcgggcgttcccacacttctcagcccaaggatgcgcggcccggcttctgggcatttaccctgagggtgacactgtctttaaacgacttccgaacaacccccttccacgcaggggccgctgcccagtgtttactgctgtaaacggagcaggacgcaagcggcgggtggggagctcagcgcgccgaggggcggacggggacgccgcggggggcggggaaggcggtgtctgggtgggcgtccggagggtgggaagaaggggcatgcctggctttctctgtgcccacggtcctgcacctgtggtttcaatgccacagagcaagtttacaaaggcggggtgaaagtagggagcgtgccaagcgggca

SEQ ID NO: 28478 - DNA, 576 bp, Homo sapiens
  chr13:100632514-100633090
  binary
caggcgacccagctgttagccacctctcgagcggcctggagtgctcgggccaggcgtccccggggttttcggtgtccgctgggagctgctcagatcccggggaagtcggtggcctacgcagaaagactggagcgctgggttgcctcccattcctgacccggctgagggcgccctgaccccgcggcccgggcccgcgtccgagccacgctggacgcccggctcccgggagcgccgcggtcggccaggactagaagccgcggcgccgaggtctcgggagaagcgcggcaggatggcaggccgggcccacgggcacgttcggcggctgcctgagccggcagcagctcagggagcgcgaggactgaggggcgggcccggcagcggggcgggggcgcgggactgactaggccgcggcggccaatcgcggcgccgggagggcgggcggggcgggagccgccgttaaaggggcggtttgaccgggggggcccggcctcgagctggagggagggagggaggccggggcgggagactagggggtgcggggggaggggagaggaaaaggaggagacaaaaaataaa

SEQ ID NO: 28479 - DNA, 36 bp, Homo sapiens
  chr13:100633184-100633220
  binary
cgcctgggcctcacactccctcgggtcgcggactgc

SEQ ID NO: 28480 - DNA, 147 bp, Homo sapiens
  chr13:100634131-100634278
  binary
cgaggcagatccaggcggcggcggaggcggcgggcgcaggagagcggctcccagggctgaagtggccgccaccaccgccgcctgcgcctggagcccggtggccgccggacgcaccgcgcggatcgggagcgggagtcgaggcggcgc

SEQ ID NO: 28481 - DNA, 129 bp, Homo sapiens
  chr13:100634617-100634746
  hyper
ccacgccgcgcacgttggctcctactctgggccgcccttcaactccacccgggacttcctgttccgcagccgcggcttcggggactcggcgccgggcggcgggcagcacgggctgttcgggccgggcgc

SEQ ID NO: 28482 - DNA, 339 bp, Homo sapiens
  chr13:100635597-100635936
  hyper
cgagttttgaatgattagcctcacatcaaatgtatgcttgggtcatgcaattgcttcgtttgctcagccccggttaataatttccgttttaagtagaaagcacaaaataaaactgctcgctaattcggtgcccgggaagcgagcctagagaggattttgccagcttgtctgaatgtgcttttctgctcggagtgtatgtctgtctgagtggtttgtgtgttttcccacttcttttactcggggtccaaacgcccttcccgggactgtttcccatgaaatgagtctggtgtgagccgaagctgtaatgcgtttctcatttttaaagtgtttttaaagccc

SEQ ID NO: 28483 - DNA, 207 bp, Homo sapiens
  chr13:108518148-108518355
  hyper
cgacgcactgcctgcaagtggtcatctcgccgccttccttgagcaccacatccagactgcagttcaaagtgttgggactggacaaccccgagaacaactcccaaagtgtgtaggaattacaaaacgaaaggtaaaaatccgacaagttccagagcggagtgggatgcttgctcctcacctcctgcccgtcccccccggccgcccccc

SEQ ID NO: 28484 - DNA, 322 bp, Homo sapiens
  chr13:108518933-108519255
  hyper
cccctggtcatattttgggaacgcacagccctggccgactccaccgtgagggcgcctgtgccggtgtcaccacaatatgcattgacttaaagggtttaatttccttatcccctcctcccgtttcttctctctcctctctctctttctctctcttcccctctccctctctcctctctctctctctccctctccctctcttttatctctctctgtctcttttgcctacataaatattaccaggctttgaaggaaggtctgacttgcttcctaatcatcagccgaccccatcctctgtagagtgggaaacaataatggagagaga

SEQ ID NO: 28485 - DNA, 59 bp, Homo sapiens
  chr13:108519564-108519623
  binary
cgcgctggctctcccagagtccggagcctgggctgcctccggcggggcgctccctcccc

SEQ ID NO: 28486 - DNA, 166 bp, Homo sapiens
  chr13:108519932-108520098
  binary
gagaaggcgcgcgggggcgggcggcggcggggccgcggggcccgggggcccccgcccggctccccgggctcaggcgcctgctctttcctttctgtccccctgtccacgatattttgttttaatcactgaagagaaaaataaaagtcagactgcggacggcatggcc

SEQ ID NO: 28487 - DNA, 34 bp, Homo sapiens
  chr13:114017783-114017817
  hyper
cgctgggattacaggcgtgagccaccgcgcccgg

SEQ ID NO: 28488 - DNA, 229 bp, Homo sapiens
  chr13:114017991-114018220
  binary
cgctccgggagcccggactttgcccggcccgtcccagcccaacccacctgcgccctcgggacccacctgcgcccccgggacccacctgtccggctcctggggacgcccccgccctgcagcagccgggaccatttgatcgccctgcgggtgagcgtgaccaggtagctggagaaaaacttctcgtaggcggcgtcgtcgaagtcctcaggccgctcgaatccgtacgggt

SEQ ID NO: 28489 - DNA, 140 bp, Homo sapiens
  chr13:114018330-114018470
  hyper
acacctggggacccgcgagcgctcggcgggctgcatgcggggagggaggcgcgcaccgagcgaggccagcgggtcccaagttcgcctcccggctccggggcgcttaagtccttccggcgggaccgcgggcgcgtgggggc

SEQ ID NO: 28490 - DNA, 155 bp, Homo sapiens
  chr13:21634593-21634748
  hyper
cgcctcgggccgcgtcccgccaagaccgtgagcaaactcgcagagttggcgcggcagccggccgggagacgccgagcagggcctggccgcccgcagcccgggaggaacggcgcccccagggtccggtggcctctgaggggctgactggcccgtga

SEQ ID NO: 28491 - DNA, 569 bp, Homo sapiens
  chr13:21634965-21635534
  hyper
ggatccgtgggaccgctgcgccgccggaccgggggtcccgaggctgtcaggggcgcccggccgggcgtctagtgaaaagccgatcccccggagacagcggaagcagaggcgcgcccggcgctacggcctttcgggtctaggacaccgcccccggcccgcgccgcccctgccccgccgggatcccggccgccccggtcgccgcacaacaaagcggcgcagccccgctgcccccgcccgacgccggcctccaacttccccggctcctctggaaccggctccgcgggctccgtacggcctggactacgagccgccgggcgggggcggctccgggcgggcgcggaccgtgggggcagggcgcagggctccgtccggacaaacttcctcggccgccccgccgggcgcccttcccggagcctcggcaccacagtaggtgcgcggagccgcagggctcgaccgcttcgcggaaactctcgccaccctccgagctgccgccccgaccccagctcccagccccctcacctccaggggcgcggtctacaccctcgggggcgtcctggccggcggctccc

SEQ ID NO: 28492 - DNA, 783 bp, Homo sapiens
  chr13:24734971-24735754
  binary
cggcgacctcggggctccgccggcaccggaggtggctctgagggcagggacgtgttggacacgctgactttgtaggctccgccaagaggcgccgcaggaggtaagacggcttcgggcgcgcggctctgccgggcgggcgcgggcatgggctgttaggtagaatatcgggaggatttgagtcccagtggactgcctcggggcttcgggatgtccagctcccagctgcttggcctctgcttcccccgccggtggaggctaccgggtgctcacctgttaggtccgtgcgcccgctccctgcccggcggtggctctgcgccctctgggccacccggcaccatcgcttttgggaggacatgcacgtggtgttctcgcaaaaggccgtttccagccggaagcctgcagggaggtcgccttgtaacttcacccgcgctcccagctcgcggggcctggcctacaggggcggccgtgggggtggcagagtctggggagcctggcgcggcggagccctgtaacgctctgctccatcgggtggcgtggctggtgcctccggggacccggagcgatgcggttggagagcttagtttagaaagcaagtttctcttggtaccagcggagtctcgtcccaggggaaagattttgggacccggtgcccatcgtctgtggactgcagggaatgcattggcggagttggtttggtcccattctgtgcaggaggtgggggaattggtactccagccccaggcaggtagaagcccgcgctgctgccagcgtcagggggagctc

SEQ ID NO: 28493 - DNA, 82 bp, Homo sapiens
  chr13:25746000-25746082
  binary
gaaattcgagtcgtaattatggaattcaaattccctcaactctcacccaccttcggattccttctctagactcgctcttcac

SEQ ID NO: 28494 - DNA, 282 bp, Homo sapiens
  chr13:26624917-26625199
  hyper
agatggtggcgtcgccgccgtcgaagcgctcgggacactggaagccgatgcgccagacgccctgcgcgtccagccagccgtggcagtactcgccgctggccctcgcccccgccgccagcagcgcagccagcagcagctgcaggagcgaagcggcgttccaggatgaggagacggacgagcggcgagcgccccacatggcaccaccctgggcgcggacagcgcgtctccagagagcgcaggacggtctccgagaagtcgtggccccggcgacccccgggcctc

SEQ ID NO: 28495 - DNA, 71 bp, Homo sapiens
  chr13:27131483-27131554
  hyper
cgcaaactcaaaggtactgtaatgggcacctagcaatcagaggtgatacaagggtctcttggcccgaagta

SEQ ID NO: 28496 - DNA, 124 bp, Homo sapiens
  chr13:53420877-53421001
  hyper
cgcagcgcgtagatggctccggtagctgggtccaccgagacataagtggacacggcgcccccggcgcggcccacctcggcctccagcagccggtaggtgacctggccgttgcggcccaggtccc

SEQ ID NO: 28497 - DNA, 81 bp, Homo sapiens
  chr13:53422554-53422635
  hyper
cgcctcacaggactcatgcctccagcctcaagtgcgatccgaaaggctaaggaagtcttctctggtttccaggtcgggcgt

SEQ ID NO: 28498 - DNA, 232 bp, Homo sapiens
  chr13:53422885-53423117
  hyper
atccctttaatgtggaaaggcttagaggggaaaacaagaaaggaaaattagggaatctttcttttgtttaactccttttgctttttcccccttttcttgtcagcaccctgcatgtagaggagttggcacagggctccaggagtaaaaggagcggatggttttgttaattgtcgcctgcctccctccgtgccgcggctagaactaagtgcgaacacgctggggtttcacccca

SEQ ID NO: 28499 - DNA, 64 bp, Homo sapiens
  chr13:53423198-53423262
  hyper
gcagccccctacccacagacttgctctgctgaatgaggctctgctttccttctctcctagctac

SEQ ID NO: 28500 - DNA, 83 bp, Homo sapiens
  chr13:53424677-53424760
  hyper
cgcagccctttcttccgctgtcttccatctcccaagtgcgatttagtatgtagccctcccaccgtccccgcccaagagatatt

SEQ ID NO: 28501 - DNA, 235 bp, Homo sapiens
  chr13:96743113-96743348
  hyper
accatggatgaaaggttcaacaagtggctgctgacgccggtgctcactctcctcttcgtggtcatcatgtaccagtacgtgtccccctcctgcaccagctcctgcaccaacttcggggagcagccccgcgcgggggaggccggcccgcccgccgtcccgggtcccgcccgccgggctcaggcgccgccggaggagtgggagcggcggccccagttgcccccgccgccccgggggc

SEQ ID NO: 28502 - DNA, 246 bp, Homo sapiens
  chr14:102355922-102356168
  hypo
cgtgtcctggggctcccctagaagcaggcgcagtggacagagatgtctcagaggaagggagctgggtctgtcgcagatgggtgcttcagaaagatcgcacctgagacagcacggaggatgcgtgtgggtgtcagtggggaactgggcaggtagaataagaggagttcaggaatcacttctaccctttgcaggaactgtgctaaatattgcgggctttaaaattaagtaagacattggcctatgttg

SEQ ID NO: 28503 - DNA, 188 bp, Homo sapiens
  chr14:102356197-102356385
  hypo
tgaacgagtaaaagatggatgaacagatgtgcgtgtgatcaagcagatggagcacattgctcgtggtcgaatctggtggttgaaatgggtgttcactgtagaattctttccgttttcctagatgcttgaaattttccaaaataaaatattgagaaaaaaattcgtgcaagaccaagttctctgccctc

SEQ ID NO: 28504 - DNA, 86 bp, Homo sapiens
  chr14:103745819-103745905
  hyper
ggccgccgagcaagcgcctgcgccggccgtgggaacccggggccgtcccgcgggtgctggtgggcacccaggccgacccggacgac

SEQ ID NO: 28505 - DNA, 78 bp, Homo sapiens
  chr14:104158805-104158883
  hypo
cgctggcaggtctgctgcagacccgcactcggcccctgctcggcccctgctcctgcagagggctggggacgccgccac

SEQ ID NO: 28506 - DNA, 218 bp, Homo sapiens
  chr14:104582815-104583033
  hyper
cgtgagggggtagggcgtccctccccccgcgtgggaaatgaggaggcaggtacggggctacccctgtgggctgcggggtgggggttcagggtctgagaagcagaaacctccctccctccagtttcactttctctttacccctccccttccccctcccacgaagttccctttgaagtgagaggggctggggtgggtgtgtccagcccagcccccacacc

SEQ ID NO: 28507 - DNA, 988 bp, Homo sapiens
  chr14:104583110-104584098
  hyper
cggccaaggtggagccccgggccctccgtgcgcccgagcacccccggcccagacgagacggttcgggcgtggcccggcggggacccagaacccgggaggccaggtgcgcccaggccaggcgctggaggctggggcgccggatggggcggggcggccgctgagtcagggccacccccgcgcgggcgcgcggagcaggtccccgggccgtggaggatcagtcgcgggacctatgggcccgggagccgccccgcccggaaaaaccggtcgggccagcgcggcgcgggcacattccggcgccgggaagggcggctgcgccgcataaaaggcgccgccgcgctggccaccgccgctcggagctcagccgccctgccacgcggggcccgcgggacgaggggacgccggggccagcgaggacgcggcggggctgggcttggcggctgggatcccccagcgccaggcgagggcgtctaaggcgtccggtacggcgtcggggccgggtggctgcagcagggcagggggtgcgcgaccagcggggatctgggcgcaggggccggtccccgggatccgcaggcgacgcgggcggtcccaagggcgtcgggggctcctctctccgcagctcggcgaaccgacggtgttggggactcgcgcgctgggtccagtggttcttaacagttcaacagttctgtagcgcaattgtgaaatgtttaggaccactagacccggcgggcgcggcgacagcgacggagcgtcccacgcgcggcctggagtcagagtcacagtcaggggtgcgccggcgaccaatccaggggagcccacggaccggctccgcgctccaggtcggccgccccatgcgccgcgccccgcagtccccagggcctggctggctccacctgctgccagggaagaccctcggccggagagccaagtgctgctgggaggtggccgggcgtggccgggctgtgctgtgggaaccgctgggtgggggcgc

SEQ ID NO: 28508 - DNA, 341 bp, Homo sapiens
  chr14:104603375-104603716
  hyper
aggggcgcaggaccggtgctcccgaccgctgcgtgcttctgtgttgcgtgtgtgggtggggggacgggatatagagagtgtgtgtcccggagcagtggagcggcgggaggcggtgctgtctgccggcagtgcggggtggggtttgggtgttgtcctcagtacccagatccagatgtgggctgacgcccgttttcattctccaggctgcgaagagacgggtaggggaagcgcttccggccccccaggctgggtggaaagcgactgcaggcttacggatctcagaaagagtggagagcccctgccactttattccatacccccttgcgttttcgaacccctaa

SEQ ID NO: 28509 - DNA, 353 bp, Homo sapiens
  chr14:104603753-104604106
  hyper
caccccactttctggggagtgcgtgcgtgggcggggaggcttatccaagtaaaagggggtgggcaaaacggaaagggtcactttgacgtactgagtctctgcgaaggcctcaccgtatgtgccggcagccgcgtgtcctggtctccgccgggtcacgaccttcggagtttccgagtgcgcctcaggcctgggacgcgcggcgctgtctccccagtctcggagccgtgtgcgcagcggccggcagggggcactcgcgtcacggggagcccgcccgccgcgcccgcctggcttgacccgggctttggggctgacccggagcctggcccggagctgcctgcggccgcggatgccgg

SEQ ID NO: 28510 - DNA, 200 bp, Homo sapiens
  chr14:105070705-105070905
  hyper
cggggaggtgggtctgggggcgctgggggcatggaaggggcgccgcgccgggagcggcccccacttacccctcgtgtcccttgcagaggaagaagagcgtgcgccaggcgtgcgcggcggccagcagcagagacaggaggctggcgagcaggctgaagcggcaggcggccggcgggccccactcctgcaccgtgaagcgc

SEQ ID NO: 28511 - DNA, 63 bp, Homo sapiens
  chr14:105071236-105071299
  hyper
ccgcggacagctcctggtgcgcgcgggccaggagcccggggtccaggggccagagaagggcgg

SEQ ID NO: 28512 - DNA, 36 bp, Homo sapiens
  chr14:105071396-105071432
  hyper
ccgactctgggtcgtcagttcctcatcagctcgaac

SEQ ID NO: 28513 - DNA, 728 bp, Homo sapiens
  chr14:105330980-105331708
  binary
cgtcgatgcccaccaccatcgcccccagctcagcccagagcgcccggggtcagaggtggagatgtcggacatacgcccagtctggccaggctcgggagggaaaatctgggagcggcctctggaactcaccctgactccttcaccgtccgctcctctttttggcttccggggccaaaggttggggactcgaggcgcggctggagcctacagctcctggagcgtagttaagcgttaacccgctggccctgggccagggcgcggggctgctgtgcgcacccggttccgcccgtcgagctggggccggaccgggaggcgaagcggggggcgctgccgagacgggagggcatggggtctgcgccgggtgcgagatgagccggggaggccagcggggcctgggcggtgggggaaggtgggcctggggcaggggcgggatggcggctcgccaagcctctgccgaccggaccacgcgcggggctaccggggcgggctcacctggcggccgcggacccgccctaacctggtttccggcggggcggcgcggggtgcggcgcggccgggcgggggcggggcgggcgggggcgtgcccggggcggggcgttccgggggcggggctgagcctcccgcagacgtcagggacccgcgcgcgaggccgccggcggccgctctgccgtgggctcggcccgggctgccacgagcgtgcgggcctcgccgggcatgtcctaggcggc

SEQ ID NO: 28514 - DNA, 156 bp, Homo sapiens
  chr14:105331744-105331900
  binary
cgcgagggcagggaccgagccgggccgagctggggaacaagccggggaccaagccggggaccaagccggggactaaggcgagccggagaccgagcccgaacagcaggtaggacgcgccggcccagcgctggccgcggcccgggcctcccatcgccc

SEQ ID NO: 28515 - DNA, 94 bp, Homo sapiens
  chr14:105444359-105444453
  hyper
cggccgggaaggcccagaaccacgcgcgagtcccgcaggcgtctccgagtcccccgcccccaaggcccgcactgcgcgcccctggacacgcccc

SEQ ID NO: 28516 - DNA, 134 bp, Homo sapiens
  chr14:105444808-105444942
  hyper
tgccgtcggcctcattcagcccattggctgccgtcgccgcggccccgcccctcccagccaggccccgccccaccccgcgcccccggcccgcctgtcgcgtccgcagaattaactttggactcccgccagggagc

SEQ ID NO: 28517 - DNA, 255 bp, Homo sapiens
  chr14:37050246-37050501
  hyper
ccgcggcggttcccacctcgccaccgccgccgccgccgcacggctgcccgtcgcgaacaagcaccggcaccaccacgcgacgcagcaggccgggcgcggcgtgcagctcggcggatgctgccaggtcaggcgactccgccgcccctggagcgcgagcgcgcttcagcttgtagcgatgattctggaaccagatcttgacctgcgtgggcgtgaggcgaagcaggctcgccagctgctcgcgctcgggcgcagaca

SEQ ID NO: 28518 - DNA, 214 bp, Homo sapiens
  chr14:37050539-37050753
  hyper
gtctgcgccttggagaatagcacccgccgcttcttccttttctcggcgtccgagcccggagacgcgggcctagcggacggccgctgcgacgagtctggcgggctggtctccaggctgctctcgtccgaggctagggacagcaaaggagacacgggtgggtgagacgccggaccctacgagggcctgctgcccttctggcgcgggcgtggaggca

SEQ ID NO: 28519 - DNA, 251 bp, Homo sapiens
  chr14:37050794-37051045
  hyper
gaggccatttcctgagtccacatctggacatccacctctccgaatgcggtgacctcattcataccacagcggtcatcagcgggcctgagatcgtgccccgaaaaaacccaccccggggccctcttaacatgtccgcaccggtagttgcgctggccgaccagtttatcacaagctgggtcaccagcgccggcctcctccaggtcgactgcactgcagtgtgccgaggtttgcggagccctgagtgggaacgg

SEQ ID NO: 28520 - DNA, 404 bp, Homo sapiens
  chr14:37051196-37051600
  hyper
gtcagacacagaaaccccaaatctcggagcaccagtgccaggcagggatctgctcttaggatgtgccgaccgggatgaatgcgttaggggttcgaggacagggctcccgtttccaagactgaggaaatctagactctgggctgggatttcggctttccggcccctcgtgggctgggcccttgattctgctgccccacgcctcctacctcccaccccgcaccgcaatccaccacgcacttacaagggtagtggccgcgctccgaatccagccaggcggcgcaggggtcgggctggggggcgcgtggttctggctcccgcctcggcaggtgttgcgcgtcctgctcgggtaaatctagaaggctgcgcacggtgaagctcaggcgtccagaggtggccatggccga

SEQ ID NO: 28521 - DNA, 226 bp, Homo sapiens
  chr14:38052540-38052766
  hyper
cgaggtcaagacccgcagtgtcttagtgggttttcacctccacctccgtacaatcaagagggcagagaaggcgggggctggaggtggctgaaagggcagggatggcggtgaaacccgggaggaggcgacattcgtgtcaggtggcggtcccaggcagtgtccacaggcccggaagccgaggggaccaggcatcaagccccgcgtccagatccctgcacccgggggc

SEQ ID NO: 28522 - DNA, 175 bp, Homo sapiens
  chr14:38053203-38053378
  hyper
gggccaggactgcgcctgtgtgcgggtccccaggagcactgctcgcctgccagccccgcccggccgggcccctccggcgggatagagccctgctttgctcttttcgttggccaagcacaattgtgttattggagataatgaattcaatccccatcaaagggcattaggctcgccc

SEQ ID NO: 28523 - DNA, 109 bp, Homo sapiens
  chr14:38063865-38063974
  hyper
cggagtttcctaaaactccctctccggctgcgagagtcgggacagagcagggcagcaggtcccgcttccaggcccggccaaggcccggccggggccacaccggcgggcg

SEQ ID NO: 28524 - DNA, 305 bp, Homo sapiens
  chr14:38064003-38064308
  hyper
ggcccgcctgcctgccttgcctggcgcccaccgctccccggcctcccccggcacgggctccagcggcgccccaccggccgcccgcctcgccttgcctctcacctcctgcgtgtctgcgtagtagctgttccagtcgctggtttcatgcccttccatcttcacagttcctaacatcctggagccaccctgcccaatacaaccatccagccctgtgcgaagcgacgggcggccgcgcggcgcggggcgggggaggggagctgagcagctgcagtcacccgagcgcccgcgcgggcccaacgccaccc

SEQ ID NO: 28525 - DNA, 309 bp, Homo sapiens
  chr14:38064549-38064858
  hyper
gcacctacaaagcccgaggtgcacctgcaaggcggccgcccgccagtccggccgccgcgcctcccgccccgccgcttcaccgctgcgcgcgacccctcccccgcgacccctcccccaagcggggccctcactttgtttgcaaagcagtgtaattggtttaggcccggaggctagggaaagagggaaatggggagggagggggtgtaaccccctttggaaaaagaaaaaataggcggggccaggcgggcgggcgggctagggctctggatcggaacctcgcagccggagaaggccgggggcggtggcgtc

SEQ ID NO: 28526 - DNA, 65 bp, Homo sapiens
  chr14:61748033-61748098
  hyper
tagttccaggccctacgagcagtgcccacaccctcccagttccgcctccgcccaggtgcgctgca

SEQ ID NO: 28527 - DNA, 202 bp, Homo sapiens
  chr14:65171074-65171276
  hyper
acccacaggaaaaattcctggcccgcccctccctcgctccctcgctccctcgctccctcgctccctcgctccctcgctccctcgctccctcctgccctcccgctgcagctccggctccgctcgacttcctgccgggcgctggcaagccgcgcgctgcctggggtctccgggggccgcgcttgcagctggccgagtccgggcc

SEQ ID NO: 28528 - DNA, 188 bp, Homo sapiens
  chr14:65171373-65171561
  hyper
agccccgcacgccgtgcgcgtcccgagcccgcggggcagctaccgctcggtgagtgtcccctgattctcctctctcccctcttatctccctgcattaggctgagcggcggtgccggcagtcacgctggggccccagtcccttcgcggcccccgtgccagccccctgcggggtgaggaccggggcgacc

SEQ ID NO: 28529 - DNA, 77 bp, Homo sapiens
  chr14:67878644-67878721
  hyper
cgttccggggcgcgcgtctggccccgctctagggagccgcgtcggcggggccccacccgggcaatgtcccgaagctc

SEQ ID NO: 28530 - DNA, 41 bp, Homo sapiens
  chr14:67878763-67878804
  hyper
cgccgtcctccatgtcgccgcccgcacgccagggccacccc

SEQ ID NO: 28531 - DNA, 105 bp, Homo sapiens
  chr14:72399486-72399591
  hyper
aggctgtggggagcggcgcggagacggactagacttcccctccgcccccaagaggctgccggtccccggttccctgggcttctccagctttatcatgaacctggc

SEQ ID NO: 28532 - DNA, 108 bp, Homo sapiens
  chr14:75079225-75079333
  hyper
ccccgaatcgttctcccgcccctcgcctcagggaccgtctttggatcgggggacccaggctgcagccttgcaggtctgaaggaagccgggaggggcgccgaggcccgc

SEQ ID NO: 28533 - DNA, 536 bp, Homo sapiens
  chr14:81902288-81902824
  hyper
cgtccccagggacacctgttgtcgcctccccactcgggccgatgaagacatcctgggcgtcccaatctcgaagacacccgtcggccagaagtgtctgtgtatggggccaggtgtcgcaggagtcctcctccacccctacctgccttaagcagagtcccctcgtcctcccccaccccgggacgcccgcggctggtggaaacgccgcgcctccgcgtggctcgaccaggcaggctcgggggcgccagggggcacagcggcgctaggacctcgcggccggcccgcccccgcccccgcccccgccccccgcccgctccacctgcggggcccctcttggggggcgcgctcgcctcctgctgcggggcgtgggtgcagttacctgcgccgcggtccgcagggtccccggcgtccgccgaaaggtcgccgcggcaaagccggcttctctggccgcgggatacccacccggccgcactgctctcgccacgatccctcccggccgcagcgccgacgccggctccagactcgagctcgctctgcgc

SEQ ID NO: 28534 - DNA, 141 bp, Homo sapiens
  chr14:81903005-81903146
  hyper
accccgaagctgggattcttcccctctgcgcctagtggggccggccgtccaggcacgaggcaacacggaaagcatcgattcgagcgacatggaaatggcgtggaatggggagcgcatgggagtcccacccgctccgcctgc

SEQ ID NO: 28535 - DNA, 551 bp, Homo sapiens
  chr14:92302201-92302752
  hyper
cgcgccgtcggaagcccgagcacggagcagggagccgggcgcccggcgcgcggccgtccccgcctgggctggggtctccaccgtccccggtcacgggtccccctaggcagagccgcccacctggccagcggggacctagcctcgccccgtcgcccacccctggtgccctccagaccaccgcgcttccagctgtcgcggggcctaaagctctctcaggcccccgcgacacaggcgtcgctgaggagacgtgggaacagcccctgggccccaccacggccccattttaaagaaagttaaagacaaaagagacagaactgacactcacctccagcccgcaaggcggggccgccctcacaggcaccccccacagccctgagcgagctgccaggtgggagaagcgcacctgagccaagccacgccgcgcctttccccgcccgggtcccgccgccctcctccgggtctccacgtcccacgcccgcgctgggccggcgccgcgcggccgcggccggttacctgctggaggcagtgggcgctctgctgtcgccgcctgc

SEQ ID NO: 28536 - DNA, 188 bp, Homo sapiens
  chr14:92980770-92980958
  binary
cgctgggcgtggggtcggagacccggacccccgcaactttgggtgcccgcggcccaacagctgaccggccctcctggaccgagggtccactgggcccttttcccgccgcccctctgccctggccgtagacggtgaccttcggaccggccctggtcgagcctagtgcttgggtagggtccagggcgcac

SEQ ID NO: 28537 - DNA, 295 bp, Homo sapiens
  chr14:95235695-95235990
  hyper
cagggaaaaggaggaggcgtgttagagcatccatccgcacacccgccaaagccagtaagagaattcaaaacaaaacaaaacaaaacaaaacccagtttccccgggcaggcactgaattccagttttcgcgaactctggccaaaagtttgcagcaagaagtttgcaaactcctgcgcccgatcggcaaaagcggaggggggagttgcaagaggagcaaagtttgaggaaggtgaattaaccaaccggctccatgggctaaggaccgcagtgggcggcagaggccggagcgagcgcg

SEQ ID NO: 28538 - DNA, 267 bp, Homo sapiens
  chr14:95236553-95236820
  hyper
acccgcgggtaggacggagctcagaccagctgaacctcttgttggttttatactgagtcgacgtcatcctggatttagttcctggtaatatgcagatgacaaacagaaccagatttggccctttcttttcctttgggtgggggaagagggttggggggagggggagaggtgccaaggggagggggttacaaggcctgaaaagagattgtggattgcgaattaatgaaattaacctaatcttttccattcggcagccgggccgcgggc

SEQ ID NO: 28539 - DNA, 34 bp, Homo sapiens
  chr14:95236848-95236882
  hyper
ccttggttaatctcattaattcctttgtgccgcc

SEQ ID NO: 28540 - DNA, 76 bp, Homo sapiens
  chr14:99736040-99736116
  hyper
cggctctcggccgcccggcagccagtcctctgcggtgactgggcgcgcagccctctcgagctccgcgcgggcagcc

SEQ ID NO: 28541 - DNA, 61 bp, Homo sapiens
  chr14:99736213-99736274
  hyper
aaaaaaaaaaaaaaaaaaaaaaaaaaaaaaaaaaggaacggcgacccaggcaccgcgagag

SEQ ID NO: 28542 - DNA, 128 bp, Homo sapiens
  chr14:99736431-99736559
  hyper
ttcccctctgctaaataaacccaacagggacggtggaagctgctgcttgtcttgccccgctgcctgactttgcccgcccagccacatgcttgaaatcgacacgatttcagccggtggatttccactgc

SEQ ID NO: 28543 - DNA, 221 bp, Homo sapiens
  chr14:99737178-99737399
  hyper
cgagcgtccagccgggctcggcgcgcacacacacacactcctccagcctgcatgccccctccccggcccggagccggctccgcaggcccccgagcccgaggcgcgtccggctgctcggcgccccaactccccgggctgcaaagaaactttcctatggcccccgccccccgccatgctccaggccgacgccgtagactctgccagccagcgggcggccccgg

SEQ ID NO: 28544 - DNA, 544 bp, Homo sapiens
  chr14:99737462-99738006
  hyper
ctccggcccctcgcgcgcactccgcagacacttacgggtgatgagctccctctgggacaagtgctgcgggttgccctgtttgcggcgggacattgccccggcatctattctggcatcgcccggagagctgcactgatggggggagccgggggagggggtccgagccgccgccgcgccgctgccgccgctgccgccgccgccgccgccgccgcacctcctcctctgcccgggttggtgttttttttcccttcctctctttccctctcttcctcctcttcttcttctttattttgctctttcttctatgctgttttttgttttgtttgcaaaaagaaaaaaaagggaagaaaagcaagaaaaacctctcgatctaaaataagaaaaagaggcaaaaaaaaaaaaaactgctgttgctttccgcggactggctggtttctttaaaaatatattctttcgaaggaaaaaaaatctcttacacttcttcaaactgcttggcctcttgcacttgcaaatgtcttcttgaacttaaactgggttttgcacc

SEQ ID NO: 28545 - DNA, 460 bp, Homo sapiens
  chr14:99740032-99740492
  hyper
tcgtcccgaaggtcttgggtggggcgatggcaccaacaatttaacagcgcccagagtccgtgagcgagaacagaaagagatcccttccagtcccataccctaaaaaataataacaataaaatgtgccctggcttgcagttctgtaaactgtgggctccacggtgggcggacgcgaggccgagcggatggagaccgggggcggggcgcggacttgcacctcctcgccctggccgggcaggctgcacccggctgcccacccccaacaccccacctccacgtggtccaaagtctagtagggcctccctcttctgccatccctctcaccgggaaaatctttccaggaaagtggcttaaaaaaaatatgcccacacgcacctttaataaacttctttaagacattcataaactggccatccctactcgcccggactctaaatttgaaagatcaactcgcgctctc

SEQ ID NO: 28546 - DNA, 166 bp, Homo sapiens
  chr14:99740713-99740879
  hyper
ccctcaggaaaagggagcccctccgcgagcggcgcaagggctctcggagtcccagctgcagccgccaccccgcgtgcggtaaggggccgtgcctggggagggggcaccccctccccactcccagcaggaagtagctggcgtgggccggcgcgtgccccacggaccc

SEQ ID NO: 28547 - DNA, 98 bp, Homo sapiens
  chr15:100881161-100881259
  hyper
cgccccacccccaccctccacggcgaccactctgcgtcgcaacagaccggacgggccgacccggaggtggcgcgggcagtaccaggccgccggcggcg

SEQ ID NO: 28548 - DNA, 468 bp, Homo sapiens
  chr15:100882092-100882560
  binary
gccgtcacacatggtacccgggaccggcagcccccccggaccgtggcggcgaagcaggagcgcgctaggcggcggcgccagccggagtgaagccctccagcctttggaaaaagtaattagcgctgcggacaaacccaacgtggtaaaccccaagccccgccttcccctcggaaggcgggaggggattgggccctcgctttcctccgccccgcctcctccttccctactggttgggatgggtcgaaaccacagtgcgtagttaggttgtcagcgctttcttacacgtggtttctgggcagtggcggggacacggcaccaggtggcgcgcgggagccgaccggagccgtgggaccctggaagagctggaggatgcggggctggtcttcagagcttgtcctcattttggaactctctcagcctgctgcccagtttcccgggaaggtagggcggaaatcgccccggccaagc

SEQ ID NO: 28549 - DNA, 62 bp, Homo sapiens
  chr15:102028780-102028842
  hyper
cgacaacccagcggtgtagacattgccactgactgcaaaggagcttgtcaggggagcgactt

SEQ ID NO: 28550 - DNA, 503 bp, Homo sapiens
  chr15:102028992-102029495
  hyper
aggctcccggccatctacccccgggagccgcggacaccgagggagcgcgagtccccgagacgccgggccacgctcatgtcacccaagcagcggccgcggccgccttggcgcgcgcaccgggtccggagctcgcgccgcccgtcgagggcagaggggccgctcccccgcgggggagagccgggtgggcgcccaggacccagcggcggacggcgcgcgacgcctgaggcagcccagactcccccggagcccggcaggtgtccgcgccgccccggcttctgaggccacacttccgagcgcggggttgggcggcactgccgggggacttgcggtcggcgcgccggacctgcgtgggcgcccacgcgggaccccagtcccccccaccccgccgagtgtcccgcgcgcgcccccccgggcgacacccccccccgcagggcgccccggccgcccgccgtccccaagcggtcccggagccttcccacgcgcgcgcggggccggggccgggc

SEQ ID NO: 28551 - DNA, 142 bp, Homo sapiens
  chr15:102030030-102030172
  hyper
ggcgcgttcccgcccccgggcccgcgctcctgcgaccgggctccggggccgagagccgtccgggaggcccgaaacgccccccaccgggggaacttccccgccgacttctggggctctcgggacgcggtgccgccccagaggc

SEQ ID NO: 28552 - DNA, 54 bp, Homo sapiens
  chr15:29130654-29130708
  binary
cggaggccgcgatccccgagagttcttcgctcgagggttcttcgctctagggtc

SEQ ID NO: 28553 - DNA, 64 bp, Homo sapiens
  chr15:29862439-29862503
  hyper
gcgggcgcctggctgctgtttcctccaagaaaagtaactccgggaatcagcgcaataggagcgg

SEQ ID NO: 28554 - DNA, 289 bp, Homo sapiens
  chr15:29862582-29862871
  hyper
ctactcggccccggcgttggccgccggaacttgccgcccgcggtggcgtcccggcggccgcagcgcctagcccccccggcccgcgcagtccccggagcccgtccccgcctggtcgcggacactcaccgagaagcctgcccagaaggggcaggagtggcggacgcgggccgaggtggtgagcgccagcgcggcgaagctgactgccacgatgaggcatccgagcgccatctgcgtggccccgagcgccagcacgatgcgggagcggcccgggcactcgcgcaggcgggac

SEQ ID NO: 28555 - DNA, 67 bp, Homo sapiens
  chr15:29863222-29863289
  hyper
cgcgagccgccgccgctgctgccgtaccgggcgcgagccgctgccgtccccgggcgcgagccccgcc

SEQ ID NO: 28556 - DNA, 330 bp, Homo sapiens
  chr15:30113537-30113867
  binary
cgtaggaatactttgtattacttgtgaaagtttaattcaagttaaattattaaatgttaaagaggttattttcaaagttaccttaaataagtaatacagcatgaaagaaaacccgacctactacgcctcacaggctgagtggagtgttttgcagtctcaaagccttatcgctggcgtgcgcataccgcagggagtgacatcagatcgaaactacagggtttcgccggggaccaaccactcctccaaagacagcagctcccggccagcaggaggtggcaccccaagccccgacccgctgagagccggcttccagcccccgaaccctcactg

SEQ ID NO: 28557 - DNA, 320 bp, Homo sapiens
  chr15:30113984-30114304
  binary
ccctccccggccgcccccagtgcggcccgcgccgcccccgcccgaggggctccccgcggcccgcggcccgcggcccgcggccccgcgccagccctgcccaccccgccgccccggggcccagacagccgccagcgagggagggcgggacgcgggccagatgccggtgggcgggcggcgacggtcggcccggtctggccctggcggccgcggaggcgctcaccttggcggccgcagctctggcggacatcttgtctctctccagcgccgcgcgaggctcctcggacccgaaactccgcggcgctggcccgcccgctcctcac

SEQ ID NO: 28558 - DNA, 432 bp, Homo sapiens
  chr15:30114349-30114781
  binary
cgggggcggccggaagggcccggcccagggggagggaattcaactcggacaaaagtccgggaagcgcccgccccgcccgggtcttctccacggggcgcgcccgaccggcacctccctccgagcgcggccacccactcggcctcccgcagctttcgcagcccggccacgtcggcctcgcccggtcgcccgcccgtcagcagcacccgtggcctcccggcgtctcctcggaagccggcttcgccacgtaacttcccgggaaccggcggccgccaaggaacgcggcgtccgctggctcagccggcgccggcaactcagcggccacgcaaacctgccggcccggcccactgagcatgcccggcccggcgggggcggggctggacgaggcgaggcgaggcgaggcggggagggggcggggccgcggcgggggagggg

SEQ ID NO: 28559 - DNA, 376 bp, Homo sapiens
  chr15:30114810-30115186
  binary
aagcgcggaaggaaaagccgggtaacccaagtaacttggaagacagtttccgctgccgtgcgagtcttcctgtttgtttttatccaaggtctggcagaattcgcccccaaggagaaagcgcctgtgcaccaaagctttccttaagagacttgtccacttgctcctcgacaagccacgcacatcatggggtgagccccatgcatgagtgcggctggaaaggccggcagagccgatacccgacagttgtttccttcactgggcaaacagcatggtcacggctgtcaccgcgtgcctcggcgttgttcccacggaaggcggaatgcattttctgcaaggcgcgtcatggctttcatctccgaggagctccggcagggtc

SEQ ID NO: 28560 - DNA, 210 bp, Homo sapiens
  chr15:32162282-32162492
  binary
cgtctgcaagagccgcgggacccccgacgcgcgcgcacggaccgaggggtcggtcgccccacgcctggcatcacgttccagtgcggacagccaaagggctgagcggaggcagcagccccgacccagcggtagcgccgcgccctgcccgagagaggcgcgccacgccgggccggagccggtggcccgggagcccgcggggtccggagcgga

SEQ ID NO: 28561 - DNA, 761 bp, Homo sapiens
  chr15:32162523-32163284
  binary
ccggggcccgcgccccccgcgtccccgcgccccggccccgcggtcgcccggcctcaacgcccacctgcctcgccacggagctcgggaaggagacggcgccggccccgcgcccggagagcgcacctgcctggtccgcgggcccggccccgccgcccgccggcagcaccgcggccagcgccgtcttacctgccgcgccgcgccgctccgctccgccagcccgcagcgccgcagtcgccgctacccgacttccattttctctcgctttaaaggaaaaccagatcagctgttttgctcccgctcgggctccgcggccccctccccagctgccgctcgcggtcccggtggcctctcctcccccgcctcctcccgcgctccgctccgcccctcgcgcccctccgctccgcccgcggccgcgcacaacgcccgcctcccggctccgcctgctgcctccgggcgcgcgccctcctctgacgtcaccggtcgcgttcgcgccccgcccccgccccgcgcggacgtgcgcgcgccgcgcctgtgccccgcccccgcccctccggggccgggcacggagagcgcgtgctcgcggccgcgagccgaggaggggacgtacagcgcccgcgcgcccgcgagcccgctccggctctcccatgcttgcccctcggggtgctccttctgcgctctccgcctggactgcaggaaaaggctgcttaaacagcctgccttttcctgctgcctgactcgcgccatctgcggccacctgtctc

SEQ ID NO: 28562 - DNA, 301 bp, Homo sapiens
  chr15:39872823-39873124
  hyper
cgccccgtcggcccatttttctttttacaaaacgggcccagtctctagtatccacctctcgccatcaaccaggcattccgggagatcagctcgcccgaaagcccctgcgccaccccgcgggccctcctaggtggtctccccagccccgtcccttttcgggatgcttgctgatcaccccgagcccgcgtggcgcaagagtacgagcgccgagcccgtgcgcgccaaggctgcgtgggcgggcaccgacttttctgagaagttctagtgctcccaagccccgacccccgcccccttcactttc

SEQ ID NO: 28563 - DNA, 62 bp, Homo sapiens
  chr15:41913266-41913328
  hyper
cgccacactcccataattacccaaaccgtctcattccaagcccaaggaccgggctttcaagg

SEQ ID NO: 28564 - DNA, 362 bp, Homo sapiens
  chr15:41913372-41913734
  hyper
agaggtgcctttcccggcatgctctgcagcacaccgaggggcgccaggcgtatcccggcgtgcatcggggagcgcccaagggcgatggttcccggctcctggagaggcgtgcgaagttaagccggtaggtgcgagcttccttagctttgagcctctggtttctcgtttcctctttatgggtttaaatccataacggcagaaaaggatggccctctaactaccctccctctccgcgtgcgaacgactcggcgccgcttcgagctcggtgccaggtgattagcgggtaggggcgggcttgcgaccagcacgtgacccgaactggcagccaatgactagccgggtggtccagcagcgcgaggatt

SEQ ID NO: 28565 - DNA, 211 bp, Homo sapiens
  chr15:41913957-41914168
  hyper
caggccgaggcgcacccacagctttccccggcgccccggggtgcgacgtgttcactgaggttcgaccgggccctgacggcctgagcggtctttcgaagcgcgtgtgcggcctgtaaattctggccgcggcttttcgtggcgtcctgctccgcggtgagcacagacgacaagttctcagcaaaatggctgctggaaagagtcgccaagcagg

SEQ ID NO: 28566 - DNA, 31 bp, Homo sapiens
  chr15:41914240-41914271
  hyper
gggtggggggcgtggcgggtcacgtgccttc

SEQ ID NO: 28567 - DNA, 213 bp, Homo sapiens
  chr15:48009312-48009525
  hyper
cgaaaaggttgcttcgcaggctgcagcacccactgcgagctggatgactgaggcactgggagttgctagaaggagcagctactcagaggtggggagagggagggtgcgcagcagagcgccggagaggagggacgcggaggccaccgaggggtcagcagggccgcggcgccagggtgggggcctccaggcggcgctggccacggttcacccgcg

SEQ ID NO: 28568 - DNA, 212 bp, Homo sapiens
  chr15:48009670-48009882
  hyper
gccgtgcatcggtttgttttgctcctgctctgtcccgctgctgctgctgctgctgcaaggggtggtggcgagtttcaggattctatcaaggaagccaagacctaaggagacagagggatatctatttttacaatatttttctttattttctttcttccttgcgcgtggcaagcttttttttttctttttcttttttcttaccagcctccccc

SEQ ID NO: 28569 - DNA, 121 bp, Homo sapiens
  chr15:48009969-48010090
  hyper
gtgtgtgtgtgtgtgtgtgtgtgcgcgcggtgggggtcggaacctgagatcccgaatcgctgtgtgtgtgtgtgtgtgtgtgtgtgtgtgtgtgtgtgtgtgtgtgttgccactggacagt

SEQ ID NO: 28570 - DNA, 208 bp, Homo sapiens
  chr15:48010897-48011105
  hyper
gctcggtgctgagatgtgttacgttctcatctccccatcaattatggatggaaacaaataaggaagagtcaattttgctgagccccttctccggcaacgagaggcgttctgcagccgggagggagccgccgctcgcgccggcagccgctggcaggggcatggtgaggaggaaggtagggaaacttttatttcccgtcttgacagcggc

SEQ ID NO: 28571 - DNA, 228 bp, Homo sapiens
  chr15:53078992-53079220
  hyper
gggggaggagggatattgaagtccagagcaagagcctccagggggcgggggtgggggatggggaccgagttttcccggaggggtagccttctccatttctatcttcttcccacattcccccgctccactctttggcttcagcgggcactgcctgggtaagaggccctgaagcctggctctggggtggtgtgggtgtgtgaaaaggcactaccttgggctctggagaga

SEQ ID NO: 28572 - DNA, 771 bp, Homo sapiens
  chr15:57668421-57669192
  hyper
cggtgacggcggaggggaggtggaaggacgaacggctccgggaaggggtgaggtctaagcgcagccccgggcccagcggagccgagggcgggtggtgcgggggttcctgggtaggttcgtcccgacgggccgcgggcggattgaagggagggttgggcccgccggcagccccggcgggtccaggcccccggccagcccctgcccctcctcccaggagggcgggcggcgactgcggggcggggcgcgggctcgctcggcctcccggcggcgccgcggcccttgcactccggccgggctctgctggctgcggcgggagctggacgcgggaggaggcggcggcggcggtgagtgagctccgggctggagcggggcggggtgtgcgccggcagccgggtttcggggtgctaggggccgcccagggcggcgggacccccaggggttcgggctcagccaggtgcactgtgctcagtccgcgcgtccactctcggtgacccgcgccgcgcgtgtcctggggctcgaagatgcgacccggactcccgcgccgcgccccgccgagggcaggcgcagaacagatgcgggcgatccctggggaacccgcttcggggcggggtgggagggaggaggccctgcagaacctccctttagtgaagagggactttctgccttcgcacccctgcctggaccctccggctctagtgacagctgggagagactcacacgaagcagtttctgacctatcctgtcgtacacaagtcctcggcgtgctcggcc

SEQ ID NO: 28573 - DNA, 377 bp, Homo sapiens
  chr15:61519485-61519862
  hyper
cgctcgcattccaaatccaccgtctcagggtctaaatatactctttgcagccaaaagctccccgcacacaaactcaccgagctagcggcaggtccaggcccccagccctcatccccttcccttttgtcccagccctcgccgcccccctcccgctgaaaccgcggttcgccgcggtcaccctttggaaatcgcctttaattaaatgtttttcgcgtgtgtcatcctgatggcttttactgtactcgaattccgtgaatgggaaagcgcctggacagggggtgtggctaaggtggggggggggatactgtaaaacagccagcacatgatcagccatattcctacctccaactacaacatcgagaggaagggagcagttc

SEQ ID NO: 28574 - DNA, 88 bp, Homo sapiens
  chr15:62456599-62456687
  binary
cggcgactccttccagcccgcagcgcgcgactcagcagcccgtcggggacgcgcaggaggcggcagcggcggggccccgcagcgagcg

SEQ ID NO: 28575 - DNA, 131 bp, Homo sapiens
  chr15:62457008-62457139
  binary
cgcagcgccggggcacggcggcggcccggattggagactcgagcgtgcaaggggccggcagccgcggcgggatgcagaattcggggatgcgattcggcgtgagcactttggcgaaggcgggcttcggcgcg

SEQ ID NO: 28576 - DNA, 257 bp, Homo sapiens
  chr15:62457296-62457553
  binary
cccagaccctgtaaacgtcccccacgtgtttaagaccccagaccagttccagccttcctctcccctgcacccacaacaaatcagccccgcttcagacctttctctcttcttcagtgtctctggatctggttgcaagctcagtgccagtggcctctagcccgctgccgaggcgccaccttcagtactgcggccaggagagtggcgctcccctcttataccgtaggctgagtcccgcccagccgccagcggcccaaccc

SEQ ID NO: 28577 - DNA, 38 bp, Homo sapiens
  chr15:62684313-62684351
  hyper
ccgcggctgcgtgttctgctctcgcagctcgtagaggc

SEQ ID NO: 28578 - DNA, 163 bp, Homo sapiens
  chr15:69366376-69366539
  hyper
cggagatgggctgtggagggggacgttgggaactgcccgaccccattctcgccttttcccgctggatgtgcagctttcggaacgtgcaggggcgggagtgtctacaacctaagaaaagggccgcggtggggagcccggagcagggctgggtgcagggagcgct

SEQ ID NO: 28579 - DNA, 65 bp, Homo sapiens
  chr15:69366730-69366795
  hyper
tcggggcaggaaagcaggctcctgtctctccaggatccagcctcccgatcaccgcgctagtcctc

SEQ ID NO: 28580 - DNA, 362 bp, Homo sapiens
  chr15:71055275-71055637
  hyper
cggccgagcgggcgtgggcagcagggcgagcgccgggagaggagagcgacgagggggggtcaacggaaagagcggagtaggggtgccaatcgaggaactttggatttaggaggagggggccagaaccgccccactgaggtttcttccagaagttcggaggcttgggagaaaggggtggggaagagacccgtagaggctcgggtgcggcggcggggaggatccccggggtctctgggctgacggagtctccggcctcagggaggagtcgccagggccgccgaagccgaactggcagaggaaaagcagaggaaggcggcgcgcgaactcgccagcaaaggagggctgcgctgctcccggagcgg

SEQ ID NO: 28581 - DNA, 43 bp, Homo sapiens
  chr15:71055815-71055858
  hyper
gcagcggctgcagcagaggcggcgcgggctgtaccagccccac

SEQ ID NO: 28582 - DNA, 249 bp, Homo sapiens
  chr15:71055980-71056229
  hyper
cgggaatggggcgggacttcccttttaaactgagtaacacccttcctctcccagctggaggaaaagtttgggaactttagcccgggaaggggcggaggaggtgggcggccagaggcgtggagatgcgcgcaggccgggctccaggccaccggcgcccgcccacccggagcttaagatctagagagagcacggggtcccgcctttgccacctctcatcttcccggactcccctcctctttccacccacgc

SEQ ID NO: 28583 - DNA, 115 bp, Homo sapiens
  chr15:71146199-71146314
  hyper
cacctcccgggccagccgccgcgcctacctgtgcccgcggctcggctcctcctcgctcgcgctgccccagccggggctgaggtaccgggccgggtccccggcgccccgagtctcc

SEQ ID NO: 28584 - DNA, 82 bp, Homo sapiens
  chr15:71146345-71146427
  hyper
cgtcctcggcctcctggatggcgacgcggatctgcaccgccgtcttgggcccgggccgagcctccccgccggactgggccat

SEQ ID NO: 28585 - DNA, 65 bp, Homo sapiens
  chr15:71146754-71146819
  hyper
gcccgagaggaggtgtcagggctccctcctcctgcgccttctttcacggcgccgcagggatgggc

SEQ ID NO: 28586 - DNA, 194 bp, Homo sapiens
  chr15:71184276-71184470
  binary
cgcgtgtccaggcggcctgcttggtctccctcctctcccctcttaggtgccggggcgggcacccggtgcagggtgggcacggcgcctgccaccagcctcaggcgctgggagaagcgcaggttcttctggataaccgaagagacgtcaaaacaggctggggcaaagtggtcagagcagatgaccgagcggtcatt

SEQ ID NO: 28587 - DNA, 767 bp, Homo sapiens
  chr15:71184499-71185266
  binary
gcacgaagcggtcccagagcagccgcacggcccggtccttgggaaagcggaacagcgacttcccagacttggtggtgttgccgcagtgggcggccacacaacgggccggcatggcggccgtcttcggtgcgcgggagccgggttccctggaccttcgcccttgggcacgctcctcgcagcggcctcggcgaggcaagtcctcccctcctcacctgtccactccgggtcgggattgtttccttccctacctctggtcaccggaagtggcgatctggggcccccaatgggagggctctttgatatcttcctcctcctcctccctgcgctgctccccaggagccagtggacacaagcagagggatacaaatttcgcgcgggcagcgctgaggtgggccgtaaagaggaacggaccggaagtggtggtggttatagcaaccagtgtggccagcctcttccccagcttatcctcctcccaatactcccgctctgtttttatgaggctgggaaaatagaacgaggaagtggtgacgcactgggctctcacgaatacaactagaagctgcaacgactgtgtggctctatcgattcgggagaggtccagaccggaaatggtcgtttccatggtaaccctgagcaggttgcctgggagatgacctctttcgggtctctttgaatctccgctgtagcgtcacctggaaggcagatctaacagagaacctggactgtctcctatcatgattcccgggaaatatcgctctgtttctggc

SEQ ID NO: 28588 - DNA, 127 bp, Homo sapiens
  chr15:71185295-71185422
  hyper
ctactttctctttcttcccactggtactctttctgactggcgtctttgtcctaggagatgggctgtattattaggaccggcaccgctgggtctactcaagctattgtctgaccagggtttgaggttc

SEQ ID NO: 28589 - DNA, 588 bp, Homo sapiens
  chr15:71407569-71408157
  binary
cgccccctcccgccctcgtggcctctgtctagaccgtactccctcctactgggtgatgtctcttcccctgggacccagggaccatcccgttgttgacctccggggtcaggggtgcggatgggggccggcccttcccgcggtcgccgccagggggcggcaggagcggctccagatgacagcgggaggccgcaagaggggagggaggaaggaccgagggagcgcggatcccgctctcggatcgcaaactctgagccagagctctccgcgcgcgcctgaaccgctggccgcccgcgcagcccgacgcggaatcggggcacagcgggagcccgtgcagggcgggcgcggggcggctgggcggcggtggcggccgtccatgcggcggcgctcggggctgcccggcgccgggaaccacgcgggggcgaggcgaggcgaggcggccgccggtcgctccgggacgcggaccgccaggtgagcagagccgcgcgccccgcgtcccctgcgcgccgcccgcgcggccccgacccggcttccgctgcccaggctccggctcccgctctctggccggcggggcgggctggcgcgggctac

SEQ ID NO: 28590 - DNA, 118 bp, Homo sapiens
  chr15:72612103-72612221
  hyper
cggcgggaccggggtttagcccgctcatgccgacgccgctgtccgcggtgctgaaacccaggcgcgggccggggccagcgggctgcgctgaccctcccggcgccgcggccatgtcccc

SEQ ID NO: 28591 - DNA, 448 bp, Homo sapiens
  chr15:73660925-73661373
  hyper
cgcccccgcggggaacaatgggcgccggccggagaggctctgcggccgcggcgctcagggaaccgctccggagtgcagagcgcacggcccgcgcgggtcccgggcgtgcgtcccgcgggagggctggctgtccgtctgtctcgccgcccgggctttgtggctggccacccgcgagctcgcctcgcctcctctgccccggcccgtccggcccgtcccggggctcccgccgcaaccgagcggagcccagcgacccgccgggcttacatcagcggccgcctcccccgaagcgccctccggcagcgctcgggctcccgcgccccggaatattcatgaagccgccgcagctcgcgggttgccataggagcggctccagcagccgggcctgcctacctgggcttcttaaaggggcagcggcgcacgggccgggggctggaaaggggcggggggc

SEQ ID NO: 28592 - DNA, 987 bp, Homo sapiens
  chr15:73976461-73977448
  hyper
cggggtgggggatgggcagcgccctgctccgggagccgagggttttccccgccagggtcaggcctgggggcggggcggggcgggggcgggggccaggccgtgtgctctgcccagcgggctggctcaggcctcggtcagcagccgccaccgcggggccaatccggcctcagggacgcaccggagccgcctttccgggcctcaggcggattctccggcgcggcccgccccgcccctcggactccccgggccgcccccggcccccattcgggccgggcctcgctgcggcggcgactgagccaggctgggccgcgtccctgagtcccagagtcggcgcggcgcggtgagtgctggcgtggcgcgggcggcgcggggtggggcggcctttgtctgctgcgggccgggcctggatcccgcggaggtccgcacgttcccgctcagggctgcaggagctgagcagggcgccttccctccgggctcctgctcccctgccctcccccaggtccgggcggcccccctcgcacaggagtcccgggaaccgcgggcgcccctcctgccctgggctgtggggcccgcggagagctgggggctcccggatcctaccccgcccccctttcctcgggttgagaggggcccgggcgccgtcggacctgcagaccccggaagctgcggaccgggccgggtgggtgaatgcgcttttgcaggccccgggtctggagcgggcatgggggcagatctgtcccgtgttgaagcttaacgaagccaccggccggcgctgggaggttagcggggtctcgggtcctgcagaggaaaacgcccagctccgggaggggagcggcggggagggaaggcgagtggttaggcgtgtccactctgcagggcccagcagggcgaaggtgtgggcgactggtgcacttccacaggcagccgtgggcagcatgaggggtcagattccgggaaggacaggtagagacggctggcaggggccac

SEQ ID NO: 28593 - DNA, 61 bp, Homo sapiens
  chr15:79383268-79383329
  hyper
cccctccccagacacacacacacgcacacgcacacgcacacactcaaaccctgccctccct

SEQ ID NO: 28594 - DNA, 60 bp, Homo sapiens
  chr15:83951722-83951782
  hyper
cgtctgggccgctttaaatgccctggccttcagaggactgaggcgagcacagccataaaa

SEQ ID NO: 28595 - DNA, 228 bp, Homo sapiens
  chr15:83952822-83953050
  hyper
atcagctgtttcacaaattctgaggtaaaagaaaaaaaaaaaaagaaggggtcgacccccacaggtggaaacagcaagtcctaacgtcctgggctgaagcctggggtgcgggcggcagagagtggcgtgtagggtacccgccgagtgccgccgccgatttccacaggctggcccgccggcacctccgacgcgcccgcagatccggcgcggagaccgtttgccagctcc

SEQ ID NO: 28596 - DNA, 76 bp, Homo sapiens
  chr15:93616753-93616829
  hyper
agtagaaaaactgtccttggaggcaaatcccagccctactttccaaccagactgccgaccccaagcttccaccgac

SEQ ID NO: 28597 - DNA, 461 bp, Homo sapiens
  chr15:96873798-96874259
  binary
cgcgcgcgcgcctggccaggccaaccccggctgctgccttataaggcgcgccgtcgccatggcaacgtgcgctaagttgcagcagtcgtgtcaaagttcactatatagagagctcagtgagctgatcgcggagaagccacttctgccagccccggcgcctataaatcgcattccctcccgcgcccccctttttagcatatttgatcactttgattctctgttcttttctctccgcggtgtgtgtgtgcgtgcgcgcgtgtgtgttttcttcttctcctcctcctctccccgagttgcctcctttctccgggtgccgtactgccttttttcccctctttcattctttctctccgtctttttctcccccctctgcgcacgaaggatgtgcttctaggtggtgatctgccctcctctctctcttttatcatttctcccccgccgccggcgagttgactctttcc

SEQ ID NO: 28598 - DNA, 159 bp, Homo sapiens
  chr15:96874514-96874673
  hyper
gcggcggcggcggcccagcgccaggacgacgccgcgcagcgcccgacgcggaccactttcatgctgattcccccggacccgggcagcgctccggccactccgcgggccgccggcctccgccccggcctgcctggctccctgggcgcgcccgcacccggc

SEQ ID NO: 28599 - DNA, 40 bp, Homo sapiens
  chr16:1967780-1967820
  hyper
cggtcccaaccccactgcccggagcgcacccctgctccct

SEQ ID NO: 28600 - DNA, 224 bp, Homo sapiens
  chr16:1967909-1968133
  hyper
accggtaccaggcgaggccgcgctcgtagcacctgtcgaagaagtggggctcagagcccagcgcgcggacgtcggggtgcagccgcagaaactccagcagggcgcgcgtgccgcccttcttcacgccaacgatgagcgcttgcgggaagcgccggcggccgggaccgctggccaaaggcaggccgggtgctcccgggcggtggacggagctggacggctcggag

SEQ ID NO: 28601 - DNA, 380 bp, Homo sapiens
  chr16:23724334-23724714
  hyper
cgccctcgccccaagtgcgacgccgccccctgcgccccgcgaccagactttggggacttggcgtcggtccctggctctcacctgtggactcagcgtcccgagcagcagcgccgcgaactggagctggagccccagccggggccacggcctcgaccccctgaccgcactcgccatagcgcctgggcagctgcacggctggccaggtccctgggtgcctccaagggagcgctctgtccccgcccgacccggagaaggctccgcccctggctgggcctgcaaccccagcctggagtcctcgccgatccccgcccttctcatcacactcccagccgcatcctcgcgtcccagtcaccccaccaaacacggtggggcgctttccc

SEQ ID NO: 28602 - DNA, 167 bp, Homo sapiens
  chr16:25704644-25704811
  hyper
gactccagcgaaaggtcactttatttcagggcgaggggaggaggtgtcaccctgccctgcctcccgcgctcctcatccaaggaggtgctgtctgaatctgcccagctccaagcctgggaacccccagccctcctgcctgctgggtgtttccgaaaccaggctcttgc

SEQ ID NO: 28603 - DNA, 326 bp, Homo sapiens
  chr16:3021581-3021907
  hypo
gctacactgtgttgtcgggtgtggccggctggcgtgctctcaccgccccctccaccagtgctcggctccgggcatttggatggcaggctgctgcccgcctactggtatttggggcccggggagtgggtctgggttcaggggctccaggctccctgccctgctacctgcgcatggacgcactggcgctgcttgggggactggtaaatgtagcccgtctgcccgagcgctggggacctggccgctttgactactggggcaactcccaccagatcatgcacctgctgagcgtgggctccatcctgcagctgcacgccggcgtcgtgccc

SEQ ID NO: 28604 - DNA, 33 bp, Homo sapiens
  chr16:31483764-31483797
  hyper
cgggaggtgcggcgcccgcgggcgcccgggcgc

SEQ ID NO: 28605 - DNA, 283 bp, Homo sapiens
  chr16:4165534-4165817
  binary
cgcctagaggcccgggacctgctcctgtcctaaggggcggctccagcacgcgacctggacaggcaccatctgttcctgtggttcccggctcagcggtgctcccaccgcccccaccgcccccaccttcgaggcgcacgagaaccgctcgggacggacctagaacgcccgggggtccccgccgcgtggccgccgtggctccgggaccgctttgctcgctcgccttccgcgcctctcgccccgagggtggcctccgcgccgcgcggcttctcctcctcgcgcgctc

SEQ ID NO: 28606 - DNA, 1114 bp, Homo sapiens
  chr16:4165852-4166966
  binary
accttgagcgctcccagccccgcgagccgcctgcgcacaaacaactccgctggcggcgcggagccctccatcctgcaggagccgcgctccgatgcgtcaaaggcggcgcgcggccggccccgggcccggaccccgacccggagcagcgagcttcggcgggcgcccccggctcgcgctccccggccgccccccgcgctccgggccggccctgcccgcggcggcgggcgctgggggtgggggcgccccgggctgcgagtgcgcggagcccgtcggcgcggcccgtctagtggggcctgcttccccccgagtgcgccgccgctcccgccgcggccgcagctgtcccgggaccgagcgcgtggaaccacggacgcgggcccctcgccgggcggcggtgcagacgctgccgcagagccgggctcccgcgacgccggccgggacgcccgcccgcccgcgcccacgccgggggccgcctccccgagctagagatgcggccgccgccgcgcccgccgccgtgtcccccgcggccgctgcctcatgtcggaagagctgccgccgccaccatctccggcccctgccccgcccgctgtcactgacagacgcgcgcccgcgccgcccctcgcccagccgcagcgcgcacgcgcggcccgcgctcgccgccaccgcctcctggccccggacacgcgcacgggccgcgcgccgccccgccttggtgcgcgcgctgggctggggctgcggggcggggcggggcggggcggggcgcgcgctcggctccgccccccgccccgggcggcgccgcttctaggcggcgggctgtggccgctgtccgcgctccgggcgctgtgggcccgccctccctcggcgtcccagaggccgcgcgccgcccggggtcccgaccctgcggagagacctgaaggcgcctgccgtggaagaagccgctggccgcaacgtttgggaaatcaaaatgttgccttcccactcggcacgcctttgggataaatcgaagtttccaaccgttggatttccctcccgggaggctccccttgctctgtaagcaatgaatgcgggccccggggcactcggcctgccctggacctgctcacggggcgaccttcac

SEQ ID NO: 28607 - DNA, 66 bp, Homo sapiens
  chr16:49316711-49316777
  hyper
cttttctgttttgcacttaaaatttacattttgcatccgtactttttatttactgtgcacccttac

SEQ ID NO: 28608 - DNA, 156 bp, Homo sapiens
  chr16:49316844-49317000
  hyper
cgatttttcgagaataatttttaccctaagtggattttcgtgccacgcatggacttggaactacacacacgtagtccaaaacgtgaaagtcaaaatgcagctttgccaagtggcagggagaaaggagagctgagaagatgaggagaggaagggcgc

SEQ ID NO: 28609 - DNA, 664 bp, Homo sapiens
  chr16:5007944-5008608
  binary
cggccagacgcagggtccggggcgggtcggcccggactcagggtctgcttggaggcagagctagattagggcggggtcgtcctgtggcctaccattccccgaggctgagggccttggagggcggggccagtgaagggggaggggacttcctgaggtgtgaccaatctagagaaaggactgggctgagggcgtggtcaaacaagcgacatctaaaaataaggggcggggctagaaccagggggagttcgcctggggcggggccagagtggggcgggaccagttagggggcagggccaacctgggcggggccatggccggggacgtgggcgggaccaggtcaggggcggggccaggccaggatctccgctgtcccgggtcctggagctctctcggcccggcaggtttcgctcccgcccctccggccttccacagctgtcctggccgcagggtgttcaaggcgggacacaccaggctagagatccgcgatcgggccccgcctcaggtactgcgctccaggccaggcgggcgcgggtaagcgctcagctcccgagccaggcgggcttccagggcacttcccctaggctgcattcccaaaggctcccgagggcgagggtgagcaaagctgcggggacctgtgtgtgcatgcgtgtgcgattgcctctac

SEQ ID NO: 28610 - DNA, 756 bp, Homo sapiens
  chr16:52579636-52580392
  hyper
cgacaaattcggcgctgggggcttcagggaggacagaggacaccggatggtgggggggaattccgcgcggcccgggtaccagggctgcgactctcgcccgcctcgctgctccgagcgacgcccgctgcccttctgaggtccacctcgccacctggaacgctcggtcctcgaagttggcgcagggggaggtggagaaggtggagtgaccccagggtgtggtgtggaggtctccaatcccgatctccccgaaatgcaaaacttagcccccccaaaaaaatgagaggaaagaagccacttactctaagcggggaggggcgggcaccccggttccgaggtccaaagtgccctaacgaaagggcagcaaaggccacctgcggggtcccaccacttccccccactcccctgtccaggcatactcaaaagtttgttcctttccgtccgtaagcggccccgaggccggctctggagtaggtgggggaggtaagaaggactgggggtgggggagggcaagatcatcggaccaggagatcagggacccctgcgtagcccccactcagtccaggggggctgcgatcgtgtttactaataacagcaacaaacaatcacacgccagcccttctttcagtcctcgggctctcttcgctttttgggggcagcaaaggagagtctggcggggaggtgggagggagcggaggggctgaggagagcgccggctgggggacaaaaagcggcgtgggatggggcagaaagagaagc

SEQ ID NO: 28611 - DNA, 781 bp, Homo sapiens
  chr16:54316061-54316842
  hyper
cgcttcctatacctccccggaacgcgcgagatagtcacacgcgccactttgagggtcaaacaccccgcatctggccacactgtacctttactaacgtggggagggggcaaaaaaatgtgtctctccttcttaccccgaggtgtcactcgcccaaacactccctacaacttcttcaagtcaaacttgggcaaggttggctggctgactgcgagaggaaaaagagggcgcggagggggcgcggcgcgcggccgggtgtagaggccacggaggcgaggcgccgagcgtcccctttgtcctgtagagggagctccagccccaaatttccctgctgcctcccccggcccgcccaccccaggcccgcctggagccggaatcccggctggaaaggtgcggcggtctgacacccccgcaacccccgcgccggggccttagcaggatgcctcttctagggcacgtgggaaaacccaccagggtgccaagacgcacagatgctcccaggacccgggctccccaactctcaactagagctgggcagtcacacatcatctagaggattatgtacccctaggcgaccctcttctccatatccgcctccaccgtcaccccacaccctggcatctataaagagggaaggggggcaaccgggttggaaggaggatggaatctgggcttgcacagcctcttataggtaacagtgagaaagcctcaactgtgtcgatcaaagaatggggacgaagggagtgatgagaacacgaccccgccacccgcgcaggctaacccc

SEQ ID NO: 28612 - DNA, 72 bp, Homo sapiens
  chr16:54318434-54318506
  hyper
cgagcgaaggcggcggcggcagccgggtggcccgcggctccgggaagtcccagcaggtgcggaggggcagag

SEQ ID NO: 28613 - DNA, 46 bp, Homo sapiens
  chr16:54318853-54318899
  hyper
cgctggagccagactcaggaccggtagtggccggtcctctaagccc

SEQ ID NO: 28614 - DNA, 302 bp, Homo sapiens
  chr16:54319053-54319355
  hyper
cagccaggccctcgccccccgtgtcctcctcctcccccccgagctcctcctcctccagctctagctcgcgtttgccgtcctcctcgtcctcctcttcgtcttcctcctcgcgctcgctcccataagcgtttccctcctcgtcagtgcggctgcgaggcgcccaagtcatcttattctccttcttgaggcgccggcgcgcgttggcgaaccaggtggacacctgggtgagggtcatcttggtgatgatggccagcatgatcttctcgcccttggtggggtaggggttcttgcggtgctcgttg

SEQ ID NO: 28615 - DNA, 1091 bp, Homo sapiens
  chr16:54319649-54320740
  hyper
gcgccccagcgccaacccctccttccctggctccgcgggctcttaccagctgcgggaagatgggcagctccgcggcgtagggcaggaaggcgccgtagccttgggcggcggcggccgcagcggccgcggcgtagggcgccccgtacacggacgagagcacgttggacagggaccccgaggcgttcagctccgaggctccggcacccaggccgccccgggcccccgcgctgccgccgctgccgccagcggcccccgggcgctcggacgggtaaagcgggcggatgtattggtatcccagctgggggaaggacatggtggcccgcggggcacggacggagaggggggccgacccccgggccgcccagctcagcgccgcccgcgggctccggcgcgcatcgggggctgggccgggcttggggccgcgctgccgcccgcgctgcgctgtgctccgcgttcgcctattgatctgctccgcggcggcgacggcggcggcgagggcggcggcgaggagccaggtcaggtccgaacagattggcggagattcccggggctccgggctctgattgacatttctacggggcgcaagcccctcctctctgcgccgcgctccctcctctcggccgccggagctgcctctgcccgctcctcgctcctcactgccctcctctccccagcagtgtcgcgcctcgcttccttcgccctcctctagttttcactccccctcctcgcccttcctctcccctcccctctccgcactcctcttccccccaggatcgcttccgctgcttcgggctcctgcactgccctggacgctatgaaactctcctttctcctctccccttctctttccctttctcacgagggcttttgctctccggtccgttcccttcacttcttcctttctcactacttctattttgtaaatctctctctttactcacacgatactccccgcgacctttccagcctctgcgccctgggctaagtaaggcagccaaaagttgtggacacttagggtgccgcgcggggggtgtgtgtcggtgtctgtctgtccatccccgcccttccaccccctccctcgcctttcccca

SEQ ID NO: 28616 - DNA, 207 bp, Homo sapiens
  chr16:54321080-54321287
  hyper
gctcgcacctctcgactcccggccactttcagcagcttagggagggagctagcagccggcgtgggggtggggagcgagggagtgcgtcctaacagagtctccagaggccacctcgctgccttgcgggggcgaggcagcccccaacccagcaggaccaaacccagagattagccacttaacgccgcccccgggtccgtgtgcgaatcc

SEQ ID NO: 28617 - DNA, 230 bp, Homo sapiens
  chr16:54962422-54962652
  hyper
cggaaagccgtgtcccggacgagagccgcggcgacgaagggaacaggcgtggacagaggagccacgcccacgcgcgcccgccccgaaccccgacacccggagaggctcgaccggcgccgacgcggcccgaggcccaggccctagcccacgggacgtctggtcgggcgcggggcaccgccgcgtccgttcggcccacgaggggacacgactagaggggcggacggcgcggc

SEQ ID NO: 28618 - DNA, 367 bp, Homo sapiens
  chr16:54962936-54963303
  hyper
ggcgaggccgccactggccggctgcgcgctcccccaggctcgggccgcctgggccgctccgcctcgcttagacattggccggctggcagccacctcggccccacggtccccgccgccgctgcagccagcttcccgtctccatgacaatagcgcgatcgagaccccgcccctccccgcccctctggcgccgagactcggaggaaagcggggttacgtcaccagggggcggagcccagggaggccagcgcccaatcataggtgaaggaggtgtcaggcactgggctgggcggacccaggggctctcggagaatgtagtctgaaccgctcaggcctcttggtgggcggtgtctgggggaggggagcagac

SEQ ID NO: 28619 - DNA, 161 bp, Homo sapiens
  chr16:55689618-55689779
  hyper
tggagagtctgtcactcgctccccgtggtgggagatcagaggcctggtgtccttgggagcggcgagcggtgctcggcgcaggatagaaagggagtgcgcgcccgagtcccccagatccctgggaacccgcgccaccctcccgcccctgcccatccccggcc

SEQ ID NO: 28620 - DNA, 165 bp, Homo sapiens
  chr16:56671950-56672115
  hyper
cgagagtgagaggccgacccgtgttcccgtgttactgtgtacggagtagtgggtccgagggacctaggtgtggacagggacaggcaaggcgacagcgaggagaaacgaaaatcacatcggtggcggttgctctgcacacaactcgctcgctaccgcacgctccac

SEQ ID NO: 28621 - DNA, 232 bp, Homo sapiens
  chr16:57318148-57318380
  hyper
cgtccgtgcgggaagcgccctaggggtacgcgcagcgcgtcggtgacagtgtgagcccgggtggggagcgcaaggttcgcgaaaaatgaacgcagcgccggagtccctcacccatcctggccggaccgggagcccccggccaaccccgtgggcccgcgcgtgctctcaccagctgcagcagcatgagcgccccgaggcgggagcgcacgaagcccaggtccgggcgcagcgc

SEQ ID NO: 28622 - DNA, 204 bp, Homo sapiens
  chr16:57318412-57318616
  binary
tgctggtccgcgtgctaactttcgacgggaactcggccatggcggctccgcttgcctcccgaggtcgctacggccgccgtcgccgcccctccagcggtgggtgccggctcccgcgccgcttttcccccaggctccggatccctgtgtggctccaggcgctgcaggaggcgtcggggctgggagcctggggcgccaggtgcggcc

SEQ ID NO: 28623 - DNA, 677 bp, Homo sapiens
  chr16:62069435-62070112
  hyper
agctgagccttggcccgcagccctgccgcgggggtcgccctccctcgcctcggagatgaggcggtgcagaaaaccagccatagaccactcgggccccctcgcctccttttttccctggcttgcaccctccgcacagcgggctgcaggtgcttcccattcaccgcacggaccccgcagtgaaggcgcgcggctgcagccgcgcctgcctgcgttgggaagcggcgaaatagccaagtcgccgcagggaaggaaaccggcaggaaaactggaggggcacagcctggagcttgctactctctaggatctgttgtcaaagcagtttgcaaaaacagtcaggcaaaaccttgaggcgtacgtacgttatcacccacggatatcgcgaaagacacagcttagcccagagcctatgctaagaaccctcatccaccatctgaggggcaggaggcgcgcaaggtgtccgaaggggcatgggaattcctataagaaacggtcccttctggatagtcggaacatagaggaaaacgggggtgggttaggggaacacttactcttgtggggccctgcgctggcgaatgtcaagcctccaggttcacaaatggctggaggtgctcggggttagctcccgagggcggcaagcgccgaccggtcctcgctcgctaggcaggcgcctccggatt

SEQ ID NO: 28624 - DNA, 206 bp, Homo sapiens
  chr16:65157317-65157523
  binary
gtttgaaagggctagaggggaggagacgggcccaggagttaacggaaaaagaggccgaaaacggaagagaaagcttgggatcctgagcgcatggggaaggaaccccagtgcggggctaaggcaagagcggccgagccctgccctccagctcctggtcaccagcccgcgggtcccgagcgcccgcagccgcccgggtttccacacgg

SEQ ID NO: 28625 - DNA, 151 bp, Homo sapiens
  chr16:67427472-67427623
  hyper
aggctgtctcggcgggagagtgaccaaggtcacgccggccccgcccacgaggccccgccctccccgagactctccgggagccgcatcccgcccctcccccgcaactccgcggtcctcgcgacggcgagaccagcgctctgcagttcggggc

SEQ ID NO: 28626 - DNA, 709 bp, Homo sapiens
  chr16:68771324-68772033
  hyper
ccttggagccgcagcctctcggcgctgctgctgctgctgcaggtaccccggatcccctgacttgcgagggacgcattcgggccgcaagctccgcgccccagccctgcgccccttcctctcccgtcgtcaccgcttcccttcttccaagaaagttcgggtcctgaggagcggagcggcctggaagcctcgcgcgctccggaccccccagtgatgggagtggggggtgggtggtgaggggcgagcgcggctttcctgccccctccagcgcagaccgaggcgggggcgtctggccgcggagtccgcggggtgggctcgcgcgggcggtgggggcgtgaagcggggtgtagggggtggggtgtggagaaggggtgccctggtgcaagtcgagggggagccaggagtcgtggggacgatcttcgagggaaggagaggggcatccgtagaaataaaggcacctgccatgccaagaaaggtcgtaaataggagtgagggtcccggggataagaaagtgaggtcggaggaggtgggagcgcccctcgctctgaggagtggtgcattcccggtctaaggaaagtggggtactggagaataaagacatctccaataaaatgagaaaggagactgaaagggaacggtgggctaggtcttgagggggtgactcggcggccccctcccgggagttcctgggggctcggcggccgtaggtttc

SEQ ID NO: 28627 - DNA, 909 bp, Homo sapiens
  chr16:71659877-71660786
  hyper
cggctgtgggtcgccccgcccgggtttccagcagcagcaccccagcccccacccagcacacaggcacccctcccgcccgggccccagacgcgctcaggccgccccctgagggcgcccgttctcaggtgagctcccggactagcgcgcatgcgcacaggtgagtgcccgccccgcccccgggcttggccacctgcccaagaaacttgttggttgttgccctcaggtcgctcccgggcggggacacggaacccggccatggaagatccgtcgggggctcgcgagccccgggcccggccgagagagcgggacccgggacggcgcccccacccagaccaaggccgcacccacgatcgaccgcgggaccgacccggggacccgcgcaggaagcgaagcagcgacgggaaccggcgaagggacggggaccgggacccggagagagaccaggagagggacgggaaccgcgaccggaaccgggaccgggagagggagagagagagggaaagagacccggaccgaggcccccgccgggacacacacagggacgcgggccctcgcgcaggtgaacacggagtttgggaaaaaccgcgccaaagccggacgcgggacggagcccggggactgacctgggacgcagccgcgcctcctgggcccgcgccctgggaagccccggagccgccgcagccgcagaggaagggagaccccgggcgccgcagacccgaaaggtgagaggggccggggcgctgcgacctccgcgccggggacacctgtggcccaggccggcccgcgaggccctggcgtccccgggttctcgtcctaggagcccgtttaaatgaacaaatgccgtttctcccttctgcgctctcagaggcgacctggcagggaaggaaaactttagggttcccccttctc

SEQ ID NO: 28628 - DNA, 180 bp, Homo sapiens
  chr16:79633613-79633793
  hyper
cgtgctcatgggggtggaggacagcgagcccccggcgatgagacggccgcactggctgatgatgcggtcggtctccaccggttcctttttcacttcaaacttcatcagatcgaagtcattaacatattccatggccaggggactggtgggcaggtcggagttgctcattgccagttctga

SEQ ID NO: 28629 - DNA, 492 bp, Homo sapiens
  chr16:79633843-79634335
  hyper
gctgcaggagaggggccagcgggctgtgctgggtggccagcgggtgagccagcttgccgggctggggcgcttctagcttgcgcggcggtggctggcccgaaacctccgagcgcgctcacacacacacccccccgccctgcccgcgccccccgcgcccgccctccctcccccctgctcacgccaatgtgctccctcgctcgccccggcccctccttgctcgctcgcctccttgcgcgccgagccggcggcttcaggctcgggaagatcctccgcgagctgcggtggcggcggtggtggctgcggcggcgaagctggaggagcccggcccggtgcgcggcgtcccccgctcgccgctccgctgcgcgctttgcataaggaagggctcgcctcgccggcccgggctgcaggcagggcgcgcgcggcgtccgctcggggctggaggcgcggcgggcgtctgtccgggcggcgcgggccttggcacgggggagttaa

SEQ ID NO: 28630 - DNA, 395 bp, Homo sapiens
  chr16:79634364-79634759
  hyper
ttggctctctttattattttttttctttcctctctctccctcgcgcgctctctacctctgtgcaaagtgcaaggcagaggtgcagcccgactggaggagagggaggggggagtttagttctttcttgcctttttttaaaaaagcaaaatagcgaagtcctggggaaagacgaggcagagagcaaaggggggagggggaggccaagccgacaagcagcccgagctacagctagaagatgaaaaaagattttaaagcctctgatccagcaagaagagtttaaagcaattgctgagttttatagcactcgtgacgtcaggtccaaatgagaaattgactggcactccgggccaatgggaggcggcgagagcggccgcgattagcataatagtatagaa

SEQ ID NO: 28631 - DNA, 86 bp, Homo sapiens
  chr16:79804157-79804243
  hyper
cgtgtgtgcgtgtgtgcgtgtgttcaagggctgggggctcaattgtgagaggtggcccaggggccggttagagactgggaaggacg

SEQ ID NO: 28632 - DNA, 102 bp, Homo sapiens
  chr16:79804457-79804559
  binary
cgcgcccccagccccgccccgccttaaaaaaaaaaaaaaaaaagaagaagagaaagagccgccgggagaagcgcggacgccgccgcttcccgggctccagcc

SEQ ID NO: 28633 - DNA, 97 bp, Homo sapiens
  chr16:79804596-79804693
  binary
cgccattggtccatccgcctagcaacagccgcggccggaccaatgggagccgcgaagcggccggccccgctccagaaacttggctgcggagaagttc

SEQ ID NO: 28634 - DNA, 190 bp, Homo sapiens
  chr16:84853661-84853851
  hyper
gcccgcgctgtcgccgctgctaccgcgtctgctggacgcgggagacgccagcgagctggtgattggagccctgcggaggtaagtgtgatttccatgcttctcccttttgcaaactgttacccccccgagaagctggaataactaggacagatgccacctcgcagggctgactgtgtgctggcaccacacc

SEQ ID NO: 28635 - DNA, 837 bp, Homo sapiens
  chr16:85202563-85203400
  binary
cgcgcgcggctccggctggacacaaaatagatagaggagccggccgctattgtgcgcagtttgggacgcggggggaggcggcggcgggcgggagggaggcaggcttggaggaggagggcggggggagggagcgcgcggggagggattcccccgcccgccgcgcgcccgccctccgcccctccccgcccctcccgcccgccgccgccccgccccctcctccccaattaaatgaccccacgccttggcaggcgccggagctcgcacatgcggctgccgctccagccgcccgggccccgccgccgccgccgccgccgccgccgccgccgccgcgttccgggcgcgctcgccgcggcgccgcctcggcccgcgccgccgccggggggtgctcggcaggcccgggggggcgccgctgcgaggggccgtgcgcccgcgcccgcgccggccgcccgccgccaaactttgcggcgcgcacacatgctccaagttgggcgcggcggcggcggcctgggcgggagctgagggcggcccggggcgcgcgggggcccgggcgggcggcgcggcgcggccatgagcgggcggccggccccggtctcccgcaagcagcggctcatggcagccgtgggcgagcgggctgcgggcggcgcgccgctctcctgcttcatctgcggcggcggcatcgggcgcggcaaggagctgaagctgcaggtgaagcagccggcggcgggcgcggggaccccggcgcagcccttcttcccgttcctgcagcagcaggagccggcgcccggcgcgcgcgagctgtccccggccgacggctgcgtgttggtgtgcgccgtgtgc

SEQ ID NO: 28636 - DNA, 100 bp, Homo sapiens
  chr16:85203606-85203706
  hyper
ccggctgcgcggggccgcggaggagacgcgagactccgacctgtcggagctgtcggacaccgaccccctttccgagcccgacccgcccgcgcgggacgcc

SEQ ID NO: 28637 - DNA, 246 bp, Homo sapiens
  chr16:86531701-86531947
  hyper
cggcccgcacccgaccaaattttaaaaattgggagggttttggggactgcaatggaaaatcagctggccccggccccagactccgtctacactggcacagacaggtggagtacaaagccggcttcctggatgattcaggccccaaatcgtaggtagaaatgtgcaagtaatggaccttcgatctgctttccctcccttagcacataatccgtagtattcgctgtttcccgttgcccctatagacac

SEQ ID NO: 28638 - DNA, 389 bp, Homo sapiens
  chr16:86609636-86610025
  binary
cggggctggggcgcaaagccggagttctacagctgaaacctcccggagactttgcacacttctgcaaacgcgcggggctgggtgtgcgtctccaaaccgcgactagagcgtgggcatttgttttttgttttttggtttttctctctctctcctaatctctctctgtctctttctcgctctcttttttttttttttttttttgctttactatcggtgccccgcccaccagcctcccgtgtctccgcccacgtcccgcccattaccaaatcgggcagtatttatcaccgtacaaattcaagctcggatttgccttagagtttagaagacgcgccgggacggcgggagtttcggtagaggcagggatgtgcgtgctggacttcgggtgccgc

SEQ ID NO: 28639 - DNA, 802 bp, Homo sapiens
  chr16:87525701-87526503
  binary
aggcacgagccgaggaagcgaagctcgagcgggatgcacaggtccagcaggccgcacaggaactccacgcgctgcggcgacggcagctccgagaaccagcggtacacgccgtccctctgcagcgggcagcgcttctccaccatgctgccgcccgcgccgcgccgcgacccggggccggggaccgcgcgggggcggccggggggcgccgggggccgcggccggggcgcgccgggaccggggacgcgcgggccggggccgggtccgggcgagggcgcgcgggcgccgcgggccgggcgggcgccggggcgggggcggggaccggggccgggcaaggctcccgtcaggggccggcgggcgggcgcgcgcggggcgccgggggggcccggggcggccggggcggccgggggcggcgagcggcctcgggccccccgctcacggggaggcgccttccccgcgcccgtgcccagcggcggccggtgcgcggcggcggcggcggctgctcctcgtcgtcgtcgtcgtcgtcgcccgggaggcggccgcccccatctccccccgcgccgcagggtctgtcactgcgggccgccccccgacggagccgccccggccatgccgtcgccgccgcccgcgcctccgcccaggccggccgttaccccgggccgcgggcgcggcgtcgccgcctggggagcgctgggggccgcggccgcgaaacggacgctggagggggagggacgcgcggcgggaggcgcggagggatccggccgggacttgccggccttgctgctcccgcgcggcggacggatcc

SEQ ID NO: 28640 - DNA, 505 bp, Homo sapiens
  chr16:87526565-87527070
  binary
cgccggccgaggagcggagggatcgtcgcgctcgcggctgacgggcggccgggatcagcagaagtgggcggggtggccgcctctcgcgacagcccgggcctgccgggcccgtcccccccccactgattggctcaggcggcccgttctcggcccgtgattgtgccgggtccccaatcccattcgcccgttccgcggccacgcctccctgggggctgtcgatcatgttggggccaccgcctcccgtccctcggcggccgtcaagacgcgattggtccgcggaatcggagaggcggaaaacccgggctggatttctggttgcttttgttcccgcaaatttgcgtggagcattgtttttcggcgaaaacggggcgttcggccttcctgctttatttttgagcggtgtaagagggaggtagtgggtatcttcgagaaacggccgccgcggggtccggagccccgggttccaatcccgggtcggccactgcaaagctgtgtgaccttgggc

SEQ ID NO: 28641 - DNA, 60 bp, Homo sapiens
  chr16:87635912-87635972
  binary
cggggagcgcggggctgggggcgcggagggcggggcgcccggggtccccgcccgcgcgcc

SEQ ID NO: 28642 - DNA, 190 bp, Homo sapiens
  chr16:87636008-87636198
  binary
cgccgcgctccgggggcgggggcgggggcgggggcggggggcggggggcggggggcgggcgggggcgcgcgggcgggcggggtgcgggcgcgcgccgcgcggcccgagcgcgcgagccgggcccggagcgcacgccgccgccgccaccgccgccgccgccgcccgagccgccgcattgctgctgctgctg

SEQ ID NO: 28643 - DNA, 83 bp, Homo sapiens
  chr16:87637320-87637403
  hyper
acagtgcccctgtgccagctgaagggtgttgggggctttccaggggcagagccaggcggggcccagcagagcctccgtgcgtc

SEQ ID NO: 28644 - DNA, 122 bp, Homo sapiens
  chr16:88699839-88699961
  hypo
cggccaggagcggacaggtgagcccaccacagctcaacggccaggagcagacaggtgaacccaccacagctcacctgtggactgggaccaggcgaggtcccctctgcggctgctcagccccc

SEQ ID NO: 28645 - DNA, 225 bp, Homo sapiens
  chr16:88800137-88800362
  hypo
ccccacttggctgcccctgtgatggtgtgagggtcagtgcggggcacaaacggggattcccgggtcccctgtgaggaagaggctctggagcccagaggggactctgccaacgccccccgagctgggacatggcacagcagactgggtggcagctgtgctctgcccgcccaacccaccttcaggcacctgcgtggcctggtggggagtggccacgcccagcccctc

SEQ ID NO: 28646 - DNA, 425 bp, Homo sapiens
  chr16:89323587-89324012
  hyper
gacgggcgtgagcgcagaagccgcagagcccctcgcgcgcctcgcgggggtgtggtggggggtggccgcctccggggacgggcgggctgcggggctccgaccccgcggcagcgtctcgcggcgcctgaggccccggtgggcgtgggttccaggctgcacggctggtttgccgtctgggggtggtttgtgctgggacccccgcctcgccgcaaggaccgacgctttccgtatcccgggttcctgcttcggtgtaccggcagaatctgatcacgcgtggcctggagaatgcgcccagggtcgtattgcctggaaggagctctcagccgctgggggagccggaagggagacggttctgccctggacgcgggctgctcggcggccccggctctcctccaaccggccaaaccccgcctggtcccgccgcc

SEQ ID NO: 28647 - DNA, 267 bp, Homo sapiens
  chr17:15244586-15244853
  hyper
tgggcatcccttgaaaacccttgaaaagcatcagaaaggtaaattacgaggaaaccaacgtctgggtgggaggtgcctgtggatttgtacggtttttatttggaaggaaaagtgaagatcgcggggaggaattgcagggtgtccgcgacctcccgcgatcctgaggcgagaagttggagtcctggttggcgaagggggatcctttggggtagtcctagaggcaggctagagtcagcgagaccactcacctgtcggcggatgcccggc

SEQ ID NO: 28648 - DNA, 159 bp, Homo sapiens
  chr17:1901335-1901494
  hyper
cgcctccgccccaggccgcgatcgatcccggcctctcccggcctcattaccgagggagagctgccggggctggcaggggagccagacggcggcggagggggcggggaggcctccttggctccctggcccggattaaatatttactatgttttgtttggc

SEQ ID NO: 28649 - DNA, 100 bp, Homo sapiens
  chr17:1901970-1902070
  hyper
ctgcccaagctggcgctgccggagcgcccgggccccgctcccctcacgggcctcgcagcacagacggggacaggggcggcctcgcgcgcacggggacccc

SEQ ID NO: 28650 - DNA, 416 bp, Homo sapiens
  chr17:19770859-19771275
  hyper
gggcggactctcatgccgagagaccggagcggaaactggggaagctgccgcgcggagccagggtcagcgaggcccggcccggcccctgccgctcatggcccggcctgccgccggccgctggctgtctggcgaagcggcctcggcgctgccgggccaggggtgccgtcaccgtcactgtgcgcgcccagagccgcacacgcgctctgaggcagtgaggggcccggtactctccatccccagctcgtcgggcctcctcggccctccccgctcggggcgctgctgcgacggcgacggccgccgccctagaacccgcaccgccgcggccccgcgcttccccgcctcgcggcggcgcccaacgccctcgcgcgcgctacccgctcccgcgcgactggctgccctccgcgacgtccgcgcgc

SEQ ID NO: 28651 - DNA, 206 bp, Homo sapiens
  chr17:2658616-2658822
  hyper
cgagtagtttacttctttaggcatcacttcctgggtagaacgggtttcctaagggagtaaggcacagaacgaggcaatgggccgcctggtctctccgcgcgtcagtaggactcggggaaccagactccgcccagtgctccccagaaacccggctcctcggcgcggcggggagagacccggacggggagaggccgctgtcccgcccg

SEQ ID NO: 28652 - DNA, 256 bp, Homo sapiens
  chr17:2658859-2659115
  hyper
ccaggggcggggtctgagcgccgcgccctccccgcgccctccccgcgccctccccgcgccctccccgcgagcgcgccccggacacccgcctgcggcagccgagcctcctccaccgtgcggcccgcggagggcagggagcggccgggcgaggcatggcgggccgccgggcgccgggggagaagcgctggcagctggtgcgctggtgagtgggcgccgggcggcgcggggcctaatgcgggagcgaaccccgaggccc

SEQ ID NO: 28653 - DNA, 440 bp, Homo sapiens
  chr17:2756601-2757041
  binary
ggggaccgcgcgcgggcagtttcgtttggacggaggaggacgcgcgtttcctcttggtgcctgttttctctccctctgttttaaaagcagtgacagcatcggggaagtatccggggccgggccggggagggcggcagccgcctctgcctggggagggagctcggggccgccggcgggagtgcgggcggggaccagaaggagcgggcgaggggaggcagggccggggccggggagggcgcctgggagccgggcaggggggtcccgggagcgctgtccgcctcctcctgcgcttcgcccgctccctgtgccccgcgtcctccaccatccgggcggccgaggccggggcgcgggaggcggggccggggcgggtcccggcgcgggcggcgcgtctgagcgggagccgggagccgccggcccgggccgcgccccgagcgagcctc

SEQ ID NO: 28654 - DNA, 79 bp, Homo sapiens
  chr17:32907146-32907225
  hyper
cccctctgcatcttacagcgtttatggtcatcaagctggagtcgacgtcctgggcaggaagggctcggggcagggcgca

SEQ ID NO: 28655 - DNA, 146 bp, Homo sapiens
  chr17:32909146-32909292
  hyper
tttcttaaccagcaaggcgtggcggggttggggggcgggggtgtttcgatgctccacgctgaggggtgagcctcaggcagaatggagggcgcttagatggagggggcagtgggctctccgcattggtggagcgccctcggtgtgcc

SEQ ID NO: 28656 - DNA, 86 bp, Homo sapiens
  chr17:36101946-36102032
  hyper
cgtgtgttcaccgggaagagccgggagagctggttatttttgtttgtttgtttgaaaacacagctcaggttcagaggttccctaac

SEQ ID NO: 28657 - DNA, 203 bp, Homo sapiens
  chr17:36102080-36102283
  hyper
aagcgcaggtgtcaaacgccggccgcggcgcccgcagggtccgtcccgcacgctccttctcaaacaatgactttgctgcccacgagcagagaagcctggactccagcgcagtccgcagcgcgttcgttaaggagcccaacttcggcttcttagaatgcagcccactttctagacgcccccggcgcacctgcctcgaggccgcg

SEQ ID NO: 28658 - DNA, 280 bp, Homo sapiens
  chr17:39683530-39683810
  binary
cgaatgggccccagggcgggagagtgggaggaggccaaagcctgagagggatgaacactagacccttccggccagagaaacggaatgcaggaggccctacgctgcggtggcagagggggcaagactggccccgggtggaccagatcaccaaagccaaactctcgcatcttcctgcggcagcgcggcccctggcctagacctctgggcactctacagccgggtcccatctcctcccactcttcaggcctcgctgacccgcgtcccttcttcgtcccggggc

SEQ ID NO: 28659 - DNA, 794 bp, Homo sapiens
  chr17:39683839-39684633
  binary
ccccacccacttatctgccctgcccagttctcctcccctttccaccaccccggcctctgcatccagccccgaggtcctgccccgcacgtctcctgtccccctttactcggccccacctgtggaccttcccacgtcctaacgggctcctgcccgccgccccgcctggaacctcgcccggcccgcggggctgggtttccgcggcaggtgcactgcacttcccgcggccgggcctccgcccaccttgtcccgcaggtcctggatggtcgtgtagtagtggctgtagtcgcgggagggcccaggcccctgcttctggtaccagtcgcggatcttcacctctagctcgccgttggccgcctccagggcgcgcaccttgtccaggtaggaggccaggcggtcgttgaggttctgcatggttagcttctcgttgcccgccagcagcccgtcggacgcggtcaggacgccgccgtagccgccgccgtaggcccccgaggaggacgaggacacaaagcgggcggaggacacggatacgccgcggccgccggagcccccgtgaatgctgggcgcgcgaaaggcgacccccggcccaaaacgcacggagccgccgcccaggcctccgaaggacgacgtggccgacgactggcgatagctgtaggaagtcatggcgaggcggagcacggacggagcaaccctggtctcagaagctgcgattcgcgggaggagcggcgaggccctcacctggcgccttttatgcccgcggccggtggaggggggaagggaggaatggtgtcaggggc

SEQ ID NO: 28660 - DNA, 188 bp, Homo sapiens
  chr17:42061046-42061234
  hyper
cgctccccggggccgggtcttaggcgcacattggctcgcggtgcacgtccactctcctgtaggctcgtgcccttgacatatccggggctgtcacagtcccatgccccgaccccgaccccgcgcgagtctgcttgatgacgtcgctgtcgcaccccaccggcctccccgggtcctccccaggcgcgcgc

SEQ ID NO: 28661 - DNA, 149 bp, Homo sapiens
  chr17:42061420-42061569
  hyper
aggcccttatcgcccgcgtttatcgggccatcgctgataagaaaccgagggggcggcggggcggcccctctccttggatccaagaagcgatggggtcgctgttagggggggcgccagccccggggatgcggggagccttcgcagcctcc

SEQ ID NO: 28662 - DNA, 83 bp, Homo sapiens
  chr17:44919338-44919421
  hyper
cagcgctgaccggcagggggcgctcctgcagaaggctggccgcggtggcgccctcggcggggcctgggctggcctggggaccc

SEQ ID NO: 28663 - DNA, 39 bp, Homo sapiens
  chr17:45500788-45500827
  hyper
cgtcggctgcgcccgcggcccggggcggagttggccacc

SEQ ID NO: 28664 - DNA, 380 bp, Homo sapiens
  chr17:45500865-45501245
  hyper
cgcaggtggctcctccttcgcttctcccgatccccggccgtgccaggcacggtgccggctgccgagggaacgcctttgtgcccggtcctgggaacccgcgacggccgccgcgcgccccggtccattgtttcgcttctctgggttccaggtaggtgcgggcggcgcgcggggtccgcacgacgtgtcaccccggcggttggggcgccgggacccgcgggcgccggcaggggcgttcccgggcgcacggcggcggtgcagcacctgaagcggtggtggtcggccagcggcggcctcctgcacctcaccctcctgcaccttaccctcctgctgagctttgctgggctccgtgtagacctagacctttacctgctactgccgcc

SEQ ID NO: 28665 - DNA, 55 bp, Homo sapiens
  chr17:46832887-46832942
  hyper
gagcccaataaacggttcctctttccttctccggtcctttcccttccaacagagc

SEQ ID NO: 28666 - DNA, 507 bp, Homo sapiens
  chr17:4795549-4796056
  hypo
cgcctgggtgaggtctgagggcagcctagggagtagggggggcacagggactttaccagcctacccgcctgggggtgggaaagccccagccccatcacctcagcgcccccccgccgccccctcggcacccctgtgctcccttcacagacctcgcagcaactccgcctggcaaatctatctgcaaaggcgggcagagcggggcaccccaaagcctccagggccccctgctcagccccctggcccgcccaacgcctctaggtaatagagttgtcccccaactcactctcacctctcacttctgccacccgcttccctggtgatggctccctctgcagtgcagctcagcaccccagagaagggagcaccgtgcctccctgaccctgactctgcccccccaacagtaaccccgacctcaggaggagcgaccctggctgggaacgctcggacagcgtccttccagcctctcacgggcacctcccccaggctggctcactggagcggaaccgc

SEQ ID NO: 28667 - DNA, 456 bp, Homo sapiens
  chr17:48711989-48712445
  hyper
cgactcctggactgttagcctcggtatttagagagacatccccctggcttggcccaggggccgctcgcaggggctgtcgccgtgccaagggcccccccacctctgccccaaagtccctcccagggaggcgctgtcgcaacccgcgggacgggggcagggagaccggacccagaggcactggggtagggctcggcagggcgggtccgggcggagcgcggggtgcggagggcggaggcggctccggcgcccgctctgcccgccgctgggtccgaccgcgctcgccttccttgcagccgcgcctcggccccatggacgccctgtgcggttccggggagctcggctccaagttctgggtaaggcgcggggctccggggtcactgcgcgggggccagggtcggccggcttcgcccggtccccgccgcctgccttcccgcggggccggcaggtatcccggga

SEQ ID NO: 28668 - DNA, 102 bp, Homo sapiens
  chr17:48712602-48712704
  hyper
gagtgcgcggctggggcgcaaaggcacagtgcgtggctgggtgagtcggctccatcccagcccctccgtcgggtgcggaaggggcgtttcgcaatcagccgc

SEQ ID NO: 28669 - DNA, 731 bp, Homo sapiens
  chr17:52977560-52978291
  hyper
cgcacacctcccctcccggatctctaggacaaaggcaggtcgagggtaaatatttctagttattcagtatattcagtggctaactatttattttgtgggtaccagacaccgacataatcggttacgtccttcccttaattctcataattctgaggtttgtgttattaaccccctattatctttggtctacccagggcagccaaagaggcgcagagaagaatgacaaggtgcccagcaagcggcaggatcaaagcctgggtctctaattcccaggctggagattctgggctgcctgctcctcctgcacggggcgaaaagcccacctgggatccgagcgggcggccgcgccactctcgcaggctccatacacccgccactacccgcctgtaccacctgcagccggcagcgcagcctcctcgcgggtcccgcagggcgcgctgcaggtgcgctgggcgtcccgaagccccgccctcgcgtccctgccccgcgcccagctcctcacgctcggtgcccgcgccccgcagcggcagcgcagaacgcaccgcctctgccagagcccgggaagcgctcgggcgaagaggaggagccaagggtaccgagcgggtggagtcgggagccggagagcggtggaggcggatttcctgggcccggccctctggcgctaccatggcgtttggcaagagtcaccgggatccctacgcgacctccgtgggccacctcataggtaagga

SEQ ID NO: 28670 - DNA, 235 bp, Homo sapiens
  chr17:54673684-54673919
  hyper
gactaagggccatggtttcggaggggtccgaatctgggtgaaaatcaccacctctggcatctgcttttgggaagagagtatgcctgtgctcgggcactttctccccttgaggggtggggaggagggagaaatcggaaccggaatctttgcgctttaagattagataggggcagaaggcacgtaacccattaaagggacgtgcaaaacatcactcccaccccaccccttaaaaagc

SEQ ID NO: 28671 - DNA, 281 bp, Homo sapiens
  chr17:54674073-54674354
  hyper
cctccccacctccctgccacctctccgcgcctccctcccggcgttccttccaccccaccccccaccccccccaaccccccaagtccggagtcccggcgaatctatgctaattatttcaaacctgcgcctggtccccagcgcagtctcaatgcccccggccccgcccgccctgtccctccagcccggcgctttcttccctcccgacgcagcctcgatggctcctcatttcaatagcctggccccggagccgagccccctccccggcgctgcctccgtcagcc

SEQ ID NO: 28672 - DNA, 669 bp, Homo sapiens
  chr17:64187889-64188558
  binary
cgtcccggcctggatcgcgctctgcctgccggggacaccacagcgggcagcgccgggaccccaggggcgcgcgccccccaggcccggagaacgggcccagggcctgagggcgacgccccttcccgaacgggcccgcaagggcggggcggcagccaccggcgcaaaattccactcaagaacctggtgggaggggcgggggaaggaaattcagaaaaaaacgagaacctggcaccaccacacgcaagctttccgctcggccgctgccgccaacgccgccgccaccgccgcccctgccaaacggtttcaaatccttgcgggccgctgggtcgccgccgcccagcagcccgggggcggggactttcgcgctcgcatttccccgccccctactccacccctctagcctgcggtgcggttgccatggcgacgttcccggcggcggcgaccaccggcgccccaggctgggggcggagacttccgcgcgggcatttctccacccacaggtggcggcgtgcgcgcggccccgttgccatggcgacgctcctgctggcccagcaaccgccagactcgcaccccagcttgtgggccccttggcgggtccccagtcgaagcttccgggataacccgaccacagtttgaatgctgctgccctcccgcatcccgcgcagagtc

SEQ ID NO: 28673 - DNA, 675 bp, Homo sapiens
  chr17:64298985-64299660
  binary
cgggcaacgactccacggcgtctcaggacgtggccaaccgcttcgcccgcaaaggggcgctgaggcagaagaacgtgcacgaggtgaaggaccacaaattcatcgcgcgcttcttcaagcagcccaccttctgcagccactgcaccgacttcatctggtaggtgccgggccgggcactcctgccccgctcctccccgcctccgggtcccggcacccggcgctccggcgcgtccgccccggggctggctcactccgataacttggaaccggcgggagtccgaactcttcgcccggagtgacacgcgcgcccggccctgacaccggcgggcaggactcccgggacgtcgccgtcccgccacacacaccccctggcgcgagagggaggctggccccgtacggtggcgaaggggatccctctccgggccgggcccctcacctccccgggcgcgcccacccgcacgcacccagcggagcggccgcttgccggggtgtgagcccaggggacaggggaggaggagaggccctaagggggcaaaggttcccggagaaacgcgccccggagtaacgggggagcggcggcgattgcactgcgcgcggtccaagttgctggcgagccaggctgggcgcgttcggggtgggggggttgtgtttgtgcttcccatcgggctggactgc

SEQ ID NO: 28674 - DNA, 61 bp, Homo sapiens
  chr17:64961305-64961366
  hyper
acacacgcgcgcgcgcgcgcgcgcacacacacacacgcgcacacactgcccggcgcgcggg

SEQ ID NO: 28675 - DNA, 203 bp, Homo sapiens
  chr17:64961625-64961828
  hyper
aggtggaggctggcgagggggcgggaggaggctggggttggggggagcggacgggagggggggaggggttgcttggcaaccggtgtctgtgctattgctatgggaactggccatcctggggcggggccggccgggggcggggcgcgtcggtgccgctgggcgctttctacaggctcgggctgaggggtgggggcagaagtagg

SEQ ID NO: 28676 - DNA, 83 bp, Homo sapiens
  chr17:64962141-64962224
  hyper
cgacccccaaatgcgactggaggctgagtagtaggtgtcatgaggctggaatgctaggggaccaggatttcagccccgggacc

SEQ ID NO: 28677 - DNA, 50 bp, Homo sapiens
  chr17:68164458-68164508
  hyper
cgactgcgccgtccacaataccagctagtttgctgaattagttcagcgac

SEQ ID NO: 28678 - DNA, 197 bp, Homo sapiens
  chr17:68164537-68164734
  hyper
ctgcacaaaagacacatttgatcgctcgagaaaataaacatttaaaaaactcagtggaaagaaagactcctaaaatatatcctgtcctttaggagcaaagcttcgttaggacaccgaagtactcagaaataataggcacttactcttcggtttacacacacacacacacacacacacacggattagtttataaagtt

SEQ ID NO: 28679 - DNA, 205 bp, Homo sapiens
  chr17:68164928-68165133
  binary
tggagagactgagggcggacaaggcgagagggaacgagccgtccacccttcggagaagcctaggcgccttgtaagtaattcgcgaacagtcgggagaacaaacagccaagcggcgctgcagtggccgcacttgcgcgcgtctcaatcctgggggctctgcgcgcccgccccagtccctcgccccattgactcagtggcttctccg

SEQ ID NO: 28680 - DNA, 722 bp, Homo sapiens
  chr17:70588172-70588894
  hyper
cgcttggaggcagggggatgactaaaatgacctccaagaagatgtcaattacaagaacaaaaatttcaacccggaatctcgagaccttcgaaaaacgacgcggaggaaaaaaggaaagaaagaaaagaaagtaaatcagatcccttccccgaaccgcagggaaacttacctccagcttggcgacccagctgttaagcagaacaaatcaatccacggatggagaagaggtcgtgggtcttctgagcccagctgatacacaccaagtaatccacgttaaggggtccgcagccccccacccaattccccactttccatccaaggccaaagagcagccagaccctgtcctctgcgctccagactcgcggaggtcgcgggcgggggtcctcaggcggccgccttctcgtccccaggggtgggcgcgcgacgcgggcagggaccgggcgcccggaggaccaagcgagcgcatcccgcctactcgtgctgggacatcacccagcctggacgccgctcctcgcctttcttccccgcgcatcgccagcgccaaccaaagatccccgccgggaaagcctctctgccaagctggaaagcgctgaaggcggatcgtctctcagacttgggtttgcaggttcacaaggcccgggaggcttacggtgggcgcctgcctaacagagggtccttgcggagaagcgcagaacgacaaatgccagaggcggtgaccgcgt

SEQ ID NO: 28681 - DNA, 63 bp, Homo sapiens
  chr17:72427030-72427093
  hyper
cgcgggcgctcagggttgagcaaacactccgggccgcccgccccgccaccagctggctccgac

SEQ ID NO: 28682 - DNA, 220 bp, Homo sapiens
  chr17:72427594-72427814
  hyper
tgaaggctaattaggacaagtcggagcagggaacggggacgccgggaggggagagcgcgctccgagttgggcagaacctggaacggtcacaggaaacccgggcgcggggtagtcgggccgagggggacctttgcccacggtccagagtggtctggactcggcccacgcgtgagaggagcgcttggtgacgatcccacgtacgcttggtgactggtggagg

SEQ ID NO: 28683 - DNA, 333 bp, Homo sapiens
  chr17:72427999-72428332
  hyper
gaaggtgacaaaggctaggtgtcccccacggagacgcgccaaggtagccccgcgcgtgtccgtaggcgcgctctctggaagacgcggtggggggtgcgcagggctgcaccctcacaccaattgccccggcgaaggccgagcccagaaagtgagtgcgcgtgagtgtgcgcgcgcccgcatgcgggggcgtggcagtcaacagcaacaacccacacgccggcagggccagaaactcccatctccctcaccagccggaaagtacgagtcggctcagcctggaggtgagtcggggcggggagggccgggcaggctttgttcctgtgtaaacggagc

SEQ ID NO: 28684 - DNA, 341 bp, Homo sapiens
  chr17:72428489-72428830
  hyper
cggtcccagggagaggcaggccctgcgtcccggcccgggccccgccatcccagccaggaccgggcctggcccagcgccccgcgccgcgtccctcccacccccgcccgccccccgcctggggctggagttggccccaaacgctgcgctggagcggggccggcggcgagtcccaggtaagggctgctgccttcccgctccgccgcccggaagagtcgggtcgggacggcggggagtgggcgagggcagaggcggggggactggacatcctgcgggctggggacgccgcgccaactccgctcggtcgctgaaagttttcaaacccgagccggctggggactggg

SEQ ID NO: 28685 - DNA, 69 bp, Homo sapiens
  chr17:72428872-72428941
  hyper
ggaaaccactccataatcggggtctccaagaggagcccctccaccgcctgcctctcggtgggagtccgc

SEQ ID NO: 28686 - DNA, 360 bp, Homo sapiens
  chr17:72449954-72450314
  binary
cggtggcttgcctcacccccaactccaccgacggcaggagagggtccgcgggggcccgggcccagggaaggttttacgctccgtccttaacccagcgtcctaacctgacccggctgggagagggggcggggccccggaaccccacccgcagacagcccactcccccgcacgcacctgggttgggggaggtggggggcggtggggggcagtgaaggtggggggaggtgggggtgggcccgagcagccggcgcgcccacgtgcctctcccgcgagggcccggccaccccagctccagccaacccgaggccgcctctcgtgccccaccccaagccccgccccggcccctgcaacccgatcctc

SEQ ID NO: 28687 - DNA, 336 bp, Homo sapiens
  chr17:72450330-72450666
  binary
cgaagccagctgtcccagctcctgctgtagcctgggggccgggccgccgcgctccgcccatccccgccctcagagctgggcctcgcagccgctagggattgcgggggccgcatttatccctgtgtctctcaggccccgcagagacgggggtggggtgggtgacgccagggaagcaggccccttttcccaagggaagaatccccttccggaggcccgccgggccatggagtttccgcgggtggaggtagtgaggccaagggcacggggagccctgtcgctgccttacgtctggctctaggccggggttcctcggctccaccagcgacatttgtggcc

SEQ ID NO: 28688 - DNA, 658 bp, Homo sapiens
  chr17:75206857-75207515
  hypo
cgctcttgtccatgtttcaagaacttggggtgcagtgtgtttcgtgtgaatcgggggcatctgtagacatccacatggtaaaaacctccgttctgctttgggtattaaataaagcacagatccgagatggcaacaaactgaaaggaaggctgaagcggaggcccccactgtgaatgcaggaaagaggttccgtcagcacagggggccgaggcctcaggatggagctgcctggggagccactttgctgaagagggggccgtgccacgtggtgccgcctgctgttcttagacaggacccttgtacctcactgaatctgctgtggaaggacattctgaagtggcgtttcagtggtgaggtggcagtggtgggattaaaggggcccggctcgtagagcagccacgcgctgaagggcacagcagacagcgtgcatgggctgagaggggccgtgggcctggctctgctgcttccttaggtggagttttcagtgactgcagaactctgcacagctgcttttcattctcacgtccgcccccgcccaatctttgaaactaactttgattattccctcctgggtagctctgtcggtgctgtgtaagtttggttttcaattggttctcagcacccagggggtgaccacctcaaccccatctctactatg

SEQ ID NO: 28689 - DNA, 210 bp, Homo sapiens
  chr17:75207630-75207840
  hypo
cccctgcctgctctttctttagctttcaccttctccagggccttctgttctgtccagcccagggcagtcctctgaaccactcatgtacgagctcacagtgtttggtgtttctaagacctggcctcttagagtgtgtgtgaagatggtgtatgggagatcttggacctctaggtgcaggtcacaaagaacacagagcttggtgcatgacat

SEQ ID NO: 28690 - DNA, 328 bp, Homo sapiens
  chr17:75207987-75208315
  hypo
tggtgctcgtggatcgtggctgcctaacgctgcctctttttcagattctcattcagattgtggatgcctcgtcagtcatcacttgggatttcgacgtgtgcaaaggggacattgtgtttaacatctatcactccaagaggtcgccacaaccacccaaaaaggactccctgggagcccacagcatcacctctccgggtgggaacaatgtgcagctcatagacaaagtctggcagctgggccgcgactacagcatggtggagtcgcctctgatctgcaaagaaggagaaagcgtgcaggtaaaatcacacacaggtcaaatcgcgcatcc

SEQ ID NO: 28691 - DNA, 282 bp, Homo sapiens
  chr17:76167747-76168029
  hypo
cggttcttgggtcaagggtggtggagggtggggtcccccacccacctgtaccctgctgtgctccccctgcagggtgtgctggcctccctggcctaccagcgctacaaggctggcgtggacgacttcatccagaattacgttgaccccactccggaccccaacactgcctacgcctcctacccaggtgcatctgtggacaactaccaacagccacccttcacccagaacgcggagaccaccgagggctaccagccgccccctgtgtactgagcggcggttagc

SEQ ID NO: 28692 - DNA, 42 bp, Homo sapiens
  chr17:77788305-77788347
  binary
cgatcgtatttcctggggacagctcgacccccaggggagcac

SEQ ID NO: 28693 - DNA, 234 bp, Homo sapiens
  chr17:77788400-77788634
  binary
cgtgccccagtctacctagactcccaggagcgtccggccggaagagacagtgggagatgaggaaactgagattgggagggggacgtgatggggtaaggccattcctaaggcttgtggcagagctgcctcttcaccccacccccatttctttcagatgcggagatcaaagcccaggctcactggtgggtcgggagctcactcctccaagtacacttggccaacctcggggagccc

SEQ ID NO: 28694 - DNA, 258 bp, Homo sapiens
  chr17:77814493-77814751
  hyper
cggcccgaggggcaggggcaggggcgcgcctggcctggggtgtgtctgggccccggctccgggctcttgaaggaccgcgagcaggaggcttgcgcaatcccttggctgagcgtccacggagaaagaaaaagagcaaaagcagagcgagagtggagcgagggatgggggcgggcaaagagccatccgggtctccaccaccgccctgacacgcgacccggctgtctgttggggaccgcacgggggctcgggcgagcaggg

SEQ ID NO: 28695 - DNA, 222 bp, Homo sapiens
  chr17:77814929-77815151
  hyper
ggggtgtaggggtgacggttgtcttctggtgacagcagaggtgttgggtttgcgactgatctctaacgagcttgaggcgcaaacctaggattccctgagtgttggggtgcggcgggggggcaagcaaggtgggacgacgcctgcctggtttccctgactagttgcggggggtgggggccggctctcaggggccaccagaagctgggtgggtgtacaggaaaa

SEQ ID NO: 28696 - DNA, 754 bp, Homo sapiens
  chr17:79008842-79009596
  binary
cgggggcggtgatgcgggcgcaacgggggcgggacgcaggggcggggactgccgcggggcggggcctgaggcggctataaaggtggccgccgccggacgccgggctctgtggttcgggtccgctttcgtctccgtcctgctgccgttaccgccgctgctgccgccgcttgcgtcccccgctccggtctgtggtgcagccgggacccaggaccatgtctctgtctcgctcagaggagatgcaccggctcacggaaaatgtctataaggtgagcgccccccggcgccgagctgagcccgctccgtgtgcgcctgggtcgcgcgccgcccgcgcgcccgagcccgaccagggcggccccggggccgcgcgccgggccaggaggctgggactttgggggtcttcccggcgcggccacccgggacccgggctgctggggtggtgagcccggcgccggccgctcacaggtggccacccccgcccgggcccccccatcccatgcgcgccgcggcccggtcagtccccagccccaggcccggggagcactccccgctccgacggccctgctcggcccccgcgcgctcgccttggcgtcggcgggaacggagccgcgcgccgggccccggaagccctcggaccggtcggggtcgtagcacacccgggcagggccggggcggcgggggcggcgggcccaggggttgcggcggccaggacggcatgggggctgtctgaaggccgcggtcggcgcggtggcaccgt

SEQ ID NO: 28697 - DNA, 43 bp, Homo sapiens
  chr17:79009691-79009734
  hyper
ctaaggtgggaggtcggagcgcgggcaggctggatgggtggac

SEQ ID NO: 28698 - DNA, 284 bp, Homo sapiens
  chr17:79317890-79318174
  hyper
agcaggaggggcgaggagacttgcgcagtcagggagccgcgaaccccgagtctcggtcctcgaaggcggcaggagaaaccgcgcgctgtgccccgacctctctcgccctggccaaccgcgacttgggacgagctggaggagcttcccccgggctccggacgcccgcgccgaaaaccgggccatgggtaccaaacccgactctaggcggtcattcactttgtccccacccaaactctgatgagctatttgggagtgcgcggggactgggaagtgagggactttta

SEQ ID NO: 28699 - DNA, 1118 bp, Homo sapiens
  chr17:80655727-80656845
  binary
cttccgcacgcgagtcacctgtgctccttcctctcccccggacacgcgggacccctggcctcgggaccggaccctggtctcccctcccctccgacccacgcgcagacccagcacctgggcgcctgctcgccgcgctccgccccaggagccccggagctcgcgtcccctcccgcccctcctgccccgcggccgaacgcgcacttgcggactcgagcccccgccccgggtccccacagcagcggccccaggtcgggaggagcccagcgcccggcccagccgcgggctcccgctgcgcgcagactgcggagaaggatggagactgcgccgcggggcctcgagtggaactgggggtgcaacagggacgccgcagcacgagggccagggccgggcggagaaaggcccgcccgcgaaccgcgctcctcctcagccccgcgcccccggaccgggactcctaccctccccggccacgcgccccggcctcttcccgacccctgcccggtctcgcgtccccggacccggacccccacccgcaccccctccccagccccgcgcccctccccggccccgcgcccgcaccccggcacgccctccgcccgcgctcacccgccgggtggccgtacggggactcggccgcgccatcctgcaggctcgccaggatctcgcccttgcccacgtcgctgtcgcccaccagcaggaacttgagcagaaagtcgtaggcccggaccgggctgcccagggcgctcatcgtgacggcccggcgcccccacccatgcccggcctgcggggctgagcgcagaggcggcggcccggccccgagaggcgccgcgcgggccccgagtccttgctcgcctccggccccgccccgccgcccagcgctgacagcgcgcatccccgcccggccccgccattggtggaccgcagttgctagggcagctgcgcgctttcactggcttggttgtccgtccatcttactctcgtcaccgcctccgggctgtcgcccacccgcccctcctgaaaggtcgctgtcaccacagccaatggaggcccggagacggggcaggggcggagccagaacaagcaggaggcggggactctgctcccgcagccaatggcggggc

SEQ ID NO: 28700 - DNA, 340 bp, Homo sapiens
  chr17:80692978-80693318
  binary
cgtgtatgcatgcatgggcgcgcgtgggcattcctgtgtctcaagtccctttcccaggacatcctggaatcagcagccccaccctgggccgggtcagcgcgtgccatcggagcccccacgtcagcctctctctccgatcggcacctggcgtcccagtgcgcaagccccacgtcatcacgggggccgctgggcccggcctggtctgcagtgtgggaagccggccaggcctgtgaccagcgcccgggccgagggccggacctgcgtccgctgcggggcagggataccgggtccctgcagggagctcaagccccagcgcgcccgcgaagagctgcgcggactc

SEQ ID NO: 28701 - DNA, 285 bp, Homo sapiens
  chr17:80693554-80693839
  binary
cgggccttcggcggccccggcgccggctgcatcagcgagggccgagcctacgacacggacgcaggcccagtgttcgtcaaagtcaaccgcaggacgcaggtgctggcccgtgcgcaggcgggggctctgcgggtctctgcggggcctgggaaggcggaggggtcgggggcaggcgcatttcctggggctgggcctggggaggggtcagctttggcccttgggaggtggcacctgctgggtgagcccggctcaagcgttctgtgaaggtttgtgtctgcacgatcc

SEQ ID NO: 28702 - DNA, 443 bp, Homo sapiens
  chr17:81036717-81037160
  binary
cgggggttgctactgatacccagagtgcgggggccagggtgctgccaacatcccaccatgcgcaggacgtccccaccccaagaaccacccggccccgcgtatccggagcgaggagtgggcagcgctcggcagaggccccggcgcggcggctgcacgtcctccgggaggagggagggaagccgggctcaccgccgggcctcccccccggtcaggagggagccgggaactcccgaggcaccaactctgcggaacgcggggcgcccggatcgcccctgatcaccgcccgctggcgaggcgcgggggacccagaaccggcggggccgggagcctcctttaccgctccgcgccggggctgcccgcaggatggggcgcaggatggggcgcaggatgcggccccggcaccgcctcgcgggggtctgcggggggcgaccgcggctcgcgtc

SEQ ID NO: 28703 - DNA, 1219 bp, Homo sapiens
  chr17:9548277-9549496
  binary
cgggggcttttttcacagggcaacacgtggctcccagttcaggtcccgggttggcgggtgcaggcacagactctgcctccccccaaggggcagacggtctggaaggaggtggcgacacctgtccgcacacacctgagcctgcggaggaaccagcggtgcacaaaagcgctccccacccccacacagcgcccagcgcgcgcctctcaccacgcccgaggctgtgctctggagatgcctgccttgcccttttcttcctgcagtagccaggcctttaccatttactaggcgctttcagaatgttcatttctccgtaatttccactgcttgaaggctgctcgaggaacaggagcagcggcgaaacccaggtctgtcggtttacgaggtaaggaagggtggggaatccgaccacgaagactcccagtcagcgcagcgggggcggcaccaggcaggggtaggggtggcccggcgctgccctggagggggctggtcgtgccgccggattcccgcgcggggcggggctgccccgcccttggctccgcctccgccccgtccccgcacacctggcccgcaggtagccggcaccaggagccttagagaagctgtagggcctgctggccgctcgtccgcctcgcgcccgggggctccgcgcctggagctgcgccggcggcagccatggacctgggccccggggacgcggcaggagggggaccgctcgcgccccggccccgccgccgccgctccctgcgccgcctgttcagccgcttcctgctggcgctgggcagccgctcacgccccggggactcaccgccccggccccagccgggacactgtgatggcgacggtgaggggggcttcgcctgcgccccgggcccagttccagcggcccccgggagccccggggaggaacgcccgcccggaccccagccccagctccagctccccgccggcgatggggcgcggccgccgggcgctcagggcttgaagaaccacggcaacacctgtttcatgaacgcggtggtgcagtgtctcagcaacaccgacctgctggccgagttcctggcgctggggcgctaccgggcggctccgggccgcgccgaggtcaccgagcagctggcggcgctggtgcgcgcgctctggactcgcgaatacacgccccaactttccgcggagttcaaggtaggcagcgctgcgccgccgaccgccctgtccccctggtttc

SEQ ID NO: 28704 - DNA, 293 bp, Homo sapiens
  chr18:10455170-10455463
  hyper
ccccgcgcctgccgtctcagccctgggagagggggctctgcccactttccgaggcttgggaccgctctcccccagggcgcccggagctctttgctgcgggactgttctttttggaagggtggaagctctcccacgcagacaccttttatgtccagaatccgttgcatccagtccgagggaaactttcgtccgctctgctggattttccaactgtacactgccatgaaatcgccggctctgcgagcctttttccaaaatgccagaatgcagcaggctcttgatgtgttccaagc

SEQ ID NO: 28705 - DNA, 61 bp, Homo sapiens
  chr18:11752769-11752830
  hyper
ggattgctcagacccggctagtggtgagagatggcagcgatatccggacacagatcacagc

SEQ ID NO: 28706 - DNA, 41 bp, Homo sapiens
  chr18:18821658-18821699
  hyper
cgagttcacgcttggggctcttcagccgccgtccagtgaac

SEQ ID NO: 28707 - DNA, 108 bp, Homo sapiens
  chr18:19748747-19748855
  hyper
cgtacatgacgacccgagttaaagttcccaaaggtcagctggggaatgttgtcttgaggttcccgaaaccaccacgacctgagccgtagcatcccgagatagggtcgg

SEQ ID NO: 28708 - DNA, 526 bp, Homo sapiens
  chr18:19748884-19749410
  hyper
tcagggcaaaaagcgcatttgctgtgaaggggctaggcgggggttggggggcgggggggcgcagagcacgttcccccttccttctgggggcgtgctgacccaaggtctggagcgcccctcccgccgcggcggcggcgcgggactgtgcactgccaactcctcccgtgccaaggctccctccccctccctcgtgtgggtgtgtgtgtgcgactgcgggagcgggagggtgcaccgccgctggatgggtgcgggtcgctagccaggtcaggcgttctgtggcctccgcccctcccccggggtccctgggctcggtgccccccgggtggactcgcccccactccggggacagggcttgcggctcagcccacgcccgcaggcagcgcggctctcattgtctgcctgggcggcgcgctcccctcccccctcgccgtcccctccccaccctcttttctctcctcccctcgatccctcctcctcctcttcacctccagcgcccagctgctcgctgagcgcagttccgacccac

SEQ ID NO: 28709 - DNA, 419 bp, Homo sapiens
  chr18:19749446-19749865
  hyper
gctcggtgagtccaatcaggagcccaggctgcagttttccggcagagcagtaagaggcgcctcctctctcctttttattcaccagcagcgcggcgcagaccccggactcgcgctcgcccgctggcgccctcggcttctctccgcgcctgggagcaccctccgccgcggccgttctccatgcgcagcgcccgcccgaggttcggctgcttcctcctcgcgcgatctccccgctttcctcccctccacccctactcgtcgcgggcccctggcctccggctctccggccctctccaggccgcggtcggctccgacggtgtttccctccttccctccgggcgggctgaggcggctcccaggctcccgggacaccgcggaccaacttctagtctctttttctctcctcgaagcgcttatctgcg

SEQ ID NO: 28710 - DNA, 385 bp, Homo sapiens
  chr18:19749924-19750309
  hyper
cagagaaacttctttcttgctatctagccaggtctgtgtgtgggcattaattttagtgtggtaatctccgatgagccgaggcgatttggaagagcagcctggaggaggccagcccggctgcatttcacctccctcccccactcgctccgagtctccctgtcattcttcctgctctcccatttggggtcgcctcggctctggggcggtctcacgctcccccctccccagcccgttgcgttccccctccttttctctgctctccgctccaccccgctacgtccgattccggaacggtccggcgtttctgctgctggagatgaccgcggggtgggccgggtggcccggccggcgtgagcgcgcacgctggtggctgcaggcgcgggcc

SEQ ID NO: 28711 - DNA, 350 bp, Homo sapiens
  chr18:19750390-19750740
  hyper
gggaaggacccagactgctgcccccgccctggcgtcccactttccctgggccgagttgcatttctctctggggctcgcgttcgggctggtcagcgcagtccgggaagctctgggagagccaatataggagaacgcggcggtttcgttttcggggacaggttgccttccttacgcgaagggttttcccgtggggaaccctcaccccgaggcatttcgggagaggggcatccgcagagaggcgggatgcggcggtgccgacacgcacagctacttaaattcttttgtgtgtcatcagcccgggggagacactttagggcggaaggaaagcctcagccagcttctgcagatca

SEQ ID NO: 28712 - DNA, 224 bp, Homo sapiens
  chr18:19750806-19751030
  hyper
gaccggagcggtgcctttgagggagggctggtatcccagcccttccagggccctgtggcggctgcgcaggctcccttcccctcccttattgatctccacgcccggggcagaaataggatctttgagaagtctcaaatgggatctttgagaagtcagatcccatttgaactagaaaaaggagtggaggcgaggtagcgtgcagcctacgctcttgttaacccgtc

SEQ ID NO: 28713 - DNA, 469 bp, Homo sapiens
  chr18:19928416-19928885
  hyper
cgccgtacccacctccctcgctatcaaacaaaagctccaggcattggaaacgtttccccgccgggagcgccagggtccggccgcgctgcggggtcggtctgcgcgcgcggcggggtggtgggcgcgtctggccgcccgggtcttcaggcgcgcagcgacgccggcccgggccgccggtctcagcgcccggctccggctgggcggccccggacgcgccgagccaggctcgcgggggtcaagtccaggttgcggcgcaggaaggcggcgggggaggggcgggccggccgcgccctcaccccctcttctccgcgcccagtgcggaatgatgggccggttccctcggtgtggtatgtctgtataaacatcgttagcctccgggccgacacgtggtgcatttttaatttcgccttacaaattgcggcctcctggcgctggagaagcggtgggggaccttgactccccgcctttc

SEQ ID NO: 28714 - DNA, 271 bp, Homo sapiens
  chr18:21269079-21269350
  hyper
cgactcaacacttggctgggaaatcgaaatgtctttgatgtgagttctgtaggtagtggcagtttcctctgctctcaaccaaattcgtttacaagcctcctttactcttaggtcacaggtggcttttctggctttgacctgagcggtgagtatccagagaggagaacgatctaattaatttctgtcctggcgcctggagggttcgaagatcccaggctcccgttcccgccgcctgggtgggagcccgggaacgcctctcccattccccgcc

SEQ ID NO: 28715 - DNA, 34 bp, Homo sapiens
  chr18:21269390-21269424
  hyper
ctgctggcgcgcggctgagcgctgtcagttcctg

SEQ ID NO: 28716 - DNA, 213 bp, Homo sapiens
  chr18:21269740-21269953
  hyper
tgcggggcgaccgctcgggatcccggggccgcggccgggctcagccttcacccgacttacttcaacctggccgaggcggcgaggatttgggccaccgccacctgcggggagaggggacccggcgaggggaggccccagcccgagctctactgcaagttggtcgggggccccaccgccccaggcagcggccacaccatccaggtgagggcctcg

SEQ ID NO: 28717 - DNA, 174 bp, Homo sapiens
  chr18:21270135-21270309
  hyper
ggcccgaggcgaggagggggagcacgcgaggtgacatgaggctgtggtcaggttcgggctggtggaggggaaagtgtgaggctgcgctctaagagatgcaggcgcctcggcccttcccgcctccgtcacccacggagcgtcccgccaggcttgagtcctcgagggttcaggggc

SEQ ID NO: 28718 - DNA, 72 bp, Homo sapiens
  chr18:21851454-21851526
  hyper
cgtccaactattcttggatctactcacatccctggatcaagtctggccgccctccccgctccgtcccccggc

SEQ ID NO: 28719 - DNA, 760 bp, Homo sapiens
  chr18:21851561-21852321
  hyper
cgagctgcaaatacacccacctacctgggccagatccgaggaccccggctggcgcgctccaccctgcgctcctcgcaagctccagcgcgaatgcgctcggcctgctcctcctcctcccctccagtcgagccgaggcgagccgatccgggaggcgcgacccagggcggcccgcaaggtctccctaagtcacctttgcgcagcctgcccctggctccggccgggcagcagcgccagccttccccagcgaggtcgggcagaggcgttgcccgccagcggcccaggactcccgcgccgcgcccgcccgggccgcagaggtctgcgctgcccctccgccgccgctggctcggccgcagacccgccctccggggctcgcggggagagcgcgggcgggcggcggcaaggcctgcggcgggcggctccctgcgcgcggcgggcagcgtccgggccgctcctccccttccccagcgccgctggcgggcggaggcgcaggtagggaccgccggggaagcctgcacggccctccgaggagaggtcggggactgctccttgggctctacgtgagtgccgcgccgaggcgcctgcgaggtcctagagctgctgtgcgctcggccctctcctggagacaccggccctggcaactttttttttttcttttttctttttttttttttttaaccaacccgccccttgggaaactctggaaagcaaaggaatcttctctccagtcctgcctgtcacttactccggctcacgctgaagc

SEQ ID NO: 28720 - DNA, 378 bp, Homo sapiens
  chr18:25756118-25756496
  hyper
cgagggtatgaaaagtacggaaggctccaggcaaaggcgcccccggggcgcatatagggcacaggcagccggacagagaaaggagcagccgcgtaacggaacttctcgcccgggggagatactaggcgtgagaggccagactcgttctacaggcaggcgctgaccggcagagactcctccgggcaagagggccagattttctttccaggtgggacgaacacagaatattgtgagggcaagagaagaagaaaaggaggcaactccagactgggataaagacaataggacagtagagcccttgagcaccgggaggcgcacgggtgcagggtggggtaaggtggaggcaagtcccgtaactaagacaccagagtgagaatt

SEQ ID NO: 28721 - DNA, 105 bp, Homo sapiens
  chr18:25756986-25757091
  binary
ggaggcggagaggggccgagcgaagagccggaggaggcggcggcggcggcggcggcggcggaggaggaggaggcagcggcagcaccaacagcggcgcggagaaac

SEQ ID NO: 28722 - DNA, 42 bp, Homo sapiens
  chr18:25757146-25757188
  binary
cgctgctctccgctccccgccaatggagagcgagctgatgac

SEQ ID NO: 28723 - DNA, 291 bp, Homo sapiens
  chr18:28622129-28622420
  hyper
gagggggcagcccctaaatcccttttcaagtctgtgctttgagctctcagggatcctctccacccaaaggcgccctccaaccaccatcaccaccagctccaccacctggggagaagcgtgaatcccaaccccctgcccaacccgcgacggcgcccgccagagcgcagcgaagcctgagcgcgactcagaattccaacaatcgaacaccttgtctcaaaacaaaaagctcagtccagagtcgacccgcaaacacacgttttctctcctcactcctgcaggcccgaacttggg

SEQ ID NO: 28724 - DNA, 359 bp, Homo sapiens
  chr18:29077773-29078132
  hyper
cgcgctacccaggtcgagccccgccaggaggctccctcctcccgccattctccagagagtagggggtcgggaaggagagaacggcggggcggggcctgccacccacagtccccaacccaaggacgtcacggtcccaggtgcgagtgcgagcgggcgggagtccaccccgcgcctccctcctctgctgaactccccacctctgtaaaagcggcccgggccggcccccggctccattttctcgcggcggccacacctggagccgcgcctttgggttgggctgggctgggccgcgcaaccgccacgggaagacagccctcggggcggggagggagagggtggccgggccggggggaggccgg

SEQ ID NO: 28725 - DNA, 404 bp, Homo sapiens
  chr18:29078255-29078659
  hyper
cctggtaagtgccgcaagcgggacaggggagccaccgccggggagggcgtcggtaggcgaggtctagacctcgcgaccagacttgcccgccgcccttgtgcgcgttacctgcccggcgctccttcctgctgcccgaggggggaaaagggccgggcaggctgcggcgagatccgacctggggcttcggaaaatcctcttggctggagccaggagagtaagttgcgacctatcgaagttgtgttttccttcccgcgtcacccaggccccagcgcccttttctgtggtgtgtgggtgtagtgagccctggggcggggaacaccattgctgggggtcggaggctttgttgagagtctctgggacgagaaacgtggaggcaatagggaacaacctcgcgcttcttccac

SEQ ID NO: 28726 - DNA, 147 bp, Homo sapiens
  chr18:31157947-31158094
  hyper
cggcctgagcgggacagcgggaagcgggtggaacggcctgcacggagtgggcagcgccccaggaatttgggggctgagttggagggagaggggtctcgcgagggtttcagggcgtggctggagtagggggcgcgcggcgagtgtgca

SEQ ID NO: 28727 - DNA, 332 bp, Homo sapiens
  chr18:31158158-31158490
  hyper
cgcgtcgccattccccgtgacgtcagagtgtattgttgtgagcggggccgagcggagcatccccggagctgtcaccgcagcggccgcggcggtggcgcagcgcgagccccgcacgagcgagcccggccggcgccgcccccgcccctggcccgggccccgctgctgccgccgcccccgcccccggcccgcccgccgcgcgccgccgccgccgccgtcgcgcgcccccacccactccaccccaccccctcgctccatccctcccacccgccgccgccgccgccgccgccgccgccgccgccgccgccaccgcccgcgcgcctccccccgcggag

SEQ ID NO: 28728 - DNA, 96 bp, Homo sapiens
  chr18:31159050-31159146
  hyper
aactctgtgcacagtctgtgtgtatgttcggcgtttgtgagttcaaacattttacacgtgcatgcatggtgtgtgtccgacacggacttgtggggc

SEQ ID NO: 28729 - DNA, 208 bp, Homo sapiens
  chr18:31802468-31802676
  hyper
cgctagcgctacattcgggctttatgccaataaggagacactgtagactatcgatcagactcgtctgctctcagagcgtgcggccgggcttccagcctggcctttaggcgcggtggcggcggtgggacacgcgccaggcgcccagagaaggacatgggacaatggcccagcccgaggacgccagacgccgccgcccgacccggggaag

SEQ ID NO: 28730 - DNA, 201 bp, Homo sapiens
  chr18:31803102-31803303
  binary
gctggacgatccgttcgtattttttacgggtcaccgtcttggtcttgcctgagtccccgtaagtcctgaggcaccagtcctggaactggcggtacatgtcgcgctcgctctccatgttccccgcgctcggccgctggccggatgctcccagcgcacttcgcacctgttcaccctaggctcatgaaaaatgcagccccggcc

SEQ ID NO: 28731 - DNA, 412 bp, Homo sapiens
  chr18:35146241-35146653
  binary
gaggcgctgagattccgggcccggcggccgcggggagcgggtgtccgtgaggagccgggcagccggcctcctctctttgccttttgggggttctttttgtaatagcagcaggtgcaactttttgtattttaaaaatagtgatttttattttcgtgtgggtatgtaggggggctttatccaccaagctatgctctattagggcgccaggcgggcgaagcaaaggcagggatggcgggcggggcggcggcggaggtggaatgggcgcttttttcttccatctggctttatttatttatttagactagaaaagcgagccggcttggagggagtccgcccggggatccgagcgcgcattcatcagtgtcgagagaaaaaaagctacataaatatatattatgtggataaatctata

SEQ ID NO: 28732 - DNA, 275 bp, Homo sapiens
  chr18:43914608-43914883
  binary
gatcgaaaggagaaagatacatgaccgtgtgtgtgtgtgtgtgtgtgtgtgtgtgtgtgtgtgtgtgtgtgagagagagagagagcgcgcgcgcgagagcatgcttggttttctgtggtttgctttttttgaggtatatgtgtgttttgtgttatgtgtgttttgtattcattttttgttcattagtaccgatggctggctagctgggacctgggtctctgccctatcccatgccccagcccccaccctctcgtgggcacttgcacgattttcca

SEQ ID NO: 28733 - DNA, 62 bp, Homo sapiens
  chr18:44786792-44786854
  hyper
cggagacggggctaggggtgcacccttcgtcccggtcagctcttgcggctgcctacgttcct

SEQ ID NO: 28734 - DNA, 238 bp, Homo sapiens
  chr18:45534410-45534648
  hyper
cggccgggagtcgggtctctgccagcccagcgctcggaatggagctttgtggggctggggaagcaacctttgccaatgggaagggggtgtcacagcgcctcattccctcccagcttgcgctcctcggaataatctccaacagcgtgcctagaagcacagctgcttttgtttcgggcgtcggtgcttcccagaatcccggtgcccggacccagccgccgaaccgaccccgccccgccgc

SEQ ID NO: 28735 - DNA, 261 bp, Homo sapiens
  chr18:45534675-45534936
  hyper
cgagcggcggccacgcgggggcgctgggccgggggcgggggccagggctgggggtggggcgcgcccccgggccacctcccccgcccctcccggctcctccccgctcctcctcccatgccccggcccccgcctcgcagctgggctcggactcaggcttagccgcagtctgtgagcctcctccccgcacctggccggccaggccagcccagcctacttgtctcgctgcgcccggctgctgcctccgctccaggggtcggcgcc

SEQ ID NO: 28736 - DNA, 41 bp, Homo sapiens
  chr18:45534976-45535017
  hyper
cgcacacccgtggcgcgccctccaggggcggtttttctccc

SEQ ID NO: 28737 - DNA, 233 bp, Homo sapiens
  chr18:45662351-45662584
  hyper
caggacaacggaagccaggaacagaaaggagcgaccctggagccctcaccacagagcacggcgtgggggacccgacgctggatgctccgcgcggggtgggcggcgggcaggggggcgtgggtgctgggttagggggaagctctctccatcgtccttcccaggccagccccgcggccgctgcgcccgcctgcaggaactcaggcgctccagtgggtgacgccggcccgggcgcc

SEQ ID NO: 28738 - DNA, 259 bp, Homo sapiens
  chr18:45663079-45663338
  hyper
gcagagttccagatcctctctcctatttcggaagaggtgcgtggccccacgccccgcaggagctccggcgaggctgggggagttgaacgctttgcggacgccgccacccgcgccagccagagccgccccgcggccacccggccacagggtccccgcagcgcgtagcgagaatgcccgcagcgctctcccggccgcccggaagggcttcctcccccaccccctccccacggcccggccgctgggctccccagagccccga

SEQ ID NO: 28739 - DNA, 796 bp, Homo sapiens
  chr18:45687770-45688566
  binary
cgggatgagaggaaactgtaaaaccaacggggcggattcacgaaaaattcccgagcgtggtgagggtagagggtgctgggcagcaccccagttcgccgggcccacgctcctccagttgcccggcctgttcagactggttcgcccacctttctctccctgccggccccactcgcctgacctctgagaaagcagaatccgggacatgaagcaaccacagccgctccgcccggccacaagcgccccggactccgtgcctgcccgcagcccccttcctgcagcgttcactcggctgcccggcccggcccggcccgggcgccccgccccagccccgccccgctccggaggcccctcctctatccccgccccttcccgggcgccccgccctctccctccactctgcgcccccgcggcctctctctcctcctgcgggagccatcgccctcctcccgggcgcccctccccgcggccgcagcctgtttcccgggcctctcctccgcattctcacatcgctccagctcgacctccccacccgcccgcctccccgggaggccgcggcccggcgcggcaccgcccctgcccacggttacccggttaccgcctgagaggccggcgcctgcccgggcgggcgggacccgcactgaccccgcagggggcgaggcggggctgagaggggcgaacgcagagccagaccccccgccgccgcaggccgcccacctccaggcagggcttcgtgccagacccggctgtagttatcagctgggtggagggcagtgccagctgcaggcgtccccgaggc

SEQ ID NO: 28740 - DNA, 165 bp, Homo sapiens
  chr18:45934609-45934774
  binary
cgcttttctttggctcctcctggccttcatcctagtaaaaccagacaagcaaccggaaaaacaaagcagcacagcggccagagacaattcgctttcaacggagcaagagacgtacacaccttgagagaagacgcacgcagttcccgtgcgtgtcgctgggaacag

SEQ ID NO: 28741 - DNA, 222 bp, Homo sapiens
  chr18:45934810-45935032
  binary
caggctcggcttcacttgtccgaggcttggaggaactgtgtgcgtgcgcccatttcccccagcttcccgacttgacagcagcaaggatctttgagtcctgcatgagcgacacctcgggcaaggactgtactctgctcagatctcatcgagaggtgctggatcccagcctttccagctcattttccaattttcaagaaaagacagcgcgaagtgagactgcaa

SEQ ID NO: 28742 - DNA, 1886 bp, Homo sapiens
  chr18:45935196-45937082
  binary
ccagccccgcgcgccacttcgctccgggccgcggtgccagccaggaggcgcggcgcccgctcgctggctcgctctccgctggctctcccctccctccttccctccctccctcctcccgcctcctccgttgcatggctgccgcacggagcccctgaatagccaccgcagccccccgcctcctgcccaccgcgcggagggcgcccctgctccagccggcgccccaaggcgcgcggaccgccggcctcctagcaacggcccccgcaatcgctttccggcgcagcccaagcaaagccacccgcccgccgccccgcgacctcccgaactgcctcggctgccgaggtgctgtggagatcgcgaccccggcagccggcgcccgagcccggcgcgcgaagccgctcacctccgcgcgccgccggccctgcgcgcctcccgcacttggctccgggacgcagtcctggcgtcctccttcgccgccggtgtccgccggtccctgcgcgcccgagcctcgccggccgcgccgctgtcagagtctcgtggcggggctgcgccggcgggtatggagctgagcggcggcagcgggcgagcgggcagctcctccctccccgcgccgcgcctccgccctccccgcgccccgcctcccgcgccgcggctgtcagccccgcgccccgcgccccgcgcccgcgccgccggctcggggggcgcacagggctaaagggcccggatgtgtgcggtcgcctgtcgctcgcgcccgccccctccccgccgcgcggcacatgcacttgctgcgccgcagcccccgcccggctccgctaatttctattttgacagtaactgtggcgagtgggcggcgcggcggggggcgcccgggactggcggaggctgcgggcgggagtcaggacccgacgcggaggcggagtgggggggccgggcaccgccaccaaccgctcggggctccgcgtcttttctctttctttccttttttctctctgcctcctccaggatttaaagggacagccccggcagaggcgagggggccaggcggccgccgtttctccggtctcctgacgccctctgcggcccggccggacccgcccgcacccccagcgcaggcttgggaccgccgggtatttttaggtccacacccgacccggggcagcggtgcggcagagatgggctctgccgacccggggcagcggtgcggcagagatgggctctgccgccccggcgcacggctatttttacagagtccgatgggggaggaaataaaacaactcggcaactgcttttctacccgaaagtcgggagcaaggagtgggggcgagaagttaagtttcccaaatgctctcggcactccagcgagcgcaccaagacgcctagccagcacctgaaaccgcaagcttgccgcaccccggggcgccgaatctcagcgggcaatcgcgctcggcggcgctgcggcccggagtccccacccctctggagccttgggccccgcactccgcaccccacacgccggggagcagccgctggccgcccgtcactccccgggtcggcctggaaggcggccttccgaagcgtccaatcaccgcgcaacaatgccaacgggcgggcccggggagggcttgtccccgccccgtcccgccgggccccgccccctcggagtctgtcggggcaggagaatctcgctgggacgccgagtgctcagcggtgctggaagccacgaagggccagtgcgaggggaggaggaagggtcctggccctggagagggcgtgagcgttctcgggcgaggcgacacttgggcagatgttccctccagctacgggccggggaaactcgagctggctttgcctcctacctttttgcagtccacccctctgcgctccagaca

SEQ ID NO: 28743 - DNA, 75 bp, Homo sapiens
  chr18:45937111-45937186
  hyper
tacatcggaggcagcaccctcgcacgtcagcgggtcctctccggggctcctccctcagaagcgggaaagtttgtc

SEQ ID NO: 28744 - DNA, 358 bp, Homo sapiens
  chr18:47087704-47088062
  hyper
ttcccaacatccctaagccgccgatacattatcacccacgtattgcggacgagagaaccgcctcggagaagctggctggctcgcttggagttttgcagctagtggcggagcgagcattccgagcaggtactgtgcgatcctccagcgccggccgcagctcacagccccttagctccgccgggttattgtgcggccgcgccttctgcacctgttgcggccctcgctaggcgggaagggagggagaagaggaggacaaaggggatgaccaggtggctctcccccgacggactcccggcccagggagcggatagaccactcccagagagagtgtggctttgagccttggagaggatgctct

SEQ ID NO: 28745 - DNA, 220 bp, Homo sapiens
  chr18:47719964-47720184
  hyper
cgggcgggtgtcccgggaatcgcatacccacgcaacgcgcgtggacaccacacgcacacacaactctgcatggaggcgtgtgcataggcactgttaaacgtgttttggccacccaagaagacgaacaggaaaaccaggcattggactatccaaaacttgttttcttaaaggtgcatagggcacatgtgaagaaaaggcctttgcccctctcactactgac

SEQ ID NO: 28746 - DNA, 174 bp, Homo sapiens
  chr18:47720319-47720493
  hyper
cccgattcggagcacccagcctcacacatcccttctgaccttgaaggcatcctgaaactcacaccctgctcccggttcgactttactccaaccccctccccgcagtcactgaagccctctttgtaccaaagaggccgcgtcaaaacatccatccccagcaaattcacaatgctc

SEQ ID NO: 28747 - DNA, 280 bp, Homo sapiens
  chr18:47720522-47720802
  hyper
acccctctacccattgcttaccctcactccatccagccgccgcgccctcacgccaggttgtctcctccctctccaccaagtccagaacccccacctctcccaagtccagggttccctgttgtgggtatgcgggaggaaaggacgcctcggaggcgcgccctcgagagccggcgccgcagagcccctggggtggggtccacggcggggacaggggacagcagcgggagcaccgcgggggcccgtcccgcgcacggcgctcagagctggcagggtcgccctg

SEQ ID NO: 28748 - DNA, 831 bp, Homo sapiens
  chr18:47720908-47721739
  binary
cctctaggagccgggtggccggtcagtgcgggcgttcccggaaccgccaaactttctccgccaaccgaagttagggactccgaggacagtgacgaggaggacaccgcggaggggggtctcccgtcacctcccgcctccagtagccgagggagaaggcgaccctgagtactaggtggccccgagcgcgccaccccggccccggggcgcctccctcgcggccgcgctcacctggctgtagagctcgcccaccgacatggcccgggccgggcggggctcgggccccggctcctggctgccccgcggctctcagtccgcggctggcccgcctggcgccatgttcccgggctggcctggagtttctcgatcttctcgctcttctccgacctgccccgccggcttcccgcaggcgccgcggccggctcgctcccggcggcgcgacctttactcccgccgcggcggcgcagctacggccggacaggagttgcgagcgccgggggaggaggccgcgccgcaccactcccctcccaggtgtggggaggaggcgagggccggcgaggagggaggacccgctcgcgtcagagcggacggcccgtgcgccgccgcgcctctgagccctgccggtgcccggcccgacgcgccctcccgcgcccccgctgccacctgggcctccgggccgggggcggggcgctcagagaggagctccgggaccggcgcgggccgccccctgctggacgccgcgcgcgcgcaggcacaggtgcgccccggcgcccgcacctgccctgccgcgctccgcttccacccgcaccgggccccgcggagtccggcatgaac

SEQ ID NO: 28749 - DNA, 239 bp, Homo sapiens
  chr18:499804-500043
  hyper
cggcctgcagaggacaccgcgcagggggcgactaaccagctgaggtgtgtcaccccaaaacaccagtgggcacaccccaaggcgggcacgtggaagggacgcggaaccgagggcaactattttccagtcggtgaatctgatggagaaagatgccaaatgcacttcccgagccagctgaactcctcgggcacctaatcattgccagatgtggcgagggcgcacggagaacatccccagtc

SEQ ID NO: 28750 - DNA, 354 bp, Homo sapiens
  chr18:52495540-52495894
  hyper
cgagaggagtgtgtttctcactgcagcagttgagtcaccagcaagacttgcctgaggtgagctccgcacatccgcgttgggacttgcagacacgccttcttctcacacaaaccttacccagccccgccgccgcggcggactccgagggtggtgccaccagccctgccactcgcagtcctgacgggcaggggctgcggaccgcccggccttggacccatccggagccacaggttggaggagataagtagctgtccccgtgctcatcgccctgtggagcagatcctgtctccttgctgacggtggagcccgggagttccagggcttgggaaggggaaggaaacctctctgaaatct

SEQ ID NO: 28751 - DNA, 50 bp, Homo sapiens
  chr18:52496020-52496070
  hyper
ctctgtgtgtgtgtgtgtgcatgtgtgagtgcgtgtgcaccttcgatcgc

SEQ ID NO: 28752 - DNA, 155 bp, Homo sapiens
  chr18:55020285-55020440
  hyper
cgggaatttggttgatggggtgtttggggaagggaaggcgtgggggaggggtgttttggcctctccgagactctttgggccagataactgcgcggtccttccactcctctctctaattctcccttccccctccctgttattttttttttaaccca

SEQ ID NO: 28753 - DNA, 118 bp, Homo sapiens
  chr18:55021430-55021548
  hyper
tgcagatggggttccctagttttctttttttctctcgggtgtgtgtgggagcagagggtggaccaaatgagaggggctccgggacggaacggagcccgcacgcgtaccagccgccctc

SEQ ID NO: 28754 - DNA, 911 bp, Homo sapiens
  chr18:55102427-55103338
  hyper
cgagccgtcagccaaacctgaaaagtgcggccccgccccctccacagccactggtagcttcccgtggaaggcccgcctcccggggcagctgcggcctcggagtggttgcgcttggcgcccgtcgggcgtggccccgccccaggtccgggagggtaggttggctgccccggcgagcggcagagcccttctggacagctcccgctcacccaaacagaagacgtcggcgccggagcgggctcggacatggcgaggctgcgagccggcccgagcggcggggcccggtgatccctccctccctccccgtcccctcccctctcccgcacgcacgccccgtccgcccccaccccgcccccaccccgggcgagcccgcccgcagcccggggcgcacacccgcacgcgcactcctctccactcactcccgcgcccgcccccactcccgcagccgagccccgccacgcgcgccttgcccgcccgccggccgcccccgccgcccccgccgcccccgggccctgatggactgaatgaaggctgcctacaccgcctatcgatgcctcaccaaagacctagaaggctgcgccatgaacccggagctgacaatggaaagtctgggcactttgcacgggccggccggcggcggcagtggcgggggcggcggcgggggcggcgggggcggcggcgggggcccgggccatgagcaggagctgctggccagccccagcccccaccacgcgggccgcggcgccgctggctcgctgcggggccctccgccgcctccaaccgcgcaccaggagctgggcacggcggcagcggcggcagcggcggcgtcgcgctcggccatggtcaccagcatggcctcgatcctggacggcggcgactaccggcccgagctctccatcccgctgcaccacgcc

SEQ ID NO: 28755 - DNA, 41 bp, Homo sapiens
  chr18:5543478-5543519
  hyper
cgcgctcgcccccagcccgaggggcaacttaaaacatggcg

SEQ ID NO: 28756 - DNA, 153 bp, Homo sapiens
  chr18:57363523-57363676
  hyper
cgaaagcagccacccgtgtttgctatgccccactgtttacacccaaaatccaatccaatctccttcacagacttccacacaagtatttcagggagcggcaaccatcctcaggatctcagggcacacaccctagacgcaaagtcagttgctcag

SEQ ID NO: 28757 - DNA, 149 bp, Homo sapiens
  chr18:7117374-7117523
  hyper
cgaagtcccgcaaaagccagaggcgaggctgggctttaaccccaaagcccgaggaggttaaagcctaagcctgcaaagagcgggcagcgtccggcaggagcggcgtccccatccagccctccccggcaagcgcgggagacccacgtggc

SEQ ID NO: 28758 - DNA, 217 bp, Homo sapiens
  chr18:7566793-7567010
  binary
ctcgcagccctccggagcctcagcgatctcctggctcgcttttcccgcagccgccgagcagcgcaggcccggcgactccgggtgcagctggccctgtgcggtgacatcgccgtccggcgccaggctcgaagccgcctggccgcgcccgcggggtcgcaggccgctggtcccgcccggccgcgctcacaaactactcgcggctcgtgacccgggacaa

SEQ ID NO: 28759 - DNA, 416 bp, Homo sapiens
  chr18:7567335-7567751
  binary
ccgcgcgcagccggcgcgggctcggtcatcggcgcgccgccgcccggggctgggcttggggctgcctgtggagaggcggcgggcggaacgcgcgcggccacggccacggccaccgccacggccacggccggcagctcgggtcccgggtcccgggcaggggaaggggagaggcggcgagctcagcaaccggaaccgagggaagattttggctccgcgggctcgccctccgctccctctgccagcggcgccagacgccgagtggggccagggacaggggaggaggacccaggaccctgtgcccgcgcccctggagccgctggagttcggacttctgcaactgttggcactttgggggcttggcttagcgctctgctgtttacccgtctctcctcgctgcctcggaaccaaagctcccg

SEQ ID NO: 28760 - DNA, 252 bp, Homo sapiens
  chr18:78004742-78004994
  hyper
catcccacggcccgggcccccagagcccccccacggccccgaatccgagcagcccctggccctcaactcgccccggaaaggccgccctcccctccaatgtgtggcgcgccccgatcgcctctcactcgtggaacaaaagagcagctcccgcggagcgggtccagagtctgcccggactgtccgatggccctcggccctctgagcgccgcggctgccgggctttgtgtccgcgcggggggcgggaaggacggc

SEQ ID NO: 28761 - DNA, 34 bp, Homo sapiens
  chr18:78005051-78005085
  hyper
tcgccggcgcctgtcgcctccacgccgccccagt

SEQ ID NO: 28762 - DNA, 406 bp, Homo sapiens
  chr18:78005162-78005568
  hyper
gctcttgacttccactgcgctgcaatcgtagaatcgcaaggtctgagacttgtgaaaacttcggttcatggtttcggccccggtcagcctcgccgtcgccctcgctcctcaggggccgcagaaagactcccgggggcggcgcccccaggccccggccccggccccggcccgcgctcgcttggccggcgggctgctcccggtgctgcgggcccgagctgggctggccgcgcgcctcagggactccaggggccgcgcgcgggaggagcgcgggggacgccggcgcgcgccgccccacctcccggcgcccgcgcccgcgccccgccccgcccccgagccccggaggacccgcccatatccccgcccacagccccgccccgcgctccggaggacccgccacaccacgccc

SEQ ID NO: 28763 - DNA, 1316 bp, Homo sapiens
  chr18:811501-812817
  binary
cgaacgcaacgggaggcggagtggcatgattccgtaaaagtggacgctgaatggtaaatttcccaacccccaacccaaaacaaaggaaaactttaaacatgttgcggttttcaatcaaaccaagtaaagccagaaaggctcatccactcgccccacacacccgctcctctccccgcacagctgctaccggcgtcggccgatacacagacccccagcctttaggacccaaaggggccgcttccctcgcccctacttcggccgtaggggcaaaaataaacctctcctccccgtcgccgggcggtccacacgaccccaaagacaaggggtggggagtgtccccacgcccctggaacctcaggtcggacttgggcgggacccggcaggtctggacagggcagagaccgagtcaggggcgagcaggtagcgcggggaacgagacaagcccgccgggcgatccgggggaggggagaagtttcttcccaacttcccgactcgggcccgcgggggcggggaaccgcggcggcggcggcggcggcggctccgggcgctggggcctagccctgtccgggcagaggtggaaccctccgcccgcggggccccaccgggtccttacctgtcctccggccgcgctctcatgagtcgctgctaccgcagctcgaggtggcggagggcggaggcgaggcccgcgggccctctccctcctccacctcctcgtcccggggcgcccggcggcagcaacgacggcagagccggcccgggacgcgttacttcaggaggagggagttcccgggctccccacgcctcggcctcactctccacctcctccgccccccccccccggccccgccccctgacttctagcgggggcgggggctgcgggtacctgcgcgcgccgccgtccgctcaccggaactcgggccacgccggcccggctccggggcccccagccttccggcgcctacgcccccgtcaggtcccctccgcgggctccgggccgctttgctgtggtcaggataggcgaccggtccgtgtcacttctcccgacccaacatggcggcggggtccggggcggattcccgggggcggtgcaggccgagggggcgtgaggaggaggtgcttccctgcccggagagcaggcccgcggcgtcccttcccacccgcgaacccaccgacgctcggctgccgcggagattgaatggagcgctccgattctgcccctctgcctttctctgttccttggcccagctctcagtagtggccagggctttggggcttgcttttgtgggggaggacggggttgagtttttttggttggc

SEQ ID NO: 28764 - DNA, 190 bp, Homo sapiens
  chr18:812869-813059
  binary
ctcaagcccaaccgcgtgagccgggggcgttactcacaccctcatcaccatcctgatcgccgtccaaaaaacgttcacgtcttgcctccttccgaggcagggatcctgtccctgcccccaggagcttcctgttgactgtaggtcgaaccagccttgccgggaggggaaccgaagctgagttctgtttggc

SEQ ID NO: 28765 - DNA, 323 bp, Homo sapiens
  chr19:10024009-10024332
  hyper
cgtcccctacccaggcgtgccgggcagggtcgtgggaagcacaggggtagagggggacaggtgggggccccgggggctgcggcggcggcagcggctgtggcgcgggtaccacgccccccgggagcgccccccgcgcggcggccactcacgattttctcagaggcgcccgcacgggacacggtgccgttgagccccacgagcgagggcagcgtctgcgacatccagttggtgaccatggccatggtgctcagcacggccccgatcttgagcagcggcaccgacatcgcgcctccgcctcatgccccgcggccgcccgccgcgcg

SEQ ID NO: 28766 - DNA, 146 bp, Homo sapiens
  chr19:11466008-11466154
  binary
cgatgctaacacgccccgcctccaagatcacggaggccccgccccacggggctatgcaaatgagacgcccggaggccccgcccctccctccacctcggagtctgcgcggcgcggccaggcccggccgaccgcgtctcggtcttcgc

SEQ ID NO: 28767 - DNA, 301 bp, Homo sapiens
  chr19:11590392-11590693
  binary
cgcccccgggatacgcccgggctgccgagtgggaatccgagggctcgggcgaggccgggcccccggggccctgggggcggggcctagatgggcgtgcccgggcgtggccaggcagggcgtggcagggcgggaggggctgcgcgctcgggagctgaccagctccgtggctgctgaaagcaccgagcgcggggctagcggtgcgggcgagcaggcgggcgggccgcgctcaaggtcacctcgcggcccagagccttggcgaggtggggagcctggacctggcctaagggggctgtctcggcct

SEQ ID NO: 28768 - DNA, 250 bp, Homo sapiens
  chr19:1491131-1491381
  binary
cggggggccgggggcggacaccggcgcggggccggagcatcgcggctcaggctgcgggaaagcggtgcgcgtgcagcggggtgggtgccctggtccgcgggcgagctcgagcagccaaccccgggcgcgtcggggccatggacggcctgaggcagcgcgtggagcacttcctggagcaaaggaacctggtcaccgaagtgctgggggcgctggaggccaagaccggggtggagaagcggtatctggctgc

SEQ ID NO: 28769 - DNA, 296 bp, Homo sapiens
  chr19:1491429-1491725
  hyper
catgggcctgggggtcgcagaccggactccttccccggctacggggtccggtccggccggtggagcgcgcgaggtgactgggacctcgaggtccgcccgcagcccttcccttgcccgcgccctgcgaccctgctcccgggccacccctctctagcttccgcccctggccgccccccgacgcctccttccgggcgctgggtgcctgccatgccgaagtccggttcttccagttgcccagtggccccagaggggtcgggatgccagtgtcctgcgcgtttcgccgtcccccttccccc

SEQ ID NO: 28770 - DNA, 192 bp, Homo sapiens
  chr19:1675929-1676121
  hyper
cgccgcctcggggttatcgatcgcagccttggaaacgcgattagattatcccggctgggaacggcagcctggcgggggccgcgcgggggaagcgcgccgcttcttgtaaacggttccccgaagggcgctgggccaggggcctgggagggggctcgttcccggtggggggggcgtcccggtgcggcgcggccc

SEQ ID NO: 28771 - DNA, 192 bp, Homo sapiens
  chr19:1718944-1719136
  hyper
cgatgggagcgggggcccaggctgcggtttacactgaatccacaaaaatcaccgaagcttgaaaagtgctcaataagccatcgatcgctctctgctgatcggtgccgccgccgcagcggggctggggggaaaggcggggcgagcagacccaggctccctgcctgtgccccacgcgggaccgcggccctgcat

SEQ ID NO: 28772 - DNA, 99 bp, Homo sapiens
  chr19:1725428-1725527
  hyper
cgggtggtgggaacgggattggaatcccgactgtggggcccctgcggccacctccaggatacagcggaccccgatgaagccctggcctgggtgctgggg

SEQ ID NO: 28773 - DNA, 281 bp, Homo sapiens
  chr19:1748599-1748880
  binary
cgctgcagccttgctcgggtcccctagcccggcgcctccgcaaaccaacccaccgcgggccgccgagccccgctccgggatccgccggctgcctccatcccagaagagtgcgcagagaattaaatctagatatttacatgtttaatggctaaaggagcctgtcttctggcagggcagggagggcgctcaggtggtttaactcagcgccgggatcccgctcagctgcgggggccgcgaaccccgccgctgggccgacgattgggcccctccggagcgcggcg

SEQ ID NO: 28774 - DNA, 350 bp, Homo sapiens
  chr19:1748939-1749289
  binary
ctgtcagccgagccctggagtggggcgttctccaggcccccaacccctgatccaggccgttcccctcccgcgcaccctccggcgggggctgcagcccgcgcccctcgccgccaagccccattttcccacagtgcaaactgcagcaaacgaactggttttctcctgagcgcacgctgcggggagacgattccaacggcgtccagtgaggaggggcccaggcctgcgagacggggcgcgttcctgtccccagacccctccggctgcgcctcaacccccagcccggctctctgacctgcatcggtcgggccgggcacagaggaggcaaagcaggcggaggccgcgagaggaga

SEQ ID NO: 28775 - DNA, 201 bp, Homo sapiens
  chr19:1749318-1749519
  binary
ccttcccctcgggcaccctcggacgcccccgccccagcgtgttactttctagatggggaaactgaggcgcggccagggcgatgcggcggaagtcccgcgcccggccgtctcccgcgcctgccagacagagccccgagaagagggcatagaattccctcctctaattgtgtcccagaactctgggacgacggaggccaagct

SEQ ID NO: 28776 - DNA, 221 bp, Homo sapiens
  chr19:1749556-1749777
  binary
caacccctccgctccccggccagccgcggccgcccagcctcggtgccccggcgcaaacaagcgcggtgtttgccgagcgcgaggcgggcggcgcggcccgagagcgatgaggattcgatggagccgctcgccgcggcgggggcaacggagcccgggcgggcgcggggatcgatcgggcacagctgtcgcctaagagcccgcgggagcatccacccgcgggc

SEQ ID NO: 28777 - DNA, 287 bp, Homo sapiens
  chr19:1753216-1753503
  hyper
cgcgaaatcggagactctgggtcgaggcccccagccccacctgggcagagtctgtcctcggacccccgcccgctgtcccccgggtacggcctgccccagcgggcgcgggcgggcgcagtggccagggacgccgaagccccaagtctggccgacttcggcctgcttggtgctcgagtggggccggggcgggcggagagcgaggctgcgggaggcagcggtggcaggagcgggtgggcgggggcgctgacgtcagacccgggcccgggcgccggcggccgctcccctgc

SEQ ID NO: 28778 - DNA, 228 bp, Homo sapiens
  chr19:1754950-1755178
  binary
aagccccgcccgtgcgccccggcagcccgggaccccctatcaggaagctagaccgcgatccgcgccgctgcccgtttgtaccgttgccaaaagggagaaagggattgtgccgcctccccgccccccggtcgccgcttctgcccctttcgggagcgcgtaggggttctctagtccttgttagactgctgggaggctccgagcctctccccaagcagccctcagggaagc

SEQ ID NO: 28779 - DNA, 378 bp, Homo sapiens
  chr19:1755227-1755605
  binary
gctgtgtccccgaacgagctgctgttgtcggctaaggtgccactcccctcctccagagtgggtggagaggggctgttgagcccccagccccgggccacagagctccgagacgttgcggcgggcgcctgcagctcagcagcagaggccgagcccgcgctcatccccccacctgccccagcgcgcgcttctttgtagttcggccccgcgatcgataccccctccctctcccctccggccgctggcaaaggtcacccgagaatggcgggggaggggcggccccggggaccctcggcccgcgccgcccggaggccttcacaccccgacccggcgcccgccccgcgcagtttggtcgtggctcgggtgcgcgcgcccctgccc

SEQ ID NO: 28780 - DNA, 166 bp, Homo sapiens
  chr19:1758062-1758228
  hyper
tcctgccgggcgccggggccaggacagagacggggacagggagggagaaagacccgcaggtgcagacggagagggagggggagacggggagatggagagagagggaggggtcgcgagacaaaaccagagagtggggagggagagaccgggagcgggagaaacagac

SEQ ID NO: 28781 - DNA, 37 bp, Homo sapiens
  chr19:19383975-19384012
  binary
cgctcagcgacagcgccgcgatcttgccggccagcgg

SEQ ID NO: 28782 - DNA, 372 bp, Homo sapiens
  chr19:290594-290966
  hyper
cggcctttgttcccgggaccctgcgggaggggggcctcgggatgcccattccgccagtgtggcccgcaaacccgccggacaggtttggttctcctggcctcccggccccccgccaccccgttcacccgaagcctgggacccagccttcatccccagtgtctcccccgcccgagccagcagggcggctgggcctccccgcacgtgcacgggttcgaatcccgccgacgcaccgggtgccaggaccgagggtcagccctctccgcgcgcagcgggagcgcccaccccaggggcggaggcgcggacgtcctgccggggtaacccgcggccgcccccacctcccgggcccgcgtgactcacctcccaggccaggcg

SEQ ID NO: 28783 - DNA, 343 bp, Homo sapiens
  chr19:291052-291395
  hyper
ctcgcgacccccatccccctgggcctgggacgcggggacccccgagcctgggagggcgcgcgcagtgcggggcgcggagggaggtctggtcctcacgcgaggtccccgcctccagggtcctcggagggacgagggcgcgcagcctccgcgttcccctgcaaacttgcgcgcagccgggggcgtgtccgtcccgggagggtccccccaacacccgggtccccaaggctcttaccgaccagtaagcacagcacgtcgagcagcacgaagacccacctccgctgcatggtccccgcgacccccgacgccggtcccagcgcgtcccgtcgcgtcccggcccggccgc

SEQ ID NO: 28784 - DNA, 61 bp, Homo sapiens
  chr19:30718934-30718995
  binary
ggtggggtgtgcgtgcgtgcgtgtgtatgtgcgtgcgtgtgtgtgtgtggaaggggtggtg

SEQ ID NO: 28785 - DNA, 59 bp, Homo sapiens
  chr19:31839508-31839567
  binary
cgccagcatctaacatggacttgacagtcatctgacaatacccagaccctgtgcgctcc

SEQ ID NO: 28786 - DNA, 234 bp, Homo sapiens
  chr19:31841177-31841411
  binary
cccccaggacccgccgtagccacttcccccaattttttttccccggacaaactttcctgggcccgtcccgggggtcggtgtgggagggggttccttcaagtttcctctcctgactttgggatgatcagggtccctccaccccgcccctcgcccccgggagccgggccgcgccccccatccacggcgcgggccgatcctagggcgggacgggggcgggagaaggaaaccgggctc

SEQ ID NO: 28787 - DNA, 326 bp, Homo sapiens
  chr19:31841583-31841909
  binary
ggctgggcggcgtgggcggcggggcgacgcgggctcacttacgggcggcggtgagggcgcgggtgggccggagctcatgcgggcgacccccgggcggcggcggctgagcgggagccggagcccgagcggcgcgggcggcggcgcatcgatgcgctgcgggctcgattgcgtctccctgggccagctctcaggccgggaatggggcggccgcgccggggccggctccgggcgctgccgggcggcggctgctggagcgcgggggcggcctccgggcccactatccccgaggcggccctgcgcccgggcgcgccggctggggctctggc

SEQ ID NO: 28788 - DNA, 309 bp, Homo sapiens
  chr19:33685236-33685545
  hyper
acagacccacggacgctctaccggcggcacccggccgggcgggctgggcgcagcgcggggcggcccggggacgccggggccgggcgggctgcgcgccgcggggcatgggcgcgccgggggtccccgggcccaggccggccgcggcggggctcccggggcgcgggggcagcggcgggcgggggtcttccctggcggccgccgctgagcccccgcagggcccgtgacgccgcggccgatgtggccgcgcgcgccctacgggcctgcaccgccaccgcacaaagacgcctcgggagccgccgcctgcacccg

SEQ ID NO: 28789 - DNA, 250 bp, Homo sapiens
  chr19:33685653-33685903
  hyper
ggggcaggaggcggcgcccgcgggcggccgggcccggcatggagaagcgcgcggccgcggggctggagggcgcgccgggcgcccgggcgcagctggccgtcgtctgtctgggtgagtgggccgcgcgggccgggcaggtccgggtcccccgcatggcagtccgcgccgcgccctgaccgacctcctctccggccgcggcatcccgagccccccaccgcggtggctcccgcgcggagacccagagaggggc

SEQ ID NO: 28790 - DNA, 123 bp, Homo sapiens
  chr19:33686020-33686143
  hyper
cttcgtgcaggcggcagccttcaacccggcccgcccgcgctgagcctggagacgagggggccccgggagctggggacaaaggccaggccggctgtcccctgaagaagaaactgtttccggccc

SEQ ID NO: 28791 - DNA, 299 bp, Homo sapiens
  chr19:33791861-33792160
  binary
cgggaaggaggcaggaaacctccaaataaaatgacaaggcacgatttgctccccctactcagtaggcattggagcggtgagtttgcatttccaaggcacaaggttatcctaaatactagagttgccgggctcccagctcagccccaagaattctcccctcctcgcagggagaagccaccgcctggccccctcatcttagacgcaccaagtccggcgcagaggaagggaggggacacgcggagcaggccaggctttcaggaggcaccggaatctcctagtcctggctcgcacggctcggg

SEQ ID NO: 28792 - DNA, 1247 bp, Homo sapiens
  chr19:33792630-33793877
  binary
cgtgggcggcggcgtggggtgaccgggctgcaggtgcatggtggtctggccgcagtgcgcgatctggaactgcaggtgcggggcggccaggtgcgcgggcggcgggtgcgggtgcgggtgcgagggcggcggcggcggcggcggctggtaagggaagaggccggccagcgccagctgcttggcttcatcctcctcgcggggctcctgcttgatcaccagcggccgcagcgccggcgccccgacgcgctcgtacaggggctccagcctgccgtccaggtagccggcggccgcgcagccgtagccgggcgggggcccgtgcgctcccccgggcatgacggcgccgccggggcccgcgggcgcgcccgggtagtcaaagtcgccgccgccgccgccgcccgtggggcccacggccgccttggccttctcctgctgccggctgtgctggaacaggtcggccaggaactcgtcgttgaaggcggccgggtcgatgtaggcgctgatgtcgatggacgtctcgtgctcgcagatgccgcccagcggctccggggcggcaggtggggcgggaggctgcgcggggcccgcgccccggggaaagccgaaggcggcgctgctgggcgcgtgcggggggctctgcaggtggctgctcatcgggggccgcggctccgcctcgtagaagtcggccgactccatgggggagttagagttctcccggcatggcgagcctcggcggcctccagcctgcgcggggcgtcgccgccgcccacccggagaccctgctcgcccgcgcccgcgcacctccgggtcgcgaatggcccggcccgcgccggcccagcttttatacccggcaggccgcgtcgccccctagagtccgaggcggcctctgtccccgggctgcggcggcgcggcgcctgctgggtcctagcgcgcggccggcatggggcggcgaaccagcgcggcacagcgccgcgctccccaggcaggccgcggcgcaacgcccaccgcctccagcgcgcccagcagagccgcggcgctcgctccaagctccgcccccggcccggccgtcgcccccgcgcccacgtggtcggtagcgggggccccctcctcctgcctgccctaggcgcccgtatccagccacggccgggagcccaggagtatcccgaggctgcacggggtaggggtggggggcggagggcgagtcttggtcttgagctgctggggcgcggattctctttcaaagccagaaccag

SEQ ID NO: 28793 - DNA, 369 bp, Homo sapiens
  chr19:33793960-33794329
  hyper
gagaggtcctgagcgcggtggctctgcgtctcctagctctgatctccaggctacccctgtgattccgcgcagaggtacctctcggaggacgccggggtcccatgggcggcgccgcgcagggcgctaggaccccgcggggagcggaggcggcctcggcccgggagcctggaggacctggccggtcgatccgcccgggctggaaaactttctttataattacttctccaggtcggagcgcgcggcttgctaggcgcgcggggccggcgctgttacccggcgtggagtcgccgattttttttcctgcgggaccgcggggccccccagactagcggagctggacgccggggcgagcacggggaggggcgcacc

SEQ ID NO: 28794 - DNA, 49 bp, Homo sapiens
  chr19:34114303-34114352
  binary
ccatctgcttggcgcgatctggcgcagcagcagagcacgtgggagaggc

SEQ ID NO: 28795 - DNA, 117 bp, Homo sapiens
  chr19:34972067-34972184
  hyper
cgcgaggaccagtccccaaccaacccgctcctagttctgggcgccttccccagcagtcagatgggggcttcagaggccggtgcgcggccacatggccccgggccaggcagggggtcg

SEQ ID NO: 28796 - DNA, 192 bp, Homo sapiens
  chr19:41698920-41699112
  hyper
ccaagccccgcgtaaacctgggtgacctcggagacatccgttggagcatgagttcccgacatcaggcggcggcggtggtccgggagaaacccggcggcggggagataagcctgcccaggaggcagggggctgggctagctgccccgccccgcgcctgacttcgttggggagggagacgcccggctcccgccc

SEQ ID NO: 28797 - DNA, 158 bp, Homo sapiens
  chr19:41699206-41699364
  hyper
tggcgctgctcctgctgctgacgctggcgctgtccgggaccagggcccgaggccacctgccccccgggcccacgccgctaccactgctgggaaacctcctgcagctacggcccggggcgctgtattcagggctcatgcgggtaaggggctctggggac

SEQ ID NO: 28798 - DNA, 377 bp, Homo sapiens
  chr19:41732035-41732412
  hyper
cggctctggctccgcgcccccgaagccggccggaagcgctggggtggggaggtgcccccggtgactcacgcgggggcaggaatgctgcggtcggaacgggacccggctccagaacccacctccagccccagggcttctccggccggcggcgccagctcccgcgcgctgaccctggcggggccccacgtgccaggtggctggacccgacccaggctccccgcccccactcgggccgcccgcccgggactgtactgtttctcctccgggcggcgcgggggctgcgggcgcggggccttcagggcgcggaggctgcgggagcgggcacctgaccttgtctgggaacggccacctaggaagccgcgactgaggagctcccc

SEQ ID NO: 28799 - DNA, 114 bp, Homo sapiens
  chr19:41732441-41732555
  hyper
ttgcaccattccactccctccgctgacggagaaaaggaaactttgtgtctgcggatggagagcctcccttgccaacgcggtgggaacagaggcgtacacgcacggagcaaacac

SEQ ID NO: 28800 - DNA, 109 bp, Homo sapiens
  chr19:44302742-44302851
  hyper
cgggtcgggtgctggcaagagagcgtagatgcacactcaggcagtggtaccctggcacagtcgtgcgggctgcgcactgcgccagagcccgcgcctagcacgtctcggg

SEQ ID NO: 28801 - DNA, 33 bp, Homo sapiens
  chr19:44303168-44303201
  hyper
gcttcccgaaacccttctccctccagtctcagc

SEQ ID NO: 28802 - DNA, 107 bp, Homo sapiens
  chr19:4432865-4432972
  binary
cgtgcccggccaaggctcacttctgggcaggtgcgtaggtgctaccctgtcttacacccgccctcatgaggccacctatccccgaagctggccatgccccaagcctc

SEQ ID NO: 28803 - DNA, 151 bp, Homo sapiens
  chr19:45146966-45147117
  hyper
cggcaaccgcgagccgttagtaagttgctgaatctctccgtgtgcctccgtttcctcacctggaatgtgggcgacctcacacaggaagccgcctcttctagtgggcaccgacggagcgagcgcgcgtctgcagcgggactgagcgccggga

SEQ ID NO: 28804 - DNA, 333 bp, Homo sapiens
  chr19:45147367-45147700
  hyper
gggaggcccagctgctcggagcaactggcatggcccgagccatggccgccgcgtggccgctgctgctggtggcgctactggtgctgtcctggccacccccaggaaccggtgagtgacccccgcgcagtccggtggcccctgtctggctcccgctccgcatccaggccgggtacttgcccccttgggttcccgaagatgacggccccgccgcggcgccacccaccccccatctctgccccggggttggaaggaacacggtgcgagggtgcgagggcaggaccctcctcttggccacccggagagcggtcggagttgggtacagaaattcctcga

SEQ ID NO: 28805 - DNA, 95 bp, Homo sapiens
  chr19:45147734-45147829
  hyper
cctctgggcccctcggaaaggggatggagttgggtgaggaaatttcccaaaaaggcaagtgaatcccggaaaatcagcagatggtgacgcatgcc

SEQ ID NO: 28806 - DNA, 1002 bp, Homo sapiens
  chr19:45349502-45350504
  binary
cggggccggagccagggtcggcttgactcgggggagcagcgggtggatcctgtgacgtcagcgggttcgaaccgccggagctgagcgagaggccgggggtgccgagccgggcggggagagctgggccgggagagcagaacagggaggctagagcgcagcgggaaccggcccggagccggagccggagccccacaggcacctactaaaccgcccagccgatcggcccccacagagtggcccgcgggcctccggccgggcccagtcccctcccgggccctccatggcccgggccgctgccctcctgccgtcgagatcgccgccgacgccgctgctgtggccgctgctgctgctgctgctcctggaaaccggtgagacgagcggacggccccctgccctcgcgcggaccccctccaaccttaccttccgagctggggaagccgagcaccttccccgcccacccccggctccccgagccccctctcgcgtgcccccttcctggctggccccacagactccgaccccctacacgtccgattctctcgaggagactctgacccctcctttctgcatctctctcaccaccacccccatccttcttaatccaattgcccatcctacgcctgcttgtctgtccccctccccatttctcggattcccgcgccgaaagggttaaatcccaggaaggcctggtgccccctccccaccccgcgccgagtagttcacccggatctgggtctctgtctcctctacccctctcaggaatgtggggaatgttccccccacctaccgcagtaaggtctcgaggaagaggcgagaccacctccctcccctatttttccttcttcccggcttgggcgtctgaggcccggagagaactgaggacaagcggacctgattcgggtcccttggagggctaaggataagagttctggcgacttagggggaagggcctgagctcggagctccaaccccgaacctcagggagttgggggttctgactcc

SEQ ID NO: 28807 - DNA, 179 bp, Homo sapiens
  chr19:460121-460300
  hyper
aaacaccccttcccgcacccccaccgcaggccagcgtctcgggccccgtctgtcattcgtgaacagctgtccggggggctccggtggcagagacgccccggccgctcgccgctctcggcctcgcccgcccagtccgagtggggggcggtgcacctgcgcatgcgcgcccctcccccgcc

SEQ ID NO: 28808 - DNA, 147 bp, Homo sapiens
  chr19:460529-460676
  hyper
cgcacgacgtaggagaccccgggccccaggaccctggcgtcggggtgtagccagccgtgcgcgggtttgtggatgaagctgcccttccggatccactcggcggcggcggcggcgtccccggaccccgccgccccccgcccgccccgc

SEQ ID NO: 28809 - DNA, 406 bp, Homo sapiens
  chr19:460726-461132
  hyper
gggcgcggcgcagcggggctcgcaggcgcccaggacggcggccgccagcgccgggacgccccccgggcccgccggctcgggttgggggtccgcgccccccgaggccccagccgcccgcgccgccgccgggccgcggcccaggaagccgcccggggccgcgaacttccactgcggcattcggggcagcaacgcgcagaaggtggtgggcgcctcgggctcggggggcgcggggggcgccgggggcgcgcgcccgcccggaccctgcgtcatggccgcggccgcccgacggagcccgaccgggcgctgcgcctggcgcggaggaagccctcccgctccgcccgctccctcccgccccccggcccggtgatgtcatccgcccggcccagcgcgcagccgcggggggctg

SEQ ID NO: 28810 - DNA, 602 bp, Homo sapiens
  chr19:461187-461789
  hyper
actgaggccctccgaggacaccgggcgctggcctggaacccgcagccaaggcgggacggggctttgaacccagaaccccgtcagcgaccctccccgctgcgccccccacccccgcccgccgcccaagttcgcagaaggaccgagctggagaagcttagaaattccacatcccttctttcccctatttcctagtggggaaactgaggccccgggaggcgcggccagggaaaagagaaccccagaccctaaggtcagcccctccctctccgttgttgcagctagaaggtaccttagggtcacccctatttcttagtggggaaactgaggcgcggggaggggaaggggcgcggccgagggctcacagacgaagctcaaacccaggagtgccggctcgggggtggggggggggggcggggctaggagcggagccgggcccctgctctgcggcctgtcccggcctcagtttctccggctgtaactcaggggagcgggctggagggtcgcggcccttcttccctcacttctggggagcccagtcccgcaccagctcatctgagctctgggcctcagcctcccaggccggtcgctccatccccagcctc

SEQ ID NO: 28811 - DNA, 285 bp, Homo sapiens
  chr19:461846-462131
  hyper
cagaaaacggggtgtcactgtcaccccgggacccagcctcctggcccgacttggctggagctcccctgcacctgccccgccccaagcagggctgattgccgggaacaaagggaggggccgggacgcgctggcaggtggggagggagggaggggcgaggctgcccggagcccgatcgataattcaggggatgagatcacagccggcgccgcccgcggggccggggaggtgggggaggggagcgaggcgcgcggtcgcgatcggccgtctctgccgcggcgcgtgtc

SEQ ID NO: 28812 - DNA, 140 bp, Homo sapiens
  chr19:46931914-46932054
  binary
cgtggctcccgggtcctgggcaaggctgcaccaaggagggtctaaagatgatgcttcccctttcttggcgtggcctccgaaggtctcacaggccccaacggtctctccggatctgggactgctgatctccctgggacaac

SEQ ID NO: 28813 - DNA, 453 bp, Homo sapiens
  chr19:47223627-47224080
  hypo
cgccgcctctagggcgcctctaaggcctcaacccctcccctgcatgcccagggctcccccagtgattctcacaggacgcccctgactggactgcggggctcagcacacctggcagtactaggcatgggcgtgcagagactcagaatgcggggtttctgccctcacctcagccccacctgcccggccctacaccccagccagcgtggcggccagggcagggccaggtgggcatcatacgaagaccttggccagggcatcagcgccagcactggcaatgagggccttgctggggtggcaggcaacagcgtggatggcctcctcgtgcttcttgcggtgggccgtgatctcctgcacgcacgttttgttgtccaggctccagagacgcagggagcagtcatggcctgcacatgtgtcggggacagaaggggtggtcactgggctcctcgctcagac

SEQ ID NO: 28814 - DNA, 142 bp, Homo sapiens
  chr19:49242393-49242535
  binary
cgcccgccgccgcgggccggcccagagcgtcgcacaaagcgaaggcgtccacgcagctgctctcgccggggccaccgccggggctgcctgctaggccgtagcgctctagcgcctcggccacgagctcgcgcgccgtggagcg

SEQ ID NO: 28815 - DNA, 36 bp, Homo sapiens
  chr19:49242773-49242809
  binary
atgcgcttggcgcggctaccggaggctcccccggcc

SEQ ID NO: 28816 - DNA, 781 bp, Homo sapiens
  chr19:49652265-49653046
  hyper
caatgagcgggtcatgggttgggtgtccgggctgggcctgaaggaatttgccacgaacctcacggagagcggggtacacggggcactgctcgccctggacgagaccttcgactactccgacctggccttgctcctgcagatccccacgcagaatgcacaggtgagctgccgctgggcccggagcatgctgggcgtccccacctcgcagactgcacgctccaaccgccccctccacctcctctttccaggcccggcagcttctggagaaggaattcagcaaccttatctccttaggcacagacaggcggctggacgaggtgggcgcggcaacagctcagagggctctgctcccagcggctcctcgagaggctgagctgagggggcggggcctgactattaatggtcacggttggaggcggggccaggagaggggcggggttaaaggagaggtgagacccggagaggggtggagtcaaaggaaggggcggagtcagacaaggcaggagtccctcaccggctgtccggctcctatacctaggacagcgccaagtctttcagccgctccccatcctggcggaagatgttccgggagaaggacctccgaggcgtaactcccgactcagctgagatgttgccccccaactttcgttcggctgcagcgggagccctgggctctccggggctccctctccgcaagctgcagccagaaggtggggggctcccaaatgcgacagcccttcctcgcttccctagggtggggcatggaccacctcagtagtcc

SEQ ID NO: 28817 - DNA, 435 bp, Homo sapiens
  chr19:49660929-49661364
  binary
cgcggcctgggacccgccctctccccgcctcccgctttggcgtctccaagactccccgccccccagacctcgccccgccccaggctaggctggaaagtggaggatccggtttgctctgggcgggtctggaagcagagccggcggagggagcgccggggccctgggctgcaggaggttgcggcggccgcggcagcatggtggtgccggagaaggagcaggtgagcgccggaccagggtctgcgggagcgcggagctggggacctcgcctccaggctcccagagaggagggcgctggacacccagattcctgggtcagacggaggagggggatgggagggtccaggttccagggtccagggcatgggggtcgagactcctgagtctggagcgggagggcgctgggggcccggactcctgtgtccgtggggagcgcac

SEQ ID NO: 28818 - DNA, 348 bp, Homo sapiens
  chr19:50706517-50706865
  hyper
cggtcggcccccccacgccggcccttacaaaggcccccattcatgccttgcgcacaaagcggcccattcaccctggccccttgggcctcccgcccccggccgccccccgcgcctcgctattggtggcgccccgtgcccatcaggcctcggcttccacccccgaccgcgccgcctagctccgcgcccgggccgcgttcttttcccacggctggcacccttcgacaacttctgattggcccagcccgccagccgctctttttgattggcggctcccgtcccccaggggcggggccgtagcttgccgcagcgggcgccgattggcctctgctgctctcttgggggcggggc

SEQ ID NO: 28819 - DNA, 189 bp, Homo sapiens
  chr19:50706894-50707083
  hyper
ccaggccgaagcctcgggacggccctggaagccggtgagtgcccggggccggcagccctccgggggcggcggaacgggactgagccaggggaagctggagcctgggggctgcgatcggggcccgggagcccgggcaggcggccggggacggcggggaggtgacgcggacactcaccttgggcgcgcagc

SEQ ID NO: 28820 - DNA, 91 bp, Homo sapiens
  chr19:50707093-50707184
  hyper
cgagggaggtgggggggcgggacgtctacactcccccaactccagttgccgccgtgtgcgaggcccggtcggggtcctcgttgtcagcccc

SEQ ID NO: 28821 - DNA, 378 bp, Homo sapiens
  chr19:50708476-50708854
  hyper
cggggtttgaatcccgggaatcctcagccttctccgcggcgggccctcgacctttgccctccataagggggaggagcccctggcgccgccgccgccgccgcccacctggcaacaggctcaacccccgccttcccccggcccccgtcagaggccctgaagctccaggcccgccccgttcccagccgggcaggtgctgggtgacatcagagccgggctcccgccctgtgacgcgacggggccccgccctgcgctggaccgcggaggtcgctgcacctgaagagaacggggattcccgcgccctcaccccatctccccgctccggtcggcgcccccaggtagccccgaggatctgcgagttgagggggcggcgacacaggc

SEQ ID NO: 28822 - DNA, 177 bp, Homo sapiens
  chr19:50919593-50919770
  hypo
cgtgtccaccccggtgccctttccctggctgcccgggtgtgactgccatgtggccgcaggacccgctgttcgtgctggagcacagcctgcccattgacacgcagtactacctggagcagcagctggccaagcccctcctgcgcatcttcgagcccatcctgggcgagggccgtgccg

SEQ ID NO: 28823 - DNA, 51 bp, Homo sapiens
  chr19:51198271-51198322
  hyper
cgccgccgaccgcagacaaagccatcgccgccgcggccccagccccggccc

SEQ ID NO: 28824 - DNA, 47 bp, Homo sapiens
  chr19:51520092-51520139
  hyper
cggaccctggcttctatccgttgcaggcaaccacctcctcctagagc

SEQ ID NO: 28825 - DNA, 249 bp, Homo sapiens
  chr19:51520492-51520741
  hyper
aggcttcggggtccaagcgcgtgtcgttttgggggagcagcgccgcctctgcggctggagaaagaaaggggacggaatcaaagcacggagggcagggtctgggtttggggttggagctgggctgtggcactggactgcgttcggggacgggggacgcagccagaacgcgagggtggtagggaaatattgggggtttcgcgtgcaccgaagggaatgggaggagaagaagcgcgtgaaagtggaaggaag

SEQ ID NO: 28826 - DNA, 85 bp, Homo sapiens
  chr19:54412564-54412649
  binary
cggctccgtccgccgagtgaggccgcggccgcggggggtggggggtgggaggccgggagggggccgggacgccgggctccggggc

SEQ ID NO: 28827 - DNA, 34 bp, Homo sapiens
  chr19:54485370-54485404
  hyper
cgccaacgcgggcgagccgggcccgaagcgggac

SEQ ID NO: 28828 - DNA, 124 bp, Homo sapiens
  chr19:54486197-54486321
  hyper
ccgtgagcgcgctggagactgctgggcccgccccacgcccaccctccccgcccccctccccctccgaagcagggaccccgagggagggggcaggggagggagggggccgctgtgagggagcgtc

SEQ ID NO: 28829 - DNA, 355 bp, Homo sapiens
  chr19:5536543-5536898
  hyper
cgcccgggcgcaaggaggaaggagagccgggagggcgtacctggcagccaaaagcccagccgctaatgagcccggtgcggcgcgagctatttttagcagctgctcctcgggacgcctaatcgctccggccggctcccgccaggctgccatggaaacgctcgcgccaccgccaggagctccctcccggtcccggccggcgctgcccgcccctcagcccggggccaggatgatgcgtgctgccccccgccaggaaggagccctgcctgccttcccagcactgtcactgcacggctgtgcgatcccgggacatctctgcccctctctgggccttagagggcaagagaggtaaaggcgc

SEQ ID NO: 28830 - DNA, 416 bp, Homo sapiens
  chr19:5567703-5568119
  hyper
agccgtcctgcaggcgcgcgtcgcgcaccgtctggtggtcgtccagccgccgcgcgttgtagtagaaggcgcgcttccaggagctcacgccctggcccaccagctgggcgcgcaggtcgctgagcgtgtcccgcggccgcacggtcagcggtagcagcagcgcctcgtccgccaggtgcaccttgatgtggtagcgcttccagcgcgacagcccccgccgcagcccctccatggcgcccgcccggctccggctccagctctggccccgggccccgagcgccccgcgcacccgcccgactagcctggccgcccgcccccgccgcgcccgcgctccgcccgcccggacacgcccggcacgcagtgggcaggcccggcccggcggggcggggcgggtgccacggtcccctcaggcgtcc

SEQ ID NO: 28831 - DNA, 546 bp, Homo sapiens
  chr19:55677520-55678066
  hyper
cgcagtccgcagacaggacctcggggctgcccctgggagcgcgccctctgccgctggagcgttggagaacgttagcgccccccttgccaccgacgctgggactacgagctctaaaaggccgtctgctcaggctgggaaggcagacggtgtatcagaccttgcgtgctgggactcactttcagcctgcaggtccagcgccggggacaggccccaccaggacacggagccgaagccgctgccggagccggcaggtgtggtcatcaccctgcggaaaagacattctgggaatcgcacacattgcccgccccgctcccctctcaccgcccctcacttctcgcccctttgcctccacatgataccttgcccacacctttatcctccaaatatcccgggacgccccttcctctctgctcagtgcagcactgtggacccgcggcactccacaaccgctgcccagagtccccgcccttttcgaggaatcaagcaatggaagcatgtgggatgggaccacagcgagcaactgaccaatgagagtgagcgaggccc

SEQ ID NO: 28832 - DNA, 412 bp, Homo sapiens
  chr19:55866046-55866458
  binary
ctgtgggatggtcccggggtgccgctcgcttctgagtccgcggggtgcggtcccacccgggtcaggagaaacgcaccccgcggccggattggctaggacgcccgagccccagccaatgggagccgtcgtgcaccgcggggctggtaggggcgcccccaccccaccccttgctcccccgacgccccctcgggggcctgcgcgtgcacacaggcaccgaggtgcgactcgctgagtctcaggctcaagctttaatctctgcgaagttgggcggctccacgggctcgcccccgcccccccccgccccccaatatataaaggcatatccatagttctggtatctaccagagggggcaaatccccccaagcggctttcaacattccgcttcctacagtcggtgcgcacagaaccctc

SEQ ID NO: 28833 - DNA, 513 bp, Homo sapiens
  chr19:899625-900138
  hypo
cggcctggggggacacggagaagaaccgaagcagccgctcctcccaggtctccagcgtttcctggggagagcggcccggtggtcagggaactgcgggacctgtgggtggggggccagggaggtccagggcccccaggagcccacagcgctgggctcaaacatgacctctgacccaccacgtgaggctgcttaagtgtctctgaggccaccatgccacctcctgcctgtgccttccgtggaggaaactcctacacaccctgcagtgcccgccttcgttgcccccgccctcctactcagggccctggtgccgctgtctgtatcctgccctgtttcccctgacacgacctgcaccgggtgagaacctgtgcctgggaaacgggccttcaaaaaagaccaggcaggtagaaaagggaggcccggcaatcccccactcaccatggggatgcggctgcgcttgaggacggctcgcagacgccggctgatgcgctggaagcactcgcggggtgtataggc

SEQ ID NO: 28834 - DNA, 490 bp, Homo sapiens
  chr2:101435063-101435553
  hyper
cgacccccagtccaccgcgggggcctggcgcgcttggggcaaaggccctaggagaccccttctggccacaaaatcgagtatgacagaaaagggccagcgggggcgctttccttccagggccacttgccggaatgtaagagggacggagagacgtccggaaaaggctgccacgctcggagcgctgcgccaggccaggcacctaggccaggggagcggagacctcgtgggagcgggcagggggacctttcccctctcccgggcttccacccaggcgcctccccgctgtgaacgccgccgcccaggtgaaggggaaaccggccacgtttccggacctcggcggggcacacggtctccggttttcaccggctctgtcttggagccccgaagggcatcagacagcagccccggcacccggggattattcctgtacctctgcctccctccgcttggcgtttgcgggaaccttggtaaaatcctccctgtttctcgc

SEQ ID NO: 28835 - DNA, 95 bp, Homo sapiens
  chr2:101435590-101435685
  hyper
cgcctgtctcctcccacagaggaaaaaaaaaaaaaggtcacgtatgtttggaaaaatatgtaggtcagtggaacatttcctgcactggtgcaaaa

SEQ ID NO: 28836 - DNA, 275 bp, Homo sapiens
  chr2:101436113-101436388
  hyper
gcggcccgcactgcgagggtctacactaggcgggggcggcagattccttgttccccccgagtgacaactttaatgggacctcggctggcagcctctagtccacttgcctctcctctgggccggctcacctggaagcacaacccccccctcccccagccccggcgcccaaccccgaccctgcgccccaggcccgaccccgccgcgcgtccctggcagcccagcagaggctgcggcggcctggggactcgcgggtgtctgcgccgcccagggaagcc

SEQ ID NO: 28837 - DNA, 886 bp, Homo sapiens
  chr2:101436742-101437628
  hyper
cagcgcctcccgccgccgcccgggaggagctcgccgcgcccgctcgccgcctcgtctcccagcggcggcgggaggcgcgtctccccggcccagtccgcgcccggccccgcggggccgctccggcccgctccgaggtaaggggccgcgcctaggggcgcgggggacccagggtgggtagtacgtgcgcgcggggtcgcaggactcggtcacctgctcgccagcgtggaggacgcgcgggggcggaggggcgctcaggcgcgaggctgcgcggcaccggggaccccggacgcgggggcgcggagaggtgggttcccctccacagtcaggccgctgggggcttcgcgtcctgcaggaggtagcaatcgctgggccggtgggctccgggcgcgtctcgacgcagaagacagaggactgggcatccgagcctcggaatttgggggtcctcggggtgtccgacagggtggagaaggatcgtgccccagggcaacagctttggggattgcccgtggttgtcttcgagacccatcgcgctaccctccgaaacgtcgggcgtcctggacccccggagagtgcggcgtgcgcgccctgggcccgcggtctctcggagtccctgggtcggaattggttccgggccggattgggtgcggaatcggtgcccccaacccccgtgtgcgcagacagcgtgcagcctggctcctcacgtcgctgccgcccccccaccccaactccggagctccccaggttggatgtatgcgtatggttttgttgggagatgtgcccctttcccagccgaggagggacgcacctttgacctttctgaagagctgggcaggtcggtaaccagggaagggacaggcaccacccggctaaattcagaaccagtccc

SEQ ID NO: 28838 - DNA, 202 bp, Homo sapiens
  chr2:10183602-10183804
  binary
cgcggtgtattttggttcgcctccgcgccccgccccgccagccgctccctccgcggccgccccgcccctcccgcgccgcgagggccgcgccggggcagagccgcgcgggcgggcgaggcgcgtgccggccgcaggagctccgggttgccgccgccgccgccgcccgcagcccacgtgcggccgctgctgcgcccgagctcac

SEQ ID NO: 28839 - DNA, 439 bp, Homo sapiens
  chr2:10183814-10184253
  binary
cgctttgttgctcccggccggcctgcacgatgcacacgccggacttcgcaggcccagacgacgcgcgcgcagtgagtggtggggctgccgcggcgggactactcgtctgagcgaggggcgaggcgggggaagtggtgcggcactcgcgcgcctgtaaatgcgggaggtggggcgtgcagggcttcgctgcggccgcgccggtaggggcctgggcgggctccggagccgggcggggcggcggccgcgacgggcgcgcccgggtcggcgggggcgaggagggggcgtgttccccgcgcagctttgtcttgcgcttcctgggcggccccgccccgctggccccgcggctatttccagccatgacgtcaccccggtcctgtgagccggacggccgttgggcgggggagcggctggcgggaacgcggcacgcggccttgggggc

SEQ ID NO: 28840 - DNA, 519 bp, Homo sapiens
  chr2:102758965-102759484
  binary
cgggccgcgactcgagagcgcccggcagctctccaatgctttggaaccggcgggacccctgcgggctacccggggcagggcggtgtccgcaggggtctgtccagccgcgcctgctcctccgggtggagagttgggacacccggccagctcgctcgcagcccgcggactggcccagccgagccgtctccgcccgttccccgcccccgcagcggcggggctagagccagagccgcgcccggcagttcccggccgcgagggcgggcgcagcttgtggccggcggccggagccgactcggagcgcgcggcgccggccgggaggagccggagagcggccgggccgggcggtgggggcgccggcctgccccgcgcgccccagggagcggcaggaatgtgacaatcgcgcgcccgcgcaccgaagcactcctcgctcggctcctagggctctcgcccctctgagctgagccgggttccgcccggggctgggatcccatcaccctccacggccgtccgtccaggtac

SEQ ID NO: 28841 - DNA, 174 bp, Homo sapiens
  chr2:103235763-103235937
  hyper
cgcccgttgcggcgattccacccacagttcgctggctctgggggtggcgggtcttggcgcgcggtgcctgcgcgaagggagggcagccatcgcccccgcggtcactggggccccgcgttccccgcgggctcgggcaggtgcgcggtgtgccggccaggtccccttgtcctcctg

SEQ ID NO: 28842 - DNA, 346 bp, Homo sapiens
  chr2:103236292-103236638
  hyper
caaccggcggcacccatggaaccactgggcaactggaggagcctgcgggcgccactgcctccgatgctgttgctgctgctcctgcaggtggcggggcccgtgggcgccctggcggagaccttgctgaacgcgccgagggccatgggcaccagttccagcccgcctagccctgcgagcgtggtggctcccggaacgacgctgttcgaggagagccggctgcctgtgtttacgctggattacccccacgtgcagatccccttcgagatcaccctttggatcctgctggcctccctggccaagattggtgagcgaactggacttgtggggaatgggagggggcgatctc

SEQ ID NO: 28843 - DNA, 203 bp, Homo sapiens
  chr2:10517952-10518155
  hypo
cgaggggggccaggcacgggggagggtattcaagggcggcaagccaccaaggggacggggcaggcacagggagggcatttcagagagtgcaaggaggcggcgaagatgctggttgagggcacgggtgaggcggggaggcgtttcgactttggactgaaggccttaattgaccaaggcggtaatttccagtcctgtgacctcac

SEQ ID NO: 28844 - DNA, 83 bp, Homo sapiens
  chr2:107504132-107504215
  hyper
ggtaaatactctcctgtgaacttcagcgtgtctctccgcgcgcactcctggcattgggtgccccaccccgctggttctctcgc

SEQ ID NO: 28845 - DNA, 225 bp, Homo sapiens
  chr2:110370717-110370942
  hyper
cgaccttggtactattaacgaaaatagttgtaaccacacttggaaaaccgctggcttactaacaagcgagataaatctacaaaagtaactggaaaggttcaaaacagtgaacaaacgcgttcttttagagtacaaaagagtcaaggcgggaaaaaaacggtttaaaatcccaatggaggaaaacttggacgaccacaccatcggataaaacgggagagcttttga

SEQ ID NO: 28846 - DNA, 486 bp, Homo sapiens
  chr2:110371219-110371705
  hyper
gccgccgcggaagccggggagcactgggcgggcggggccggagggggcgcgggtcacaatcccgggccggaccagggggccggtgggtcgagggcgggaagtcccgcgggggccggggagcgcggggctggggccccggcgtcggcgggactcaccaggtgccgcgccacctcggaggaggccatggtcgcgggcaggggcacggtgaagcggctgtatcagcccggccccgagcggctggtcccggcgacggcggcgggaaggccggagggcagaagcaacgggcggggcgcgaggctaggctgcctccgcgacggggaagggacaggggcggggccgagctggaggcctccgggggcggggttggggcggacgccctgtggtgcgcgctgagcgttttgcctgcgccaagcgagcccctcacaggagctaccctcgacgcctgaggactgagcgtcagcgttggggcgggctgaaggagagctg

SEQ ID NO: 28847 - DNA, 447 bp, Homo sapiens
  chr2:110371818-110372265
  hyper
tggccgagacagcggggagcggaagtgggcgtggcctggtggcgtgggcgcggggcgggggtgcggggggcgtgtccgcccgggcgcggcccagtgaggcggtggccgagtcctctggcctcagacgcgtaggctggcagcccgctgagcccgccagactccgccgccgtcgggagccggccgctgggagcccgtcgctatgggaccgcgctgagccgcccgctggcgggggagcagcgcggtcgaggatggaggggccggcagagtggggccccgaggcggcgctgggccccgaggcggtgctgcgcttcctggcggagcgcgggggccgggccctgcacgccgagctggtgcagcacttcaggggcgccctaggcggcgaaccggagcagcgcgcccgcgcccgcgcgcacttcaaggagctggtgaacgccgtggccactgtgc

SEQ ID NO: 28848 - DNA, 139 bp, Homo sapiens
  chr2:110372284-110372423
  hyper
cgccaagtacgtgcacctcaagaagaggttctgtgaagggccgtccgagccctccggggacccgccgcgaatccaggtgaccgccgagcccgaggcccccgacggccctgccgggcccgaggcgcgcgatcggctcccc

SEQ ID NO: 28849 - DNA, 43 bp, Homo sapiens
  chr2:11051801-11051844
  hyper
cggcagcattctctccccactaatcctctccaaacagcagtga

SEQ ID NO: 28850 - DNA, 230 bp, Homo sapiens
  chr2:11052132-11052362
  hyper
cggcgtgggtccgccagctccgggacctgccgccgctgcctgcgcgccccggggcggaggacggtgccagccgcccacgaggagaccccgctcccgcaggaggccgagctgaagcggcggagcgcgccgccagccagccggggtgagtgccccgggcgaggccggcggccgccaaagcccccgcgggctcgcccgggcgcccggatgccagccccgagccccgccgccgg

SEQ ID NO: 28851 - DNA, 294 bp, Homo sapiens
  chr2:111490023-111490317
  binary
cgcgccggacctcccgcccgggaagccagggcagggcggggccggggagggaggggagaggaaggtgaggagggaggagacgggccgggaggggtggagagggagagggcgtgcgcctggggcctcacctgctgggagctggaggaggcgcggagcgaagccggccctgccagccacgcggagaagcagaggcaggtgagcgcgatgcagccggcgccgggtctggggctcggggactcctccctgcaccgctacctggacggcgacttctggagcctcaagaacgagctgcgc

SEQ ID NO: 28852 - DNA, 171 bp, Homo sapiens
  chr2:111490689-111490860
  binary
gttgaacctgtttcttgagtccccgccccgcgatgtcccacccttggtggggagaaggggacagaaaaccgcgatgggatgggcgcacagggatggagtggccctgtccagggcgtgtctgggcgtcggggtgggacaggcttacaggaccccctcggagtgcaggtgtgc

SEQ ID NO: 28853 - DNA, 636 bp, Homo sapiens
  chr2:120301702-120302338
  hyper
cgtcgtgagtgatgcctgtcaggtgaagccccgcccactggctcgggcggctccgccccgtccgtcttctctcccgcgctccgctcttgaagggttccagtgtgtggtgtttccaactttctcatgtcccctcgggaatccattcgtatcccatgccataagtcgcgctgtctattcttgaccaggcccggcaaactgctccgagctcccaggaatcacccgccgcctccggtcgtggcccgcagcagcccggctcccccgccctggggcgtttggtcgcgcccggccgccggccctgggagcgcgtccgcgtcgtcatggcgacgctccgagcgggcgccggcgctggcgccggccgaatccggcccgggaaccacctccagggtgagcggccagggacctggggcccgggtggcccagggtcggccgctggggcgccgcagcctagctgctgaggcgaccgagccccgggtggtgtccagccgcaagtcggccgcggcttgggtccgaggagagtcgggcccagagggtgacctgaggatggtggggggagcggtgcgcgggcctggggcgaccctgacccttagcaggagtggaatgaaaggtcgcggaggggaggaggcgcttggccggggc

SEQ ID NO: 28854 - DNA, 324 bp, Homo sapiens
  chr2:121199626-121199950
  hyper
cgggcgttccgctttctccactgtaccatgctaatttttcgagggacaattttttgacaatgagtcctccagcccgaacagaaaccctttatggggccggccccagggaggccgcggcgctgccaaggcaaacaaaggctcattgctgccgcggaacatgcctgcgcctttcagggccgggttcgcagagcgcgccgcctccagcccgcgccgaggtaacacctggtccgccaactcctggcgcctaatcaagatatcaatcacggcgcgggggcaggggggcgcacgggccccgaaggctccagaacccggcaagtgcaggta

SEQ ID NO: 28855 - DNA, 261 bp, Homo sapiens
  chr2:121200130-121200391
  hyper
aatgattcggcctttggaggagttcggagggctgggggtggcagcaggaggctggggcgcagcgcagcgccaggggcgcgggacccagccaagctccccactctgcccccactgggacagagaggcgcaagagtccaccaacccctgccacttgtggcctttcctgactgcccagggcttccaacaatgtagaagagtgacagtaaatgtccaggtccctgcatataggtgtttctttaatctgcacaccaggccggaaag

SEQ ID NO: 28856 - DNA, 693 bp, Homo sapiens
  chr2:121494270-121494963
  hyper
gagcgtgtctgcgggcgtactgagcgcggaggggctgcagccagccacttgagaacttcgaactccacttctccgcgctgcgcgtcccggagccctgcctttctttcttccttcctcaatccttcctccccctcgcccggcccggccgccccctccccctctgctgggctctcctcctcggccccccctctttgcctctcttctcctcctctcctgccctcggccctgagatccgcttgacttcccaaagggatccgcacgtaatcctttgccgggtcctccggttcccccttccacctcactttcatccctgcccccctactcatcgtctctccccacccccgacaatctctcaacaagtatatttgctgaggaatttgaaaaatccactactgcaacttgatctgtatgtgatggatggggagaggcgcggagagagttgggcgccaatcctattaagggtttagagaggggagtcttttccccggacggggcgggggcggggagctgggagggagcgtgtgcttgcgtgtgtgagtgtgagcgcgcccgccgcgctggagagctgggagtccacccagctcggcgccttttcagcccggcggtaactgctgtcatttcctaggaaacccgacttttaccgcgcggggagctggggatggagcccgtgcgcctcaccctgggtgatcggtc

SEQ ID NO: 28857 - DNA, 270 bp, Homo sapiens
  chr2:121499186-121499456
  hyper
cgcctcctccccgcccccgccgtctggaccttcctctccctccgcgccggcttttccgccacgcggagcgctggctggcgaggccgcgtgtccgagcggcgccgaccgtgccgcggccgggggacattccgtgccccgagcgccccgggcccgcggctgcggccctcccacctgcgcgccggcctggtttgcagctcccaaacaatggccacattgtcgcagccgcacaccggccgccgccggcgagtggcgggaggccggactctgctc

SEQ ID NO: 28858 - DNA, 47 bp, Homo sapiens
  chr2:121499643-121499690
  hyper
cgaagtgaatgagagcactccacgggagccgggaagagagaggcccc

SEQ ID NO: 28859 - DNA, 312 bp, Homo sapiens
  chr2:127976826-127977138
  hyper
gcccccctcagccccaactccgcgggtcccgccagctctccactcccaggccccggcggcgtccaccaggcgcccgctgcccctccccaagtctcctcctccgggacctcagccctggtgccctccccgcagtcccattcctggtttcccttcgcggcgccccctccccaggttccccaaccaggcaatccctgcctgggtccctccccgggaccagtccctggagaccctgcccgccgcctctctcgggctaccactctccgaaactccatccctgactcccctccccgctacctcctccccaggggtccc

SEQ ID NO: 28860 - DNA, 210 bp, Homo sapiens
  chr2:133427262-133427472
  hyper
tcctcctgcagcgcgggacttggacactttcccagcctcgcgccccggggcaccagtcgcggccgccaactcccgctgggcagccccagcgcagggctggccccgaggtgggcgccttgggggcaaaagggctggcgggtagatggattgtgcgcacctggcctcggctgctggcctctgggtattctcacctggaagcaagaacaatcc

SEQ ID NO: 28861 - DNA, 234 bp, Homo sapiens
  chr2:133427652-133427886
  hyper
ccgcaggtgccgctcgcggagcctgcatcgcccgcgctcgggctcccggctgcgggtctctgctcctcccgctcgcgctcccgggccgagcaccgcgcctccggagttggcggctgagactgaaggaactactggcgatcgggagcacccacaaaagtctcgccttttctccccacctcccactccaggcatcacgtgacggctgccgagttggggtgggggtggcgggcgggg

SEQ ID NO: 28862 - DNA, 191 bp, Homo sapiens
  chr2:133428106-133428297
  hyper
acataggaaggcagcctccccactccacgtcctctgcgccttccaggactggtcggtaccccagcgactgggtccagcccacacaactgaggctgtcccgctgcgggccgcgggagcctggcgccccgggaggctgacaggaagggcgcgcgttcccgtgcgcctggcaaagttccacgcccgcaggctcc

SEQ ID NO: 28863 - DNA, 61 bp, Homo sapiens
  chr2:137523039-137523100
  binary
tgcgccgttccttcctcctcctcctcctcctccttctcttcctcctcctccttctcttcct

SEQ ID NO: 28864 - DNA, 102 bp, Homo sapiens
  chr2:137523676-137523778
  hyper
cgcccaaaatcgaaaggccgggagttgttctgcaggctttgcaaacaggttgactgagggtttcctttcccgtagcgctgactgcgaaatctgtgcataggc

SEQ ID NO: 28865 - DNA, 132 bp, Homo sapiens
  chr2:142887740-142887872
  hyper
cggcgctttcgccgctccacggacctcgaatgcagcaggtaaggaagttaacctgggagctaagttgagggcggacacgcttaacgcggagaacctggagctcgcaaaagctcgcagttgagggccatcgcg

SEQ ID NO: 28866 - DNA, 32 bp, Homo sapiens
  chr2:142888566-142888598
  hyper
ttcaatgcagggtacgtctgatcttacatcac

SEQ ID NO: 28867 - DNA, 284 bp, Homo sapiens
  chr2:14772282-14772566
  hyper
aaagacgtctggggaacgaaaagggtcttcgatccaaggaccagcctaggggccatcgggaaccaaggctctgggggatcccagcagggcccagacgcccgcctcgggcaatgtcgctgcctgccccgggccgctcgcagtgcctgggccatactggggtgccctggggtttcttctccatacccagactcagcttccccgctggagtctgtcttcctggaacacggaacgcgggcgggctgtgttctcagtcacaatcagctcggatgagctggggggcgcgg

SEQ ID NO: 28868 - DNA, 167 bp, Homo sapiens
  chr2:14772823-14772990
  hyper
gtcggcgcggcggtgggaaagcagagccgagccgggactgtccagtgggagcaggcgccccggccagcgcagacctggaggcgcacgggcgccgcaccgcacgattcggctcggggtagagcggagccgcagccccacgcgcagcccaggacccactcgccaccgcc

SEQ ID NO: 28869 - DNA, 79 bp, Homo sapiens
  chr2:14773829-14773908
  hyper
cgagttcccggaaggggtcggaggctgtgtggtggcgtctgctctcgcctgacctgtggcggcttctccgcccctcgta

SEQ ID NO: 28870 - DNA, 240 bp, Homo sapiens
  chr2:14774042-14774282
  hyper
tctctgcctctctgtgcctccgcagatccccgctcctggccctcgcctcgccacctcattgatgggcaaccaactggaccgcatcacccacctcaactacagcgagttgcccacaggggacccgtcggggattgaaaaggacgaactgcgggtcggggttgcctacttcttctcggatgatgaggaagacctggacgaacgcgggcagcccgacaagtttggcgtgaaggcccccccggg

SEQ ID NO: 28871 - DNA, 256 bp, Homo sapiens
  chr2:14774684-14774940
  binary
gaacgcctgcggccacctgggcctcaagagcgaggagatctgctggacgaactcggagagcttcgccgcctggtgccgctttggcaagcgggagttcaaggcgggaggggaggtgccggcaggcacgcagcccccgcagcagcagtactatctcaaggtgcacctgggagagaacaaggtccacaccgccaggtttcacagcctggaagacctcatccgcgagaagcgccgtatcgacgccagcggccgcctgcga

SEQ ID NO: 28872 - DNA, 240 bp, Homo sapiens
  chr2:14775287-14775527
  hyper
ggctgaggggagaaaggacatggccttccccgcgagtccatggccagtgactgtggcccgactcgaaaacaaccctcttctcaaaagggaccatcaccgccccgagcgtgcgcacacagaccggtcggaggcgagaactggtctctacagggcacagttcagctcctctgtggatgcgtccccagatcgcaggatttccaagaaatcgagcctgtcccttgtgcacttgggaataattcc

SEQ ID NO: 28873 - DNA, 699 bp, Homo sapiens
  chr2:150186988-150187687
  binary
cgcggccctcgaggccgggccggccgcggctgcgggcggcggccagtgcccggcgcgagtgggagtggcgcgcgcgcccctagccgccccccgcctctccccgctgcgctccctcgctccttccctgagctcccgggctccggcagcgggctggcggggcgccgcattgcacactctgggggcgccgcagtgttcgtgggatggggcagcgggctgcagctggcggccggaatccgcgcgcagcccgggtgagtagaggcgggcttcccgggagagcacaaaagaacaggggattggtgccagcggccccggcttaggcggggcctggccaaggcagggagtgcgctgagtccctggaactacccgatgctagggcagtcccctggggccagaggaactggggtcccggcctccggcgttttgcccctagtgggcagagagccccgcgagtagcctggacgggtccagaggggcgtgtgtactcgtgtgtgttgggctggcgcgtggagggtgggatggaaaggtcaggagctgccaagttcaaggctggaggaacctttcccaggagtaattcagcatcttctcacggcccaacatgcgtccaccaggaactccagccggagggagttcctgggcggcggactggcagcaccccacatgttgctgcggggcggggggcagtggcggtagcccggctgc

SEQ ID NO: 28874 - DNA, 763 bp, Homo sapiens
  chr2:151341770-151342533
  hyper
cgctcgctcgtgcgagacttctcgcttgcctttgtgctgggactgcctctggcgaccctgtcagtctggttccttcctcttgctctctgaacccccgcgtccctcgggggctccagcggttcaagcccagcggttctgtgggaagctcacagaaacacctccacgaggccactccccgctgggcgcggctccacctcggggcctccccgcctaacagcaaacctgcttgttggcacttgcgcgttcctcctcgccagtttcacccggatttggctcggtccgccagcaacccagctccttgctaaattcccagccctaagcgcaggggcctttacccagccttcccagtgggtcctgcttttccatagccgacacccttcttggaaacaaactcgctagacaccgctggttagggcggcgggtgcctatgtcccagcccaagacctcagatggtgcccccctgccactccccggcctttgacctggcctaaacccctaactcagccggggggccggatgccttcccaccgggagggtacctagccctccctaccaccgcgcgccaggtaggtgggtgggcgcatgggaaagcaataacccggccttgaacctcagacccatgaatataacccaccgcggcgccaataattcaagtagactggaaggtcaaaggcgaatagtgttgcccgcggccttggaggcaagccgagtgggggatgcaatagaggtcaggaggggctggtgtggtgaaggggaaacggac

SEQ ID NO: 28875 - DNA, 314 bp, Homo sapiens
  chr2:151343277-151343591
  hyper
cactgtaggaacgtaattctggatagacaaaatgggcaaaagaggaaggaaagagggcaaagaggttacgtttaaacgcacgacacccattgaacacccttcccctccccgctccccagttaagaaagaaaaccttcacacatcagaccacacactaagcacatggaccctttccgaaacccctgtcctactccccactcaccccacccggctctcacagatctgctgacccgaatctcccaaccccaggttatgcacacaggaacgaacaagtttcaggagctaaccagcccatgtgcaggcgcgtcccaacc

SEQ ID NO: 28876 - DNA, 181 bp, Homo sapiens
  chr2:151343637-151343818
  hyper
ggaaagtagtaaggaccgagaaagacttttttttttctttttttttttttttaagggaaaacggatgaaagcggggaggcccacctcgggactgggatcccactggccgaccccctcgtggaagccgcggccggccacactcacctcggggaagcagtccttggcgaagacatggagcagc

SEQ ID NO: 28877 - DNA, 282 bp, Homo sapiens
  chr2:151344070-151344352
  hyper
cgcggcgcagacgaggaggagagcgagaggagcaggctggttactcccctccaacaagttttaagcctgactcctcaccgcgcctcccaagtccaattccgagccgactgctttgtttcacgctctctgcgcggctttatacgcccggccttccaatcctcttctttctcaatgagaggaggaaactgatctgcctcctccccttttatggagcctgggagcgagcgctgttggcgttgcatgccgaaaatgtaagcagtgcgccctctagggtgcccattc

SEQ ID NO: 28878 - DNA, 109 bp, Homo sapiens
  chr2:154335663-154335772
  hyper
ctgcccccctgacctctgggcgaatggaaagtggcgatgaatcgcaggtgccagatggtgccggctgaggcacccgcccactgcctgtgcttgactccgactcgcctgc

SEQ ID NO: 28879 - DNA, 1811 bp, Homo sapiens
  chr2:159313069-159314880
  binary
cgccagggacaaaccctaccaggcacagttgggattggcagtaaggcaaggaaagcctgccccagatttcagagccagcgctggggaatctccctgtcctctccgccaccccctcccgcgcccgagacctgagacaccttctctctcacacccaccctctccaggccctctcgcgctgaacagcatcggtctctatggcgacctgaaaccgcagctcccattggcctgttcaatatgagggccgggccaatggggagggccagccctctccttcccgccaatggggtggcgggagctggcccggggacggcggcgtgctgacgttcccgggagcccggggctggccgggcgggagggctggcagcggggcgggcggcggcggcggcctctgggcagtagagggggctccggggctgagtccgcgtcgacgccggccgcggaggcggcaccatgggcaaggggtagaggggcaagttggccaccgccgccgccgggggtggtgggagagccgctccgggggcgggggccggtgggggagggaggggcgggcagccgcgccgccgcggcacttttttaattttttcgggtgccgcagcggcgacccctcggcgccgatgtccctgatccctggagcgacgacggccgctgcctaagctggaaagtaagtgtgtgggctcgcgggagggcgcggagactcctgcccacgagaccctcggccctcgccccgaacacgcgccagggccaggacctgcgcgccgggggccgggggcctccctcccgctgccgcgtccccagcgcctcgcggccgccgcggctttcctgccccgcctcgtgttcctgcccgcactcgcctgctgctcccctccccccggcaggcgcacaagtttcaccctccatttgcttttcccggcgattcctctccccggtctcccgtacgcgcagcgcacgacctctgcccacgctgggctgttcggattcagagctcccagccccgaacttgagcgccgcgctgagccctgctggacgccctcgcggcggcttccccgctgcctgccgccgcgcgccccaagtcgccctcgacaccactgggcgcccgccctcctcagcactcggggccggctgtctgtccttctagccccagatcctgcaccttggtcccctccccgtcttcccacgcccctgctgcccgcgcggtcttgcgtttgtccccgaagtcctgtactccttgccggtcctgcccacccctctgcctagtgcgcccctctctaccggccgcggatcctcacgctccacccctcccggctccccagcgccgagcctcgccgctgccctcctgcgccgccgcttcctcctctccctgccaggagttgaagcggagctgcggcacctccctggcggatctggtatccccgcccgctgccgaggctgccggccctctcccctggaccgctacccggagagcgagcggcggggccgggatttggctgcgtgttggctgagtgcgacacaccgcgagcgcgggcagtggaggtgccgcggcggccgtggccgctcggggcgcagcggtagtcaggtgtgtgtgtacagcgggggacgcgcgctgccggctcctgggctggcgacagattgtgcaggaatgcgaggaatgcaccaggggcagagtccacacagcccgccgcggctgccctagcgccttccctccccagctctcgccgcgcagccagaggtcaccggagcatcttcggagctggtgagcctcattccactcctctcctcccatagcttccctccatgcggcagaggggaagcgc

SEQ ID NO: 28880 - DNA, 402 bp, Homo sapiens
  chr2:169312417-169312819
  binary
cgcctccgggcgcacgggaagaggactgagagccctgaaaccccagcggggcaggagccagcattctgagcatgtgcgagccagccagggggctagggcggatttggggggtcgactttaggtcgtcgccctaagcgcaaagcgaaagagcggtgagagcaggggcgggcgacactccccggagcggtgcccctgcgcccagggcgcagcgactgcgccctgccctgcgggtgtgggcgagttggccgcgtgtgtgcctcgctgtttgacgcgaagacgagccaatcagggcgggcggcccgagctgccatgtgacgggcaaggcggcccctttccccagcgcggccagagggaggagagaaccggggctcgccgcgagccttcgagagcagcggccgcgga

SEQ ID NO: 28881 - DNA, 904 bp, Homo sapiens
  chr2:169312881-169313785
  binary
gcgcatccccgggcgccctgcgcggtggagagcttggcgggctgcgggtgccgcaggacaggagtggacaaagcaagatggcagggatcttagcctggttctggaacgagaggttttggctcccgcacaatgtcacctgggcggacctgaagaacacggaggaggccaccttcccgcaggctgaggacctctatctcgcttttcccctggccttctgtatcttcatggtgcggctcatcttcgagaggtaagaagggctgaagcccctcctcccctccccctgcgcacacacacgcgcgcacacactcgcgcgctctctggcgcacgcccccgcgcccccaacgctcgcgttcacgcctcccaacctttgtgttcggggaggggttgctgacccccctgccccgctggctttctgggagccagaaagggtctggcttgccacggatttcctcccgggcgccggggaggagccgcggagcgttagggtcgccccctgccctcctcctgggccctgctctcctcccggcaagggcaggcgaacaaaggtgagcggtggtcgggctcaggacccgccgcattccgcggggctcgcccctctccgccggcgcgccacgcaaggctgccaggcagggcttcccgccggggcccgcgccacccacctgacagccaggaacgttccggacgcgcggcccggagggaggaggaaccgcgcacacttcaatctttatgctccggcacacggattgtaggggttgtgcttcaaaagaattcgccagggacttcctggcttctggtcgctgtttggtttttatccgtgaaactatcaggcccacagtcctggcaaataggggataatagcatttcaggttatcagcggtttctttaaaagaggatgtgacaggac

SEQ ID NO: 28882 - DNA, 362 bp, Homo sapiens
  chr2:171567970-171568332
  hyper
cgattcagtgccgcattagcaccggggaaattctgtccccaccctcccagaacctttagtatagcaacgatttaactaggcagatatgggcaactgcaaaattgagtctccttggcaaggagtggggagatccagccgattaagcaacatcttactgtgaaaggccaaagcattaagaatttgctgaaatgatctaaataatatctagatttttaaaaaatctagcttgagaggggtgactctctggttggatttatgccagaggcatgcgtcccttctagctgcaagaaaatgcccgaggcgaggtaccaagcttgggctggaagtagcaacccctgacttaatcccagagcgcgcagagc

SEQ ID NO: 28883 - DNA, 244 bp, Homo sapiens
  chr2:171570957-171571201
  hyper
ggtcgccttgggtgtcctgccgagctcagctttgagggtatgcgcggcgcgggtgtttttcccaggtccactctgcaaaagttgtggcctgaggaaaacttccaggtcgccagcaggaacgtcacaggagagccccggtcgctcgtcaggcgggcggccctggagcgtgcgcgccacccaacgccgcgctgggcggccgcccggccccgccccaggtcacagccctgccctcggccccaccgcg

SEQ ID NO: 28884 - DNA, 162 bp, Homo sapiens
  chr2:171571315-171571477
  hyper
tgcaagtaaatacaggggagagttacactctttgccgtctcaaagtccggcgcctggaagccgaaggcagatttttccagagataacaaagacactttgtcactttgggcgctgcgtcggtgcaaatctttaattgcaagtgtgtgtgtgtgtgtgtgtgtg

SEQ ID NO: 28885 - DNA, 277 bp, Homo sapiens
  chr2:171571520-171571797
  hyper
cgggtctccaggcggcaaggccccctttgatcaggaaaatccaattatttgtgtatatacatttcccacatagtgattacttcattaattgtcccgcctttatctcctcccttcccatcccccctaataatcagttcttttatccagaccaacaaacacaccataggagctttgtggattcaaaggatttgctttcgcttctgaaagagccgctattctttgatgattgggtagcggcaaacttcaaagccataaatcttccctctgactggctggc

SEQ ID NO: 28886 - DNA, 765 bp, Homo sapiens
  chr2:171673109-171673874
  hyper
cgacagcctgcctatttccaaaggaaaaaaaaaaagcgtgttgagtacgttctggattactcataagaccttttttttttccttccgggcgcaaaaccgtgagctggatttataatcgccctataaagctccagaggcggtcaggcacctgcagaggagccccgccgctccgccgactagctgcccccgcgagcaacggcctcgtgatttccccgccgatccggtccccgcctccccactctgcccccgcctaccccggagccgtgcagccgcctctccgaatctctctcttctcctggcgctcgcgtgcgagagggaactagcgagaacgaggaagcagctggaggtgacgccgggcagattacgcctgtcagggccgagccgagcggatcgctgggcgctgtgcagaggaaaggcgggagtgcccggctcgctgtcgcagagccgaggtgggtaagctagcgaccacctggacttcccagcgcccaaccgtggcttttcagccaggtcctctcctcccgcggcttctcaaccaaccccatcccagcgccggccacccaacctcccgaaatgagtgcttcctgcccgccctagtccctgctctccacgggtgcgctgcgcagggacccccccccccccgcctccctcgtcactcttcttatccctgccctccggattcacgccccggggaagcacggaggctgaggctctagttgaagtggggcaagagcgattttcccttgagcttccatgctgcgagcgcct

SEQ ID NO: 28887 - DNA, 153 bp, Homo sapiens
  chr2:171673939-171674092
  hyper
tttccaggggccgtagtcgacccgctgcccgagttgctgtgcgactgcgcgcgcggggctaggagtgaggtcggagggagggtgtggaggcgatggccggtgggcccttctctgtggggtcctcgatctacccagattagcccgcaatctctc

SEQ ID NO: 28888 - DNA, 370 bp, Homo sapiens
  chr2:171674329-171674699
  hyper
gatggctaaaaaccggctgggataagagggaggcaagcaacattccgactcgctgctttctggctgtctggagtgcaaggtgactgtggttcttctctggccaagtccgagggagaacgtaaagatatgggcctttttccccctctcaccttgtctcaccaaagtccctagtccccggagcagttagcctctttctttccagggaattagccagacacaacaacgggaaccagacaccgaaccagacatgcccgccccgtgcgccctccccccgctggcccacacgccggctgctgagtgcccaatggggcttgtagcggctcggctggaaaatcgctcactgagcgctcccctgtgctcctagcctagt

SEQ ID NO: 28889 - DNA, 382 bp, Homo sapiens
  chr2:173037307-173037689
  hyper
cgggcggtggcgggccgtggtccggcgcagtttccccgcggcccgctgggtcgcactgtggccttaggaatgtgggccggggcggggcggcttgggagcgcgctgcagccaacgccgcgttcagccccgggcgcaactgcagccgtgccgggggcctccggggccccgaccgaccgacagctctttcagaccgcagcgaagtttgcacacacgacagcacgtcccggggctaggatcttgcccgcctgcggggctgacctgcaccacccttggggaagcgcgaactgccgccccgctgccgggagttaggcgcccgggcctgggtcgcccccacagacggctcggacggcacgaacgagcggaccccaaggatagtgggctg

SEQ ID NO: 28890 - DNA, 220 bp, Homo sapiens
  chr2:177052744-177052964
  binary
tagtcaaaaagtgaaaattttgtcccgccctaggcacacagcactcacagcataagatgtagttccatgagtcctaggaaagggggaagaaaggaaaaaaccaaacatctgctctaggtttagaagagggataacatcagcgccaagcaaaccgaaagcgcagaggactcagaagaggggaagaggaataactttatctgtcctggaggtgggcgaagag

SEQ ID NO: 28891 - DNA, 487 bp, Homo sapiens
  chr2:178937351-178937838
  hyper
cgccgaccccaccccgtggtcctgctactcctgctccgcacaggtgcccagcactgagctgccgccgctgccccggctcctgttccggaaacccgagctatcgctgctcctgttctggctgccgccgctgctgctggaactgctgctgtaaccggatgagtggaccgctgtgacagggaggtagggcaggacacgcccctgagtgaggcacggagcctggagggaggagagaagaggagggagccgcggacgccagaccagccaaagtccacggcccaggctgccaggcggttcctggaagagtctctggacggccggaatcggcgcctgggtacaggactcctgattggaacacgattagaagagggaaacgcaccttgttccttccccgcttcttgctcccttacctccccaaccctccctactcaccgcgccccttaatccgttagcgtttcgaggaggcccagcgggagcccagtgggagtcc

SEQ ID NO: 28892 - DNA, 91 bp, Homo sapiens
  chr2:183902312-183902403
  binary
cgtaagaatatggaacactcaagttttcctacccacctagaatttcgcccacccaccaccctccctttcctatgggccccatcatgggggc

SEQ ID NO: 28893 - DNA, 569 bp, Homo sapiens
  chr2:183902442-183903011
  binary
cgcccccaccccgtgcgaggcccagcgcccgatcccgccgccgggagccgggaaatggcttctctgccttcggccggccggcgaaccacagggagaggcgcccgggactccgcattaggccgcggcgcatccaggcgaccccgggccgggcctcgggcggcgacgccgagatttctacacccggcgcctcctgccgcccccaccccacggcctcccttgcccttcatccctcccgggcccgcccgcctccgccgcggcctccccggcccgtgcgcaccttcttgatgttgtagaggcgggtgagcatgccgacgccccggtcgttgaggatggtgagcttctccgccagcttctgctgactgggctgcagcactgagcgcgacatggtggtgctggtgccgccgccgccgccggccgcctcgcgcccagtcacgggcccgcggccttcgcagcagcctctctcgggcctcctcccctcccgcccgcgacctccgccttaggagagcgcgcccatggccctcgcgccccaatcccgcgccggcgacagagcgagccgcggcggactcctc

SEQ ID NO: 28894 - DNA, 587 bp, Homo sapiens
  chr2:183903037-183903624
  binary
cgccccggcagcctcctgccttccgcccgccgcccttccgcccccacccccggcgctctccgccccagcccccaacgagccgccttccccggctgctccactaggtgtggcggcggcggcggcggcggcggcgtctccggcggctgagaacgaggccgcttcccgcagccccggacgggccctcggtcacctgatcggcagcgccggcgcccccgcgaggccggacggggaactgcggccgacgggccctcggcatggcctcgccgccgccgctctggccctggccctggcccggaccgcccactacgcctgatgccgggatgggagtcccaagcggggactgagtggggtcgcgttgtgtgctctttccacttcgccccacaccccactccttcaagttcccaaaagttgcttttccgcaccacccttctaaagaaaccggcagaaactctgctgggaggcggggtgttttccaggcgagtttcgcttaagagtgggctggtggctccaagcgctttttcctcccactgcttgacaggcgctcgccgcagaacacagcagatgttgtgctccgcgaggtggggatc

SEQ ID NO: 28895 - DNA, 584 bp, Homo sapiens
  chr2:189156844-189157428
  hyper
ctctccacgcccctgcccgaagcctgacccgactgcctctctcagtgaggtacggagatttatctaggctcttccctggctgcgaacccaggctccctccaggtagcgtggaatcgcttagaagctgatatcccgaggggcggtgggggtggacagctccggccaccagtgcccgggaaggagggcgcggggctgcgcgtagccgctggccagcaggttgtaaaaaattaggacagctaaatgctcagggagtcgtccagcactaaaggaggctaagacctgttgacgcctgctatggcagcgcttgagaaatgactgggggagtccagcgaggtcggggacgcagcggtctccgggctccagaaacctccttagccttttgtggtaactttggtccggcggcggggggccggtgagcaggaactggagggaggcggtggggaaaccgtggatccgtccggctgagggtgcgtggatcagactgggctgagcaggcaagtcatcgtcgggtcacagcgaggcgacccaggagcgaacttccagggcagcctcccttttgttggcgctgggagagaatgtgggca

SEQ ID NO: 28896 - DNA, 108 bp, Homo sapiens
  chr2:190445073-190445181
  hyper
cgtgtagagttgcttgtctccaaagccccacctgggtttccaccatatgctttcggtcaacgacactcaccacagcatcctctctggcggttgtgatctcccgccctg

SEQ ID NO: 28897 - DNA, 725 bp, Homo sapiens
  chr2:190445255-190445980
  hyper
taacaggagtgcaaggaactggagatagcacctctaaaaacacaacagccttgggcaaaaagactacaacgacgactttggcaaagaacaaaagaaaaggggcccagggattttcttttttccttctttccaaacttagctaacactgtagctgaagttggaaaggcaaagccttatggaagcggtttgggaggctcagcaggtcgtccgagcctagcggacgccctgagccagctctctccgccgccgccgccgccgccgtgggccgggcccagctcttataccgagtcgggggcggagctccctgcgacctccgactggggccgccccgtccccttcagggccgcccgggcgtccccgcggcgcgagacgagctcccgtcaaccttgcgcgccgggccgtccccgcgcccttgcccggaggagtcgcccaccccgggcgcaagcgtccaaccggccgcagacaccctgcgcggcttgcggggaccttcgcctcgacgcgttccactccccgggttttcctgctctccgggaagccgcgagggcaacctcggggggcggccgtggggctgggaaaaggaggaaggcgcgtggagccggcggggcggcgtagggagattctgcgcgaaactaagcgtcaggtgctggaagaaagcgctgcgcaccggctaccccgcagttcagggaaagggcggccgccggacggtcgcagtgcaaagctccagc

SEQ ID NO: 28898 - DNA, 448 bp, Homo sapiens
  chr2:192109730-192110178
  binary
cggaatgtgaccccaggctggcttcgagttgtcaaatgttgtatttctcattttatgtcagtgagtctggaagcaaaaaaggtagaaagactgccttccgtgggggccgcgacgatcgcccctccttccctcaagcctcgtcccatccaggctcgccccgggtgcggagggtcgggccgcaaacccgcaaggcgcggaggccgccgcgacgctcaccggggggcgctgtgaagccggcaccgggcggacagaggtgagtcggctcggaggcggtggctcccgttcctgcccgcgcgccgaggggcgaatcccaggcagcgaggtcgccgcccccgcccctcggccggcccctccgccagcgggcgagaggggagtggccgggctcctcccgccgccgctgagcactccgcagctgggtgcgcacgggagcctcaaccgcggcgcgtgg

SEQ ID NO: 28899 - DNA, 254 bp, Homo sapiens
  chr2:192110303-192110557
  binary
aggacgacgtggaggcggagtggcgcccggcgaggtagcgccaggcgaggtagcgcgagcgctttctctctctctcccctgcccttccctctgcgtccgtcgtcggcccccgaggcgcctgctccgcgcctttgtgcccgcggtccctggccccgtcgcaccctgcgggcgggggtcagcgggctctgccgctctcttgggagacgcggcgctgcggcgggaacggcgcacgctgtaggttgcggagggtggtc

SEQ ID NO: 28900 - DNA, 439 bp, Homo sapiens
  chr2:192110584-192111023
  binary
cgggagggaagaagggcttgtaaactaagttgctcttactttgccccatgcctctcgtacctgtgggcagagtcgaatctcggctgtcctcgtgttcacccacagcccctccattcctctggcccacagctgtttcctggccccctggaaagacacggtgtggcttcctccgggcaggaaagcggagggagaacaatggggcgtcctggggagtggggttcaggtgcggtgtgccccggcggcggcgggggaggaggggcccgggacgctgtgggcctccctgcgcgtgcagctgcgctcgcctcctttgttccgccgcagcggagggggttgccctgggtctcgtttcctgcccgggatgggattgattcacggtcccagagagggaaggggaagggggcggggctggaatggaaaccagattagagacgggagctac

SEQ ID NO: 28901 - DNA, 362 bp, Homo sapiens
  chr2:19557098-19557460
  hyper
gggtgaaatttaccaaattgtggcaacaaagaaacccttgcggctactttacacattgagaacccaacccgctactgcctgagctgctgaaaaaggactaaacgtggtttttcattcttctccgagacatttccgaggagaaattagttcagcaggcagcccttcacccctttcccccttctttctctcctgacggctggattagcggacagtcaggggagtaacagaacttttcctgtccccagcccggagaccctagggctccacagagtttccactagtgctgtgtgtgggtctcgaattggaaagcagtgcttgcgcccactgcattgcctccctgcaccaggacaatcaagggttcc

SEQ ID NO: 28902 - DNA, 137 bp, Homo sapiens
  chr2:19557489-19557626
  hyper
atcctatggagaatatccctaagttagagcgcgagtgcaaggcggggttcagactcgcagccctgcgctctcgggtctaggcggcctcatactagagcgcaactcctcaaaagacaaacttgaacgaaagcgctacc

SEQ ID NO: 28903 - DNA, 45 bp, Homo sapiens
  chr2:200322454-200322499
  hyper
cggcggcggcggcgagccggggctgctggttcgcagggcggctag

SEQ ID NO: 28904 - DNA, 62 bp, Homo sapiens
  chr2:200322611-200322673
  binary
ctccagcctctcccctctcggccgcctctgccagcagccagagccggactcactgacaagcc

SEQ ID NO: 28905 - DNA, 378 bp, Homo sapiens
  chr2:200327794-200328172
  hyper
tggtgtcccttcggcggccgcgggccgggggaccggggaagacggagggtcctgcggcctggagcaccaccctaccacaccaggcaacgccccccggggcgcccttcattcttttgcagagcccagaacttaataggtgggtccccttctgcaaccacgctgcgagagaatgactgccctgctaatctagtttacttgtagaaatcgactgtaaaccgggacaacaaggcaagggtgggggaagaaaaggaagcgccgaaggagccgccgctgcgtccccgcccccagctcggagctgccggggttggggccccgggtggcgctcccgacccgccgcgttttccttagggaaacaccgagtgaggcagaggatctcag

SEQ ID NO: 28906 - DNA, 180 bp, Homo sapiens
  chr2:200328393-200328573
  hyper
gcgggggatgggcaggtccctggcccagggtaccaccgggccactcaacacaaaaacgccctggcgcgtgcaaaatacgaacgcccacagtttgtcccaaccccttgaaatgaaaagtacacctggaaagcccaagatagcacccggtccgcaccccaaatttcaggcaggccagcaggc

SEQ ID NO: 28907 - DNA, 32 bp, Homo sapiens
  chr2:210637062-210637094
  hyper
atatatatgtatatatttcagtgaagtttgac

SEQ ID NO: 28908 - DNA, 250 bp, Homo sapiens
  chr2:211090073-211090323
  hyper
tcagctgaggcgtccacctgtggtgtcctcccaaaaaagcgctcgcgcgcgcccttccggagccccaaccacgccacaggctggtcgcgagggaatacgcccgtcttggctgtcagcaataggattttacagcgaaactgctgcctttgcttgcagcattctttcttgtttatcgaagcagctctgagcctttttagcgtcctgaagcgctttgagtaacggatgaaagctatggagcccccaaatacgc

SEQ ID NO: 28909 - DNA, 599 bp, Homo sapiens
  chr2:213402010-213402609
  hyper
ccctggatggtttcggaaatctctctggctctccaaaaggcaccccttggccacgtcaagacaccggtcctcctcagacctctcccgtcccactttcatccccaggaaactctagtgtcagaaactttgagctccattgcactgcaggtgctgtcattagtcctgcaagccgtggcgggccagccccgccgcgctgcctctcggggtcaattagccctttgcctgcccaggtacctggggctcgagctctccagcaagcagtggccgcgcacccatcgccgctgccgctttcgcctcgggtggatccagtgacccgcaggctcggcagcctggccgggcagtaaacagacaagtttgaaggactccggccaatagcaagttgaactacaggaagaactcttcccggagccaaacacggcaaccgacgggaaggccgggcttctggctcaagtgtgccaagcctttttttttttttttaagaggtcaggcaggcgagtaagcgcccctcaagtcaatggggagagggctccgggaagccggcggaagaggcccagaactccgggccccggaccgaggcgcgcccgcctgctgcactccgg

SEQ ID NO: 28910 - DNA, 87 bp, Homo sapiens
  chr2:217498487-217498574
  hyper
agccgggctgcggctgctgctcggtgtgcgcccggctggagggcgaggcgtgcggcgtctacaccccgcgctgcggccaggggctgc

SEQ ID NO: 28911 - DNA, 167 bp, Homo sapiens
  chr2:219827883-219828050
  hyper
tggctccagaacccaaaaatgtcggtccccacttgccctcccgggacgacaggactcgattcccctggcctcagcccagcgcccttgtaacctgcctggagccggaaatccccagtccagatttgtgaattgagttcccggagggagggggagagctggcggaaggg

SEQ ID NO: 28912 - DNA, 53 bp, Homo sapiens
  chr2:219828117-219828170
  hyper
tttgggaggagggagggaggatcactagggtcactccgcggctgtcggctgtc

SEQ ID NO: 28913 - DNA, 59 bp, Homo sapiens
  chr2:220417712-220417771
  hyper
ggagccgcgggctaggcgtaagcgcgttcccgtcctaggggcgggagttgcagagggtc

SEQ ID NO: 28914 - DNA, 82 bp, Homo sapiens
  chr2:220435308-220435390
  binary
cgtgcgcgttgcgggcgtggcacacgtagacgccggaatccggcagccgagccgccaggatgcgcagtgccaggctcgcgcc

SEQ ID NO: 28915 - DNA, 95 bp, Homo sapiens
  chr2:220436254-220436349
  hyper
tgctcttaggagcctctcttcccagccccctcccacagcttgggcctcttccccctcctccctcccacctccagccgccaggtccccagccgccc

SEQ ID NO: 28916 - DNA, 139 bp, Homo sapiens
  chr2:222435635-222435774
  hyper
cggatggacggacggatagatagatggatgccggaaaggagaagaatgagagacggatgtgagactagatgcacgcaggccagagcaccagcatacgctggaacagagcacgagcatacactcgaacacacgcgcacac

SEQ ID NO: 28917 - DNA, 407 bp, Homo sapiens
  chr2:222436961-222437368
  binary
cagccatggttcgccggtgccaacgctgctcctgccgcttctatcccagtggaataaatgcttaagttaggagagcagcgggctgaagacattgccaagggggcgggcccggccggtgacgtgagcccgccagtccggggcccgcggccaatggcggcgcagacagggcggccgagccccgccttcaccgagcagggcccgccccagggttccgccccctccgggctccacggggcgcgcggtctcccggggctctagggggcgagcacggccggtccccgcccccgcctgccggagggagccagcgggatcccccacgttacctcgaaggtcgagcccctggacggcggagggactttggaaaagctcggaattgaccgaggggagccagagaagaggttggaaac

SEQ ID NO: 28918 - DNA, 806 bp, Homo sapiens
  chr2:222437421-222438227
  binary
ataaaagaagtctaagctgacctgcggttgcttctttaggagagtcgacgtgtctgcgtccagcgcgcccgggctgagctgcagactcgcgcctgccaccgccaccctctgccaccttgccctgttttgtctttatggcgcttccccctctgaaatactctttgcggggagttttgtggctctatcactcgcttcttccctggctccccagatgcctggagagcggggacctacttggtccccaacgtccagtccgcagcagggctccgtcactgtctccagagactgaacgaatgactttctagcagtaaggaagtccccgctggccccgtccccctgcacacgccgtggacctcgcccagggcccaggacgccccgagatggccttgggcagggaaccagttgtggatttcccgggggcagggttgggggcagtccctggaaccgggcctagcccgtctgggagcggtggggtagaagtgaaaggcttaagtgtgggtgcggggacttgcagccgcacagacaaggcagaccgggactgggaagctgcccggagcggctgctgcgactctccgctccgacctagccggggcagccctccctgccccgggagaagacggcgagcaggaggacccgcagagccccgcccggctgctccggccccgggggcactggcaccatcgggctgtggtcttttcccgatgcccgagccgtggacgcggccacctaagagcggtccggcgaaggcagcgcagccggtgtcccagggaccggtccccaacgccactcggtgcatttccccaggc

SEQ ID NO: 28919 - DNA, 441 bp, Homo sapiens
  chr2:231902096-231902537
  binary
cgggcccgcgatgcgggctgcgcccaggggcgcgtgcacacagaggccccgcccgggggcccgggggtccggctgggctcggccctcgggggcgtgtcctctgtgccggggcgccaccgccccgagaggcgggcagcgggtgcgcccgggccgcggcggccgcagagggcgggcggcggccagcatggagcgcgagctggaggcgctggcggcccggcttgcgcgccctgccgagccgcccttccaggcgttggtggaagcggcggggggccgcgggcaggtgctgctggtgggcgagctgtgggagcgcgaacagagccgcgcgctgctgcgggacttcgcacgggcggtgttcccgccggagccaggcgcggccaagccgggcggcgcggcggcagagggcgcggggcccggggcggcgcgcggggcgcagagggcggc

SEQ ID NO: 28920 - DNA, 340 bp, Homo sapiens
  chr2:233497841-233498181
  binary
gcgggcgcctcccactccctgaccccggggagggtgggcaccactcccagacgcgggggacgcgtgggtgtcgctcgggggcgctcgcctcccccacccagcctgtcccgggccgcgagcgcttccagtcgggttacttctgggggacaagaaaggcaccgtctgaacggtcgagacgctttttcccgctacggttttccccggagctgacaggggcagcaaggtcggagttgatccgagggtccctgcctggtcccggggggacggtcagcctcccgcccggagccgcggggagaggaagcaggtcggggtctccgggacgcgcagacacccagacacc

SEQ ID NO: 28921 - DNA, 165 bp, Homo sapiens
  chr2:235404971-235405136
  hyper
ccgtgcagcggctgtaggacttccacagcggccgcagcttctcctggccgcccacgtcccagaagtggcagctgatgcccttggccgtgccgttgctcagcttgatcttctcggtgttgaagccgatggtgggcaccgtgttcacgaactcgttgaacttgagcc

SEQ ID NO: 28922 - DNA, 593 bp, Homo sapiens
  chr2:235860154-235860747
  binary
cactgtcctcagccaaggtgtagtaaagcgtctccgaacgcggcgcgaccctcgcccacgcccgctcgcggggggaccgcaccgccccaggggtcctcgctaggggttcccggagaaggggtgggagatgggggtgcgggggggcacaggagcgcgggccagcacccagacctgctcggtaccggggacccagacccgaggatgccgggcggccaaggccccgctaccctggccggctccgggcggaggaagaagaggaggcgcccagactggatacccgcctggacccggagccgcggcaccacccccagcccgccccacgctcgccagcctcagacggccgcgccccgccccgcccctctcccgaagccccgccccggcgcgggaccaccccctccgcggcctcagctccggtcctggccccgccccccgcgcccccgcccccgcccccgcccccgcccccgcccaggcgcgggaccaccctccgcccgccgaggcgggggcccagcgcgcccggcactctcggcggtccgggcccctcgccactaccgccgccgccgccgccgtgagtcccgcggagccgcgcgcgcccc

SEQ ID NO: 28923 - DNA, 85 bp, Homo sapiens
  chr2:235860808-235860893
  hyper
agccaggtaggcaggcggcggcggggagcgcctcgggcggcagggccctgggggccggcgggggcgcggggtcgtgctcgggggc

SEQ ID NO: 28924 - DNA, 439 bp, Homo sapiens
  chr2:235860951-235861390
  hyper
tgagttcggggctgcgcgggtgcctgggcgtggggcggcttcggggaagcctcgcgcgcccctcgccgctcccccgggcgctcgggtctccctggtgctggtgggcagggacccggcccggggttccgggcgccgagccgcagccctccgcgtgcgctcgggccgccccccaaccccggctctggccacttcccggcgggcggccctgcggggtggcctccctgggcaaccggacgcgtcctcgggcgcaaatcggggggcgcgctcggctcacgggggccgtgggggccacgggagggcgtggaggggtcggggcgcccccctcgagcggcgctggggaggagggaaggacgcgcggtctccggttaaacttgttggtgacaatgcatatttcaacttcttcggagatccctcctgtgaggatgaaattgaaaactcc

SEQ ID NO: 28925 - DNA, 132 bp, Homo sapiens
  chr2:235861533-235861665
  hyper
tcagttgggaccccaaccctgggtcccgcggctcctagcccggggcctgcggtgtagacgggggttggggacaggcccagctggccctgaccgggtgtcgggcgcccagagatgccgcgcgggaggagccgc

SEQ ID NO: 28926 - DNA, 298 bp, Homo sapiens
  chr2:236402404-236402702
  binary
aggcgcggggcctggccggcgggagggtcccgcaccccggcccagtgtgaacaccccgcgcacccccctggcccggcccgccgggggcgcggactacaagtcccaggaagcccagaggcaggcgcggggcggggcctggcgcaattccccgggatccggcgcgctgggaagcgccgaggaggacgcagcgccggcggccggagggcggcaagcgcgcgggcaggcggggcgcgggcgcgggcgcgggcgagggcgaaggcgggggcggggccgacgtgggccggagccctgcgtgcca

SEQ ID NO: 28927 - DNA, 139 bp, Homo sapiens
  chr2:236403013-236403152
  hyper
cccgagcaagcctccttcggggccggccgcacccgccgcggcgcgctccatgggggcgcgctccccccgggcggcccgctgacccgggacgccggggcccgctcgctcgccggccgcgcgtcccggccatgaactgagc

SEQ ID NO: 28928 - DNA, 119 bp, Homo sapiens
  chr2:236403736-236403855
  hyper
ctctcctgcgggaaagtggctcggtgcctccgcgtcctgggctgccggagcgtcccggcccagcagacgcctgggggcagccggcggggtcggcgccacccgacccctgacaggttacc

SEQ ID NO: 28929 - DNA, 212 bp, Homo sapiens
  chr2:236403941-236404153
  hyper
gggcggtgcagggctgccctccttagtgtgtttgcttaattcaggggtgcagttgaacttagtggatgccgagagccagccctagccgcgggagcatcgtgtccaggtgcccctgtgcaaacgctggaaccggtagtgtgctttgtaccaaccaaaagtccggggttggattagaggaagaaccctaccaggagggcagggcgtcctccagc

SEQ ID NO: 28930 - DNA, 308 bp, Homo sapiens
  chr2:236578055-236578363
  hyper
caggctggtgctgggctgggcccctcggaggctccggtccgcgctgcgtcgatccatcccggcgcttgggcctgcacgccgccgcgctcgccgccgccgccgccgccgcgctcccgggactcggccagcccggctgggcgcgcggcccgcggtcccttgcacgtcggcccccgtcgcccgccccgccccggcgcgcgtttccattttaaaccgccgcccgccgcccgccacccgccacccttcggccgcagccggtgcagctgtccgcgcgtcccggagcccagggagtggcggaggctgcggaaccg

SEQ ID NO: 28931 - DNA, 44 bp, Homo sapiens
  chr2:236578677-236578721
  hyper
cttggcccggcgccctcccggcccgcgggctcgctggatgcggc

SEQ ID NO: 28932 - DNA, 353 bp, Homo sapiens
  chr2:237087070-237087423
  hyper
ctccggcggttttttttttttttttttttttttgaaaggagcaaacatccccagctttaatgcggcccaattatctcgtttgcacgacttaaaatgtttctctttaactcatttcaatctagtaaatatgcttcagcaagtagctaatttctcagggatggcttcgcctcgccatttgcatataaagcgcgtcggggcccggccccttctccgagtgcgcgagtcccttcttccggtgcgcgggtggcaggcagccaggcctcctagtccagggaggtcgcctaggtttggcctagggaaggcggagtctggggtccgcgacagtgcctggggaccagggtggcagggagggc

SEQ ID NO: 28933 - DNA, 394 bp, Homo sapiens
  chr2:237087618-237088012
  hyper
ggaaatctcagggctcagtcgagcaatctcctggctttaaattccgaataaaagtctcaaatattcccgggtcatgggggcactgtctcattaaaaccactctcgtcctgaaactgcaatgcagacattaaagtgcagtatttttcaattagagctgacgaattcaatcaaaattccatagattaggatgaaatgaggcatgggtcatttacaggggaatttaattgccgagccattagacaaatagtatatttgccattcccgcgttatccatcattttcgacatcaataccggggccgcatctccccgtcccgcggccgcccggcgtcggctgtaaacactcccttccctgtatcttctgattatatctgatttcatttagggccatggggg

SEQ ID NO: 28934 - DNA, 223 bp, Homo sapiens
  chr2:237088239-237088462
  hyper
gaacccctcttgctgccagcgggtctggggagggtggggctgggctccgcaggctgtcggaaccccctcccacgccgcgcagccgcggggcgctcgtgtccctgaagcctgagctgggcgtggaggacaggccccgcgtgttcgcggatcgcgagtgggggccagccccgcacctcccgtcccggccgggcgctgcgggtagggggagcggagcggagggggc

SEQ ID NO: 28935 - DNA, 247 bp, Homo sapiens
  chr2:242498020-242498267
  hyper
cgctccggcctggtcgccttctccgggcgcatccagggaactcgctcggtcctccttaagcggggaagctcggaaagcgtctccccgactccgcccccagggttgcctttcccttagaaggccaagccccaagcccagcctctcgccagctgggagtcgcgcgctgcccacctcgctgcccaggcccccgacgccgcggcaggagccccccaagagcgcgggaagccccgtggacctggcgctcccg

SEQ ID NO: 28936 - DNA, 236 bp, Homo sapiens
  chr2:242498800-242499036
  hyper
gcccggcgccccgcgcgccccgttccccgcgccgcctccctccacccggctgagcgcttgtgcccgcaggtgcggcgccccccacccgcgtcgccgccatggaggtgctgcggcgctcctcggtcttcgccgccgagatcatggacgcctttgaccgctcgcccacagacaaggagctggtggcccaggccaaggcgctgggccgggagtacgtgcacgcgcggctgctgcgcgcc

SEQ ID NO: 28937 - DNA, 64 bp, Homo sapiens
  chr2:26915614-26915678
  hyper
cgggtgcccggcgcggagagcggcgagcgcagccatgccccaggccgcctccggggcagcagca

SEQ ID NO: 28938 - DNA, 240 bp, Homo sapiens
  chr2:42274305-42274545
  hyper
cgcggctgaccccgtcagaccccaggcatcttgaggggtagggagcgacccccagctgcatttggggctttagaggcaaggaaaatcagaaacactttggtaaaaggagttgaacagggcatcctcggcgagctcacgagcattcctctatgcctagagctcctgtcccacgcgcgctcgcaggtgctggcccggctgtgcccgcttccccctcaccatcgccccaatccggaatccggg

SEQ ID NO: 28939 - DNA, 1086 bp, Homo sapiens
  chr2:42274691-42275777
  binary
gtcccctccggagcccgctacccgccggcctcgcccctttatctttcccccactccgcccggccggctccgttatccacctcccaatcccgttatccggccgccccggccccgttatccgccctcgcgttgggcgcggagcccccgcgcgcctcctggccgccgccgccccctcccccgctcccagacggagctcgggggaccgcgggctgggcgggaccgcgggctgggcaggaccggagccgcctccgcgccgcttcccaggcccggacggccgcgggaggaggtcccgctgtcagtcagcggggaaggccgggccgggcggccggagggggcggcgccgaggacgggctcgggccgggagctgggaggtggaggcggaggggcgggggagggggcgggggagggggcgggggcgggggcggggggcggctctgggccttataagcggcgggggcagggcggcagggaggcaagtgtcaggccgatgtgtcgcccgcgaggggccggggtcggggccgccggggccatgcgcgcgggctgggcagggggccggcggggcgcagagcggagccgcctcggagcctgagccgcccggggccggggccggggagccgcgcggggccggccggccggggggaggggagcgatgcggcgccggcgggcggcagtggccgcgggtttctgcgcctccttcctgctgggctccgtcctcaacgtgctcttcgctccgggctcggagcctccgaggccaggccagtcccctgagccttcgccggccccgggtccgggccgtcgcgggggccgcggggagctggcccggcagatccgggcgcgctacgaggaggtgcagcgctattcccgcgggggccccgggcccggggcgggccggccggagcggcggcgcctgatggacctggctccgggcgggcccggcctgccgcgcccccggcccccttgggcccggcccctgtccgacggcgccccaggctggcccccggctcccggcccaggctcccccggcccgggcccgcgcctgggctgcgccgcgcttcgcaacgtgtccggcgcgcagtacatgggctca

SEQ ID NO: 28940 - DNA, 368 bp, Homo sapiens
  chr2:43864730-43865098
  hyper
gatgtcgccgggagaggtgggcagggggcggtggccggcggtccctcgcgcccgtgggctcccgtgacgttctgtttggaaacactgggcccgggcttctggcgcggcgcgagcggtcccgggggcgcagcggggcagcccagggtccccgagccgagggacccgcgcggtcagggatgccgcgctcgccttaggcttcgggagatccaccaggatctccggggcgaaactttaaactcaaaactttaaagaagcattttgtacacctcgagttgctggcacgtcaaagcaccctaaggtgacctacccggaaaccactgtccccgaagttagtggggcactttttaaaggacaacactttttacccg

SEQ ID NO: 28941 - DNA, 229 bp, Homo sapiens
  chr2:45396995-45397224
  hyper
gctgagggtcgcggttccaagggcggtctctcgccccgggtcaggccccaccccgcggtggcggtcgcgtggcgctgtcctggagttgagctgtccccgcgccgcggcccgcacgcccaggaccgcacaccgccgcccgcaggcagagacgcctgcaacctcgccctctcgcccggctcccagctcggggctgggaaccggaaaggtgcatttccgtgtggggtggggg

SEQ ID NO: 28942 - DNA, 535 bp, Homo sapiens
  chr2:45398-45933
  hyper
cgcacacggccagccccgcccccagccttctgggcacacacctcgggtccggctctgctcctggctgggggtctccttggccttcttacaggtgtacagccacttgatgatgcgggcgttcctctcgatgaccgaagtggtgctgggcacctgctctatcagctcctcctcctgcagcccctcgtcgtcgccgccgctgtgccgggagaagccgctgccggaggtggcgacgctcacgctgcgcaccttgagggtcacacagtccgaccccgcggtgaagttctccctccccagggcctccaccacctcggggtccaggccgcagtactggaagaaggtgtcagactcggccaaggcagcggaatagcgggagctgaggtccgactgtgagcgctgcagcccccgacgcctcaccacccgcggctctggcccagggggcgcggccgggacactggagggcgccgcggaccgcgcggctggggctggggtctcggggattgcggggtccgccgcggggccaggagtggtcgggacc

SEQ ID NO: 28943 - DNA, 246 bp, Homo sapiens
  chr2:45969-46215
  hyper
cggggcaccggcgccttgtccttacccggcccctggaagagcttcttcaccaggcttgccctggggccgtcggcgcccgatcctcgcacgaattcgcatttctgccggtagatgatcagcgagtccggtctcaacggcttccgcgcaatagccctgcgcgccaccggggccggggcgcgggccgggggcccagggtcgttccccgggcacttgatcgcccccgggccgctgccctcggaagcgacg

SEQ ID NO: 28944 - DNA, 143 bp, Homo sapiens
  chr2:46450-46593
  hyper
gtcagtcccagggccggttccgaagtccgcgccgggtggggaacggcgccccagtgcccagctgcccaggcccggggttggggagaaccggagtctgcaccgattggcgaaactccccagttcccgcccctcccgacctcatc

SEQ ID NO: 28945 - DNA, 482 bp, Homo sapiens
  chr2:46525231-46525713
  hyper
cggtttgggggcgcggatcagcagctttgcagtggagacttctgcggctcggaggagtcggggatttgcgcgcacggcgaggccaggaggccgagggagatggcctggaggtcggaggtgcttccgcggtgcctttgaaaatctcccagccgccccgcagcagattaccgtggccaccggcgcttggaaatgtttgtgggtgcatgtcctcgactttctctggtctctcattttggggcagcatccacgtctctatttttctctggattcgcggagtccttccaaatgcgctcctgtgcccgcgccgcggcccaagtgggcaaaggggggcgggaggcggagagcggctcagggacacgatcctaccgaggagccaggacccttcagagcgccccgctgccgggctccagaccccaccgaaggttggagaacccacttcctcgtgccgcaccttgactctggggagagtaggtagtgagtga

SEQ ID NO: 28946 - DNA, 246 bp, Homo sapiens
  chr2:46525757-46526003
  hyper
ggacggcaacactggatgtccctggcaggtccgggtgtctgtctccgaagaggacagagaagggcagccacgatctgcccgcctgccctcgcgagcctctcggcactgggtgagaggcaactctggccatttcttgctgccctctcgccctctcccggccgctcccagtccagccgggcccggcgctacccgagcgagggttcgagccctctgcgcggccgcgcagaagcaggcagggcctcaact

SEQ ID NO: 28947 - DNA, 64 bp, Homo sapiens
  chr2:46526239-46526303
  hyper
gtgactggccgggagggctcactgccgaggttgatttgctcttgttccaacttccactacggga

SEQ ID NO: 28948 - DNA, 54 bp, Homo sapiens
  chr2:46526448-46526502
  hyper
ttgggccctgctcccctttcctggccgtagtcccccctttctcgtcaccgtcgc

SEQ ID NO: 28949 - DNA, 530 bp, Homo sapiens
  chr2:46665-47195
  hyper
cgtccccgcccgtccccgcctcctcactcccgcccgggcccgcctccctggccgctctccgggtgccagcgcccgccctcacctcgcgtccggggtcccggccctcacctcctgcccggtgccgtccccgccccccctcaccttccggcggcgctgccaaccgcctggaggacgctggggcgagcaggctctgaacccccactcgctcagccccagatccccgaggtcactgctggacgcaggcatttccggggagggggagcagaggggacgtccccccacctcccccgggcaggtgcctcacatcctttgaattcttaaagtgacctcatcgtgtttggaaacttgactgtttaattttgtctacctgagctcatattcttattaacagaaaggaataggacataagaggaaagaacacgcagcgcacgccaggatcagcctacgtgttgggtggcaagaacgcagggcctcggattgggtccgactcggtcgctggccggcagcgggcgtggccgggcccgaggacc

SEQ ID NO: 28950 - DNA, 81 bp, Homo sapiens
  chr2:66654136-66654217
  hyper
cgacctgccagtcaatgaagttatcctccgggagctgggaagaaggggcgcctcgcggggctgtgggctcggttgcgaacc

SEQ ID NO: 28951 - DNA, 951 bp, Homo sapiens
  chr2:66660936-66661887
  binary
cgggagaataaagagaaggggtgagggggaattaaagcccaggcaataggtgttaaagttaaaaacaaaacaaaacaaaaaacagtggttggttggagcctccgagttgtaggtacaggcagcttttgtctgaaatctcagcttccgaagcggatttctttttctctggcactgggaggtttcgccgagccgggttggggacgggaaagaggagcgcggggaaggatgtctggggtggtgagggcagggcttcgctggagaaagagctagtggggcgcgaggttcttacaggcccgggagaggtcgaggctggagcccctcggcgcctctaagacaaaggcagcggtggctgcagccggagcctagcactccggcagcgtcgcgccgcgccgcgccgcgccctgggcgcacggccgcctcaccccgagcgggtcggagaaagagcctccctcccagcggctccccggccccggctccgcccgcgaggtctgggctgctgcgagcccgcgccgggtttcgctttccgacgatcataaatagcttggtgtttgtaaacaggcgctgggggcacattccccgcgctcagctcattgttccctcccttcctctctacttcgcgcaggacgcctgggctggggctgggagccgccggggctaggaggtgggggagtccagacccgaagtgacaaaatgctagcattttctttcccccggccgggcgtccacctctaacagcaaagaaacctctaagctgggtctgcagaaagcccgagccacctcaaccccatgttctcaggactccttagcagaggctttcccaacctggcttctccctccttttcctccacgatcccgctttgacttttctccttgcagtgtttagttctgagaattcagtactttgcgcatcaccccctgccccgaaaaacactggcagaccccaataatttc

SEQ ID NO: 28952 - DNA, 391 bp, Homo sapiens
  chr2:66803754-66804145
  hyper
gggggctggagggcacatggaacgcgtgcacggcccactaggagggcgttgggaggagagtgcccgagtctggagccgcagccgggaagccgtagacagcaccccgacgccttaggcagaagctcctcaggatcactttaaaagctctgcaaactttccccagcctttcggataccctcaggcccttggcccaccggaaggcagtaaaaacgtaacttcatgctgcaaagctcccgggtaggcgcttggacgccgatggagagaggcgtggaactgggtagtggggcgccctgcctggctgggcacttttccttgtctcattctcgtctcccatgccatgccttacccactggctgctagcggcgcgtttcacttaaggtggccacggtgc

SEQ ID NO: 28953 - DNA, 271 bp, Homo sapiens
  chr2:7005163-7005434
  binary
cggcccgggcggcttcccggtccgggaagaccacggaactgggcaagtctggcaccaccgggtgcagcgggggctccgggacgggcacgacctgtgcgcagcccacctgcagccgcctgccgtcttgcacctcccagaggcgctgccacagctggccgcgcgggtcggcctcgaactcgcccaagtgcgggcgtggtgcctcctgacaggcgcccagcagctcgagcagcgcttgccgggtgtcagggtcatccagggggtcgcgcagcag

SEQ ID NO: 28954 - DNA, 728 bp, Homo sapiens
  chr2:7005469-7006197
  binary
ggcagtagcagagcagcctgagcagctggcaccgctggaaggggccgcggcgcagctggtgcagcaggcgctggtgcagccgcgccgcccggacccgggccccgcagccggcgtccggggtcacgggcacgcacagcgagtagctgcgctccgggggccccagcagcgccgccaggcgggggtcgggggcgtctgcgtcgccgggggcgtcggcgcctagggcgaagtgagccagggtgcagtcgggaagctccaggacgaagcggcgcggcggagccatggccccagcgcagaccccgcgccgcccgagcagcggccccgacagtggcccgcgcaggagccggcgggcgaaggccatgggcgcctcagcgacgccgccctcggccccgcctcggaaacgaaacctggcgggagccaggcgccggcgggaaacgaaacccggagggagccaggcgccagcgggaaacgaaagcgaagcgttgcggggaaacgaaagccggaggcccaggcggggcaggagccctggggctggggcgcccttccggcctctcctcctcgccgcgagatgtgcgcgataaacggccggcgctcgggagcagacgcttggccccggggccccaggtgcgcggctccgcgggcctgcgcggtccccaggcgccggctcccggggctgacaccgaatgaggccccgcgccgtcggccccaaggtagctccgtgtgcgttctgc

SEQ ID NO: 28955 - DNA, 292 bp, Homo sapiens
  chr2:7057762-7058054
  binary
cgcgcgtcccctttgtgtccgcatcgcccgggccggccgcggagcggggagggcgggacgcggcgctgcgcggccggccttggggctcggggcttgcggccgcgcctgccccgctgggtcctgccccggcgcccggtggcagcgggcggggggcagcgtcccgggcggggactcgcgggctccgttcagaggacgcccgccctgccctgcccgtgtccctgacctcgtccctgctctgctcctgccctgccctgcctctcgcaggcggcgcccgcgccccagggcagtgggc

SEQ ID NO: 28956 - DNA, 54 bp, Homo sapiens
  chr2:7058378-7058432
  binary
cgcccgagccccggagttccctgcgggtcttacccaccccagcctccggccgcc

SEQ ID NO: 28957 - DNA, 432 bp, Homo sapiens
  chr2:72371599-72372031
  hyper
cgagaggaaagaggtatcccggacagctggacccgaagcgggagtctccgcccccacccccacccccacacccccaccccgcgctcgggagcctctcggaataaatatttccaggctccgggccacgggctggcgagaccccgcggggtggccgcaggccaaagattatttatagcggtaagcggtcggtgcccggaggcagcaactacagatgggggttggagtttcctccgctctccggtgtggcccgcgcagggacccggcggccctcggaggactctgcagggcggggtcacgggcccagagccgcgattttcctaatgcattttgccctggaaataacggagacggactttggttgccgccctggagtttggaacccgagcgcggggcggggcgggaccgggcagggcgacccgcgcaggtaaccag

SEQ ID NO: 28958 - DNA, 355 bp, Homo sapiens
  chr2:72372237-72372592
  hyper
cgcaaaggggaggggcgccacctgtctagccgccccgcctgccagcccacgagcgtaccgactcgggctccagatctacccgctcctgcacccccgaggggacaactcagtccccctagcccgggttggtccccctcctcactttccttttttccacagaaaactacttccagctaaatgtgcacacacgccagtacagccgaaaagtgactctgcagaacccggagccctaatcacttttccacatgcgcctccggcccggcgcgcgacggggaacgagctgggagcgcccgcgcagccaggaggggggctgggccgcgggaacgctgtccccctcccaggctggaaggcgggg

SEQ ID NO: 28959 - DNA, 480 bp, Homo sapiens
  chr2:72372758-72373238
  hyper
tcttttcctctgtttttcttttctttcaacacaaaagttgggttgtgaattttccgaggtcgccgccgcctcgcccccaccccccgcctctgatctgcctaactataattaaagtgcgttttttgtggcattaataaagagttatttgtccgccgtttccacggtcttcacaaagagtactttcataggggcggccgctcgggccgcgagtccaatttatacaaaaatgttgtatttttagccctgggctctgtttagatggcgctcggtggaaacggagagcccttggaggtccccccgtaaaatctgataaatgactccgaaaaaataacgctgggattcagagggctctcattaaccccttaggcgctcctgtacacgtaccccctatttccctcctcacctccagatctagggccccgggttggagggatggggaggcttaggtttcctcctccctaacttctgtgcaggttggac

SEQ ID NO: 28960 - DNA, 128 bp, Homo sapiens
  chr2:72374248-72374376
  binary
cgctgccgacggcgccgcaggaacacagttttaaatcggcaattcaagctgccaccagccccctcctctcccgactcaattttcggctcccagcgacacagccaaccccagaaagccgagggcgactg

SEQ ID NO: 28961 - DNA, 259 bp, Homo sapiens
  chr2:72374932-72375191
  binary
ccgacaccagatccaagccctcaaagagcatgttggcggccgctcgggggattggctgtgccggccgcggcgggggaggggagggcccgacgggaggggaccggagcggcgggggaggggaggctgcggccgggggtcctggcacctccagccgaaacagagaaggaggaaggggccaagggaaagggagtggaggctgcgaggggagcggagagagggaggaaaaaaattgcctaaaagaagagaggaaacacgaggc

SEQ ID NO: 28962 - DNA, 132 bp, Homo sapiens
  chr2:72376427-72376559
  hyper
cgcacacacggtgcgcactcgcttagtgcctgcttggcttctaggctccttcccttcctcttttcctccttcccaggtcagcggtcccctcctccagctccgagcagtccctcctgggccgaagccccggca

SEQ ID NO: 28963 - DNA, 136 bp, Homo sapiens
  chr2:72376588-72376724
  hyper
actggcaggcgcccaaagccctcgaaactgtgccttagggtcccgagcttccaacccccgggatcccgctggctcttatctccagggacccctgagttaccagtcccaatccccctaagccagatcccccattccc

SEQ ID NO: 28964 - DNA, 265 bp, Homo sapiens
  chr2:72376765-72377030
  hyper
cgccatatgtctcttaccctacggaacctggaggttctcctgtccccgtcagcgtcccaggctgctgactctgcagcccctcctttcctgcacattgggacccccctcccctgcttttgtagtccccctccaccgcccgcagcgtcggggaaccccgatactggtccggcaagtgtcctgcgcggggacaaacgcggcggccccggtacccagaggcgggagaagacgggcacaaacgttcattgatacaaatgagtaaataaac

SEQ ID NO: 28965 - DNA, 224 bp, Homo sapiens
  chr2:73144495-73144719
  hyper
gcctggatctccccgcgaaggctccagtccggcttttgcctccgactgcgggctccctccccacccgccgtccctcgccccgccccgccccgccccccaccttggggcaggtgagcggcggccaatgggcgagcgcggggcaggtgcccgctaactcgcgcctcgcagcgctgggcggccggggctgggcagggcagtgcggggacaccgggggctggggtcgg

SEQ ID NO: 28966 - DNA, 183 bp, Homo sapiens
  chr2:75426248-75426431
  hyper
cgcctgcccgcggtggctctgaattcctccactttcaagcttcaggagacgtttgagttcagaagtctggagacagcatctctcttgcggtaaactgaaaaagggaaagaaattccaccggtcacagttctaggaagcaagagatcccccgcatttatgcacctgctgctgcctgcaactcct

SEQ ID NO: 28967 - DNA, 215 bp, Homo sapiens
  chr2:75426570-75426785
  hyper
atttttccttctcttttgctgccgctgccgccgcctgcagtttcgcgggcacctctcggttcgggttgctcagctcgcgagttagctgcgcacgaggcttttataaccccctgcagagacgtcactgggaaggggcagtacctgggctgcgtactcgccagtcccggtgcgcagcgcggcagctgcgccagctgttgacaactgtctcattccac

SEQ ID NO: 28968 - DNA, 54 bp, Homo sapiens
  chr2:75426875-75426929
  hyper
tggcttggaagtaactgacacagatgcggtccgcagctggaatcgtcgttgcac

SEQ ID NO: 28969 - DNA, 206 bp, Homo sapiens
  chr2:96011320-96011526
  hyper
cgcgcttataggcgtggagcggagctggatttctcccttggctaacacagcgggaaggatgaggtgcgggccgtagccgcgctgccgcgctgagtccgtccggcggggatgcccacagtgcgccgcgcccgctggagggcagcagagggccaggctcccggctcaggtctccggcctcgcggctccaaggaccccgggctccgccc

SEQ ID NO: 28970 - DNA, 130 bp, Homo sapiens
  chr2:96011564-96011694
  hyper
cgcggctttccctcctctaccagacccggcaggaagaaagccacccacaaacgaataagcatgcccttgccctgcccgtgcgtggcactccgcatccgcttagctcttccccgccgcccgaaggcgggcg

SEQ ID NO: 28971 - DNA, 579 bp, Homo sapiens
  chr2:96011863-96012442
  binary
gaccaacttctgcattttcaaagggggccagcctgggcccagtttaatctccggcggaggaccggggttgcgggaaatgcgccggggagtgagggcttcccggatcccccgccgccgactccgcgcgggccagcggcgcggggcgggccgggatcagcgcctccccgggagagcgcagccgccgccccctcctctcgggctcccggcccctccccagcccctcggcccccatcctgcgcgtgggagaaaccgccgaccgcgcggcctccaggggctggcggagcagcggtggcgacgcgccagactccgtcctgggctggcccgtgccgggcggggcggggccggctccctccgcccttcccgggcaggcgcgggggggccgcagggacgcctcccggagtggccgccgcgcctaggccaatgagcgcgcggggagcggcgatggaggctggggcggccgggagcgcccgggacccccgccgccgcgccgccgccgccgcgcccccgcgccccggcgcccgcggggctggagagggggcgacagaggcgcagcgcccgcgccgggcatggaggcgccgc

SEQ ID NO: 28972 - DNA, 48 bp, Homo sapiens
  chr2:96012683-96012731
  binary
gctgcaggggccccggtgcctccgaggcagcgcgtgggcgaggggtgc

SEQ ID NO: 28973 - DNA, 214 bp, Homo sapiens
  chr20:1207191-1207405
  hyper
agccctctctccccacgcccctctcccagggtccccgcccggtccccttccgaccccttcctccctcccttcgctccctccccgccaccgccgccaccctgccctttgcgggccggtttccacggagtggccccatcccggtggcttcacgttgcacgaagtcagttcaatctggagactgaaaaagcctccgggacgtggggcgggagggtgc

SEQ ID NO: 28974 - DNA, 951 bp, Homo sapiens
  chr20:13976116-13977067
  hyper
cggtgcctgcgcgggtgttaggttagcgcgaggcgtgacctagttgacaggctctgaggtgctgctgtggcggcgtccgcggggctgaggcgggtgggagccggagccgagcgcgggctgagggaggagggcggcgactggagagcggcgagcggcgagcagcgcaggacgcagagcctctttcactttttccctgctgagtgccccctcccacccctcccactccacacacaccctgtttgcccgtgagcctggggaacttgcagcttaaagccagccacccccacggcaacatgtaccccagcaacaagaagaaaaaggtgtggagagaggagaaaggtaaccggcccgtcgagtcctgggggtgcgggcggtgggggttagggtgggggcgggggtcaggctgtgtgtgccgcggcgccctccgcccgagctcccgcctcgcgccctcccggccggtgccgcctccctccggtgtccgtgtgtacacacgcgcacactcgcgcgcactccggcgtgcacgcgccgcccctgggcacctgcagctcgcgcacgtgtgggcgcacgcccctctctgttgccctcggcaccccgtcaccttctcccgaggcggtgctgcgttcgcctcgcttgcggcggggacccccaggcggcagccccgggcgcggcacaagttcctctgcaccgcagctgggacttgggcactgccggcctgggtgtcccgcggacaggtgcccgtcggcgggcgctcaggctgcagctgccgctgtgcctccgcgctccgtgcaccctcatttctttccttctcgcccctgtccccccagcccccgaatggcaaagcgtacccaccatcgggtgtttaccccttgtctaggtttccttccttcgctgccgcagcgtgacttttgaaacctggaactctaggggagccctaaaacgagcgtgttgtcc

SEQ ID NO: 28975 - DNA, 78 bp, Homo sapiens
  chr20:17209635-17209713
  hyper
acaccaacacaataaagaagccgaccttccttcttcactcccccccaccccaaacttggcaagacccaggacccaaac

SEQ ID NO: 28976 - DNA, 80 bp, Homo sapiens
  chr20:18039568-18039648
  binary
cgggtgcgcccaggacaaccggcacagcctcttgtgtcgctgcggtcgccctcctccaggaggtcgtcagacgtgtgcca

SEQ ID NO: 28977 - DNA, 94 bp, Homo sapiens
  chr20:18039936-18040030
  binary
tctgccctcaaggagtcaccctctctggactgaactctgaactccagcttttctctaagaaaaaccagctaagaacgaaaaagactttgatccc

SEQ ID NO: 28978 - DNA, 154 bp, Homo sapiens
  chr20:19192506-19192660
  hyper
cgggaggcccgcgagaagaggcgaggccagaggctgggcgcgggcagccaagcgcactcgcggcgccccgactccaggtagcacgtagagaggaggctgaagagcccctcggttttccgaaagtttccagcgaatccttcttggtgaagatcgg

SEQ ID NO: 28979 - DNA, 268 bp, Homo sapiens
  chr20:19193616-19193884
  binary
gagagcagaagggtgagtgcacgctgcctgccccgagtgggcgctgcggctccggcggctcggggctcccggggctgggcgcggggctccttcgggcggcccggccggagccccaggataagcgggctgggttggcggggggagtgggatgccaggcacgaggactccccctgccccacgcagaggcatggaggtggggaccctgagcgccagcagccagcaggcttaggcgtctggccgccctgggaacatttacctgtgcccgcct

SEQ ID NO: 28980 - DNA, 222 bp, Homo sapiens
  chr20:21686742-21686964
  binary
tcctggagaagctgcattctcctctgatccccagccttcagggggcagttgagcaagtctgggaagggagtgttccaagtagacgcgctaaaagtcgcgaaagggcacggagggctacaatgcgccgcgctccactccgcggctcctctgcgcccttgcccactccaagccagacccaggcggtttgcccttggactccgagctgtctggggacccacaggt

SEQ ID NO: 28981 - DNA, 102 bp, Homo sapiens
  chr20:22558954-22559056
  hyper
cgaaccccctgcaaaaaaacccaacgccttgagtctcagttggctgagcttaccaccagccaagcccgcccgggcgtccgagccctggaagggagaaggact

SEQ ID NO: 28982 - DNA, 381 bp, Homo sapiens
  chr20:22559242-22559623
  hyper
tttatttgagctcaaaccaagcgactgttgactttagcacacaaagcaaagatttcactgcccgctagtttaaaaatgaatattttaccaagatatcgatcagcgttataaaattcagttaagtacaatgggatcctggcaaaaaaaaaaaaaaaagaataataaaggaggggggaggcaatataatatctgtgcaaatttgctgaagtgtgacgtggcatggaaagtttaccctcctggaattcggatctagaatgtttttttcggttgtttacagactttgtttattcacagatcatggttgcttaaaccggcgcgcggaaagcgtggggaaaaaaggaaaaaaaggaggggggagagtctctgcaccccacaatgagt

SEQ ID NO: 28983 - DNA, 152 bp, Homo sapiens
  chr20:22559772-22559924
  hyper
gtattcggacagaactatatcttatcggccgggatcagtgaaggggggcgcgctaagtagtttaaaacgaccctcgcacaatgggcgtgccatacgaaacatagcaggttagggcagcgctttcagcctccattgtcccccactcggccccc

SEQ ID NO: 28984 - DNA, 331 bp, Homo sapiens
  chr20:22563824-22564155
  binary
cgttagcaccgcggctggagggtgcccagacctcccacccaccgcccaggcctccgcgtccggggaggcctccggggagccctttcgtccccgatggcccagtctccggactccgagtctgtttcattcagggagagtcatgatcgatcgcccttgggaaggtggcgagcggattgctgcttgggcatgtggcccgttcctagcccttctccacctcgcccagattctagaacaggggtcccatggagtactcccaagccagcaccccaaatacattcccctaccccagagtctccccaaactctcccaccagcatactgagctggcgccg

SEQ ID NO: 28985 - DNA, 48 bp, Homo sapiens
  chr20:22564188-22564236
  hyper
cagcaagcaacctgcgggacaacgcgcggggcgcctcgggctgcctcc

SEQ ID NO: 28986 - DNA, 982 bp, Homo sapiens
  chr20:22564265-22565247
  binary
cggtctccctccagggaccccctcccttgtcccagggaaactgcaaggcagtgcctgtgcggagtgcgggggcggctggaggcactgaacggggcaatagggaaagaaccgagacctgaaccacacgcggctgagctttgcaggcaaaaactttctttctctttgtccactagtctttgactctgcctccacttcagcccccaactcctacccatcttctcctcctcagctccccaccccctcgccggccgacctcccacccctccccagccgcgcgctgccaaacataactctgttaggatagtgcgtggctcggccacgaagaggatttggaggcgccgcaagtcaatatttgatcacaaagttaatattatctcaaggctaacagtgtgtcgtataaaaaagagacccatttgattccaaggagggcggaaaaggcggctgcccagaaaggctggggttgtggggcggggtgggggggtgccagcgagggaagcggtcctgaggttggggaaggagcgagcgccgccgctccacttccccctggaaaagacgagcgcttacctcgggctctgcatagtagctgctccagtcggacggctcgtgcccttccatcttcaccgctcccagcatactggaagccgagtgcatggcagtttaaaatttaacagccacaacaaacgaccagcaatcaccccccacccccaccctcttttaaaaaaaagtcagccaaagcaccgtcccctcctccctccctctctcgcgctccctctccctgggctccactccctctctctccctgggcaggccggaggcggtagttggaagtgggcgggaggtgggggggggcgaggagcggaggaggcccaggccagcgccccgcggtagggagcacccgccgccgccgcgctcacgggctgccgggtggcggctgaggttggcagtgccgagctgccccgaggcggcgggaagcgcgcggcgc

SEQ ID NO: 28987 - DNA, 69 bp, Homo sapiens
  chr20:22565361-22565430
  hyper
cgcggagcggacaagtgccgcagtgacgtgggaggctggtgatatagcgcggcgcgctggcgcgggcct

SEQ ID NO: 28988 - DNA, 144 bp, Homo sapiens
  chr20:22565459-22565603
  hyper
gaataatcagctcacacctaggtgagaggtagccgcagccggcgctccgcacctgcccctcagcgcctgccgtccgccccaccgccgcggcgccccgcactcctgggcgggccaggggagcgggctgggcgggcgatcgggcac

SEQ ID NO: 28989 - DNA, 319 bp, Homo sapiens
  chr20:22565634-22565953
  hyper
cgggtccacagcgagtcccctgaggaaggagggacctgggaggaaaccaccctctggggcggctccggcctccagcccccgccccgtctcatcgcgccgggcgcccggtgcgcctgtcggagggcgcgtccagcctcagtgcccggcagatccctatgaaagccggatttatttatgccgggtttcttcgctctcagtgctcattctctgtcaaaacagcaagtccatgacagccaatttgcaaagcgctgtcctatttagaaaaactacgtacacacctttaactcgcccgctgctgctcctgcgaggcccctccctg

SEQ ID NO: 28990 - DNA, 260 bp, Homo sapiens
  chr20:23030486-23030746
  hyper
ctgccctggcgcagggaggttctcgggcggggccgacaggggcaggcgccagggaaggccagcacccctgtaacaagacgactgtccccgcccaccactcgggcccccacgcgtgcagccctctttcatctcttggtcctcctttctttcttttcatacatgttacagccacttccaaggaaagcctggattgcaagagctctgggaaccggagacttcagagaagagggctttgaatggggagtgggggaggtggtgca

SEQ ID NO: 28991 - DNA, 265 bp, Homo sapiens
  chr20:23617984-23618249
  binary
cgcgctgcggcgcagctcgagctggctcctggaagctgatcttaggcgccgggcgcggacctgacgtgtccgtgcggttccaggccaggccagactcagggcattcccggacacgcccgccaagggctcgggggtgacagcgaagaccgggaacagggtccgggtgagaagcccaggcgccggagaggagcagcacggggtccgggagcagcgcggggggaggctgggacggcggggccggggcttcggaccctgcggggggcgg

SEQ ID NO: 28992 - DNA, 68 bp, Homo sapiens
  chr20:23618645-23618713
  binary
caccccaccgcggcctgcactcccttttccggaacgcctcgtccctcccacctcccttctccctcccc

SEQ ID NO: 28993 - DNA, 205 bp, Homo sapiens
  chr20:25065526-25065731
  hyper
atctgtcttcatcagccaggattacccgggatttaactaatgaataaaggttcctcagctcattattttctaaggaagatttccagcccctctgtcgccgaccgcgaatgtgccttggcagcgccaggctgaggttggacctgctgtgagtggctcagcaggcacccctcttgggcttctcagagccgcggctggccaggctggc

SEQ ID NO: 28994 - DNA, 151 bp, Homo sapiens
  chr20:25566244-25566395
  hyper
gggggcggggcgagcgaacgggagagggggcgggtcgggtccgggattgcggggcggggtgggggcaaggcggcctccgcaaatctcagggcggctctggccagtttggagcctggggtgacccttggagctgacctcgctggtccctgtc

SEQ ID NO: 28995 - DNA, 59 bp, Homo sapiens
  chr20:25566411-25566470
  hyper
cggagcttggcggttcgcagctctcggggtagcatcttctggaaacaagcccggaggcc

SEQ ID NO: 28996 - DNA, 37 bp, Homo sapiens
  chr20:37358242-37358279
  hyper
ccaggtcgaggtttgttcgaatctctcccctgggggc

SEQ ID NO: 28997 - DNA, 115 bp, Homo sapiens
  chr20:39318166-39318281
  hyper
ccccacctctaggccaaatcaccgctttcccctcctcgcgcactctcctccctcagttccctttgcaccccacccccatcccgtgtcacccccaaggaggctcagaatgagcgcc

SEQ ID NO: 28998 - DNA, 96 bp, Homo sapiens
  chr20:39318288-39318384
  hyper
cgcctcctgggccctttgttcccaagcggcccccgcccagtgggcgacgctctgtgtgtcctcgcggcttctggccgtgtgtgtcgtgcgttcctg

SEQ ID NO: 28999 - DNA, 463 bp, Homo sapiens
  chr20:39318415-39318878
  hyper
gggagggcgggctcgaggctccgagagttgtgttcagacccaactcttaacctcaggggacctttctcaggccaagcgagggcccctcctggcgggtgcagtcgcagagccctgaggttcgactccactggccccgccgctccccgcgttcaccccaccgcacaatgttcacagtgaaggcgacgggaaaagcagcagcccaaaggctctgaattcctcttccccgccacacgcacggaatcctgagcccccggagcctcggggccgaggccggcccgggacggtgctccgagtagctctccactgctggggagccggccctgtttttgtttgaacgttttgtaacgattaagcagatcccggcgtcagcccgccgcggagaggctcaaacaggcataaagtgcgaccccaagtggccactgtgcgcaaaggcgccgcgaccgcccggcccacggccggaagg

SEQ ID NO: 29000 - DNA, 540 bp, Homo sapiens
  chr20:48100505-48101045
  binary
gggaccgcgcatcgtcccggccgcccgggcgcccccgcccgtgggcagcggcggtcccggggccgggctgagccgggcctaccccggccgggcaggcaactcgcccgggctgcaggcgccgcggggccggggcgcgctctccgaggcggggggcgccggcgggcgccgggggcgcgggggcaggaccgcggccgcgcggcacctcctccacctcctcctcctcctgctcccgcggcggcggcggcggcggctgcctgggcgagatcaacaagtcggggctgagcttcggctccgcgctcgctgctattctgtcccgcacttcggagcgcccggagccgggcaccaaggcaggacggcgccacctgcgggtcggaagcgagcgcggcttaactcctgcctgcccggcccagcctgccggggaggccgggggcgggctccgggatcgggccaaggagacgcgcgtggccgtgcatccctctccacccaggccacctgcacagctggcctcgcgatcccgccttccttcgtcccgtcaacaac

SEQ ID NO: 29001 - DNA, 571 bp, Homo sapiens
  chr20:50383675-50384246
  binary
cgccgcgtctcctgttccgagcaactgacgctgcaataagcggccgccaccgggaaatgcccagagaggaccagacgcccgaggaagggcggagcagagcggccgcaggccccgcccaacaccgcgctcagcctcccgcgggctccagcctcacctgcgcggcctgtggagctgcacatctccaggccccgccccccagaactctgattggcgggtctaggcgggggccgggaaatctgcatttgcaccagcgcccacccccgtccttcccacccccgcccctcacgcccaggtaagtctatggcaggcgatacgagagccccgcaaacctcaacgcgtcacgctgccatcctccgaacaggaagacggcgaggcgcaaaataccaacccgtcccctcttcccaaatgcagaaaaacccttgcctgttccgcgcctaagctgccctcggggtctcctactgcgggaagggcacagcaggtggcagcccctgtcccagccgtgggattccttccccgaaattgtggggggagaacacaaggggtagtgtcaccaagcggccagtaggagacc

SEQ ID NO: 29002 - DNA, 250 bp, Homo sapiens
  chr20:50384400-50384650
  hyper
tgagcatatctgggctcccgagtaatgctccaagcgcagagctcggtgtgacactgaccaaattgttacctcagatattaattacggacagatattaattacggaacaataaaacggtgagaaagcacggctgatccgaattccgcgagtgtgtaaacagcactggggcgggcccggcttctcggggtttctaaaggaaggtgggcaaggaggcccaggcaaccgggcgctcgaaccccaaagggccggc

SEQ ID NO: 29003 - DNA, 244 bp, Homo sapiens
  chr20:50384928-50385172
  binary
tggccgccgcgccccccgcgccgcctgggccgccgcccggtccggcctccgcgccgccgcccgccggcgccgcgccgccccgggggaggaggcggcggcagcgggcgggccgggcccgcagcgagggggcgagctcgcgagcgccgggccacgcgcggagcgcccgcgcggcccgaccgacggacacgggcgcaccatgggcccgagctccgcgctgcgcccgctcgctccgcgccgcgccgcg

SEQ ID NO: 29004 - DNA, 87 bp, Homo sapiens
  chr20:50385230-50385317
  hyper
gcccccggcccgcgcccgcgccccccacgcgcgcccacccggccacgcgccccccgcccacgcccgccgtgcgcgcaccctgccacc

SEQ ID NO: 29005 - DNA, 61 bp, Homo sapiens
  chr20:53092081-53092142
  hyper
ccccaccccttcctcctctttcctcctcctccttcctcctcctcctcctccttcttctcct

SEQ ID NO: 29006 - DNA, 276 bp, Homo sapiens
  chr20:55203829-55204105
  hyper
gggaactgggcgtctctggcgcactggggctccagctgcatgatcccagctcagaccttaagcctcagtggggtgtaggtgggatgggatgtgtttttaggagatgaggagaccccggttgttgagtcgctccccaaatgcgcagtttcttaactccaggtgacatccgtcttttggaggaacgagtgaaggccgtttaggcgaaagaggggtgggtttcagtatttggatcccttcccccagctctgccaatctcaggtgtgtttacggtggagg

SEQ ID NO: 29007 - DNA, 217 bp, Homo sapiens
  chr20:55205088-55205305
  hyper
gaagcacgaaaacaaccgaagtttggctttcaaaagaagtgggggctggggagtggtggtgggggtgcccgaggccagatggggccgtaagagctcgcgagtgctccagcctgtcggacaggttgagctagagtttcggagagtgggagggaagaaggaggcggcgagcgggaagaggaagaagacgcaggcagcgctaggcgagctcaggggcgcc

SEQ ID NO: 29008 - DNA, 181 bp, Homo sapiens
  chr20:57875361-57875542
  binary
cgcgcgtgtgcgtgtgtgcgcgcgctctcgtggccttccggcagctggcagctgtcccggcccccaccccaccctaccccaccccacccagccgcgccacgccacgccgcccccgcccctcgctgtcctgggtgcgcctcgggccgctgcgctcctggccagctccccccagcgcctggga

SEQ ID NO: 29009 - DNA, 220 bp, Homo sapiens
  chr20:57875889-57876109
  binary
ttttcgggctcacagtgacctccgccgcaggtaagcgcacggggcggcgcgcctctcctggcgcgagcgcacacaaaaggacccagggcgggggacccgaggcgcggagaagatgtgcgtcgcggggagcaaactcttgcctgggctctgcactcgtgaagacgcctgggggagggctggggagcagaagcggcgcgcaacgactacccgcacgggctcc

SEQ ID NO: 29010 - DNA, 74 bp, Homo sapiens
  chr20:58180712-58180786
  binary
ggcagagccgccggcagggagacgaagggcgtgcgccaggacagagcccggtttcgtgacagcgtgtggactcc

SEQ ID NO: 29011 - DNA, 331 bp, Homo sapiens
  chr20:60563069-60563400
  hypo
cgaaactaggagacaataagatccgtggaccagggactgacaggaggggagggatgaacgggcagagcacagaggaattcagggctgtggaacgactccacatgatacggtactggtggaaacacgtcattctacagctgtcaaaacccacagaatgtacacaccaagagtgcaccctgatgggaactatggaagctgggtgagaaggacgtgttgacgtgggttcatggattctaacaaacgcaccacccggccaagcgggggaggctgtgcacctgcagggaggagggtatgggaagtctctgtactaaaaaagtcccctcctttttcc

SEQ ID NO: 29012 - DNA, 248 bp, Homo sapiens
  chr20:61810310-61810558
  binary
gggtgcgtggggcggcgggctagggtgcggcgctgtccgcggtgctggcggcggggcggcccccgcgggacgggagggcggccaagtgcggccctcgcccccacagcgggcgccctggacagttgccacggcaacgtgggaggaggtggggcagggtctgaggtcaccgctaagtctgcccttcctcgggccgctgcgccgcggggcggggcggaggcggcgctcgctgtggccccagagcagccccc

SEQ ID NO: 29013 - DNA, 284 bp, Homo sapiens
  chr20:62578699-62578983
  hypo
cgttcccttgcaacccggcacactctctgggcagccaaatcgctgccatgctgaaggctgggtgcccaaggagacgtgagggcggcgtgtgggtggaggcgagaccagaccaggttgtgcgcacacaccgagggtgaggtccccagacaggaccaggctgaagggctcagggagagaggcagagggctcagccaggacctgattctcctgcagtgacagcaggcccagcacagtgcctcggcctggcctctctggctgtcagagtgccggatgggggaccctgc

SEQ ID NO: 29014 - DNA, 428 bp, Homo sapiens
  chr20:6747996-6748424
  binary
cgggcccagcggggaaataagaggccagaccctgaccctgcatttgtcctggatttcgcctccagagtccccgcgagggtccggcgcgccagctgatctctcctttgagagcagggagtggaggcgcgagcgccccccttggcggccgcgcgcccccgccctccgccccaccccgccgcggctgcccgggcgcgccgtccacacccctgcgcgcagctcccgcccgctcggggatccccggcgagccgcgccgcgaagggggaggtgttcggccgcggccgggagggagccggcaggcggcgtcccctttaaaagccgcgagcgccgcgccacggcgccgccgccgccgtcgccgccgccggagtcctcgccccgccgcgctgcgcccggctcgcgctgcgctagtcgctccgcttcccacaccccgc

SEQ ID NO: 29015 - DNA, 294 bp, Homo sapiens
  chr20:6748470-6748764
  binary
cggctacccgaacgttctcggggccagcgccgagtggatcaccggggaccgcgaggcacccgcgcgccgcagaccccgcgcgggctggagcacccggcagagcgcgccacagcgccgtggcctctgctgcccgggctgcgccagagccgcggacgggcgcgcagagcgccggggactccggagccgatccctagcgccgcgatgcggagcacctactgcaggagatcgggggcctgggacgcgctggccgaggtgtgatcggaccccaggctagccacaaagggcacttggccc

SEQ ID NO: 29016 - DNA, 587 bp, Homo sapiens
  chr20:6749063-6749650
  binary
ggagccggccccgcgcggggccacgcgtccctcgggcgctggttcctaaggaggacgacagcaccagcttctcctttctcccttcccttccctgccccgcactcctccccctgctcgctgttgttgtgtgtcagcacttggctggggacttcttgaacttgcagggagaataacttgcgcaccccactttgcgccggtgcctttgccccagcggagcctgcttcgccatctccgagccccaccgcccctccactcctcggccttgcccgacactgagacgctgttcccagcgtgaaaagagagactgcgcggccggcacccgggagaaggaggaggcaaagaaaaggaacggacattcggtccttgcgccaggtcctttgaccagagtttttccatgtggacgctctttcaatggacgtgtccccgcgtgcttcttagacggactgcggtctcctaaaggtagaggacgcgggccagggcccggggtgggtggtgggtgggagggggatttgggcagccactgcggtagagcccttccttacgtccaggccagaagtaaacagacccctctccagtccacgtgcaac

SEQ ID NO: 29017 - DNA, 339 bp, Homo sapiens
  chr20:9048825-9049164
  binary
cgtttagaacactgcaggacgcattgtaggcgctgtatgggtttatgaaaccgaatataaacaaataagcacgtcccccacccagccaacggctttgggggccccgttctggccagtcctgagcccctccacacggcccacggcgggctgcgggtctcccatccgaggagggtgccgcttttctgcccccgctccctgggttctgcgcccagcgccatcccgtgcgcccccgacccttgggcatggggcacatgccgcggggagccgccagggagaccccagaggagcgcgccgcgggccggcttccccggatgccccacccacctcctcttggcgctg

SEQ ID NO: 29018 - DNA, 230 bp, Homo sapiens
  chr20:9049238-9049468
  binary
gccctgcgggctcgcggcaactgggcggccggcccggcccctgcccacccccagcccagcccggcgcgccgcactgggcatgctccgtagcctgggcaggttggggctgcgaggcgacagctcgggctctggagccgggaggcgagaacgaggagggaggctcgggggcaggggaggaggaagcggctggccgctgaggggcggcggggcccggagcgggggacgcgcag

SEQ ID NO: 29019 - DNA, 111 bp, Homo sapiens
  chr20:9049670-9049781
  hyper
aggagggggtggtggcgccgcgccgggagcagtaagtgagctgcaccgccaacaagatctctcacacacagacacacacacgcacacgcacacacgggcgcgcacacacac

SEQ ID NO: 29020 - DNA, 54 bp, Homo sapiens
  chr20:9496982-9497036
  hyper
aacccacttcaaagacgcagtcagtggtgagtggaggctggcatggctggggag

SEQ ID NO: 29021 - DNA, 240 bp, Homo sapiens
  chr20:9497109-9497349
  hyper
ggtcccaggccaagtcttccctcggcttgctctttagggcggaagaggcgggagcgcccatgagtcttctgggtctcaggccttgtagatccgccaggaaccgcaggcgtggggacccaaacgtcacccgtggcctgatcctagataagaagtcccttgaaggcctgtcgttccctggtgcttcaaaacgacctcttatgatttggcctttgaaggaccacggagaagggcaaagctgca

SEQ ID NO: 29022 - DNA, 118 bp, Homo sapiens
  chr20:9497378-9497496
  hyper
tttcttatgcgctaaaactgcaagggggcagtgcgactttccttttcagtcaggatgtgatggccttcagtgtctttttgcgcatggcagcatggctcgcacgggatattcagtcatc

SEQ ID NO: 29023 - DNA, 106 bp, Homo sapiens
  chr21:28215837-28215943
  hyper
cgtagcaggaaggaccggcagtgactttcaacagtgcttgagagcagaattatggccgcgagagggagtgcaaactgggaggcggggcaaacccgggaaagacctc

SEQ ID NO: 29024 - DNA, 227 bp, Homo sapiens
  chr21:28215997-28216224
  hyper
tataagggggaaaggggacagaagtctgcagaacagagatcctagcgtagccgctcagggtaccttcccaggtcaccattgctcctctgccctctccacatccgccctcccgtgagcgcaggatgcacgcacaggcagcggttacaaaactcagcgcaacgttgcaacccgcacaaaaggcgcacacaaaatcattaaaaagaaatacacagagtggaaagaactcg

SEQ ID NO: 29025 - DNA, 112 bp, Homo sapiens
  chr21:38071905-38072017
  hyper
ccccccgcacctgcccgcggcccactccgcggactcacctggctcccggctcccccttccccatccccgccgccgcagcccgagcggggctccgcgggcctggagcacggcc

SEQ ID NO: 29026 - DNA, 311 bp, Homo sapiens
  chr21:39288394-39288705
  binary
caggtccggcttcccggcgtccgcgggtctccacccctccgcccgcccagcctctccagccaggtgcggccgtctccggactggctccctctggccgagcgcggagagcagggctgggcgctggggccaagggaggggcggaggggcgcgcgtttgggcagggacgggggagggagactgggtggaatgaagtggggaaagataagagtggcagaagaaaaaaaaaatccccggttaggagaaaagtggtggaccacgcagagagacgtcatgaaatccgcagattcaatgaatgctactcaattccagcc

SEQ ID NO: 29027 - DNA, 280 bp, Homo sapiens
  chr21:39288901-39289181
  binary
aggaccgggcttggtgggggcgggctgggcacaaaccaacgtgcatcccccgccactggaaacgtgggtgctccatgctgggggaatcttttgggtttcggtccccgaccccccagtcccaacctttctcccagtgccactaagtaagttattcccggagaaacgcctggaaagcaggaaagagccgaagctcggggagcagttttgtctgctggttgtaggggttcggcttttagggttttgtgagataaggaaaaagaggctctgggcactgcctccc

SEQ ID NO: 29028 - DNA, 39 bp, Homo sapiens
  chr21:40032283-40032322
  binary
cgagccgtccctcccggcgctggacgccccacctgtccc

SEQ ID NO: 29029 - DNA, 159 bp, Homo sapiens
  chr21:40032367-40032526
  binary
cgctgccttcctccccgtccccgcagccgctgtagccagcgtgggagccgggcaggtcgcgtggggcgctggacttaccgagaggttagcgccgccgtcgggggagggcgtgtcccgcacgtgtgtgtccgcgcgtgtccgcgcccgcgtgtgccagcg

SEQ ID NO: 29030 - DNA, 65 bp, Homo sapiens
  chr21:40032848-40032913
  binary
gggccgcgcgggcaggtttggacactacgcgccctgctcgggtttaggacgcggctggcggctcc

SEQ ID NO: 29031 - DNA, 136 bp, Homo sapiens
  chr21:40032971-40033107
  binary
cggaggagcagaggctgggacggccggaggagagagtccggccccagcaggaaaggaacccagcacgcgactactggaggggcgaggagcaagggaaggaccagaggggaggagagggggtcaggggagggaaagt

SEQ ID NO: 29032 - DNA, 76 bp, Homo sapiens
  chr21:40033358-40033434
  hyper
gccggatacagccgccgggacgcggggatgccgagggcaccgcggcctggtctgaccgacgcacgcggtgacagcc

SEQ ID NO: 29033 - DNA, 141 bp, Homo sapiens
  chr21:40033449-40033590
  hyper
cggcgtctgcaaccagcagcctccaaagggtgcagccaggaggctcagcttgtccgcctccggggctcggggctaagccccttccagaagttttcgtttctacgcgaattccgaccgcaaaatccagcttacctgagcgcc

SEQ ID NO: 29034 - DNA, 820 bp, Homo sapiens
  chr21:42879240-42880060
  hyper
ccggcacggagcgcaagcggaggagccagaccggctcctcccgggcgggttcctgccggtgccgggtgtccaggaggccccggccctgatcgccgccagcgggtcgccgcaacggggcctgagtcgcgagcagtccctccccgagactgactggccgttcgcacctcgcccgggggccctccagcagcctggcccagcggtccccgccgcgccggccgtatcgttcccggcatctcagcgagtttccagtttctccctacctcagtagggaaccaagaagcagaaggagttcaggtaacactgcgggactgcagagatttcccccaaacaaagaagccaaccgacagcactcccagtcctcctccccaaagagaaaaggcgcaccggtgctcccaggcgggggccgtggagggcaggcggactaggagccagctttggggaccccgggggactctcttccaccaactggctagggactcgcaggaccacctgccccaacctcgcgatgccaagccaacaggggcggcgagggctctcggccgtgcgcaaggggtcccaggcgcccagcactctcccagcaccccgggaggcgccctgcccggctggccccagcgctcgaccctcgggcgcactcacctgccgcgccgcgctcctcacacccgctttcacctccgggcggggcagggggcatcggcgggtcccaggcgcccaggttcccctccccagcccggaccccgagccgggaccctggtaccggcgccgctcacctgccgcgctccaggcggcgctccccgcccctcgccctccgcctccgcctccg

SEQ ID NO: 29035 - DNA, 122 bp, Homo sapiens
  chr21:42880104-42880226
  hyper
ctcgctttaatctcaggaggcggtgtcccagggtccagggcgacacccccaagcgggtcgcgggtcaccctgggcgggcgggggcgggggcggcgggaggaggcgtttcccaagggaagtcc

SEQ ID NO: 29036 - DNA, 143 bp, Homo sapiens
  chr21:42880260-42880403
  hyper
cggagggacccataagggactctggggcgcttcccgggcccggccacagcggccaacctgcccctctccggtccgcggcgcagcgctgcccgagggctcgagtttgggttaaggaaggggattctggggagcgctcctggagt

SEQ ID NO: 29037 - DNA, 114 bp, Homo sapiens
  chr21:43186321-43186435
  hyper
cggcgaggaagcgctgggcggacggatcaacaccccgggccccgtgccggaccccactgccaggcccgagccccggagctccaccgcgcaagcgccgggcgcccgggaagcctc

SEQ ID NO: 29038 - DNA, 107 bp, Homo sapiens
  chr21:43186592-43186699
  hyper
cgccccggtgggtcccgggcgggccggacgcgcctcccaagggcgcgggtccgaggcgcaaggcgagctggagaccccgaaaaccagggccactcggggagtgtcag

SEQ ID NO: 29039 - DNA, 493 bp, Homo sapiens
  chr21:43186889-43187382
  hyper
ttggtttcccccccgaagctgctccgggggtgagttcgggagagagaggcaggaccccgggaccagagcaccccgaccccgaccccagcccgggccccagccgccccagcgccccgcccgggccgctcacctgtcgtcgacgtgcaggctgggcgagcacttgatggccagccaggtcttccagtggacatggcgcaccttgtacacctgcccgaagccgcccgagcccaccttctcccagcccgtgaactcgcccgcgtcgaaggtgcgcagcagcgccagggcccatggggtcccgccgtcgccctccatcgcgcacgtctagccagcgccgcggcggctgcccaggtgcccaggtgcgcgctccgccctgttacgtcacttccgtaggtcgtcccgcccccaggccccgcccacttacccgccccccgggcgccctctctgccagcgcccggtgactgcggacggatgaatagacgctgcgggtcactgc

SEQ ID NO: 29040 - DNA, 220 bp, Homo sapiens
  chr21:43290534-43290754
  hypo
cgctgggcacacggcctcgtgacaatattaaaagcactcagggaaaacccactaacggaaaaagcaaacgtattttcaaaaatatgcgccgcagaaccatcctgaaaaatgctgtgggtgggcttcagggggctagcgggtgggtggagacggactctgactaagtcagtttgtgacaccctgcagattcccactctggagtcacgacacacacaggcac

SEQ ID NO: 29041 - DNA, 236 bp, Homo sapiens
  chr21:45628864-45629100
  hypo
cgcctgcacagatgtccacctgcatgaatgcccacctgtgtccacatgcacgaatacccacctgcacagatgcccacctgcacggatgcccacctgtacaaaggcctacctgcgtgaatgtccacctgcatggatgcccacccgcacggatgcccacctgcacagttatccatctgaacagccctctggtgcctccttttgcttgcacatgttcaaatcctcccagtcctacagtc

SEQ ID NO: 29042 - DNA, 225 bp, Homo sapiens
  chr21:45875732-45875957
  hyper
cgggccgcgcgcacagggcttggcttctctgttttctcggtttccttcttcaggcagttgaaagaaaaggcgcggttctgtgcccggtgcgagccgcggctcctttagggctggcagggaagggcttgctgggttatgacagtttttaggggttgtcggagtcagccaggcgttggctgctggagtagcccctggcgcgcgagcgcccgctggtgcccggccacg

SEQ ID NO: 29043 - DNA, 95 bp, Homo sapiens
  chr21:46825731-46825826
  hyper
tcacggcctcgtccccgcagcgccgggtcccgggactgaccgcgggcggaaggcggcggagcgcggggcgtcgtctccgcgtttccaacctgttg

SEQ ID NO: 29044 - DNA, 143 bp, Homo sapiens
  chr21:47063290-47063433
  binary
cgcccactactagtgaccggcccgcccgttcgaggccccgcctcctccccgcccaatgctcggccccgccccgcgcgtcattgggccaggtccccgccccgcccccagccccacccccgcccctttgactggagttggctttt

SEQ ID NO: 29045 - DNA, 241 bp, Homo sapiens
  chr22:25348202-25348443
  binary
cgcgaggaggcgccagcaccgcgcacagaccttgcccgcccccgggccggcaccagcagcccaggcaagtcagtgggcccacatttatggagcgcctcctgaaatcctgggttgcattaggctctcggggtcgccggctgggcagcgggtcggtgccggtggcgggggatcctggctggtgactggggaacatccagggaacgcgggagggtacccggagcaaagttcccaattggacaga

SEQ ID NO: 29046 - DNA, 788 bp, Homo sapiens
  chr22:25348485-25349273
  binary
tgtccaagcgagtcgtgacctctgacccgccggagaggtcccaggcccaggcgccactgcggactcgggtcctgcctgctctgctcccctccgcgcaggcgcggccggcggcagttcccatggtgacgggggcgcgtccccgctcgaggccccgcccccagcaggctaggctgcgcggggctgcgggctcccagggcaggtgccgcgggctgcgggcaggtggcggcgcggcgcgggctggcggtggctccacggtaggttgcgcagcggctgcgggcagtgggggccggctggccgcctcctgtccccggccgacgaggtagctgggggtgacggcggctggcgagggccgccaagtttctgcccggccgaggccccgggagaaaagttggcaaagttggccggggaagaggcggggagccggaggatttccccagactccgggtctgcagggagggaggatcccggtttgggagccggggaatccgtctcccgagacttgagagtggatcccgcgggaagatcccgcacagggcaaccaatggatcacgtgccacctggttggcgacttgggagtcgatccctggaggggatcgggcgctggaggcctggggtcccactggatccccagtcaggggtgacggcgaagggtgattcgagactgggagcgagaggatcaatctcctcccatgccagcctgagccttgggaatggattcagagagatcccgtggctaggagctgagggatcgctggagatctgggttactcagcctggagctgctaggg

SEQ ID NO: 29047 - DNA, 395 bp, Homo sapiens
  chr22:25349348-25349743
  binary
gtcgaggggagcccggaggacagcgcggtggttcggggggcgtgagaggggcggcgcgcggggcccctcggacgcggaggctccggacacgtcctctcggcctggcctgcgccccccctccgctcgtcttcccagggcggaggcgccctgatgggattaagcctcagtccccctgttaccaggcaggcccgcgtggtccccgccccgatggcggcgcggcccacccgggctcacgggtggggccctcgggatgggaagcggctcgttgacccccacccgagcctgaccttttcacaccctgctggcacaaactcgcctgggagtggggacgccgcgccttaaaaccctgctgtttgtccagtcccggagcaggcgtgtgacctccaccgcgcgac

SEQ ID NO: 29048 - DNA, 49 bp, Homo sapiens
  chr22:31198444-31198493
  hyper
cgtggaccatccgagggcccctcccctgctgggtccaggcaaagggccg

SEQ ID NO: 29049 - DNA, 395 bp, Homo sapiens
  chr22:31198752-31199147
  binary
gctccagggggcggagggagcctcctcgggcggtggggaggaggctggaggaatgaggacgcagcacggcgcgcccttgcagcgctcaggctgacgggcgggcgggcggagcgggcgcacggctcctctaggtccggctgctctctgagctcgcgggctggacgctgtccgcggtgctgaagcggcgcccgcggcagggaggcggacccggagccgccgggcagcacacacccaatcccgggaccgccctcctcccaggctcggagaggcggtggcagccggcactgcacccagatggactgagagcgcggcggcgggaaggcggcggcggcggcggcagcagcagcagctgcaagagccctcgcagcctcggggcaggacccacgtccacaccc

SEQ ID NO: 29050 - DNA, 82 bp, Homo sapiens
  chr22:32571858-32571940
  binary
cgacttggggagggcggacggcaggaaacgcgggaggcgaaggcgaggctgctcagcggcggctcgggatgcctccagcaac

SEQ ID NO: 29051 - DNA, 127 bp, Homo sapiens
  chr22:39954151-39954278
  hyper
tcactggggcatttatttatttatttctggggatcgatcctccccacccgcgcgtacccgtcaggtgagccccccatcccgcgccttcggggccatgccttgggaggaaggacaggaaactttgacc

SEQ ID NO: 29052 - DNA, 192 bp, Homo sapiens
  chr22:40812801-40812993
  hypo
cggcaccttccctggtcctctcgcccaggccttggagacgggagggctcacagccaccactgcatccacagtgcttgcccaagactggtcacgcacggaagcattcaataaaaacaaaccaacccagggctagagacacctatgaacagagaaggccgtcagggaggcagcaggggacctggggttacctcc

SEQ ID NO: 29053 - DNA, 203 bp, Homo sapiens
  chr22:44258078-44258281
  hyper
cggcgcggggctcaccggacttggggtaggtgacgatccacacgtcgctgggccgcaccgggaagttggcgatctcctccatcttcccgcggcagaagggcggcagccgcacgccatggaactcgaagtacttgctctcgaactcccccggggtgctgggggtctcggcctcgctctccgccatgccgccgccgtcgccgtcg

SEQ ID NO: 29054 - DNA, 41 bp, Homo sapiens
  chr22:44258533-44258574
  hyper
tcacccacccgctgccggggctgacagagaccctggcccgc

SEQ ID NO: 29055 - DNA, 304 bp, Homo sapiens
  chr22:44727058-44727362
  hyper
cgccggcgcggaccccagtgccgaacaccggctgtcccgcacggttcctgcccccggacccttccccggtcgtccccagcccctttctaaagagccccggacccccgtcatatgccccttacccgcctctcccaaagcgcccacccttcaccccttctccggagccccgcgccgcagaccccgccccccactcgcccagaccctcctccgccaggagctccgccccggcccctttccccgccgctctcggaccccggcccaggcgcgcccctcccccgcgcggcccccgccctgcccgccccgg

SEQ ID NO: 29056 - DNA, 649 bp, Homo sapiens
  chr22:44893737-44894386
  hyper
cgggcaggagggtgaggggcggcgtggagggcccgcgcgtgggtggcgaggctgcacaaagccccgcggcgcccgccccgcgcccgcccgggggagaacaaagggggctgctccttggcggccgcgggcctgggggccaccacagtggcggggcccggccgggcagggggccgggggcacgcgtacctggggtctcgcggttcctccgcggctctgtccgccgccggccgtgaccaagatggcccgcgcgggggacgcggccaggccgatgaatcaccgcgcggaccgccgagaactgcttcccggtcagcgcagccaagcgacggcgctggcgatggcggcgggcggcctccggcaggtgcagggaccgggccaggccggggccggggcaggggcggggccggggtcgcggcagagggcgggtcaccgcgcggcctttgtgcgggcggggccggcgcggtggcggtggcgggcgggccttaggctggccccgctggttgccatggataccgaccgctcccgcgcgtgcggagacgaccgctgccccgcccccggaagtgatgcacaaagtcccacccccccccaccccccaactcgggctgctgccaatcggggaagactgtagttgctgcggcgtcttcatcagggc

SEQ ID NO: 29057 - DNA, 35 bp, Homo sapiens
  chr22:45064203-45064238
  binary
gtctgaccgtctgatttgtcctcccggcttctagc

SEQ ID NO: 29058 - DNA, 390 bp, Homo sapiens
  chr22:45064286-45064676
  binary
cggcccgccgaggggtggggtgagggcgtcacgggccgatccgggccgccgggtgacccgggacgccccctgccccggcgggcgccgcccacagcctgcgcagtgctcaggggcggaggccgggagggggcccaagcgccagccccccagctccggcggacccgggtgggcgtgcccgcggacccgcttgccgcacttaggcgagtctcccctgcagcgccccgagtccctgggggctgcggcggctgcgggcgcccccgcgcgggcccgaggggcgggacgcggcggagcggggcggggcggggcctccgcggccccctcccccggccccgggctccggctccggctccggctctggctctgcgcggtggcagcggcggcggcggcgcg

SEQ ID NO: 29059 - DNA, 147 bp, Homo sapiens
  chr22:45064918-45065065
  binary
aaggtccagcctctcccaccccagcctcccgggacctcccgagctcgttctctcccagcctctctcgctcgccccccgccccgcccccttccctctatctctgagtttgtccgcgtctctgtgggtgggtctccgtccagccgcccc

SEQ ID NO: 29060 - DNA, 554 bp, Homo sapiens
  chr22:45097777-45098331
  binary
cgtgtgggcgcgaccgcagtgctgggcggggggcgggcgcttgggcttgggccctgcgtcctgtgcgtgttggtttcctgtgggcacgtggggccctcggaagaggggaggagggtgagcacgtcctcagagggcagacccagcgaggcgtcgtggcagctgcggccgcggagacgccggctccgcctcttgcacacgccccctcgcctgaggccccgccccgcccgcgatgcccccgcccccttccccgccccgccccccggggcgccgagacccgcccctgggcccgcccccgggtccgcccccggcctccgtttgcgccgggtctgtgctggccgcgcgcctggcgctccacgctgagcctctccgtgcaatgattaacccggcggggcggccggcgcgggacccgagacggaggcgcggggccggggcgggaccccgcaggaccgctcggcttcctgctctcgccggagtttccgcgtagagggcgcatcgccggcccggggcccttggtgcggcgtggcgcagggcgcggcgtggggcgcgcgtgggcg

SEQ ID NO: 29061 - DNA, 471 bp, Homo sapiens
  chr22:45098381-45098852
  binary
atgagttcgcccagcctcagtgacctgggcaagagagagccggccgccgccgcggacgagcggggcacgcagcagcgccgggcctgcgccaacgccacctggaacaggtaaggccgcgccctcccggccacccggaggccctggagccgggggaggggacccctgagccgtccgcgggctaggggccgccccgagccaggaacgctgccgaaggcggcgcggcgcttcacagtttgcaaagaacttgccccgccggagtggtgcgggcctggaggaaagttcagtgcagcgtggttccagaacccagggaagggagcgaggcccgccagcgcccggggctggcccagaagcgcccggcgggtgggcggcggggtgggccgggaagccgcgtgcccgcctcctacccggggtctttccacgtctccactgcggtgctcgtgacaacctgggaggctaacggagcaggaagta

SEQ ID NO: 29062 - DNA, 97 bp, Homo sapiens
  chr22:45098900-45098997
  hyper
gggtcgcgcaggcttcctgtgtctctttaagctcccttcggctttcccttgagaggccccctgtcctccagctgtcagcagggggtgcggcagctgc

SEQ ID NO: 29063 - DNA, 445 bp, Homo sapiens
  chr22:45148213-45148658
  hyper
cgtgcgggacggggacgcggcccagccgggaatcggggtgcccagggtgcgatgtgcgaggggctcctgagcgcgtgtgctccgcccgaccccgccctgtccccccgacacacaggtggacccagggtcagctcgtgcacctgggaaatggctcccgccgggtagcaggggcggaggggcggggctgggcggaggggcgggggggcggggcctgcccgggagccacgtccggggaggggccaggtgagcggcagacccggcacgcaggtgggggccggcggggtccgtggccaggtaaggcgggcggcggcgggagggagcgcgcagggaggaggccgtgctcggggtgggggggtgcgccgcgggggctcccagggcgtgtacggggacaaggggccgctggccgggtagggacgcccaggcgggcgcgacgccacgtgcggcc

SEQ ID NO: 29064 - DNA, 155 bp, Homo sapiens
  chr22:45148870-45149025
  hyper
tgttccttttttgcttccgtcctggggtctcaggttaggtcgggtcagcgcctgggggaggcacctcccccgcccccacacaccccaaacctacaaggtgggtgaggtcattcccgtttcatagatgagaaaacggaggccggggcaggtgctgc

SEQ ID NO: 29065 - DNA, 290 bp, Homo sapiens
  chr22:45403189-45403479
  hyper
ttctctctcgccagggtcaccggcagccgccccaacctcgtccacgtctctcccctacgccagaaaatcccccgggggagggggcgtccgatccggcggcccgggctggggtgggagcgcgggggcaggcccgggcgggggcgcgcgggggcgggcccggagctgtccaagtttggcgctggcggctgcggccggcattccgaaggaaacgcgatcgatggccgggggcgcggcgcgggcgggggcggggcgcgaaggagggagggagggggcagcggagggagggaggg

SEQ ID NO: 29066 - DNA, 113 bp, Homo sapiens
  chr22:45899073-45899186
  hyper
agcgccgaggcctcggcgacgcccccctcccccacggccagctccggtcctcatctcctccccggcctggggacttgtttcaaaaccggattcccccacccctcaaacacacc

SEQ ID NO: 29067 - DNA, 908 bp, Homo sapiens
  chr3:110789734-110790642
  hyper
aaatccatggcctcctgttgccagtcgcccggcgcggaaagtggacagcccagcggccagtgagaagcaagagcaagaaagcaaaccttctgaagacccctctcctcgcccagctccgccgaccattctaccaagctgccctcccagaaaaaagagcaggaaaaatgcctgtgcaaacgtgccttggcgagcggggaataagtgggctgggaagaagggaaggattcggagagcacagctgtcccggggaacaggaaggaggagaaagtctctccctcccttcagtgccccgcgccccagcgaggaggaagattactagtccagcaggctgcgtccagcttcctacacaggaacctttagcatgggcaacggaagggcagccccctcctgccttcccctccccaccccaccccctcgtcccaggtccccgccacagggagagcgccgcccgggagaggagaaggccgagcgtgattgtcccgcagccctcgcctcagtcggcgccggggcccccgtggacccgcgaggggtggagtgggcgagaccattggaaaggcagggaaggggggaaaccaggcaggaacgaggggcggggccgactaacctattccagattttcctgtcccttttaaatctctgctgtgggagaaaccccgttatcaaagtggatgaaaagaatatttttttttgaaaggggaggagcatgtgtaggagggcggggtgggaggagacagggcttgcgcccggggatcagacgggaggtggagttgcgcggggagggcgggcgagtcgggcgcccgctctgagagtcggtttcttttccccctcttgcgtggggcggggtggtgcgttccgagttcccaggagttcgacgcgggcgggtgccgaggggaggggagtggcggcgg

SEQ ID NO: 29068 - DNA, 573 bp, Homo sapiens
  chr3:110790671-110791244
  hyper
agtggcgtcggcgacggcggtgtcgaggcagccgccagcgttcggccaagtgtcagccggcagcgacggcgctagagctgggagctggggacgcgcgcgccggaccttccacagcctccgcccagagcctgaggcgccggggccgggggagccggggggcgggcgggcgagcgggccggggggagggtgggggatggcgcggaccctgcggccgtccccgctgtgtcctggaggcggcaaagcacaactttcctccgcttctctcctcggagccgggctcctgctgcagcccccgacgccacctccgctgctgctgctgctcttcccgctgctgctcttctccaggctctgtggtaggtgaacctcggcggccggcgtgggctgagggagccgccactgagggtgcgggcgccgcggccggctctgccagccgttctctggagcagcgaggcggttggttgtgcgagcgagtgccgaggactttggctggaaacttttcgccgcgcccggggcgaggccctggaagggccaggccagcgaatgctgagccggcggcccgctgccctcccccgc

SEQ ID NO: 29069 - DNA, 428 bp, Homo sapiens
  chr3:12329055-12329483
  hyper
cggtctccccagaccggccctggccgggggcatccccctaaacttcggatccctcctcggaaatgggaccctctctgggccgcctcccagcggtggtggcgaggagcaaacgacaccaggtagcctgccgcggggcagagagtggacgcgggaaagccggtggctcccgccgtgggccctactgtgcgcgggcggcggccgagcccgggccgctccctcccagtcgcgcgccgccgcccccgcccccgcccccgcccccgcccccacccccacccccacccccacccccagccggcgcccgcgcccgcccccgcgccgggcccggctcggcccgacccggctccgccgcgggcaggcggggcccagcgcactcggagcccgagcccgagccgcagccgccgcctggggcgcttgggtcggcctcgagg

SEQ ID NO: 29070 - DNA, 206 bp, Homo sapiens
  chr3:12330025-12330231
  hyper
gcagggtgtctggacccggggaagcgaagatccgcgtgcgtccgtcctgaggccgcgcggcacccctgctgaggaggaggtcccgttcgctgtccagagcccaggggcgaccgccgcttggggaccgggggaccgttcagcgaggggcgcgcttgtagctggccaggccctgtgccctgacgcgttgtgctggccctacgcccggc

SEQ ID NO: 29071 - DNA, 80 bp, Homo sapiens
  chr3:12330283-12330363
  hyper
cgcagccaggacccccagccgcaccccggggggctggaaaggcgaagtcgctgctttgtgggctcctgcaagtgccaggc

SEQ ID NO: 29072 - DNA, 732 bp, Homo sapiens
  chr3:123751654-123752386
  binary
cggaggaggtggccgcggggccgggaggagcaccggcggcgcgagcggagaagctgagcgcgcagcgcccgggccgcagagccccctggacaagcctggcgtgtgccctgcagccccgggctcgcccggcggccccgccccctccctggcccgggcttttcctgcggagctcaggaagccggcctagcacagcctcgaacaatagctcgggactcgggctccgctccccgggaggccggcgcggggccgctgggactgggggcgtaggcgccgccgggggcccgcagcgagccctcggccccggccggagcttcaattcagctcggcgctcccggggtcattgttggccgggactgagggagcgggagccgggggaggagctggggaggcggctgctgcggcggcggcggcggcgggagccagagggggagctagagagcgagcgagcgaaggagggaggtagcgagtgagcgagtgagcgagggagggaggaggtagggagacagggagggtgggagggaggaggaaaaataaagaggagagagcggagcagggctgaacaatagagacaggcagacgggcgagcaggagagccagctgccgctgctgggggacagcgggcgcccaggcagcccgcaccccggccccgggccccggccccagccagacagcaggcggccagcgccctggggaaggggtaccatgggggagctggcggcaggcacccccagc

SEQ ID NO: 29073 - DNA, 248 bp, Homo sapiens
  chr3:123752573-123752821
  hyper
gccctcccacagtcatgaacccccctgagggagcagcggaggaaggaggagcagcagactcggacgtggacgcctttttccggacaggtaagccgggcagggcgcggggggccagggctgaaggctactgcctcggacgcggcgtctcggacaagtttggggaaggagggctgttgctgccgcgtgcgtgttggggggcagtgccccctcggcgtcggggctggagttgccgagattctggttgttat

SEQ ID NO: 29074 - DNA, 245 bp, Homo sapiens
  chr3:125986265-125986510
  hyper
cgctggggcggtgcgctggccgtgggtcgagaggtcgctgcgccctgcattcctggccgcgcgcgcacaggctggaatccgtacattccattcataacattcccgcaagcgaggggaggagacgcaaagccggggagtgagtgattaaagaaaagaaagaagggcttcttgcagctccgggctgtgttttttcctgcgcgccctggcgcagtccccggctcggaaaggcaggagcacgtgagcgg

SEQ ID NO: 29075 - DNA, 49 bp, Homo sapiens
  chr3:126373704-126373753
  hyper
gggggacgacaggcgggcacggcgccccggcggcgacaacacgcgcgcc

SEQ ID NO: 29076 - DNA, 317 bp, Homo sapiens
  chr3:126373824-126374141
  hyper
ccgctccagagtctcgctctcgctcctggcccggccgggcctgctcacaaaccgaaacgcaggcggctgcggcgccgggacggggcctgaggggcggcgaacgctgccctcgctggccactctcaccacccgcgcgaatccgcgaggcagccgctcgccccgccccccaacaccgccccgcgcatgcgaaattgggtcccccgcccgcccgcagcctaggtgtcacctgcccttcgcaaaggggcgggtaccaagcgcgagcctctttatctccaggttgtgcctgcgtccggagaccacccaatcttggcgatggc

SEQ ID NO: 29077 - DNA, 81 bp, Homo sapiens
  chr3:133748401-133748482
  binary
cgcgtcgcccggggatgagatcggagcgcggcacaggagggagcccggggctcccggagcctcctggctccggcagacaga

SEQ ID NO: 29078 - DNA, 73 bp, Homo sapiens
  chr3:133748576-133748649
  binary
cacagcggccggctcggctagtagaggtgtcgctgccctgggacgcgccgagcttgggcaggagccccatggc

SEQ ID NO: 29079 - DNA, 260 bp, Homo sapiens
  chr3:133748694-133748954
  hyper
tcgggctggagcggccgggcgggtgagaggcgaccgcggcggcagtggccggaggagattcgcggagcggagactgagccagcgagtgcgcgcctagaagtttttataagtggccgccgccgatgatgaaacgcgctctccctcctccctcttttcctcgggtgtcaaaggcgctacgagcccccgccccgccgccgccgccgccgccgccccctcagacaggtgtgacgccgcagcgacccgcgaggcttgactgcccc

SEQ ID NO: 29080 - DNA, 296 bp, Homo sapiens
  chr3:135684609-135684905
  binary
cgagagtccgcgccgcggggaggcttggaggcaagcgctgcccgcgagctgagccgccggaggaggagccgcgggcaacgaggtaggcaaaggaacactggccgcacggcctggagccttcagctccctcgtcccggcccgagggggtggcgaggctcggggcggcgcgcggaggccggggcgggcggggccgggacctgggggcggggaccggcctggccagaggggccacacggagctgattgggctgtggaagtcggaattccagtcggtgcggtgcggtgcggtgcgttgcc

SEQ ID NO: 29081 - DNA, 67 bp, Homo sapiens
  chr3:137482183-137482250
  hyper
tgggaagaggcgcccagggacaaaccgaccctggttgcgatacaccgtgagactccgctgtagggcc

SEQ ID NO: 29082 - DNA, 704 bp, Homo sapiens
  chr3:138067014-138067718
  binary
taggactggggaggcgtccctaggctcagaagttggcccggccggagcggagatttaaaggttggagcgcagaggctcttaaagaggccgagtcgaattcccactcggcgtccaccttaaagccagctccccggcaccacggatctgacccgggtaagtgctgggccgcgggagaggctgcggcgccgaccccagcccctggcgctctagcgcgccctgccgggcccaggggactcggcgcgggtgggctggacttcgtaggcgcgcgtcctgggggccggggtgcacgcgggggcgacagggtcgaggcacccggcccgggctccccactggcgcgcccgcagcggcgctctatttttagcaggcgctgtggcaatataaggaatgcgcggcgcgctaggcgctcggggcgcacgctggcggcgcggtcgctttaaggaggcgccggggcggggacggaccggagtggccggctggcggggagccgtcagtccggcggccgcggggcccggcgggcgcgacgctgcctcctcaccggcgcaggctaggagggggcggcctgagtgccgtagccgagccggggctggagcgcgcggtgagtggtcgggcggccttggaggggagggggcccggccgcgccgcctctcgccccggccgtcgctttgttccggggcgggaggtgtggccgccctccgggctcggcc

SEQ ID NO: 29083 - DNA, 106 bp, Homo sapiens
  chr3:138067747-138067853
  binary
gaccggctgtgcgtggcgttttgcccccatcgcgggctcccgcgtaacggtgtgcgttcgtgaaatcggccacgaccaagaccccagtggggagggcctgcgcgcc

SEQ ID NO: 29084 - DNA, 202 bp, Homo sapiens
  chr3:13920779-13920981
  hyper
gactgcccagtctctaggaacggctgtgccgcgcctcctgagagagttcgtctcgggctccggggactgagctccccgagattggctgtggtcctggcttgatgttcctgctagacctgctgtccctatgcccgggtccgaagggtccccgggatgggctgaacctttgcagcagctagccctcccccagagtccctcaggc

SEQ ID NO: 29085 - DNA, 138 bp, Homo sapiens
  chr3:13921903-13922041
  hyper
agactcggccgagaggcctagtgccttggtctgctgccctgctccctccagcccggaacagggagctggggctgacagggcacaccccagttccccaaccccagcttcaggggagggcgccccctttcgcggagcgac

SEQ ID NO: 29086 - DNA, 479 bp, Homo sapiens
  chr3:13936742-13937221
  binary
cgacgcaacccgctgtgggccgaaacgggagctaagccagatggaacaaacgacccccaacccgagcccggcggggcgaacaggacatcccgcgttgttccacctgccaaagagggcgagcgcgcgggccgatcggagcagagcgagagggcggggccaagcggagcggatggggccaagtggacgagccgagggagtggggcgcagccgaaagtagccgagtgaagccgaacagagacgaggcgcgggtcgggtggtgccaagcggaaatgagtggggccgagcggggcagggtggagccgagcggagccgggtggagccgagcggagccgagcgagtgagaagccggaggccgagagggccgggccgacttgaagaggtggggattgctgagggctggtctgtcggctctggaaatcctgtcatactgtcacttttggattccgccgtttccgtcccaacggaaaactggggctcct

SEQ ID NO: 29087 - DNA, 124 bp, Homo sapiens
  chr3:13937250-13937374
  binary
gacgagaatctttttcactggcggcctcggcgtcggcattttataaaatgagagcggggagggcggccgaagacgagtgtgcggagccttaggccccccgctcgggtccgcttttcgtatattc

SEQ ID NO: 29088 - DNA, 208 bp, Homo sapiens
  chr3:142607211-142607419
  hyper
cggagcggctccctaggcgccgcgccgctagggttgttccctagtttacgtctctgggcaaagcctctcggggaaggaaaaaaaacagcggtaaaccaaaatccacatatttgggccccagtgcttccctctggccccatagacacgaggagaggggagacacaagtcagattaagccccgccacgtggtggccaagccagctgcagg

SEQ ID NO: 29089 - DNA, 85 bp, Homo sapiens
  chr3:142607884-142607969
  hyper
gcgcgcaccgccgcggggcggcccaggtagccgggggatacgcggccggcagggcggaggcacttttaaaggcgattatggtgcc

SEQ ID NO: 29090 - DNA, 60 bp, Homo sapiens
  chr3:145878430-145878490
  hyper
cgggcacgctgagttcaccgagaactccaaggagtcaacgagggcgggtgcccctacact

SEQ ID NO: 29091 - DNA, 113 bp, Homo sapiens
  chr3:145878553-145878666
  hyper
gggacaggcccccactactcacctggccagccccgcggaagggctggtggatgaatgaactgcccccccgccggccgagcctcgcgggacagcggcggaccgcggggtgctca

SEQ ID NO: 29092 - DNA, 174 bp, Homo sapiens
  chr3:145878695-145878869
  binary
gtccgcacccagacagggattccaggggtggaggacgagcgccaggagcagcagctgaggcttcaccgtgcatccccccatattcggccctcgagggccgcgcgggctcaggcgcccacggccccgcagcgccgcgcttctcgcgagaacgcagagacccgggtccgccctgag

SEQ ID NO: 29093 - DNA, 349 bp, Homo sapiens
  chr3:145878937-145879286
  binary
ctgagtgaggtcgtcggtggaggcacggagcagcaggcgcccggggcgctgcggaggccttataggctccccgaggggaggcgacggggcgggccgcgccctggctattggccgccggctgacccgccgccgctgcgcgcccggtgcggtcgcctcagctcgccctcctgggccccacgtctggactgtttgctcagcgcggacgctatttaaggagctgcctgcggctacgtgtggaggctcacgcagcgcttctggctggaacggggaagcctgcacttagctttgggagtgggtttgggagagggaggaggagccgccgggagtctggcgggagggcggtgttccc

SEQ ID NO: 29094 - DNA, 604 bp, Homo sapiens
  chr3:145968403-145969007
  hyper
agaaacccaatcaagcgagacctgtcacgcagagcgaaacgaaagggccgcccccgtgaagtgcagccaggacccccatccctgggcaggaaactgctcgctcccaaaccctctgcgtctgcagtgcagacgcgcgcccgacaccacggaacttctgcaaccacctgaggatgcgacgcgagcgcagtgtccgggaactgctagcgcaggacgccgcgcaacctccgcgcctgcccgcaggcaccgcggcctcgggcctcccctgacgacgccctcggccccgcagcccgggcgcccgcgccaccctgtcctgctctgcgcccgcctgtccagccccactcaccgcctgccccgcagaatgctgggcaccggggacgccagacgccgggtctagttgtactggcagaggaaagggaaaggaaaggaggcagggaagggagacggagaggatttttcaagttataaacaaagtaagcgcgcggaagggagggctaggcgcgggttctgggggcgggtccggcacgcctggaccctccttccccgcgcgcggcttccccgtctcggaccccgccccgcgctgggagagccgccagcccgggggagc

SEQ ID NO: 29095 - DNA, 79 bp, Homo sapiens
  chr3:14644635-14644714
  hyper
cggggcggccgccaggcgctccgctccggctcccgagcccgcggctgagcagctacgcttttcgagcgcgcgctttccc

SEQ ID NO: 29096 - DNA, 54 bp, Homo sapiens
  chr3:14644749-14644803
  hyper
cggagaggacggctggaggggagcccgaaggcgccccagccgtctcgcaccctc

SEQ ID NO: 29097 - DNA, 591 bp, Homo sapiens
  chr3:149375406-149375997
  hyper
gaaaggtcgcacgattccaggacaggcagccccccgaaagaagttcagcccgagccaactccaccacgtctcgactccggaagcccgaggagcctggagccctggagtggtgccggatgagcgcgcgagctccagcgggcactacctgggcgggcagcgaagctgagcctgagcgcgcggcggccgccgtcccgcccgaacttgccgtcgggcctgggtcgctcgggtgagtcccgagattgcggagctggagccgaggcttggctgacaaatcccgacccgactctgtgcctggcagtctaagggcttcggctctcacatcccccgagctggcctaaggcgctagtgctgggcgaaaaggaggcgcaggagaagcagacagcgcggccgcagcagctcccggactgtcccataaacaaagtttggagcaaactcccacccccaggaaagaggcgggcccgaaagttgagctgttgaattatgtatgacctcctagtccctagccggccagcccccgctcgcccctcctcttcctcctcctcctcctcccacctcggctccagaaaaccctgggcgtgatgggtactttac

SEQ ID NO: 29098 - DNA, 98 bp, Homo sapiens
  chr3:152553725-152553823
  hyper
actacctgccggctgtctacatcttggtattcatcatcggcttcctgggcaacagcgtggccatctggatgttcgtcttccacatgaagccctggagc

SEQ ID NO: 29099 - DNA, 32 bp, Homo sapiens
  chr3:153838787-153838819
  hyper
cgttagaactctgcgctactgcccacgcatct

SEQ ID NO: 29100 - DNA, 59 bp, Homo sapiens
  chr3:153839460-153839519
  hyper
gaatgggtggcgggctcatttgctgcgggtggtcttttggcgcgggagggacgcggagg

SEQ ID NO: 29101 - DNA, 84 bp, Homo sapiens
  chr3:153840393-153840477
  hyper
gggccccagaaaagttcttcggaacaaaaactccccctccaaaggctgccctcccaggagaacgagctcctcgagaatccttcc

SEQ ID NO: 29102 - DNA, 173 bp, Homo sapiens
  chr3:158289012-158289185
  hyper
ctcttgtcgcggccgcggcgagttaacatcgtttttccaatctgtccgcggctgccgccacccaagacagagccagaatgttcaggatgctgaacagcagttttgaggatgaccccttcttctcgtgagttacgggagccaggagtccggggtcgcgcgggaattaaggtatc

SEQ ID NO: 29103 - DNA, 273 bp, Homo sapiens
  chr3:159943217-159943490
  hyper
cgcctcccgcagcctccgcgcgccgcgggctcctcctcccgcccaagcgtggccaagtgaggactgctccggccgcaggtagctgaggcgcgggaggcggcgcgcgcgggacccgagcggagcgccggggaggggccgacggacgcgagggcggacggactccccagcctcccgtcccggacgttagccgaggtctgcgcgggccatgtggggacccggggtcactgctgagggcctgtcggtggctccggcgccgccgcctctgctgccgct

SEQ ID NO: 29104 - DNA, 362 bp, Homo sapiens
  chr3:171527569-171527931
  hyper
cgtattgtgaggaagaagaccttttacacactccctgctgctggcccccggccccctcgccccacctccgagtggtcacatcacacggcgggagccgcggtcagcagctgtgatcacacccccaggaccgtgctctgcgggctgggctcgaagccttgggacgcggcacttcctggttggtacgggatgccggtcccatcgcccccaccagcccagtcatgccaccgcgcacccgaaccaagggcgcccggatgacctggggacaccacacacactgcacccgaagccctgtggcggcgaggcggtgcatcctgcagaggacgcctgggcttcagcctgagcctgcgcggctctgcgctcca

SEQ ID NO: 29105 - DNA, 80 bp, Homo sapiens
  chr3:171527971-171528051
  hyper
agctttcaccctgcaggaattccacccgaaggcgtgcgagggaggcccttggggatcgctagggagtccgccgccgactc

SEQ ID NO: 29106 - DNA, 217 bp, Homo sapiens
  chr3:171528333-171528550
  hyper
ctccgcccggattcgccccggattcgcaggggtggagcgaggcggtgccaggtcccggggcgtcgcggtgccggctggaggccccagcggggcaggtctcgcgactgggcctctgatcgcccgcgttccttgttctcttttcccaaagtttcataactcgaccgcatcaccctagggaatgctcgctattaggaccattatcaggtcctctcgagcc

SEQ ID NO: 29107 - DNA, 56 bp, Homo sapiens
  chr3:181413014-181413070
  hyper
cgccgtttcgcccacggggtgcggggaacgaacccaactggacacactgtgcaccc

SEQ ID NO: 29108 - DNA, 202 bp, Homo sapiens
  chr3:182970902-182971104
  hyper
cggggcccatcaccttcacctacgcgccgggagggtggcggctggcgggcggggccgggctcgggccgtgacgccgagagtgcggggcgcgcggctgggagcctcgcgcccccgcccgggcccgcccccatcccgcccgcatacagcccgcatcccgccggggaagcgagcccagtccagcgctgcccgtccagtcctcgcc

SEQ ID NO: 29109 - DNA, 368 bp, Homo sapiens
  chr3:182971342-182971710
  hyper
agtttgctgtaagtttccttactttgttactgaggcccccagagctccacgcataagtggtgtgaccagaaaccttttaacaagacccgcctgagcctgcgttagagctcccgctcggaaagtaaaagaccatcctaatccgcggcgctgcggaaccggtgtcccgtgtgggaggaaccgcggcgttccctgggcgtagggcccgcgaggccagcacagtccgcctcttggcggagcgccctgggccggtggttccgcgcggagttagtctgtggtcagttacgtggtgaaaacacggctgtgccgcggccgcatctttccgcggccgaggcctctctgggtgggagtgttggcttcctttccggatc

SEQ ID NO: 29110 - DNA, 198 bp, Homo sapiens
  chr3:192635147-192635345
  hyper
ccagccccaggtggcggagaaattaacaaaagagcaagcgaacagggggaaagggagacccggcgtaaagtatagtaaggaggggagggcaggcagctcggctttcggcggagaaagaagagagaggcggaacagagatggcttatacccaaggcaccggctcgggaaggcaacccagaagggaagaggtcgagaagc

SEQ ID NO: 29111 - DNA, 159 bp, Homo sapiens
  chr3:24870844-24871003
  hyper
gcacagccagcgggcggcgcgccgcggactccaaggcagcccgccaaaaggtaaagccaggagagcgcgctggcgggtcttcctgttgggtggctgctgtccaagcccctagcgtccccggagccccaagctgggtctggaagaccagggcatttgcat

SEQ ID NO: 29112 - DNA, 349 bp, Homo sapiens
  chr3:24871245-24871594
  hyper
cgtgaacccaggagtcgctggcaagttgcacctgccagccggatccgccccggctcccttcgcgtccctgccgggtccagcgctgtcctgcgcaccttagggctgggcacggcgaaacctggcgcccttgggagcagaggttctcgctccattcccctgtggggatctaagctccaggccggggtgtcggacctctgggttgcagcatgctttggggccgaagaaagggcgagaaaaagtttgagcattggctgggcctagggagcgggtagcgccaggctgcacatggcaggagttggagaagagtactaggggcttggcgccggacacagggacgcggccagggacc

SEQ ID NO: 29113 - DNA, 94 bp, Homo sapiens
  chr3:37901953-37902047
  hyper
gcgcgcgcaacctagcaggcggaggcaagcagctcttcgcctcaggccgcccactgaaccctgcccaccgacgtcgcgccctgtaggccctccc

SEQ ID NO: 29114 - DNA, 424 bp, Homo sapiens
  chr3:37902095-37902519
  hyper
cccgagcccgccctcctgcggcactaccccgcccccccggcttacggggctgcagagtgtggcctgcaagttggaagcgcaggacgcgggcgtccaaaggccccgacgctcccaggctgaggaggcactttgtcgtctctcccacgctctggccgtcgtcctaggcctgacagtggccagctgccttgcacaagcacagtccctgccagacttggtctgccaccagcgccttccgctcttctgccctcgacggactcccccggtccccttgctgcacagcacccgaaaatgcccactgcccaggcccctctcagtcacgacaccctcacgtgcaggaggttggtccttcaggacccgccgcccctcacgcgggctctggggccgaatgctgacgcgagtcccgccagcatccgaacaacctgag

SEQ ID NO: 29115 - DNA, 255 bp, Homo sapiens
  chr3:37902584-37902839
  hyper
cccctcaagctggggagcgcagccctgggcctctccgaaccttccccacgctccccggtctccatcacagcagcgccgcgcccgggcccctctgcgggccgtctgggtgtcactaccgctcctgggcagcccccacttctgcacaccgcttccctccgcactcacgtcccaggcccctcggttccctcgcctggacgcccctcgcccagcaccttcccgagacaccctcacagcacctccgccagcacttcccgc

SEQ ID NO: 29116 - DNA, 42 bp, Homo sapiens
  chr3:38070629-38070671
  hyper
cgttcttggatgctgtttccttccttcgccgcccctccgtgc

SEQ ID NO: 29117 - DNA, 494 bp, Homo sapiens
  chr3:39850742-39851236
  hyper
cggggaaggacctggagtcgcacatgggggctcccgaaccgcggccccaatactgcactgcgccgcagggaagagccccgggaggggcgcgggtccccgccccgggcgcgcgcagccctgccccgcctcctcccggtgcgccccgcccctcccggcgcgtgccgcccgcgcgcccgaggtgctctggaggaaccggcccggcgggcaccccctgccccggcgcaggcgcgatcgcgggccgcccctcccgccgggcgccctgcacgcgcccccgccccgcctccgcaggctcccccgctccgggcgcctctgattggctctcggccgggccagcaggtgtcggcggtggctgcggccaggctggccctggctgcctgcggcgcgggcgcctccctcgcagccgctgctgccgacgccgctgcgctcccgcctcctgtcggttcccgggttcccgctgcggctgcggttctggcagccgagcccccgcggtgctg

SEQ ID NO: 29118 - DNA, 244 bp, Homo sapiens
  chr3:43147038-43147282
  binary
cgttgcccaggtccccggcccccggcccccgacccccaatccccggcccccgaccctgagggtccacccccgccccgcccacctcccgcgcctccctcagctcgcttcacacgtcacccctcagttctgcaaactctcctggatcccgaaggcgtcctagaacctccccctcaccccggggcccagcaccgcgtcgtcccctccagggggccgagggttcgacacctccacttcaagtcccagg

SEQ ID NO: 29119 - DNA, 105 bp, Homo sapiens
  chr3:43147607-43147712
  binary
cggccacaaccttggctcgcggaatcctgggaggtgtagttttgcgtacgaggacagcccgcgccgccaccagcctgcggaatgttgggagtgataatttgcgcc

SEQ ID NO: 29120 - DNA, 366 bp, Homo sapiens
  chr3:45186931-45187297
  hyper
cgtgttggtcccttcccccaaccgaaacaactcgaaattcacacatatccccggaacaacagcctcctgccctcaaagtccactgccaaaaagtgcgaggggcgcgggaatgtccagtctctgcggtggcgcagatgcctggcggctttctctgggaccccctaaaagaaatccgggcgctttcatttttgcaccaacgctcttcaactttaggagagggggaatgcagcgtgcggacgggaaaaaggggatctagtgggaaatgcggacgtgaaagcactttttttgcaccttctctctggaccaggcgaggaggtagagggcgagcctggagaggaaagatctcttcccacaccctgcctgggt

SEQ ID NO: 29121 - DNA, 389 bp, Homo sapiens
  chr3:64430905-64431294
  hyper
cacaggtgcgcagccgcggggcgcagtggggctgcgcgcgggcgctcgcggccggctggaggtgcccggcgatcggccccgctcgagcgggggacactcaccgagcggctggagagtcttttccgggagctccggctgaacatggccggacgcctcctgctcgcagcgccgtccgtcggtccgtccgcgccgcggccgggagggcgggtagcctgggcgggcaccctcggcggccgctggcctggctgtctccgccttgcagtccccggctcgctccggagcgcacgcctacccctcctcccttccctctgcctctccctccacgcccgcaggtccctccctctctcccggcatccccccgccctcccgggttcgccccgcggtccacc

SEQ ID NO: 29122 - DNA, 307 bp, Homo sapiens
  chr3:64671732-64672039
  hyper
tgagagaaagcggggactctagattacgcaccgccctccacaacacacactgaaggaactcccagtgccttgggcaggggatcctcagccccacatccccgatgcaaggcgcaccaataaggagtctggtccgccctgcgctcagcggctccgctcccgggtggccaagtttgctgcagggaaccgcaactccagtaactttctccgagtttggaaactgacttccaggccgcctcgcagcgttgggcaacgcgccgctgaaccgagtccaaactccagaaagctctgaaacatccagaagcccctg

SEQ ID NO: 29123 - DNA, 208 bp, Homo sapiens
  chr3:64672413-64672621
  hyper
tggcggtgagattaaatagaaactgctggccgaaggcagagaggcggtaatgcgcctgggaggaggtagaggaggaagaggaggaggcgaaggcaggccaggggtcagtggcagagttaatgctccgtcgcgttcttttgaagtggacgttcgtgggaaagggttctccgagagcgttcactcggatgggagacacgatttcgtattc

SEQ ID NO: 29124 - DNA, 130 bp, Homo sapiens
  chr3:64673134-64673264
  binary
cgctgcggggtgcccctgcccaggagcgaggaccgggaggcggcgtcggggccggcggggtcccgggggccggagcctggttaccttgcctcgggtgcagcctgtccttgcgcacggccgccgcggcgtc

SEQ ID NO: 29125 - DNA, 507 bp, Homo sapiens
  chr3:64673419-64673926
  binary
ggagagcgcgcggagcccggcgcccgccgccaacttttgactttaggagtcgctgaggtctcgctgcgagggtcccgtctgcgctcggctgagcaacgccgccgcctgccgagagctgagccgctcgggccgcaggaggagccggaggagcaggaggaggaggaggactggggctcggctgcttggccgcataatgcccagcgagcgggcaggagaaggcgaggaacttgcgctccgaggcgcgccgggcgccctgtgctggccgggatagctgagcggcttcttgaatggggggctgggggggcggaggcgggggggccgcgggtccacagcctctcaaatgcccccggtgcacgcctctaagaggaggagaggggaggagaaagcgagacgaacggggaccgcctccttccagaccatgtcccctcctcggccggcccgtgcgggactcgcagccggaggccctgccggctgcaagaggcggaggccagaggcgtcaccagcgcc

SEQ ID NO: 29126 - DNA, 1319 bp, Homo sapiens
  chr3:66024122-66025441
  binary
cgctcccctgcacacgctcgcgcactcaagccatcataaaacaaactttctgggcttccccgcgagccccgcacaggcgcccgcgagctttgtttgcattccggtgcctctgggtccacgttccggcgcccgcccgtgctctcccggaccagagtccactctgcgccgctcgggttatttttttttccttccttcctttctctcttgccttttacaaatgcggtgcctcctctttgcctcccgcccggctcgcctctcctcgctggcaggctgttactgagggtgagggaagcccttccagccagttgccgggagccctgaagacgcggtggcggggcggcggggagcagggcgggaggtaagtgctcgcggcccctttaagcagatacaaaggctcggcttgttttgttacagttcattctattccgcgccgcggagcgcagcggccggcgacaggagacgcgcgcgcatgcgccccgcggccgccagccggccggcccacccctcccctcctccccgaagggagagattccaacgtgcttcccgatgggtcctaaaaccgacctgccgggagaaggcaactcccccccaacccttcctgaacccctatcctctctccttttctttcagtgccctggactccgcggattcctttggggctggagggccgcacacgtgttttactccaactgtttgcaacttttgaaacccgggcaatctggctttggcatttgaaaaccatttcaaacaggtgggggttggggaggctgccacactcaccctggcgctcacactcacgcacacgcgcacgcactcgcgccggccctaagcctcctaaccgccctcggccagtggctggccaggctgtcggtcacccagcccggctggttcgccgccccccttgccgcaggtcccactgaaacccccgagacccgccccggggcgctcgccgcctccctgcctgccctgcgcttgcgggttcgggtcctggcgcggggtctgccagggtctctgcgacccgggggagggggacggtgggatcctccggttccccaactgggatccctgtgcgggtcacacgcgctcttacacacacccgcatccttaaactttgggaccaactttttaggacacgggaaactacaggcaagagagagaagccatggtgctagtgtgggttcaggtattcaaccaaaaaagagatccctctagcttttcaactgccctgccagcagagactgctggacccagtcaatcatctgccccggcctcaagttcctggcagggccgagaagcctgcggacctactccggggccag

SEQ ID NO: 29127 - DNA, 56 bp, Homo sapiens
  chr3:66025506-66025562
  binary
actcggaattcgcagcccgggggtagctgcggcctccggaggtcgcccgggggtgc

SEQ ID NO: 29128 - DNA, 778 bp, Homo sapiens
  chr3:69788429-69789207
  binary
cggtgtccaccacgttgcctctcccccgcctggccttctgggagctgtagttttcgtgggagcggctccccaggcgagctgggaatgccccgcccgggccgaactacagatcccaggcggcgctcggccgccagcccctcccgcccgggtgcgagtgtaaactccccgcgctggggcgggcggccgcgagccggcgagcgggcagagctcggcactgcgccggggcgcacggctcgggggacccaggcccagctaccttccctccgcccccgggctctgttctcactttccagcagtggaaggacgggaagcgggagccatgcagtccgaatcggggatcgtgccggatttcgaagtcggggaggagtttcatgaagagcccaaaacctattacgaactcaaaagtcaaccgctgaagagcaggtgagtggtgacagctgggcagaggcgcaccgggcggctggggggcactgcgtctgccactctggggcgaggagagcgggtcgcgggagctctgggacaaggacccagtgcccttgccccggagcagagggcgaactgcccctcgcagttgggggccgcgcctgcccggcccaagtgcgcctttaggaagctcggatggagcgcacttcgcgggggcgcggcgggtcgccggggacgaagcgtccaggcgcggggaccctcggccgaggatgccagctgctgagactgattgggggctggggagcgacctggcgcgatgtgggggaggaggagcgccgggccgggacgctgtccc

SEQ ID NO: 29129 - DNA, 61 bp, Homo sapiens
  chr3:71802788-71802849
  hyper
agggggctccgcggcggcggcggcggcggcggcagcggcggcagcggcggcggcgggcccg

SEQ ID NO: 29130 - DNA, 245 bp, Homo sapiens
  chr3:87841814-87842059
  hyper
cgccccggacccgcaagggcggcgcaagacttccccagcgcgcagtcagcgtcgcggccccgaaagctggcgacaggcgctgctgtcttcccgccccgtggggtcgcccctgccctcccgcgccccggggctgggggcgccaccttgccagctccgactgctgcagggagcgccaggggtgagtgtgcggatcagcgctgagcccgggagtgcgggtcacgcccgcagctggcgcgcaggtgggg

SEQ ID NO: 29131 - DNA, 302 bp, Homo sapiens
  chr3:87842412-87842714
  hyper
cagcggaaggaggggagagtcttcgaatccatctctcggtgggatcttgagaggattcgcgggggggacggtaagataaatctgaggagctggaagaagccgtagatcggaaatcgcttgcagttttccaactttatttcccgcgggtacgaaccattaaggtaaaagggtcagagagagcttctacctcgcggctgcagcttgcctagttgccgcaggtctgactcaaggtagggttgttggcgccttcctgtttggaggggcaatcaagcaaaagagaaagggggatccgagagaccggc

SEQ ID NO: 29132 - DNA, 281 bp, Homo sapiens
  chr3:98619774-98620055
  binary
cgcgccaacttgggggacagacgggcaagaccttgcctttgcaactcaaccccgtgagtacccagccaggtccggccacgcacgaaagcgcaccgcgcctccctgcagcgtctgcagatttgttcaggggccaagagacccgcagccccgacggaggttcccccgccgctcactcccctgggaccactcaccttgctgggctccagcgtcctcgagcagcaggagcaggacaagtaagagcaggaggaacagaggcatggagaaggaggaggagttggagc

SEQ ID NO: 29133 - DNA, 58 bp, Homo sapiens
  chr3:98621126-98621184
  binary
gatgcagtgttcagtttttaatatatgtgttccctgttttctctgctctttttatggc

SEQ ID NO: 29134 - DNA, 556 bp, Homo sapiens
  chr4:118954450-118955006
  hyper
aggaagggaccgcgcgggtgcgccccacccttccagcgtcgcctcggggactcgcacccctttccctggccgcacaagacgtttcatccttggcggccgccgccaacccgccgggaggggcggtcggaactggcaggccggggcggaacccccggggtctccttgtcgaggcccgggcagccagatcctcagggccggtccgggcgggagcccggtcgatggaggcggctcccgtcctcagctcccgctccctccccttccccggggcgggcgcgcgcgggccgggagctgggaggcggcggctcccgcccgggaggcggtggcgagggcggcggaggcgcggccgggcgggtcccagggccgtggttctccagcgcaggagtccccggcgcacccgctgcgctcgccccgcagccgcagcctgagcggccgaagtcgccaccagctgtgtccgcgcagatcccgggcgcggaggggagaggtcgcccgcttgtcgcccccgccggaccccgggcaccgcgtagcacccaagcgccacccggacgaggggccctgg

SEQ ID NO: 29135 - DNA, 81 bp, Homo sapiens
  chr4:118955125-118955206
  hyper
ggaatgcggactccagaggcggcatctcgaccagacaagtttctcgcggcttggaatgagggagtcctgaaaccgacactc

SEQ ID NO: 29136 - DNA, 109 bp, Homo sapiens
  chr4:119273336-119273445
  hyper
cgtccggagtttccgcggccgccccgaggccactaaccgtgtctgcagtcgcagtagccccagtccaccttgccacgggcgtctccgtagaaacaccagggtctgcccg

SEQ ID NO: 29137 - DNA, 223 bp, Homo sapiens
  chr4:119273515-119273738
  hyper
ctccaggaagggtggcacctccgcccaccgcagacacggggcgccgaagtccgtcacgctgacccatggctcgccggcggggcagccccaggggtgcggccggggcgtgtgcccggcctggagggcgtgcgggcgctgggcagggagcgcccgcggggggcgcgggaagcgcgggagaggcggcggcggacgcgtcctcgggggccgctgctgggtgggaagg

SEQ ID NO: 29138 - DNA, 202 bp, Homo sapiens
  chr4:119273903-119274105
  hyper
gctccccagcttctcgggcttggagcggagaagaggagggggcgggggcggggctgccgcgtccctcgaatcccccagccccctcccgcccccgcacgcggaccgccctcgcctccccaaccttgcctcccgccgctggtgccctgccgcgcctcggctcctgtcccctggcggcggccgcgggtggggaaatctggagctc

SEQ ID NO: 29139 - DNA, 243 bp, Homo sapiens
  chr4:119274214-119274457
  hyper
tgccccctgggggcgggcgccggccgcgcaagctgctccggacctacgctcggcccctgccaggcccaccgcagtccgcccgcacggcactgccagctgctgggaccgagcccgagggtgcccgcgcggagcacggtcttggctgccccttgccagcatgcagcaccagcacagcccggcgttggcggctcccaaatctggcaccggcccctgccgtcatctctcctccaacctcgtcgcccc

SEQ ID NO: 29140 - DNA, 261 bp, Homo sapiens
  chr4:121843304-121843565
  hyper
gcaaagacgcagctcacacccgtaaccgaggaagagggaggctcccgccgcgctcacttcctgcgggagagaggaaagacatcttgcggcagggaggccggtggcagttccgcccctggaccggccggcagcggagcgcaccccgccgccacctacgtggcgctgcctgctcgggtggcgcagcgagtaaaggccacccccgccgtgccccgcggtccccggccttcccacggacgcctggcccggcccgggcgaggggcg

SEQ ID NO: 29141 - DNA, 277 bp, Homo sapiens
  chr4:121843731-121844008
  binary
gagaacctgtccggcacgtacatgcccagcattttcccgggcgcggcggccgccgcctctctcaacaccggcgcttagcgcccggcaggcggcacatcgaaatttggggtgccagggtagaggggagaaaccggcagggaaggaggaaatggagttttcctcccagaatccccacctccctgccgattccaggatcccccgcggctcagcccctcctcgtcccgggtcgggctcggcccggatccgttcctgccattcctgctgcgggggcgcgggg

SEQ ID NO: 29142 - DNA, 170 bp, Homo sapiens
  chr4:121844206-121844376
  binary
ctgggttttcaaaccttgccccgctgaaccattactccctgtaggggagtctcgcttgcttctcttcagatgcaaaacgaaatggaccttcacacagctggggcatcctccaaaacaactttatcaagttcctgactctgaaagccagcttattgccgactactgagaac

SEQ ID NO: 29143 - DNA, 235 bp, Homo sapiens
  chr4:121992978-121993213
  hyper
cggatagggcgcccttgagaagcttcttgggccttgaagatttgggggcgcgtgcctcgagcccccatctcggatgacccttcgggcgtgaacgctccttgtgctaggtctcagggtggcgggctaaggcgtcgggtctctggggcattgctttcctctccccacttaccttaaaaagatctgtttttcgtagggaaaatagaaaaaaatccctccccgtggtgtggtgtgcgaa

SEQ ID NO: 29144 - DNA, 114 bp, Homo sapiens
  chr4:121993736-121993850
  hyper
tcccagccctaacccctcccgcctcaccgctgcccgcccgccccctccctcctctgcccgttgcctccccctccgtccctccttctctccctcccgctgcgcgccagcgcgcac

SEQ ID NO: 29145 - DNA, 243 bp, Homo sapiens
  chr4:128544404-128544647
  hyper
cgccttcagcccttggcttccgcgcgtcggaggctggcacctccaggttcaccgcggcggccggagctgtgcgggggccagacggttcggcgggagccggggctgggacctgggtgacctgtcgtccgcccctgtagcgagtctccagtgggcatgtttcaggtgggcaggtccagcatccccaaacctgccccccgcagcctggaggacctggactcagtgcagcgtgtcctgttacacagg

SEQ ID NO: 29146 - DNA, 49 bp, Homo sapiens
  chr4:128544806-128544855
  hyper
cccaccctttccagaatcgggtgccagcgatccaccctgtcccgctgcc

SEQ ID NO: 29147 - DNA, 137 bp, Homo sapiens
  chr4:1400112-1400249
  binary
cgtccatagcttcctgggcagcggcggcgggagcgggcggtgcgggccccgaacctggctggggaggcggcggtagcgcgggaatgtccccaggagcctcggggccgctagcgctcatgccggcctcccgccgctcc

SEQ ID NO: 29148 - DNA, 824 bp, Homo sapiens
  chr4:142557243-142558067
  binary
cgggtgtcttcttccaacatttcccctagttggacttcaaagtttccttcttgcagcctgtgcggggaccaagaggccggtctagagtagccgcccagcatccagatccgacatccttttccctttcctcaggaagacttggatgcgcgccagcccagcccgggtctccaggttcagctgcggaagcttcccacatggtgcccgtcgcttgggatgcggctatccttgtgccttctctgcaggtgtcccggcaggtagaggaggagaccggtggctggtgttcctgcagggcggggctggggctcctcgatgtccttgcgcttgccctgcaagttctgcgccccaggccccggcagggacggaaacaggccgggaagcagtgacacctggggcagtcagtcatccaggagccgccgccacccgccccacccccagtctccgcgggaggtgtttgtcttcgcctatgctcccggctctttctctttcacttttcttttcgccaggggttgggactccgggtggcaggcgcccgggggaatcccagctgactcgctcactgccttcgaagtccggcgccccccgggagggaactgggtggccgcaccctcccggctgcggtggctgtcgccccccaccctgcagccaggactcgatggaggtacagagctcggcttctttgccttgggaggggagtggtggtggttgaaagggcgatggaattttccccgaaagcctacgcccagggcccctcccagctccagcgttaccctccggtctatcctactggccgagctgccccgccttctcatggggaaaacttagcc

SEQ ID NO: 29149 - DNA, 114 bp, Homo sapiens
  chr4:152246019-152246133
  hyper
cggcgcaggcaaacccctcggaaggtgtcgttgtccaccgagacggccattgacctctgactcatccagagataagtcatcaaccaggccacaagtcccaagccagcagctcct

SEQ ID NO: 29150 - DNA, 179 bp, Homo sapiens
  chr4:152246314-152246493
  hyper
gctgtgtggggcaggacccgagcggccccagagcgcgcagctctgggtccccgccgccccgtcccccgcgcctctcacctgcggccgagtggcccgagagcgcacggccccgggcgcggcgctggccaccaagttcgcggcgctcgcgtagctcttcctcctcgtcctcccgccgccgg

SEQ ID NO: 29151 - DNA, 469 bp, Homo sapiens
  chr4:152246542-152247011
  hyper
gctgcggccccggcgccccagaacgcctgcacccggcgccccacgccaccgccctcgggccggggggaaggcggctcccggagaggaggcgtcggcggcggctgtggaaatggccacctccgcgaactccacctgcagccggccgggcagcggcagggcgcgggccgagccgattccccgcctccttgcggcgtcccggcggcctcttaatccctggcctttcccactcccactcccgctctcttcccccttcctctttgccttccccgccccgtagagctccaccgcggatcgggcgggttcggggctggcctcgcctcctcagggaggggttatcggcccctaaggccgccccacagccacacacgctggaaacaccagctcgacccaaacaaacgtgtgcaaaataaataaacgggataggaagaggggaaagaggaggtggcctggcctcttcctgccttttcac

SEQ ID NO: 29152 - DNA, 1048 bp, Homo sapiens
  chr4:152329824-152330872
  binary
cggggcgccggtggccgccgtcaaacctttgggaagcaagaaatccgaaacgcccgtgacgtgcggcgttgtccgactccttccactaggcagaacccgagagacgagcctttggcgggacggtgaacgattgtgctgtgtacggcggtgtgcgtgcgtgagtaaagagtgtgtagctccggccaaacgctagcccccaagggcgcgagtgctacactgcgcccagctcaagtttctgtggaaactttccctcagaggctcctcctccttcaccttggaaaccggcgcgggccgtgcggcgcggcactgcctaagtccccggcgcacctggcggcggcgtgtcccagcggcagaggcggggccggcggcggcgggggcggggccggggcgcgctccccgaggcctccaggcaggttgggccccacccccgcccctgccccgccccggcccccgcccccgcccccgccccccccgcgctcactagggagaggctggggggaggcagtgacccacgcgcctcagcccgcggctgacgcaccttcgaaaagttgcgctccgaccttctcacgacctacattcttcccgggcactcctgagtttgagccgggcctggaggacctgggccaagactttcgagcggcggccgcccgaggtgcgaggagccagcccggctttcctcactgggtcccgcgcaggcgtccccgggaccgcagagcaaactttctggactatctgaggacacttgtccagcgagccccactgctcggggaggaggagccacggccggggacaggtaggtgctgtgctggccggagatttgcgcttgagggattcttttattttagagggttgaaggaggagggagagtcgaaatgtcccttctctgcatccgccaactgggcagggggtgcgggcattgggctgagggagcaggcattgggctgggggccggctggggatgttccaaacgaggtcgctgcgtcgggcgggggcgcaggggggaggaggtgacttctagggtttcgggctccgggacggggcgtaacgc

SEQ ID NO: 29153 - DNA, 372 bp, Homo sapiens
  chr4:155664665-155665037
  hyper
cgaaagattcggtcaggaaagaatctgcaggcattcgaggcgctcgcactttgcaaagtaaatgcaatctctttattaagccgaagtccctcatatctatccttttagaggaaggtggtccaactcagaaatctctcccaagaggactttccaccgaagactaccgcgaagtgccaggaactcgccccagtcccgacaggtgcaggacctttcgtgccgccacaccttgggactctacctccctaaataggccacttaaaagccagtagtgcaaccgggatcccgcggcgataaagaatcactgtgcagaaccctggagctgggagtcggcccgcccccctcccaaagaaaccgggatcccgcgtcctcccc

SEQ ID NO: 29154 - DNA, 726 bp, Homo sapiens
  chr4:159690014-159690740
  binary
cgcctcccgccggggttacgtgagcccggggcgggcggccgccgggccaatggccgccgccggggccgccgcgctcctcccgcgccgccgccgccgccgtggggctgcgggctcctcccgcaggagataactgtcagcgcgcgaggcggtggcgggccggctcagtcatatgaccggcagccggcggctccggcgccgagcagagttactcagtcgcagcggccccgcgctcccgcaaggctgggcggccgcgccgccgcgatggccccgccaccgcggccgccgcccccggctgcgcgctgagccgccggccccccgagcgccacggccggagctgcggcggcggcatcatggccccgaccctgctccagaagctcttcaacaaaaggggcagcagcggcagctccgcggcggcgtctgcccagggcagggctcctaaggaaggacccgcctttaggtgagggggcgccggggggcaattctggcgcgggacccgagttggcttcggtgctcgccggggaggggacgggtaggggaaagggaagggactgtccaggacggcgctgcctatcgccggcacctggtcccgggcttgtcagcgtggacgcgcctgatccgagtgtggctccggaccctccgtgacccttcctcccgctctttctccacaactcagggtccttccccatttcagagttctcttgtgttccttggggttcccgggcgtgc

SEQ ID NO: 29155 - DNA, 359 bp, Homo sapiens
  chr4:164253781-164254140
  hyper
gaactccacctcatcccggatcacgtgacggcgtcccgcgagtagcgcctgaagctcccccaaccccacaaacacctcacaaaggtgcacacctcggggaagcattgcctaggaattttggaaagaaaagcaatccaacagaagccacacattattcgacacagacctcccgcgcaggggaaaggaagccctaatccccacagtcctcgactccggggaaggcagggcagtttcccgaggcttgaaaaagtcggtgccactgtgcttttctttgtttgcaggtcagtgccatcttgtggccgaagtcatacccggctggagagctcgagcgccagcccaaaccaggaatcaaagggctc

SEQ ID NO: 29156 - DNA, 156 bp, Homo sapiens
  chr4:165304258-165304414
  hyper
cgtctctctgcctcgactggtcactccacttcctggagctccagaaactccctcagcacctggataactgcgacactcacccgtgagcgcaggaccctcctggcgtcttaagtcccagctctcagtcccgctggccgcaggaacacaatgacatct

SEQ ID NO: 29157 - DNA, 244 bp, Homo sapiens
  chr4:166300444-166300688
  hyper
cgccgaagcccaggagcccggggcgcccgcggcgggcatgaggcggcgccggcggctgcagcaagaggacggcatctccttcgagtaccaccgctaccccgagctgcgcgaggcgctcgtgtccgtgtggctgcagtgcaccgccatcagcaggatttacacggtggggcgcagcttcgagggccgggagctcctggtcatcgagctgtccgacaaccctggcgtccatgagcctggtaagggc

SEQ ID NO: 29158 - DNA, 63 bp, Homo sapiens
  chr4:169552556-169552619
  hyper
cgccggtggaacttgcctgttaccttcttacaattccccccgcccctgggcaacgcaaaagcc

SEQ ID NO: 29159 - DNA, 31 bp, Homo sapiens
  chr4:170947105-170947136
  hyper
cgcgctcctcgccctcggaaggttacggttc

SEQ ID NO: 29160 - DNA, 103 bp, Homo sapiens
  chr4:170947173-170947276
  hyper
cgccccgcacggatctcgaagcatcctgcgaccccctggagcccgctgcccggaccctgcggcgtctcgcagcgcagcctccgccgcagtctcagccagccca

SEQ ID NO: 29161 - DNA, 172 bp, Homo sapiens
  chr4:170947867-170948039
  hyper
gctctctctcccgcccggggcttccaccgcaacttctgtgggcgtcgcatcgcacgcgtgttcaaggacacccaggaaaaggcttcttagggtcccatcctggggcgctaaatgggaaccagtcaacccacccccaagcctaccctgtctccttgcaatcaaatgcaatcac

SEQ ID NO: 29162 - DNA, 427 bp, Homo sapiens
  chr4:170948089-170948516
  hyper
cgctgtaagtcttaaacgtctcttaaagcaaagtccacagatggaagagtctggaaaaaaacccagcgggccgttccctggtgactttctgagtggtggggttccaggaatttttttttcattttctttaaaaatattatttgtaatttccacgttttttctaatgaaccataagttgattttttaattaaaaagtagagtactctaaaattattaagtacctacagaagtttcgctacacgatcctgcaatgttagtggcttcttctcctccttatctccctttttttttttttttttttaattttaaaagagaacagagactctcaatttctggggcgggaccaggctccttcccccggctttttagtgcccgccctcttggccacaccccactccggcctttttactcccgtaccgccctcttc

SEQ ID NO: 29163 - DNA, 941 bp, Homo sapiens
  chr4:171010636-171011577
  hyper
cgcagagcctggctcaccgcgagcgtgcacaggggtacgcatggatgcaaccaagcggtggcttgctagggaaccctccttagaggctgtgcgaggaatgccccaccccaaaggagagatggtcaccccgtttctcactcatggtccggatgggagaagggtttctggctgcgctcgctgccgtgatgaaccgtgcgtaattcatgtcttctgacagccaagcatcaagcttcttcttcagtggttgaggactagaaaaaccaaagagcctcgtcaagtcctgcctgctaactcctcactctggcaacgccaccgcgagatgtgtccccccgctgcgtctggcttcccgcgcgcggtgcccggagaacgccgccgaaactccccggctggacgctgcgttcggtctcccggtcctaaacgggtctggggctgtgtggcgagcccggcaaagtccacgccgcacgcgctcctgcggccgccagggcccaggccggttttgccccgccgcgggcctcgccgcgccccctcccgccccgcgccgtggcctatggccgcccgcggcgcgcgcctccccgtcccggatcatcgccctcagagcgcagggcgcggggtagcccaggcgcgaggcgcttgcagccccaggccaatgactcttgacctcgccgctgggaatcaccgcaacccggcgtccgcgttggccggcctaggcgccggcccagaggctagcccaggggctgaccgaggggaccggaagtgcccgtgatcctaatcctcgggaaccatctggcggcgacttgggtccactgcagggggctcccgagctgcgcccagccgggagcggccccaccctcgttcccgcgcgctccgctggcctcctctcagtcactgggactgtgcattttgcccgctcagaccatggctatgctaaatacccatctttc

SEQ ID NO: 29164 - DNA, 187 bp, Homo sapiens
  chr4:1796303-1796490
  binary
cgagggcgcttccccgtgggtgcgcgccgagctccaggcaagcgaggggcgcgtgtcccagcgtcgcgggccctagactgggctggcggtccaggtcccgcgggacgtcgagggtctgaagggaggtcccaaggggcgaggggaggggaaggggcgcccggccggacctgcacacgcgccgcggttc

SEQ ID NO: 29165 - DNA, 549 bp, Homo sapiens
  chr4:1796598-1797147
  hyper
aggccttggcccggtgagctcgcgccccacccgggccgaggcccgaacagccgcttctttgtacctcgacgcggccacagaccgcgcattgatggcggctcggcggctcgcggggaggtgtgagcgaccgcgggcgcggcgggccggggagggcgcctggagggccgaggcagatggcgtccgccccgcccgcgcccccgcgcccctttctccgtcggcggctgcagcctcccggaacaatgtcattttttttatgaatgaaagtggcccggcgcttgaatgtgcgtgtcattcagcggcgtgacaggggccgtcgggaggtcagcgcgcgcttttagcgtctgctcgggcggccccgcttccaggggtgccggaggggcggccgcggggggagcttggctttcgcattctcattcagataaagatattactccctacggcccgggaatgtcagccagccccggggaagggcggcggccaggctgcggagcctctcctggaccccctgcgggcgcgcggggcctcccccagtcgctcctggaacgcccc

SEQ ID NO: 29166 - DNA, 207 bp, Homo sapiens
  chr4:184019900-184020107
  binary
tttctccggaggagagctccccgcccgccacccctttcctctcgaaagttttgtggtttccctagaagacgaaagaggttgagaaggttgcggagacttttgcaatcttccccgtccagaaactctaaaacctctcggcgtttggcccaggggagctatctggggtcaaggggagggagctggccgcacattccttcgcccgccttc

SEQ ID NO: 29167 - DNA, 366 bp, Homo sapiens
  chr4:184718835-184719201
  hyper
gcgcggcagatgcctgggaagatggagaagtttctgcagatcgcgcctcactccctggccatcgtcctgggcccggcagaggcgccggcgggggaaaggccaggggcagcccggcccgcgcccccggcccagccccgccagctcgcccggcaccacatcggctacgagatcttcgccgacttcaaagccgagaacatgcagcacttctggaacaagaaggtcacggccgcggtggccgagaccttcttcctgggctggatcgacgagcaggtcctgctgatccagggcaaggaggaacatctggaggcgctgcgcgaaggctggacgcgccgggccctgcggccgccctcgggcttccacatccgc

SEQ ID NO: 29168 - DNA, 521 bp, Homo sapiens
  chr4:184719413-184719934
  hyper
gtcccattcccggtgcgccgcccccgcctgcccgcgggagcctccccggtggcgggcggtgcctgaggccggccaggtgggcgccgcggctcggcgggcggctcggagggcgcggcgctcggggcgcgtgagtgtccccctcccggcactgctccgcggctggagtgcgcgggccgggcggaggtgggcggggaggattccggggctcgggtcgcgcggggctcccagctggagcggcggctcaggtgcgcccgggacgcccttccctgggcggcgactgcgggggacgcgccgggaagctagggttgaggctgagtgttgcgcgcacgcatttctcaacgaggcaaggctgcagagttcgtcttaaatgtctcacctgcagcacatctctcaagtcgttttgtgtgtctgagggaaggaagagacacaaagaggccggaggaaaaaaaatctgatcctcaacaaaagagagcaaaacgtaaagaggggcagagtcgcccagaggtgaaggtcgccgccgc

SEQ ID NO: 29169 - DNA, 183 bp, Homo sapiens
  chr4:187647457-187647640
  hyper
gtttaaacttaaatgccaaaaggcatgcacgatttgaacaaagaactcaccagtctagccgagtcctcggccctgggctctaaagtcctcggcagctccgtgatcccctcgcggtgtagatatgtgttaagagccgggtttgaagtaccaactttgcctccccgggatcttcagcatgtccct

SEQ ID NO: 29170 - DNA, 394 bp, Homo sapiens
  chr4:187647669-187648063
  binary
gacccaggcggccgcatctccggaggcttccgaccagggcaaacttaagcaccaaacgcaggcgaaaagagagtgcgcggggccggaacgagggcccgggagcagccaagtttgtcaggacgtgcccaggcagccagccgccgagttgaggagttgcggccgccggctgcggcgactcgctgcctctttccccactccctcccccttggaggcggtgggggaggggaggtgacgtcagcgccccgcctcgccccccgccccgggcgcggacgggattctccggctgggcgcgccaccccgacagtggcagcagcggccgtggaggctgcgggggtcccggcctctgcggtctctctggccggccgcagctgtggcgcgggtgaaacgcccgccc

SEQ ID NO: 29171 - DNA, 239 bp, Homo sapiens
  chr4:187648119-187648358
  binary
gcgcctggagccgcctggagccccgctgcgcgcacttccccggctcgcggagcccctccggcggcgtttcccacgccgcggactgcaggtgatgctcttcctcttctgcagccgaaattcgtcgcgatgtgtcgcctgccagatttttgctgggcggaagcatgaacagtctctgcagactggcctggacgacttgtactttgtggccctccaacttctggatgtgaattttttttcac

SEQ ID NO: 29172 - DNA, 145 bp, Homo sapiens
  chr4:24914262-24914407
  binary
cgaaagtgcaggaggagcggcgcacctggcggggtcgcgcgggtgcggcagccgcggccacttggagtgcgcgcccccctctcgtccctcccagctcggcctctctgggggcgcgggcccggggctggcggccgctcggcccggc

SEQ ID NO: 29173 - DNA, 72 bp, Homo sapiens
  chr4:24914804-24914876
  binary
gggaagccagggtctcagcctacaggtcactccggacccctcagcgctctccgcgcgggaggcgggccccac

SEQ ID NO: 29174 - DNA, 95 bp, Homo sapiens
  chr4:25031950-25032045
  hyper
cgtcctccccgggggccaacactccacccacgtcccccacacaaaggcaaagaaggggcctggggagtgggtcagggtcgcgctggcccggcgcc

SEQ ID NO: 29175 - DNA, 461 bp, Homo sapiens
  chr4:25032103-25032564
  hyper
aggggtcccactcacagggagctgatgtcgcccggcacgatcctgggcacccaggaagagcccacgcagatgatagactccttggtacagctgcaagtggcggggcagcgcgccagccgcctcacctgcgcgctccgcggtatcaggcacgcggcgcccagcagcagcagcagcagcccgagcgctccgcagccgcctctccgcagcgccatgcccggtccccgctccccgcccgggccccgacccccaccgccgcgccgcgcgctcggacccggcgccgctgcagacgcgggcgccgctcgctgctctgccgccgccgctgctggcgaggactagggagccgcgggtgtgggaggccgagccgcagccgagcagcatgctggccgccacccccactcggcgcccccccacccgagcccgggctgctgggcggccgccgccgctgcgcccgccgcactcgc

SEQ ID NO: 29176 - DNA, 284 bp, Homo sapiens
  chr4:30720964-30721248
  hyper
cgtcgtctgagagggagggagaaggagaaacctatcctgacaccagctccgaaagctctcacgcgtgaactgggcattagtcaagggaggaggaaatttaccagcccgagggagggaaaacaagtcccccagagaagacggcggtactcgctagggagggggactgggctttggcttaaagaggactggctgggattgggcacactttgagcggcccctggagctgaggctgggctttcccgagcgcggcggctggctgacgctccctcccgcctccttatccc

SEQ ID NO: 29177 - DNA, 304 bp, Homo sapiens
  chr4:30721470-30721774
  hyper
ggcggcgggagcgcccgcaccagactctcccagacgcgaaaagggacgagacaactgcggaattcaccagccgtgccagggcacttccgaggccacaaccgactgacactttttctccccttggcaaactggatttttttttttaagctacttggcagctgtctctgactccacctccccctccacccccgcccgaaagcctttggcttttcttcggaaatccagacagaattgggcatctttgttaattgccgttggggacgcccggccgtgcgctttcgccggctaacgtcgcctgtgctcc

SEQ ID NO: 29178 - DNA, 221 bp, Homo sapiens
  chr4:30722023-30722244
  hyper
cgacatgcgggccgaatgcaggtgagaaaaggcacggactctgcggctgcgaacccaaacttgggcaccgcacggtgcgcactgctcagccttcgcccccgtgggcgaaaggctgctgcggtttcaggcggctgcttcgtgactaatgaccttgcgcagagttgttaagaaaaaagagaaacccgcgctctccggggtgagaagggactgactctgggcgt

SEQ ID NO: 29179 - DNA, 548 bp, Homo sapiens
  chr4:30722273-30722821
  hyper
cgcgccggggggaccctgacactgaccgctctgtgacgcgagtagtctcccctgcaccgtgcccgaagcgacgtgccgggggatttttcattctcgatctgttgactggctcccccgctgcatgagcagagtcggagttgagactggcttgttgctggccccagcgcctggtgcaggaagcgactcacgtttgtctgggtggccggagccggagcagagcctgggtttggagtgagtgcctggaacgtgaattggactcaactcgagtagcagcaaagaccagcgggctggcaggcgggggaggctgcaggctcattccccacctcttcccagccccactgcccgtctgccggagcggttctggccccttccgacagagcggggactagagccggggattctccgcccgctgaggggatgactctgggttgggggagcgccgaacccgcggcgcgcagtgtcccgtgaactgtgagtactgcgactgaacggcggcaggcgagcgggcgattagcacccattgcatgaattatgaaacaataactttc

SEQ ID NO: 29180 - DNA, 398 bp, Homo sapiens
  chr4:37455033-37455431
  hyper
cgtggtggtggcgcccccgctgtttctaggtccatgtagctcatacagggctggccatggaactcacagcaggtctaggcggcgaatgccagaaataaggaggaaactgaaaaatgccaagttctcggggtttgggagtacacaactatttgccagcgggtgcatttgttttgtgtatccccgtactccagtcccttgatcataggaagctcccttctctccagcgcaacattggagtaagcaccccggagtttcccgtgatggcaggcggttggcgcggtcgtttgtgctcagaggccaacaagcgcgtggattttctgcttcagtgcgcccgggactgccaccccggccccggggatgtcggacatcgtactccagggtttcgagccctagccccg

SEQ ID NO: 29181 - DNA, 330 bp, Homo sapiens
  chr4:37455485-37455815
  hyper
gcagcccgggccacgtgacgcgcgggcccaatgacagcgctggggcggccgctgcgagctcggcgggctcagggcagcgcggagccgctagcgtctcccggcgcggctgcccgaggccggcgaagccatgggcgccgggaccccgccgccgccgccgccgccgccgtctggccccaggtagggacaatcccccgccccgcgcgcgcaaagagggctttagtcctgcggaacttggctttggggcgagctttcccccacttctctccgagtcgcctacttttaagtttaatttcttgatttgcttttgccctgaaaaaaaaaattagagac

SEQ ID NO: 29182 - DNA, 138 bp, Homo sapiens
  chr4:3767158-3767296
  hyper
cggggagcgccgatccaggatctggtccggaccctgagctcggcaggacctgtgcgcacgcaggtagcgtcgcgtcctcccccaggctgcgagaggttgctctgccatcaggccatggaccccgagccgcccgtgctg

SEQ ID NO: 29183 - DNA, 275 bp, Homo sapiens
  chr4:3768207-3768482
  binary
gcggtccccggcgggcgcgcccgagcagcaggcggcgatgcgggcgccgaccccggctggggggcgcccgagctgccgcggctgcgccccggctccaggagggacggcgtagctcgcgggaggaccatggcgtccccggcgctggcggcggcgctggcggtggcggcagcggcgggccccaatgcgagcggcgcgggcgagaggggcagcggcggggttgccaatgcctcgggggcttcctgggggccgccgcgcggccagtactcggcgggcgc

SEQ ID NO: 29184 - DNA, 53 bp, Homo sapiens
  chr4:41362252-41362305
  binary
cggcgccgggccaggggctgccccgccttgcccctacctctgcggccaggaag

SEQ ID NO: 29185 - DNA, 349 bp, Homo sapiens
  chr4:41363167-41363516
  binary
tgcagtctagctgcgcgcgtgagggcaggaagggatcccctgcgcgtccatccttcctgcccgctggcctcgcaaatctcagctagcgccgcttccaggcgctgccaagggaagcgcagtgctagcaaagcgttgcaaaggcgcaggaagcgcgagcccccagagacttcaccggtgctcgcatttcggggtatcttgcttctggtcccacatttcgccccttgtccccctaccccgcacccttccggagcagagttggcagtgtcttcacggaggcgcatacccaccggagcctcttgctgtattcctggcaccgggtcaggtgtgaggctggcacagtgcgcagggc

SEQ ID NO: 29186 - DNA, 66 bp, Homo sapiens
  chr4:41752247-41752313
  hyper
cgttcagtgtttgccaaactaagtggtttaattcgatgctagtgccggggagtggatgggctcccg

SEQ ID NO: 29187 - DNA, 240 bp, Homo sapiens
  chr4:53617162-53617402
  hyper
cggccggggttgggttcctgtcgccgcacgcgtggcccgcccgaaacccgctacaaagtagcggcgtgtctgccctagggaggcaaagcgcaaacttgttaccgcgccgggacctgccccgggattctcccagcggctccgcaggacgcagcgcctgtgcctcgcgcggccctgggacgggcacggccgtccgccccctgggccgccgagggctgctttacccctccgttctggccgcgg

SEQ ID NO: 29188 - DNA, 242 bp, Homo sapiens
  chr4:53617560-53617802
  hyper
ccaagaagaaggctcgcggcgggaactgaagtgagcggggacacacgagggctgggaagatcctgggttggggcggagcggggctgggaagatcctgggttggggcggggcggggcaccgcagagcggacagccggattcaggcaccaggaacccaccggtcccactggccaggtgctccgagctgggtgattttctcccgctcaagactaggaacatacctgcgctttcggcgcagggaag

SEQ ID NO: 29189 - DNA, 145 bp, Homo sapiens
  chr4:5890606-5890751
  binary
ggaacgttcttgtccctccaggatcgcgcccaaggaccgctcccctcttgcctctccttccatagcctccgtttatccttcccgagtgcctctccctgaatgcaccaagcactttttccatctcggaccccaagcctttattcac

SEQ ID NO: 29190 - DNA, 207 bp, Homo sapiens
  chr4:6201673-6201880
  hyper
ggggctgggggcgggaccgggagggggtgttgggggaagcgacgcagcggctgggagattttgcaagggggtctgaagaggagtgggggatgggtatggaagggtgggggaccactgaggtgggatgcgagagtggaagggggacccagagggggcgcgatggccggaggagggggagatggacgatggggcggggcggcaccggtc

SEQ ID NO: 29191 - DNA, 65 bp, Homo sapiens
  chr4:6202658-6202723
  hyper
gcttgcaggtaaagcggggctggggccgtcctggccgtcagtggtcaggaagacgcagcgacccc

SEQ ID NO: 29192 - DNA, 821 bp, Homo sapiens
  chr4:6271360-6272181
  binary
cgctgtgggcgagccggacccgccttctggcccctcgggcccaaccacgcagggggagtgccgggccgcagctaggcgaggcgcaccgtgattggcggagatgtggagtgattggcggctacaccggccactcagcaggccgagctggcgccgcatccggggggccgcgtctggagtggagggaggccgaaggccccgcccctgccccgccccctcgtgcagaaggccgcgctagccggctcttcagcagcgagtgcagattgctcccccgcggccgcagatctcccgtttgcgccgcgttcagctgctcccgaacaacttttctgccggcccagaggccccagggcgtcgcagcgccgcgtgcggcccactcacgggccggtgagtacttcggcgctggggcagtggcgcggtggctgtgggcagcgcgcaggaggcgggcaagagccctgaggcactgtcctcttcgggcctcagtttccccttccgagctgatgggtggctggccccaaagtcccgacaaggtccccgaagttggagggccgggggtcccgcccgctctgcaacgcgcaaggcgacccctgttccgggcccgaacgggtcacccggggggcgcgccccggtcccccgcgcgctgtcgcctggagccccgccgcgggcgggacagcaggcccgagaggcggagcggccggcgggcaggccccctccccgcgccccgcgccatcccccccgagttgccccgtcatgcccctcccccgcggtcccgggacccacggccgccctcggtgcccgcccggccgttggaacgcgcctgggccccc

SEQ ID NO: 29193 - DNA, 165 bp, Homo sapiens
  chr4:6473630-6473795
  hyper
cggagggcggcgcggaggagggcgctgccctgtgccggcgctgggcagcggaggccggtaccctcgggctccctccctcctgggccccgggcagggtgggatgggatggggtggggtggggtgggatggggtggggtggggtggggcggggggacacgacacaca

SEQ ID NO: 29194 - DNA, 46 bp, Homo sapiens
  chr4:6474487-6474533
  hyper
tgctgggtgcgccacgggggagggaggaaggagaccgccagcttgc

SEQ ID NO: 29195 - DNA, 215 bp, Homo sapiens
  chr4:7194882-7195097
  hyper
ccctacccgggacaccgcgggacacccgggcgggaccgccacggcccccaccccagatccccactatggtcatcaggggcgggttcttggcgacttgggcacttgggtcacctcggccgcgcccctactggcctctggtcactggttacttggggagaggtcctcagattcgtacgcttgtctcaccgcaggggacattcccgcagatttcggga

SEQ ID NO: 29196 - DNA, 356 bp, Homo sapiens
  chr4:74904434-74904790
  hyper
atgcatggttgagactggaaagcccggagcggccgggccagggaaattcccggagctccagatcgatccggagtcccgaaggaaggcgacggccccgcccccggggtggagtcggatacgggtagggggagcccactggtgacgcctacgcctcgccctccagagtaacccccgtgcactctgggactttgggatattcattttctgccccaaattcctggagaggcagtgagtccacctcgctgaagatacagcctgtgaggggggaccttaggtccccgatgaccccccgcgtacggggtagggttggaggaaagagctggggggacccgtgagaaccaggacaggaaaggcac

SEQ ID NO: 29197 - DNA, 422 bp, Homo sapiens
  chr4:77172549-77172971
  hyper
cgctcctcctgccttcttcctttctttccttcagtaaacgttttttgaaacgatgatgagcaaaaaacgcctgatccagtctatggcgcgtttcggtgggaagatgaacacgccttcccagcagagtaaaacgtgattacaccaaggaccggtaccctctcccttccctcggccaggtccacgtccccaggcgtcggagaaggggttggaccgcgcagcggggcgtcagagttgccaggcgcccggggcaaataccggcagcggtggttgtgcggtgtcctagcaacggggcggcagcagggcacacacaccgcccaagcccggacggtggccgcgaagctagggccaccatggcggaccgcaggcggcggctccggccggggacgttggccccggtgcgcgagggcgtgaactgcaggtcc

SEQ ID NO: 29198 - DNA, 86 bp, Homo sapiens
  chr4:77173055-77173141
  hyper
gggcgaggggagaggtccagcctgccttccctcctcaatgcttcctgtacgtacaacataatacgctgagataaccaacgcttggc

SEQ ID NO: 29199 - DNA, 362 bp, Homo sapiens
  chr4:77227668-77228030
  binary
cgggaacagaaagtgtagggacagaagagcgctggagtcttccccgggagggagcccggggctgcagcccaggggcggggagcggggcggggctgggaaagttgagtactggtcgctcagggccgggctccgccggagtgcccggcgcagaaaccgtaaaaggctggagcgggcggggtaggtgtggctctgtgtgcgtgacctgagccccggtcccagtccctgtagtctcctgcggccgcggcctctcagccatgggcgccgtctggtccgccctgctggttggagggggtctggccggagcacttttcgtttggctgctgcggggcggccctggcgacaccgggaaggacggggatgcg

SEQ ID NO: 29200 - DNA, 78 bp, Homo sapiens
  chr4:77228452-77228530
  binary
gggcggctgcagtggcggcgccccttcccggcctttggaaaggggggcttaggtttaggggatcctacaagcctcttc

SEQ ID NO: 29201 - DNA, 668 bp, Homo sapiens
  chr4:7940425-7941093
  hyper
cgctgagagctacaaagttcaatctggctttccagattttttttttcttcccattactaacggaagaaatcaagaagctccgggcagtagggccctgctccctccaatcagagcccagcccggggccagagcaggaagcgcggcggtgggacgcgcggtgacagccccgcgccccccggggcccgccggccaggggagaggacggtgcggccgctgcgcgacagctccgggcccgcgcctctcgcttccacccgccgggcaggtgagaggataaatcacggggcggggcagtgcgcccccaccaaccgcgccccccgcgcacggacccccattacactcgcgtcccaggcggggtcgacccagacgagccacggggcggcgcagagccccactcgcagggcggccgggacccacgcgcgtgggtccacgcaacaacctataggtgacaaaacactcaggaagccgtcatgcggggccaagaaagagcccccatccagagtcacggaccccctcgtccgagggtccgcgcagtcccctcggtaagtcggacgaagcagtctcgctacgggggagggcggcggagcctcccactcttggtgacccggaccccgccccacgagtgggtcttcgcagggccccctctgacgcacacggggaccagccacgcc

SEQ ID NO: 29202 - DNA, 33 bp, Homo sapiens
  chr4:7941129-7941162
  hyper
cgcagtcccctccgggcagacgcggggagctgg

SEQ ID NO: 29203 - DNA, 523 bp, Homo sapiens
  chr4:7941191-7941714
  hyper
ggacgaccgggacccccgcgcgggcccacgcggcgtcgcagcaggcgcggagcccccggtaccacccgaggccgagacaaagcccaggcgcacggaccccggaccctgcggagccccgctcggagcttccacgcccggggcagagacccccgccgggtccggagaccctgccgccagtcgcgccgtctcacctcaggccgccacctcgcagcgctcgctcctcgccgcggcgcctgggccgactggagcgcagctgaacagccgacagagccgcagccgccttaacaatggagccccggggcggggccgccgccgccgcctcagcccgtgtaccccgctcgagatccggctcggctcgcggagctgcagccggcgtggggctgcggccgggacagacaccacgcaggcgcacacggccccgcccgccgcccgccgtcccgcccccagcggagccgggcgcccagggcccgccccccggccaatgggaagcgagctgcgcggagtgggcggggcctgagggaac

SEQ ID NO: 29204 - DNA, 628 bp, Homo sapiens
  chr4:8159728-8160356
  hyper
cgcggctgggctccagcgctgtgggatttttccagccccgcacagaggctgtcagatcccggagggtgggtgcggcgggaaaggcaggggtgcgacgcgcaggggcgaggggctggagacgcgcagagatcgggtcggggccgggtctgacacatgcgggctccgggtccccagatctgctgcggagagtcctgggcgccgagggtcggcctgacgcccccaacccaggcgctgccagagcggcgcaagggcggcgcccccagctgcaaagccccgcctatcatctcacctctgcgtgcctaggtctgctggggccccggcccttcgcccggaccccaggcccccgcgcggaccctgaccgctttctgcagcctggaacaacccggacccccgtgagaagcaaagaaggggcgccttccagacatcctggcgcagccacgccggccggcgcgctgggaaaggatccccggcccgcgccactgagctacgcgctccgggcgcagggcagagggctgcgctctggcccctcggggctgcaaaatcctggagcaaaagttgggtggagccgctgggtgattttccccggcgttgcaggtgcagcctccgaatgccacccagcccttgcggc

SEQ ID NO: 29205 - DNA, 142 bp, Homo sapiens
  chr4:8160429-8160571
  binary
cggagtcggggcggcccggcgctgcgacagccagaccctcgggcccgcaggtgccgcgcccgcgctatcctccgcccgcccgccggctccgcgcccgctccttgcgcacacgccaggcagcgccgccgcagccccacggcgc

SEQ ID NO: 29206 - DNA, 289 bp, Homo sapiens
  chr4:819440-819729
  binary
cgaggaggaggccgggcgcgggccgggaccgcgggggccgcttcagcaccgcggcagtggacagcgcccgccccggaccccgcgcgcgcggagcccgggagagaaacgggggctgcggggagaagccggggtcggggggagaaacgggggccggagggagaggccggagccggggggagaagccggagccggggaggagagacccggggagcggaggccggggggaggagctgggcgaagccggggccgcggggagaaggggggccgggaaggagaaaccggggccggc

SEQ ID NO: 29207 - DNA, 234 bp, Homo sapiens
  chr4:82965099-82965333
  hyper
cggaagacccccaggcccgccaggggtccctgaggggacacaccctccacctacctcaaacatgggagaggcgcccttgctcggcaacgtgcagcccaggagctcggcgagaaactttgccatatacaagcggtgaggcagggtccctcccgatgcgccgtttctgtcctttccccttgccagagcccgagcgccaggatcctgcccgcagcccgcccgccagccggggccgtg

SEQ ID NO: 29208 - DNA, 53 bp, Homo sapiens
  chr4:83482632-83482685
  hyper
cgcttctcacccgagtccacccgataacgagatgatggggcggcgggtgggga

SEQ ID NO: 29209 - DNA, 115 bp, Homo sapiens
  chr4:83483372-83483487
  hyper
cgcgtttgcctggcgctcctcatccaacaaaaggaaggacagaatcttggatcctccgcctggtggttatttattcctgacctgttgtaaccttctgcctggctctctttcgtcc

SEQ ID NO: 29210 - DNA, 701 bp, Homo sapiens
  chr4:85419891-85420592
  hyper
actgggatgctctgctctttcggtcgcgcggctgattcgcattcgacgctcactgtgcccggggagaaagcgcatccagcccgcgggagatctagcctctgtgcgggcttcctccgcccacgctgccccgggctgctgcgccagaaagggcagtgccacggatccccgcggctcccaggtcctcacctccacccgccttgccctctggcccacggggcactggagttgcaatattgaaaagaaaaagggggaggaaaaacacagaaaaacaaaagactaagtgtgaaaagtctgacggctgggtttcggcgccgctcgtcagtccacttctgcaaacgggcccggcgacccccgccccacccccgctccctctctccctctcactctcagcctttgactctcctctctggcattttcttcgcggcttcccaggcttcggtcttctaagtcctgtcctctggccaaactgaccctctccgcggctcctccgctctttctctcctttcctctctccctccgggcctgacagttcagatgaagctctcaaaggtaataaaacatttgcatcactccctacccctctttagctgggggacgaaagggagggggaagtgggggaccaaaatgagaactttgagggacgtcactccgaggctgcgggggccggcgagccgggcgcaggccgggggcgtaaccaccgt

SEQ ID NO: 29211 - DNA, 311 bp, Homo sapiens
  chr4:85503546-85503857
  hyper
cggcgctgcggttgtgatcggaattgttggccgacgcacctctggacgcccagtgaggcaaaagcatctcctgttttcaaggtgatgacactgggctggaatgccgcggggccaaccagtccgtcctgccagacaagtttctggtccagtgagcctccgacccgccgcgcgtgtcaagctgacaaggccggggaggcgtttgaagcagcagtgttgagcgctgttaacatttagcgggcgtctttgagtagctcctccagccctcgcagcggcccagggactagcctgcaagttctcaacgctcacttcca

SEQ ID NO: 29212 - DNA, 251 bp, Homo sapiens
  chr4:85503985-85504236
  binary
cgtcacctcacggggaggcggggctgtgggaaccgcagtgcagcgcagaggggcggggcctgcggcgcgagacctggtgcgggaggcccgggcagggagaagtgtgcggggccgggacaagccggctccgagtccggctccggggggcggggcgggaggggcctgcgcggcggcgggagcccagagccgcgctaaagcgggtcaagcgtcctccttttctccccgccccttctcctcctcctacctgggcc

SEQ ID NO: 29213 - DNA, 297 bp, Homo sapiens
  chr4:85504793-85505090
  hyper
ttcctccctgcctggcactgcttcctccttctccagagggggtcgggacccgggatcccagtggcggtgaggttcccaggatgaccgcggccgctgcccgggagaaatgggccactcaacccggcttacagtttagcttcatcctcttccggtcccttcttcaggatctggggccgacgctggaatcaggagggaacctgtcctcctaggggctgcagtgcagttagtagctgccacctcacctctcttttcagtagagggaacaaagttagtaaggactagagacgtgccaccgtc

SEQ ID NO: 29214 - DNA, 307 bp, Homo sapiens
  chr4:85886808-85887115
  binary
cgaagggcttccagcgtagggcgtagggggagaggcccgaagccctggagacagcgcccgagggatggaggccgcgctcggctgcgctcaggtccgggtggctccgggagctgagaccccgcaggatgcagcgggggggggccagggcctgatcccctacccctgcgagccagggccgcctacgcccccactgcttcccacaggtaacgtccagccctctcctcccctatcccccgaaatatcccggttccgctccgctccgctcgccgcccgtgaccccgaccccgacccgtccgcgacggcgccc

SEQ ID NO: 29215 - DNA, 679 bp, Homo sapiens
  chr4:85887200-85887879
  binary
acagcagctgggccgcggcctgtccctagggggagcgggcgcagggccgcgagtgggcagcgcctccgccccgcacgaacaaagcggccaggcgcgccgggccgaggcagcaccgcctctccgggagcgcggggggcggggaggatggcgggggtactcacctgagggccggcggagggcgcgggcgggacaggcccaggagacgggaccgcggcgggccggggctccgcgccgagggcgcacgggctacggggaaggggcgaccggcgcgacgtccgcggcggggcccgggagccccgcgccgcgggccgggggccggggcccgagctcgattctgcggccgcgaggtatgggaaccggtccgccgggccaggcagcggtgctaggcagcaggggcagcgacgccgccgcctttcccttctcctgcccccgtccctgctccgccgcgtcctcgtcctcgctgggtccccgccgccgccgcctcagcctcggcgctcctcgggtttcttctctccatcaaggccgggccgacccgcagggaccatcccggaaagtgaggggttgttgccgtttcccgcagctgttggtggccatctttaatcctcctcctcctcctgctttctccacctcccgctggctgtctgactgactgactggatcctcctctttcccctcctgc

SEQ ID NO: 29216 - DNA, 439 bp, Homo sapiens
  chr4:85887927-85888366
  binary
ccctcctgcctttccttcctctttccttacttccttcccttccctcggcttcccgctcttgcctcactctcagcggctgccttcgcccctgtctgcagacagcgccgctggatgctcccagctggacttcaaccccactcctctcagtccctctccccactgccttccagacgcgcctcttccccgccccgcgcccctctctcctctcccacccctgcccctctccgcggcgctcaccctcctcagtcccagtttctgaaaggactcagctgagaaaggacaactgggttccgctttccttaaccctacaccctttagctggatgctgtcagaggcgatggagaaacgcaaaggtgcgttaattttactctagccagagtataaaagaactgcccacgccagctattgtactacgcagcttcgaaactcctgcacgctc

SEQ ID NO: 29217 - DNA, 49 bp, Homo sapiens
  chr4:85888399-85888448
  binary
gttgaggagctcggtctcaaatggtgccttccgtcagtgaccttgagtc

SEQ ID NO: 29218 - DNA, 184 bp, Homo sapiens
  chr4:87515033-87515217
  hyper
cgaagagtaagggaggagccagcacttacgcatttttcactctcctcctcactccctagggtcatagttttgattctgaagttagaagtgtgggggtcgtcggctgcattttcaacttggcctaaaagttggagttcaccacactgcaggcgctaggaactctgccgctcggtcaccaacctga

SEQ ID NO: 29219 - DNA, 341 bp, Homo sapiens
  chr4:87813080-87813421
  hyper
cctgcacaggaaccacccgccccggcccgggcactttgagcagagcaatccttcccaggttttccctcattcaaaacactcagcaccactcccgcgtccccgcccttgcacgccgattcggggcgagtcccctacccttccccggacggacgcgcagggcccgggaggaactggttcccgggacgggtgggggcctcggccgcccacagagcccgcggagaagggaacggcctcagcctcggctccttcccacacctgggccccaccctgcctccgactcgccaggaatgcgctgtgtgcgcggggcttccagggtggcgggtccccgcgagccggcgccg

SEQ ID NO: 29220 - DNA, 313 bp, Homo sapiens
  chr4:87813512-87813825
  hyper
acacgcctcggggccgcgccgcaggcacacgcctccttcccgctcgccgcgggcgccgagtctggggctcctcgcgtcacacgggagcctcaacaaagggctttgtggggccctccccacccgccagggaggggacgccgggcccgggagacgcgccccgcggggtccgctctctggtaaccgggccggggcaggccgcgctctcggaatccagccaaccagccagagagggctgtaagccagacctttcctgggaaggacgctttccaatgtagggggctgcatccaagcgatctggacttcgtttgcgggc

SEQ ID NO: 29221 - DNA, 33 bp, Homo sapiens
  chr4:8873984-8874017
  binary
gtgtgcgcgcgcgtggtgtgtgcacgagtgtgc

SEQ ID NO: 29222 - DNA, 311 bp, Homo sapiens
  chr4:8894331-8894642
  hyper
cgggttcccgagagcggcggggggtccaaaggcgcgggcaccgatggcgggcggggccctcctgggtcctctgcccgccgccacccctcggcccaccccgcccgcagcatctgcgcgttttaagccggataagacgcttccttccctgtttgtctgggtttctttctcggttgctcaaggctctgatgtgacctctccaagaaaggacaccaatggccgcgcccccgccccacgacgctgcggacagcaagccgactccccccacccggccgcctgccccctccccgcgtcggtgcgcgccttggctccgg

SEQ ID NO: 29223 - DNA, 197 bp, Homo sapiens
  chr4:94749529-94749726
  hyper
gcggtcgtgcacatctgacccgagtcagcttgggcaccagccgagagccggctccgcaccgctcccgcaccccagccgccggggtggtgacacacaccggagtcgaattacagccctgcaattaacatatgaatctgacgaatttaaaagaaggaaaaaaaaaaaaaaacctgagcaggcttgggagtcctctgcac

SEQ ID NO: 29224 - DNA, 277 bp, Homo sapiens
  chr4:94749755-94750032
  hyper
ctttgattggctgctcgcacgcgcctgcccgcgccctccattggctgagaagacacgcgaccggcgcgaggagggggttgggagaggagcggggggagactgagtggcgcgtgccgctttttaaaggggcgcagcgccttcagcaaccggagaagcatagttgcacgcgacctggtgtgtgatctccgagtgggtgggggagggtcgaggagggaaaaaaaaataagacgttgcagaagagacccggaaagggccttttttttggttgagctggtgt

SEQ ID NO: 29225 - DNA, 61 bp, Homo sapiens
  chr4:95678999-95679060
  hyper
aaaaaaattccagaggcagccgaggagcgagagggaaaaaaaaaaaaaaaaaaaaaaaaag

SEQ ID NO: 29226 - DNA, 315 bp, Homo sapiens
  chr4:95679325-95679640
  hyper
gacgggtagcggctgggtgcggagctgggcggcggtcgccctaggcaggacggagcgcgcgagggagagggcgagagcgagggcgggctgcgcggccgtggggcggtggcggcggcggggagggggtcaggcggtggccgcctcggctttgtgcgcgggcggctctgccgggaccccgaggcctcgtgcctgcgcaggcgaggagtcggggcagcggcggcggcgggcgggacacgtgcttcgggctgtagggacgccccaaggcagggagtcggacctgcgagcggagggatggggcgggagggcgagctgagg

SEQ ID NO: 29227 - DNA, 63 bp, Homo sapiens
  chr4:95679745-95679808
  hyper
acccagccttgccgtgggggaaagtgcgcagcgggctggtcccggcgccttggactgggctcc

SEQ ID NO: 29228 - DNA, 210 bp, Homo sapiens
  chr5:1004778-1004988
  hyper
cgcctcccagaacgcggagtcgcggtggaagagggtgacgccgccgagagttcacgagcgtgtcccaagccgagtgaggagcgcgcgggggcgctcttgctcccaaggccgcacgagcgccaaggcctcgcggggagaatagccacggggggagacggggcccgcgctgcccccacgaacgctgttggtggggaccccacggctgcgccc

SEQ ID NO: 29229 - DNA, 117 bp, Homo sapiens
  chr5:1009142-1009259
  hyper
cgcggggcccggcggggcgtggcggcggcgatggggaaactgcagtcgaagcacggtgagccgcgggccggtagggcgggagggcgggcgggcgggcgtggggccgcctctcactgt

SEQ ID NO: 29230 - DNA, 151 bp, Homo sapiens
  chr5:1009625-1009776
  hyper
gcggccgcaaaggcgcggaggaagcggagcggcgcgcgcgggacaagcaggtaggcggcggggcggaggctggggtcgcgctgcgcacccgcccgggggcggggagcggtgtcagagctgttcctggtgcccgcccgcggacaggcgagac

SEQ ID NO: 29231 - DNA, 299 bp, Homo sapiens
  chr5:107005685-107005984
  binary
cgctctctctgcgcgcaccgggaaaagagaagggaaaattaaaattaaaaaaaaaaaaaaaaaaaaaaaaactttgggggatgtttggcgggttctctccgcagtccctgcggacccacgctccaggaaggagctcccggctgcgcacactgggggctccccgcgccgggaaccggatgccagccagatgccggggctgggaagcagagaagtccctactccccggctcccgcccttttccgagtctcccggcgccccgcagaagcagttggtctaggcagccccggggactcccaggg

SEQ ID NO: 29232 - DNA, 450 bp, Homo sapiens
  chr5:107006260-107006710
  binary
cacacacatccagagcaccagaaacaccagcgtcaacatctccacgtgcaacatcacgcctggccagcggcggagcccccgacgcgccactccggggagagagcggggatccggagggagggaggcaggcaaagggacagagagagagcgggcgccaaataaatatgaataaataaaaatgaaagtgggcgagaaaggaaagaggcgcccaccaagctggggaggggtaggagagcgagaagaaaagaaggcggtgggatggggggtgataaagacaaactcgcacccccactggagggttcaggaggaaaaaggaatcacaagatggagagaagcgtgcgtgtgtgtggtggcggcggcgagggcgggggaagaggtgccaagctgtgtctcgggcggcggcggcaggccggtcaccccgggagagggaggtgcgcgccgggccgggcg

SEQ ID NO: 29233 - DNA, 991 bp, Homo sapiens
  chr5:1111396-1112387
  binary
cggaacgggggacgggaacacggaggacgcggcctgagcaaggccccggtggctgccccctccccagccagggcgcagtccttcctgttccgcctctggggggtgggcggctcctccagggtcaggcgggggcaggacgggccggcccgggctagtgttaccggacggccgcggcgcaggggaagggagagcgcgggggacgcaggacgccccggctcccgaaccgcccgggtctccaccgccacccctgtcccactagggaccacccaggggcccgggctccctccggaggcgcgctccagcccctccccgtttccatggctaccagcagcggcgtccacacctctgcccccggtcccacccgagctgaccgtaccgggagccctggcagggcccctcgccccctagcgctgccactaacgtggggtgggggccctcgtgggggaccgagaacaggcggtgggggcgcgggaaggggcgcctcctgtacccccggccccgccgcccgcctccgctcccggatgccgggcccagacccgcgctcggggcgctcggcctttgtccggccaggtgcggccgcgctcacccgggctggggcgctcgggctcggggccctcgggggtgcccggagcctccgtccgctcggcagtctcgtccccgccgccgtcggcgtgagcctccacgggcaccacggtgaagttggtgggcatggccgcctgcagccgacagtccccgtcccggcccggcccgcgctgcgccgctcccgccgacgccacgggacttggaggcaggggcggggtccgaccgagccgccccgccccgcccgggccacgtgacttcacctgcttgccccgcggccccacgaaaagttggcccgcggcgacttcctgcagggaccccaacccaggctgcgtctgtctgaccgccgcgacccgggacgcggggctttcgctgcctgcgctcccgaccatcgcagagcccgcgaatcccc

SEQ ID NO: 29234 - DNA, 253 bp, Homo sapiens
  chr5:112823814-112824067
  hyper
ggccaacttttcccgcgagcttctgagcaacttgccgcaagttggggcgagggggcagagcaggggtcaagggcgcgcggagggactgatctcgctcctgtcggtttcctcgtacctccccgcgtacctgctgatgtatccgtccccgtcgccgtcgcacgtctggaagaggcgccgcatcctctcctcctcgccggtgctggacgtgtcgctgctgctgctgctgctgccgctgccgccgccgccgccgccg

SEQ ID NO: 29235 - DNA, 167 bp, Homo sapiens
  chr5:1155508-1155675
  hyper
cgaggtcagagggcgccccgggagctgtcggcccatccccgcggcccctgccccggctcggtgtcacctgcaggccccggacagggcgggatccccgcagggaactgccccaggtccccggagcgcgcggcgggcggcaggggcggggctccgctgggctgggggga

SEQ ID NO: 29236 - DNA, 74 bp, Homo sapiens
  chr5:11903295-11903369
  hyper
cggcgctttctggagcctggctgtctattgtcagcacgcagaagcccccgaaacctgtgaagccggctgcaaag

SEQ ID NO: 29237 - DNA, 168 bp, Homo sapiens
  chr5:129239570-129239738
  binary
cgcggagtggcagcggtaagaacaacgtggaaaggacggaaaacgcgaagagtggcgccctggcggacctggggcggggcagagtggtaagggtcacgccaggacgtacccggctgtgggccgggggaggagagcacggtgggacagcaacgaacttgctgggggctc

SEQ ID NO: 29238 - DNA, 243 bp, Homo sapiens
  chr5:129239782-129240025
  hyper
gggaggaggccagtagagcccccagacacgagtgtcgggaggccagcggaggggcgggacgggacgggaaatgggacgaagagcaagagctgggggaggagggaagagggggcgtcggcgctgcaagccggaggcggcccgacagggatcgtttccttccggagaggaggccggctctggactgaggcgcggacggggggcgtccaagggcgggtgacggggaaataccgcggcccgcgcttc

SEQ ID NO: 29239 - DNA, 35 bp, Homo sapiens
  chr5:129240901-129240936
  binary
ctccagcggccgagggggagcccgaggaggaggac

SEQ ID NO: 29240 - DNA, 144 bp, Homo sapiens
  chr5:129240962-129241106
  binary
cggccggccggggagtagccacaacggcagcggggacgggggcgctgccgccccgagcgcccgaccccgggacttcctgtacgtgggggtgatgaccgcgcagaagtacctgggcagccgcgcgctggccgcgcagcggacctg

SEQ ID NO: 29241 - DNA, 274 bp, Homo sapiens
  chr5:129241140-129241414
  binary
tccagccagcagccccccaacgccggccagcccccgccacccctgcctgtcatcgcgctaccgggtgtggacgactcctatcctccccagaaaaagtccttcatgatgatcaagtacatgcacgaccactacctggacaagtatgagtggttcatgcgcgccgacgacgatgtctacatcaaaggtgacctccctgcgccggctttccagcctgccagtctccccgactcctttctctgtaaccggtcctagcccctgcccagcccctccgctg

SEQ ID NO: 29242 - DNA, 227 bp, Homo sapiens
  chr5:134824599-134824826
  hyper
cggcggagggcagaagcgtcttcttggctggctagagaagctccgccggagtggcctcctcccctcccccaggccggggaggaggccgccgagggctctccaattggagagcctttcatctctttgtttttacagtgattaacccgtccgagcgcgctccgagcgtggctccaggcagcgcagggggaggggagaggacggctgggcaagggaagggagggaggagg

SEQ ID NO: 29243 - DNA, 176 bp, Homo sapiens
  chr5:134870248-134870424
  hyper
cggctcaaaccgaattttcatgctcgtttttcttcattagagttctacaaattgtaaaattgacttttcacctcgtcttcaggggctgatctgtcccttttctaaatcacactgaagtggtggctggggtcagttctgagccagtcacaaaggaggttttgtggagttcagaaagt

SEQ ID NO: 29244 - DNA, 341 bp, Homo sapiens
  chr5:135528891-135529232
  hyper
ggggcgggactggcggcggctgcccgggggagcggctgcgaaccaatgagggcaagagaggacgcggctgcgactgcccccagcccggcctcacatcactcagggacagagggacagagacagggacagagagagagagagaaagagagaaaagcacagggtcacaggaagactgacgggcaaagacacagttacagacctatgaacagagccacacgccaaacagggacaaaccgttgaggtaagcaaaccaactcagagacaaagctcagctgagcgtgcacacctgcgttcattatcctccttgacaggctccctccaggcatggcctggtttgttcc

SEQ ID NO: 29245 - DNA, 275 bp, Homo sapiens
  chr5:140346034-140346309
  hyper
tccccctctgtcttcccttctgtttccttttccctccccctggagctgtagcggcagcagcagcaggaagccgagccgggttgagcgactcggaggcgagcggaggagctggaatatggggagtcagcgaggacggtggggccaggagcccttgggagggcctacggagggagcggccccaggcgctttctagagcgtgagcggtgggggagcaggcgcagggtggcacgagcggaggcggggcccgggcgtggggcacggctggggaagctgcc

SEQ ID NO: 29246 - DNA, 439 bp, Homo sapiens
  chr5:145214425-145214864
  hyper
cggaaagctccacacgtcggtcatctgcaactccacggagctcacgagctgggattcccggaggctcttcctaaaaggaaagcctcttctttcagctggggcaggtgtgaacgtgatgccaagcacggccccttttcccgctccctgtaaagggagtcttcgaggaaatccctctcgacccacacatccctgaagcaaagcccgcagctggaaagagacactggcggtgccagcttccgcgtggatgaaggagaggagagaggggcaagcagcggaggcagcgcgggatacggaaggtggaagcggggcggtacctttcggagaaagctggcgaccacctgctcgaaggggtacttgtacacctggtgcacatccaccgagacccccatccccgcgcgccgcgggccccgcgcaccggccacgcctccgcgagctcaga

SEQ ID NO: 29247 - DNA, 235 bp, Homo sapiens
  chr5:145215152-145215387
  hyper
tgcctgggagccatcacgccccgccccaggaaacctggaccttgggcttatgcgtttatggtatcaccgcctggagtcacagaataagccgtggttggcagcacgggaaaaaagtattaataaggaaggcctggtgtgacaaaggccagcattactcatgccaccaggcagctgcctctgaggcttgggtttgggcctcgtgtaaggtaaagattgcctcgggaataagaaccgc

SEQ ID NO: 29248 - DNA, 127 bp, Homo sapiens
  chr5:148520933-148521060
  hyper
cgtccatctcacaaggcctcgtccatctcccatcacaccctagggcccaggcagaagcccggcggggcggggcctcggacacgcgccggtgcgtccagcaggtggcagcagcgagcggccgcgcccc

SEQ ID NO: 29249 - DNA, 45 bp, Homo sapiens
  chr5:148521331-148521376
  hyper
gtccggggtgcgcgcgagcaggcgctgccaaccccacttctgccc

SEQ ID NO: 29250 - DNA, 253 bp, Homo sapiens
  chr5:148650971-148651224
  binary
cgcggcgaatggagaagacaagcccaaagccaggaaatgggtggcggctgcagggaagggggttttgattccctaggataaaaacgcgctccaacagtctccgcattccggcatggagccggctgaggggtgcggtggtaagaccccatcgctagcggagtgcaagcaaagccgcacacctcctgggtccgggctggggcaggccgcgcgggcgcgggaacgaacgcgtgcggacggggaaaagggtcctcca

SEQ ID NO: 29251 - DNA, 103 bp, Homo sapiens
  chr5:149569886-149569989
  hyper
caagatgaagaagctccagggagctcacctccgcaaggtagggcacgagggcgggggcgctgggggtgcacctggaggagggttggagagacccgcccccaac

SEQ ID NO: 29252 - DNA, 183 bp, Homo sapiens
  chr5:149681827-149682010
  hyper
cgccagcctccccgggcccgtcggccacgaagctcggcttggcccagtcccaggacaggtagccgaagctgagcaggctgaccagggagaagccagtgagggtgtgcatcgccaagccggcccgcgcgtcccggcgcgccgggctcctggggcctcaccacctcgcgcgcccagggcgcacca

SEQ ID NO: 29253 - DNA, 256 bp, Homo sapiens
  chr5:155108849-155109105
  hyper
cagcataagcgcttagagatccgcagccgcctgggcgcgctaagagatcgtgggcagacctagcccttagggcagcctaagcgcgcttcactaaagaaaaaagactgttggtatattaaagaagtgtgtgtgtgagagagaaagagacagagaaagagacagagagacatgggtgggggcaccaggaaaggtagcccgagtaggaggtgctagtgaaatttatcttttgctgacggatccagcctccggaatgccc

SEQ ID NO: 29254 - DNA, 43 bp, Homo sapiens
  chr5:159399024-159399067
  hyper
cgggtgccagtgccgcggccgcggccgccgccgacgccgccgc

SEQ ID NO: 29255 - DNA, 97 bp, Homo sapiens
  chr5:168727259-168727356
  hyper
cgggccctgcgtctggaaccctcacccctggagaggcactgctctttgcccatcgctgggggtttcgagacctctctttccagatctgaccaagcct

SEQ ID NO: 29256 - DNA, 89 bp, Homo sapiens
  chr5:16935468-16935557
  binary
cgcacgttttgcaaaggaaataccagacaagacctttcttggagaaaggcaggtccccgctgaacattttattgggcttcctgcacccg

SEQ ID NO: 29257 - DNA, 267 bp, Homo sapiens
  chr5:16935617-16935884
  binary
gggtgtcccagggcgccccgagagccagccacccacgcaaacggaaacgcaccttcgctacctcccggagcaaaatgcgagcgcgggacaggacgaaacaaaacctgcccgggcttactcatcagagactccgcggggggatggggggtgatttcaggagactcccagaaagttgcgccttccagggcttaggaaaaagtacccagggcgcgcggcgtggtgggcagacgcctctctccctgggctccggaggccaggtcggactgg

SEQ ID NO: 29258 - DNA, 34 bp, Homo sapiens
  chr5:16936321-16936355
  binary
agccgcgatccccgcgcgagcgcttggaggtgag

SEQ ID NO: 29259 - DNA, 71 bp, Homo sapiens
  chr5:16936514-16936585
  binary
ctggccccgcccgggcggagcgccccgcccccttcccgaccaggccccgcccactctaagcccgaagcagc

SEQ ID NO: 29260 - DNA, 235 bp, Homo sapiens
  chr5:16936833-16937068
  hyper
tgccggggctgcggggccagatcaaagcggaagacggaggctaatcagaatttctggaagctgcattcccgtgttgactttctgtcctgcagtcgggtttgcttaagacgtttgcgtaacagcggggaaatgtagttttgaaactggaaggggacgtggccaatatcacctttaaaaatgtaacccttttctagacctcaaggaagcagagatggcagatggcactgagatggac

SEQ ID NO: 29261 - DNA, 227 bp, Homo sapiens
  chr5:169930945-169931172
  binary
ccgtgcagccctcgcccccgccccgcccctccgtagttgcccgcccgccgccccctccgccgccccctccgccgctccgactctcgccccgagcgctggcagcaggcagcaggcagcaggcgggcgcgctgtggctccgcgccgcgcggtccgggctctgttcattcatgattggtactcggccctccgagacccagcccgagcgcagggaggggagccgagtgtgc

SEQ ID NO: 29262 - DNA, 415 bp, Homo sapiens
  chr5:174150711-174151126
  hyper
cgaggcaaacactggcattcaaacacgcacgacaaacacaggctcaaacaaactcatgaatgcacacttgcactgtcttgagaaaaaggtcggatccggatcgcgctcagaaaggaggttcaggagacaagtacagagatttcaactttctaaaagtgcgctggatttgctttctagtgagagagatggggacaactgatttaaattcttcactccgaaccatttgggagagaggcactcctgaccacttctcgggctccttccggcccctcttttccaggggaaagagttgtaataataacagtgggcgcttttgagcgctggctagtggcgagttactcttctaagtgcatacatttctttcacagggatactggcctgtgagtttcagcaccgactttctggaactgtaaag

SEQ ID NO: 29263 - DNA, 247 bp, Homo sapiens
  chr5:174151197-174151444
  hyper
ttctggcggtagagggagagtgggatgggcgcagggtcccttttaaagaagggtcaaaagagagaagaaatgggactcggcgaacttccgctttaaataatcgctcttaattaggtctcgggcttttcagtttcggcgtgattataacccttcagggatcgcctaataacaactctgctgactgctcctgtaattaactcctaatttatttcaaacaggaaaaaaaaaaaaaaaaaaaaaaaggagg

SEQ ID NO: 29264 - DNA, 999 bp, Homo sapiens
  chr5:174151769-174152768
  hyper
ggagcgccgcgtcaaggtctccagcctgcccttcagcgtggaggcgctcatgtccgacaagaagccgcccaaggaggcgtccccgctgccggccgaaagcgcctcggccggggccaccctgcggccactgctgctgtcggggcacggcgctcgggaagcgcacagccccgggccgctggtgaagcccttcgagaccgcctcggtcaagtcggaaaattcagaagatggagcggcgtggatgcaggaacccggccgatattcgccgccgccaagtgagtgcgcgccggggcaggagtaggaggtagcgcggggtactggagggagcggggggcgggtgttccagggctgagggtaccgagacccttctgcgtgcgctacactcccgggaaagcaagcccagggcctctggactcctgggtgcccggggcgttcggcgcgcccagtgcgccgtccgcatccaagacaccctctgggtaataaccgcgctgtgtgtgtctgagactccctcgacatacagattgttttttcaagagcgaaccccagctgggtttacggggtcgctcggtggtccgtttctacagccctcggccctgcgctctggccacttggcttgtttttgtttcactgttccccggagtctctgcctggggagtgaaggagttggatccatgttcagtgagcacttggatgtaccaggaacgagacaggttcaaaactcaaccctgagagttgtgcccccattttaaagatgagctaactgggcttagccagacattgaggagaaaccattttctttcgtgagtcccgcgggtgtcgaagccggatcccacgaagggatggtggcaccagggatggtggcatcagagtctggtgcggggaggaaatgtctctctgtggtctccgcagccagcacctccccggcaaggttctgagcttcgccgggagcgggctggggccagaagcgcacgggctcttcttggctcacagtaataattaacc

SEQ ID NO: 29265 - DNA, 93 bp, Homo sapiens
  chr5:174162402-174162495
  hyper
cgccaggagcggtgcgcccagcgcagggggctcctagtcacctcgacccttccggcgcccttccctccttagctgcacctggcaagccagcaa

SEQ ID NO: 29266 - DNA, 87 bp, Homo sapiens
  chr5:174162904-174162991
  hyper
gccgagcagataataacagccccctgtaactgagcgcttcccaagtgccagacactgttgctcggcgatttacaccaatcaactcac

SEQ ID NO: 29267 - DNA, 66 bp, Homo sapiens
  chr5:174178103-174178169
  hyper
cgaatcacagactccccgcagtcagagatggcgaagcctccaccgggtcacctcggccggcccccg

SEQ ID NO: 29268 - DNA, 384 bp, Homo sapiens
  chr5:174178248-174178632
  hyper
acacttgcgggggccgcggcgcaccctgacagcccggcagctccgcgccaaaatggatgggtctcgggcggcgagggcacggatacaaatgcgccgccgcgttctcaggtacacaaatgcggcctcgggcgggcgctggttcccaggcgcacggaggcggcggccccttcaactcggggcgcgggcgggagcggaacccgcgttaattactgtacgtttccactgtaaagagtgtcagccggggagcggggccgccgcgcctgcccggccccggcgcacaaaagcttcatatattctgaatgaaggcgaatcgcagcctcggcctccttgaaaagagccgtgagggagacttaattctctccctttcagctgtgctcagactgt

SEQ ID NO: 29269 - DNA, 111 bp, Homo sapiens
  chr5:175084709-175084820
  binary
cggttgcccggtcaagggcgggctcacaatctgcggggcggggagagggaaggagccagggagaaaagggagagaaagagggggcagtgtggcagaaaggaagaggaaggg

SEQ ID NO: 29270 - DNA, 244 bp, Homo sapiens
  chr5:179498011-179498255
  binary
cggcacgtttttatattagaaaagggccgcatccttccagatctagcgcagccttaagtccgtgatttgaggaacctgccgcttccaaaatacaggctgagacgtcctccccatgaagtagttttgcgctcttgcaccacctcctttgtctacgctgtccctgcaaactcctagctcaatgccctccagcaaacgagctgcctgaacgcaaagatgaccgttccaagtcttttttaaaagaagg

SEQ ID NO: 29271 - DNA, 505 bp, Homo sapiens
  chr5:179498363-179498868
  binary
agccagggccagagccggggccgggaaccctagtcccgccgcctacgcgggatgcagcgaccaccgcccgccgcccccgggccggcactcacctccgtggaggggcagcggcgccagcacctggccgcggacctcggccttgggggagtcaagcccgtagcgcccgcggtcgatgcgaaacgtgagcggggcgccgcggccgggctcctgcaccgtcacgttgatgagcgccgtgtagtactcctggctcgcgttgtctgcccgtgccggccacaggctgcaggtcagcagggcgagcgcggcgagccgggcagggcccgcccgccccgcgcagctcatcgtccctccggcagccgccgctgctcgcggaccgggctccggggccggcgcctagaggcggggcgggcgcggcccgggcggcggcgggagcgcgcgcgcgcggcctgcgcggggccgagcccgagcgcggccctcctggacgccgcggccccgccgctcgccgccc

SEQ ID NO: 29272 - DNA, 330 bp, Homo sapiens
  chr5:179498897-179499227
  hyper
gcccatgggccctcggcgagggcggcgtctcaggtcgcacgcgggcgtctcttcggggtcccaggagggttgtagaagcgtgccccctccatccccccgggtcggtcccaccgaatgggaggcgcctcgcaaggacgcggcgggggaggggaagggcggcacgggaggaagcgccccgaggagggtcagcggaacacaaagtccctctcgcgcggctgccgcctgaggcgcgtgtccgccgccgccccgcccccccgctggtctagcggcaacgcgcaggcctaaggcgcagtcccgccccgagcgcatgcgtgccagggcctgtccgct

SEQ ID NO: 29273 - DNA, 81 bp, Homo sapiens
  chr5:179499256-179499337
  hyper
ccgggtcagccgctggtgctggttgtttctctgtcaggcgtgatagccgcagggcgtggagcccgggagatttgcgaggac

SEQ ID NO: 29274 - DNA, 197 bp, Homo sapiens
  chr5:179779452-179779649
  hyper
cgctccgggccgcggccgccctccccacggtcccgcagccacgcgggacagcgcgggagcgccgcgggaatcggacgcccggccccgctccccgccccggactccctctcgtggcttcgggccgaggttcgggcagtgactgcctcttccccgcgcaaagaggcggtaacgcggcagcgacccttctagggaccaga

SEQ ID NO: 29275 - DNA, 70 bp, Homo sapiens
  chr5:1877239-1877309
  hyper
agaaagtttaaaatctaatcaaagaaatccctattttttcaaacttctagagttgggtgatgggaagtac

SEQ ID NO: 29276 - DNA, 132 bp, Homo sapiens
  chr5:34655742-34655874
  hyper
cgttcccatgcgcaatctcgcctgtcagttcaggctgtaggtttctcctttctaactcctgagcagaacaacactgaacggtggtagtcttgccttgccacccaatgagtgctagaaaacagtcacttcaac

SEQ ID NO: 29277 - DNA, 442 bp, Homo sapiens
  chr5:34655910-34656352
  hyper
ctttactttctgttcaatgattttggaaaacaaccttttagattctggtcagaaggggcttggatccgtgactttgaaacactcgccactaccacaaacgactttggaagttaatcagaaataaacagtatctgggatctcatccgtcctaaacccaggggtcagagcgtggggggcttccactaacttcaggttaagaggatgaaacagatccgcggagaagggtcccacgatccctggagactaaaagcaagccacgaacagccgggacgcgcgggccggggagatgcgccgggggctggagggcggagagcaccccccgcaggtcccggccagagcccggggccgggtcacctgactcgcggaatttggggccgcgaggggtggaatgggaggggaatggttagcgcctcccttcccgctcccactggatccaggtcgg

SEQ ID NO: 29278 - DNA, 222 bp, Homo sapiens
  chr5:34656421-34656643
  hyper
gctcggcgcccactgacccccgcagcgggggaggaggagggactgcggcgcaggaagccgagcaggaagcgagcccggcggccgcgttttcctggggaagcggcgggcggggtggagcagccagctgggtccggggagcgccgccgccgcctcgatggggtgagtgcgcggcacggagttgggaggctcccggcgcggggtcccgggctcgtgtccccgcct

SEQ ID NO: 29279 - DNA, 387 bp, Homo sapiens
  chr5:34657034-34657421
  hyper
caatccgcctcccggctgaacttggaggaggtggggagggaggtgcgagcgggagactccgggtggctcccaggacgcggggtccgctattgttcctcctctgactccagggagcccctcggccggcccaagggcgggggcgagacccctctgggcctgcccctgccccctaccttgttttccccgccgcagctcggggagaacggatgctggagttggggcagactcggggccgccgggacttcgggagtaaggaggacgtggagccaccagaaaggcgcccgccatctcccgcgacccctgcctggtggggggtggggggtggggtgtcgtcctcaaccaccttcgctgccttcttgggcaggttggtgtcggtttagtttctgc

SEQ ID NO: 29280 - DNA, 376 bp, Homo sapiens
  chr5:35230090-35230466
  hyper
aaagctggggttgggggcagtggtggaggcaaagcaccttaagagtattttttagcccctctgagaagggacatccgggcgggaggcgggcggatcccgggcttccccgccggctgccgactctggctcctggctggcgttctctccaggagcccgcgccggtggccccgctctccccttcagcacgcgggcctcgaacccgcatcccggagagcggccgcccgcgcagcccctgccgcgcgccgtcggaggcggcctcagctcgccatgggtactcacttttgccagggagcaaagtctgccacatcagtcgatgagtacttcctgcacgaggacatgaagctccattgtgtggaaagctgtttcgcgaacggtc

SEQ ID NO: 29281 - DNA, 101 bp, Homo sapiens
  chr5:38556107-38556208
  hyper
cgaaatcacctggcaggtcacctctccgaaggaaaaacatttcaagctccctcccatcccccaggtaacctctggcctcagaactcactgccctgcgtggg

SEQ ID NO: 29282 - DNA, 86 bp, Homo sapiens
  chr5:38556985-38557071
  hyper
tctcagaaggtcatggaagcgcaggggagagcgaggcggccgagcccaggcaaatcctcgagaaaggccgagtgcgcgacggctct

SEQ ID NO: 29283 - DNA, 38 bp, Homo sapiens
  chr5:39424892-39424930
  hyper
cgaagctactcaccggctagctattgcctccgtgaagc

SEQ ID NO: 29284 - DNA, 278 bp, Homo sapiens
  chr5:42424338-42424616
  binary
cggcagggagttgcgggcgacagacgaaccatcacactctggcgtctgctctggcccgcgagtagtgtacgtggaggggtttactccggagacagttttgttaaagtcataaaagttttgctagtgtgtttctgtttgccatcatctgcctggctgcggcaggaactgccgaggctgctgctgttgcgcggggaagaatccccggcagcgcgactggagagactggggaggtcgagctgtgcgcgtggacacagcgcgcagagcgcgcggtcttttgc

SEQ ID NO: 29285 - DNA, 75 bp, Homo sapiens
  chr5:523704-523779
  hyper
cgaccgggattttctaaaaaaaaaaaaaaaaaaggaggcccgccaatgggaacgctgcgcctgtagggaggattc

SEQ ID NO: 29286 - DNA, 317 bp, Homo sapiens
  chr5:72733185-72733502
  hyper
ctccagcaaactaacatcttgataagtccgctgacaacaaaataaacagtggagaaggctggagggcggggggcgccgtggcccgcggctggttcgcagcagctcggcggccttctgcgaggggaaggcgggccgctctcggctttgtgcttggggctttaggaggggggcggttggaggagagagagaagccgaattatctccctttccgcgtctcattcccgtggatggagggccccgggagcgtttgacgatggcagtttggggcgtgcgcgctgcctcgtcggcccctacgacgtcaggcgccggagctgccg

SEQ ID NO: 29287 - DNA, 177 bp, Homo sapiens
  chr5:72733588-72733765
  hyper
ttcaagggctgacgcctggaaaacaccgccaggcccctggccgaaggaggtaactaaccgagtcgaaacggcgatcagaaattaattcagtgccctgctcaggagcaaaaccgtcaaaaccccatcgagatgttggcgcaagcggattcacacacaaaggaaaacaataaaagtctc

SEQ ID NO: 29288 - DNA, 369 bp, Homo sapiens
  chr5:74349128-74349497
  binary
cggggttcagcccggttccccgcgcggctccgagagggcgcccccgcctgccgcctggagatggacgcggcgccgaagttttccccggcgggaaaacgaaagtcgtgaggagcagagggtcggggcgtcccggcggagacgaggctgagaccgggttaacatctccagccccgggcgaccctcgctcccccgcgtggccaagtcgacttacgagagggagcgggccagccccgaacgcggggtccgtgcggctgcggaggccgccccggcgggggccgagggttgcgctctgggttcccaggctctccgcggcggctcgctctcgccgcgctcctccgtcgccctgctggggagccgctctcgcccggc

SEQ ID NO: 29289 - DNA, 408 bp, Homo sapiens
  chr5:76114443-76114851
  hyper
cgcatccctcctcctgcagggtccaccgcaccgggaagccctgtctgtatcagttaccaaccacaattgcagtgagtacgaatcgtggctttcccacagtcaggaaaggcaagggagaccgacgacccgcttctctaggagtaagtaaagattaaaggtagttcgcggtatagcctaggcagggattaacccgtggtcccagcgctcctgctatttgcattccaaagcagacacctcatgcgctcaaccccgcccgcaggcggctcccgcagtctaagggacctggcgcgagtccgggaagcggagggcgcagctgcgcagggaagggggccgggggcgggaccagggcgcgcgttccggtcccggggcgtggcctcccgcaggtgagtacgctgctccttcggtttc

SEQ ID NO: 29290 - DNA, 283 bp, Homo sapiens
  chr5:76114880-76115163
  hyper
cgcagcagaggctccgattcggggcaggtgagaggctgactttctctcggtgcgtccagtggagctctgagtttcgaatcggcggcggcggattccccgcgcgcccggcgtcggggcttccaggaggatgcggagccccagcgcggcgtggctgctgggggccgccatcctgctagcagcctctctctcctgcagtggcaccatccaaggtgagaaacctggccaaggagggctcttatctctgaggagctggggtcctgggcacgctgggcagacggtggga

SEQ ID NO: 29291 - DNA, 219 bp, Homo sapiens
  chr5:76115225-76115444
  hyper
ccccttggtggctttgatgtgaggtctctgcgccaaggaggcacccaggtgggacatgcgggagcagctgaagtcagcggagccgggcagaggcagagatttccccaaagaccccacttcccgtagaggctgtcatgctgggcacctccaggccccagcgtgggttcggggaaagggagggaaggaaggagtagctgtgtctaaagggtacgcagagga

SEQ ID NO: 29292 - DNA, 78 bp, Homo sapiens
  chr5:76115609-76115687
  hyper
ctaggttgttttttgcgtccctctccaactgctggaagcctttcttcgggttctggcccctgcgttcgagacccaccc

SEQ ID NO: 29293 - DNA, 42 bp, Homo sapiens
  chr5:79865662-79865704
  binary
aaggcaggaggcgcgagggtgagctcgcgtggagcgcgcccc

SEQ ID NO: 29294 - DNA, 91 bp, Homo sapiens
  chr5:79865744-79865835
  binary
cggcggccctcggctggccctgggtctctcatcctgctcggggcactgcaatgtcagggtgagcgggaggtgcgggcttcaggggcttgcg

SEQ ID NO: 29295 - DNA, 69 bp, Homo sapiens
  chr5:80256566-80256635
  hyper
agcgtgcgctacaacgaggggcacgccctgtacctggcctttctggcgcgcaaggagggcaccaagcgc

SEQ ID NO: 29296 - DNA, 46 bp, Homo sapiens
  chr5:87436549-87436595
  hyper
cggatcttgttttttcttttcttttcatgggtccccgtttgcgctc

SEQ ID NO: 29297 - DNA, 735 bp, Homo sapiens
  chr5:87436769-87437504
  binary
gccttgatatacaagacaaatgcacactttactctgggcttaaaaaaccatctatcatcatcctttgggcatgacaaatacattgtgtgtttcagagaaattaatctggtatttagggggagaaaggcatttccaaccagtctccgtgcagaaccttcccgcaaaccctgtagcggcatttttcgacacttttctcctcctttcggcaagcctcaaacttgaccttcgagaggattttaagggtagagccttcctccctttccctcgtctgctccaagagctcacgtaggccttcttctgggaaacagcggctcaggaccagagctcggagaactgcgcgtccaggagcgcgggcgcggccggggaaaagggaggaggcggcaggagggggcaggaggtggagggaggaggaggatcggtctgaatatgcatgaggcacccagcactgccctcttccccggcagctgctcgggcgggggcgaaggagggaaggggaggggaggggaggaaatgaggctggggcggggtggccagagcagccgcagaggctgacgcgggtttggagaacggaagagatgatttgcatggcgcctggtgattggctgatggccgggggctgggtctgagaggcggcccctgaatggtttaacggaggaaattacaagattcattcgactaaagaaagccggggcgggcctggtcggcgcaatatgcagcctgtccgcaagggggcgc

SEQ ID NO: 29298 - DNA, 927 bp, Homo sapiens
  chr5:94619403-94620330
  hyper
cgagatgttttctttcgactgtttcatctacttagaattaatagcatttctcctcccgcctcccggcccccgccccccgctccccgggtggtgaacgcctgaagagggaggcgtggtcccgcgcaccttgtctccggccgcgccaccggcactcacctggctgctgccgtgctcctcgcccgtctccggggcccgagactccgcgggactccgcgccggctctgcgggaggaggcggcggctccagcagctgctccaggcaggcggtgcccggcagagaggagctcttctggtggcacaagtgcgccccggggccctgacgccgtgcaccctcatctcgggcgcggtcccccctcgggggaggctggggcgaggaggacagggaggatgaggcggaggaagaggaaggagctgagtcgggggagcgtccgccaggaggcgtccctcccgctgctcccgaggccgccgcgggcccctttacggcggggagcaaatgctcgcggatccggcggcgtagcgtggacccctgctcggctctgccggcgccgccgggctccaggggctccggcgacgagcagcacaggttgggctgcgaggaggagaagactcggtccagcacttgcttccgcttcttgaagccgctccacctgctgcctgcaccactccccctggccggtgcattccctgtgcccaccgggggtggcggggagggcgacggggtgtccgcagtgcggcgctctggacccccagcgcgcccgcccccgccgcccttgctcctgcccacccccagctgcaggttcttccagagccgggcctggaaggaggaggacgccgccggcggctctggctcgcccgccgcggcagcccggggctccatcctccaccccctgctcctcctctcccctcctcctcctcctcctcctcctgc

SEQ ID NO: 29299 - DNA, 52 bp, Homo sapiens
  chr5:9545445-9545497
  hyper
cggcacaggcgggtacacaaacttccagcccgtgcactagctcaactgtggg

SEQ ID NO: 29300 - DNA, 588 bp, Homo sapiens
  chr5:9545851-9546439
  hyper
tgggggcaccggcttgggggccacgagcacggtccccgagcgcgcggccaaccggtgggtgggcaggttcgcgcccagcagagacgaccctcgaggtggcaaagttgggtgtccaagccagctccgcggggcagtcctgggtgggagaagggagcgtcccgggatgagcgacactggccgggccgcccctgcacggggaaggtggagggccggggctgcagcgggccaagggccgcggctggcctgaggctgcgaagcccacccgcggcgggaaagcagcgctcgggagcgggctcagggagagcagccgccaccggcgccgccttcccggcaagtagatcggcgcggggcgagcgggcgcggagagcgcggggcggagagcgctgggcggggagcgggggacagcctgggcccacccccgccccgccccgcccctgccccgcccccgccgccgcgccgcctcctcctcctcctcctccccgccggggtgaaactcgagcgccccacccgcgcctgacctccccgagcccctccccgggccccgccccttcccggtacaggacccccaccttcgctcctgggagcccc

SEQ ID NO: 29301 - DNA, 144 bp, Homo sapiens
  chr6:10383584-10383728
  hyper
cgcccgacggagcgtcccctcgcacctccccagagttgcctaactcctaggccctgaaagtgccagaacaaaggccgactcccccggcgcctccctcggggactgagcaccctgggccctgctgacgaagcaaaccccagactc

SEQ ID NO: 29302 - DNA, 85 bp, Homo sapiens
  chr6:10384074-10384159
  hyper
gcccaaatataccacactgtggcgttcctcgtgccgaccgtgggtctctaacctagccaccttctcccgttgaaatatgcacatc

SEQ ID NO: 29303 - DNA, 854 bp, Homo sapiens
  chr6:10412036-10412890
  hyper
cttcagctggtcgaacccacggtctctatcctgccgcgactggttatgattcaaagttctttaaaaatgaaaaaccccaaaaaaggaaaaaggaaaaagtatgtgtgagtgtgtgggtgcgtgcgtgttccttaatccgtgtctccccctcttttcttagcggcggcttcgcttgagcttctaataaccgcgctgggcagcgttcctggagcctcctaatagcagatattcatgactattaatattacacgaatacttaataagggaagaatgcctggaaatcgagcgtgaagcggagaggcaactcgcgccggagccggctctcaatgcagtccattgacgggagtctcagtgtagcaaatcggagtggggagagggagcgcgagagacaaaaagcgagcgagagagggagcgggcgagcgcgcggggggccgcggcgcggcgtctggcgaatcacagggaaggggcaacattttaaaaggttgcagggcatgcaaaagtgaaagagaaagaggcagagagggagaccgaaggagagagcgcagagagggagaatgtgtctgcgtgcgtgtgtgagaaagaaagtgtgggcgagggagaggagccccgggtggggagaggggagggagggaaggagggagagcccgagaggaggaagggagggaaagagggagggaggaagggagggagggagggggagggggcccagccggagcgcacggagggggaggccgcgggggagggggaaggggagaggaagcgagcgaggacaatcagacctaaaaggctggggcagacctcgggatgcagcgggggtcgtgcgtagcgggtaggagctgcttgggaccgcgtcc

SEQ ID NO: 29304 - DNA, 61 bp, Homo sapiens
  chr6:10415329-10415390
  hyper
ggaggagggagaggaggtggaggaggagaaggaggagggagaggaggagggcaaggaggag

SEQ ID NO: 29305 - DNA, 283 bp, Homo sapiens
  chr6:10415836-10416119
  hyper
ccagcttctagcacttctcccttaaccctgctaccacgatccgagctgcccttttggccccgtgcaattttattagaaatcattatccctttcgcaattaaacataaccaccaaaccaagaccggcgaagtcactccaggattttttcccaacaagggatcgcctccgctcgaggcagccaccccctcgggccgcagcgccttgggagttttattggctttgagctttcccccaggttggagattctgccaagcggctccggtggctctgctggggtttgcaa

SEQ ID NO: 29306 - DNA, 477 bp, Homo sapiens
  chr6:128841101-128841578
  hyper
tttctctcttccccactagcccggcgcaggccacgcgagacgccgaagccagcaggtccccacactctccggctagaccgtgccagcctgagccccgagcaagcttcggagaggaacaatgggtgccccgcgtcccacctggcacgaactctggggacagccctccctctaccctgtgttccccacccccggacagagagagctccccacgatccttgtccccagccctagcggggacctggctcacccctcgtgagcccaggactccaggcgttcgtcggggacgccccccggccactcacctgcggagaactggccttgggccgatcccaggagaggccaaggagagaggagcaagagcgccacaaaagcaggcagcgccgccgccgcagtcgtatccatgccgagtttgggagaagtttcaagcagctttgcaaagagctgccggggggatcgccgcgaaatccacgacggagg

SEQ ID NO: 29307 - DNA, 686 bp, Homo sapiens
  chr6:128841719-128842405
  hyper
ctcggcggaggctgctcctgttagtcaagagttactttgctcggggagggacgggggcggagccgggggtgacgtcgccccgcgggctccgggcgcttctgaggaatgcgggctcgggcgcggcgccgccaccgcctcctgccggagagacgcgcgccagccccggccgcgcgccccgcgccgcctttgttcgcagcctgggccccgccgccagccgctgctcggagggagcgagcgagaaaggggagccggcgcagctcgctgccctgttccagaactcagaatttgagaggcgagagttcggtaagccgtgcgaccagacgaccgaggacgcgcgcagagaaacccccgccgtccgaggagaggcgtcctggggttccgtcccaaggtggaggtccccccgagcggttgctgattgaaaggggagtgtggaagcgccctgaggaaacacccgcctgccttgaaaactccccgttccttattcttgtaataaggaataagacaccccacccccatcgaaaacttgtcccttattcatagaataaataaaacttgaaccagaataaacgatcagtaactttccagcgtgaacagctggcgtgtctcctttctggtttatttgtcattggccaagtatttggatttactctgcttcactgactttgcttgttgctctgaaaccctcc

SEQ ID NO: 29308 - DNA, 67 bp, Homo sapiens
  chr6:13013504-13013571
  hyper
cgggtcggagaatttctatgggaggtgaaaacatcaattatgttgtaacaggttgtctgctccagtg

SEQ ID NO: 29309 - DNA, 391 bp, Homo sapiens
  chr6:13014076-13014467
  hyper
gggggccggagcagcgcccggccccgggcgcccgggggccggatggcggagcccacgcgctcagcgaagccggggaggtttgcgctccgttcgccgcgctgcagggagggcgcggtgccaggcgcgagcgccgagaaacccaaaaagaaagctttttatttgctgaggatgaagcccctgaaggagcccgcccccaacaacaacaacaacgtgtcctttgtgatccactgtcaactaggcaaggagatcaaacacatttgcagcaactgcagtcggggggaggacgcccgggacggtgagtgccggggcccgtcggggcggcggcggcgagcgcgggaggcggggaggtggctcgggctgtctcagtttgggggcaccgccggcgtctgtc

SEQ ID NO: 29310 - DNA, 704 bp, Homo sapiens
  chr6:1311068-1311772
  hyper
cggctccgtcgctttttgtgcaacaaaggcaggaaaaaggaggaaactcggcgtggcagggcagcgggctggaagtgcaccttcccggggccgaggcgcccgctccctggactaatgacgccgcgtggggatcacgccccgggcgccctggggtgaggaacggtcccccctttcgagattgtccgacactggtgccagtgaggtcacagcaaaagtcccaaaggaatattggaaagaaatggccgtgaaccggtttgttcttgcccccgcccccgggaacacgccctctccgtcgttcctgttgactgtcagatcccgggaaccaagcggcggagctcggcggcatctgaggcttccgcagggacacaagtgcaggcacagcccagcaccctgcgccagacacagccgccccaggggaagaggaggacgctgctgtcctcccgcaggagtcaccagccaggtaaagaaaaaggtaaagtaagacaaagaaaagtgaaagtcggagcccatttagtgagcaagagtaaaggtcatccaaaaaggcgcatacaatttcaagcccaggagtgcattcattaaaacaagaggaaaagacaagatggtccttgaaaggagctcataggaaggggcacagcacaaggctcccgaaagaggtcactgcaagtgtcctgcgcaatttctgttcagcacctctgcagtgacga

SEQ ID NO: 29311 - DNA, 224 bp, Homo sapiens
  chr6:1312096-1312320
  hyper
ttggcgggaggaggaaggcggggccggccgacccaaaacaaacaacctgcgccagcgactttgccgccgcgctgcagtgtggcctccgcctggtgcgcgcccgttggggagctggggaactggggagccgccaccacctcggccacctcgttcccccaccccttgccgtccgcgctcaggccccgcccccgcggagccgccgcagggttatattgggccggccc

SEQ ID NO: 29312 - DNA, 47 bp, Homo sapiens
  chr6:1312708-1312755
  hyper
tcctccctctccgccccatagtccacccaacacttgcagcccctcca

SEQ ID NO: 29313 - DNA, 484 bp, Homo sapiens
  chr6:1312784-1313268
  hyper
gaaaagtgactatctcggaagaccagggtagagctcccgggagaaaaaggcgaagatccccggccccggatcgccatccccttccctggcaccagcttctctaggctgcgcgaaggaagagggtacgacgccggggagggactgggtgcgcgggcatgaagttggaggtgttcgtccctcgcgcggcccacggggacaagcagggcagtgacctggagggcgcgggcggcagcgacgcgccgtccccgctgtcggcggcgggagacgactccctgggctcagatggggactgcgcggccaacagcccggccgcgggcggcggcgccagagatacgcagggcgacggcgaacagagtgcgggaggcgggccgggcgcggaggaggcgatcccggcagcagctgctgcagcggtggtggcggagggcgcggaggccggggcggcggggccaggcgcgggcggcgcggggagcggcgagggtgcacg

SEQ ID NO: 29314 - DNA, 603 bp, Homo sapiens
  chr6:1313302-1313905
  hyper
tactcgtacatcgcgctcatcgccatggccatccgcgactcggcgggcgggcgcttgacgctggcggagatcaacgagtacctcatgggcaagttcccctttttccgcggcagctacacgggctggcgcaactccgtgcgccacaacctttcgctcaacgactgcttcgtcaaggtgctgcgcgacccctcgcggccctggggcaaggacaactactggatgctcaaccccaacagcgagtacaccttcgccgacggggtcttccgccgccgccgcaagcgcctcagccaccgcgcgccggtccccgcgcccgggctgcggcccgaggaggccccgggcctccccgccgccccgccgcccgcgcccgccgccccggcctcgccccgcatgcgctcgcccgcccgccaggaggagcgcgccagccccgcgggcaagttctccagctccttcgccatcgacagcatcctgcgcaagcccttccgcagccgccgcctcagggacacggcccccgggacgacgcttcagtggggcgccgcgccctgcccgccgctgcccgcgttccccgcgctcctccccgcggcgccctgcagggccctgctgccg

SEQ ID NO: 29315 - DNA, 86 bp, Homo sapiens
  chr6:1381781-1381867
  hyper
cgggcgggtgggatgatttgttgatttgcttgttttccaccaaaccgcagggcacctccaggagctccgggacaacttacaaatga

SEQ ID NO: 29316 - DNA, 61 bp, Homo sapiens
  chr6:1382651-1382712
  hyper
agagggcgagggggcccccgtaaatcatcctgagggatttttggcccaagtccctgtttcc

SEQ ID NO: 29317 - DNA, 57 bp, Homo sapiens
  chr6:146349455-146349512
  hyper
cgggtcagggaattgcaactcactggtcaaagcgtcccttgcaggccctgccaggga

SEQ ID NO: 29318 - DNA, 214 bp, Homo sapiens
  chr6:148663794-148664008
  hyper
ggtcctgccaagacttgctagaaggaacgagtcgcgtgccttagttagttggttcccgtcacaggaagaaacgcctttgcagtgggtttaattgcttctgggccgagcgaattccccgccgtacaactcagtggtgcggactttgcctcctgctaccctgttgctgcgccgagcggggtgggaaagtttctggagttgtcagtcgcgcagcccg

SEQ ID NO: 29319 - DNA, 181 bp, Homo sapiens
  chr6:148664163-148664344
  hyper
gcggggactgggacgcacggcccgcgcgcgggacacggccatggaggacgcgggagcagctggcccggggccggagcctgagcccgagcccgagccggagcccgagcccgcgccggagccggaaccggagcccaagccgggtgctggcacatccgaggcgttctcccgactctggaccgac

SEQ ID NO: 29320 - DNA, 42 bp, Homo sapiens
  chr6:153452827-153452869
  hyper
agcagcctgcctgctccgggtcccggaggaagcattccctgc

SEQ ID NO: 29321 - DNA, 89 bp, Homo sapiens
  chr6:166076007-166076096
  hyper
cgcgggccgcgacccagccgcagccgccgccgcgcgcagagagggcgccggggcccccagcggggctggggcggcctgcggaggagagg

SEQ ID NO: 29322 - DNA, 277 bp, Homo sapiens
  chr6:166077059-166077336
  hyper
cagtcagagttcccgggagagagttccaactcggacctttggttggagtttaaatcaactcgcagtgtttcccataaactagggtttgaaatacggttcctccccaggactccctttcgcatactcactttaaaacgaacttcgtgtgcacaagcccagtttgccttggttggggttagagaacggaaagggcaaactgtggccaaaaatgagcaagactgtgcgatcattgccccaaaccctgagaccgccttgccatatgcggctctcttggaca

SEQ ID NO: 29323 - DNA, 447 bp, Homo sapiens
  chr6:17101827-17102274
  hyper
cgtgttggtttctgttcgtgcgaccgtctttctgaggtcgcttttgtgccactgccttctggtgctgtcggggccgcctccacaccgtcctccggccctcaacagccgtctctgcgactggacacctgcctcgcatgccacacgatcaccttcactacagacagtgtctaaaaacaaggatgtggtccaggcaccaggggtaggggcgtgtcacacacaccgtgtcttacaaagaggaaaaataagaggttcccgcaagatgcttgcgactctggtacttttcaaagtaacgcagccaggcagcgggctttcccccggcccctcgctctggatagggctgccatttgcatcctagctgtgatttagacacctccaaccttctagttttcagttacaagagtcccatctccgcccaggtcccaggtctgcatgacgtaatttattgtg

SEQ ID NO: 29324 - DNA, 192 bp, Homo sapiens
  chr6:17102346-17102538
  hyper
gcgggtggcgcccgagcgcagtagcaggggcgtagggcgcagggcgcaggagcgcgggaccaccggcgccggagcgcggcagggagcgctcgcgggggcgcacagcagccaagcccgcggaggaggagcgcgcgcgcgcagcatgggctgtggaccttcccaacctgctgaagaccggagacgtgtacgcgc

SEQ ID NO: 29325 - DNA, 156 bp, Homo sapiens
  chr6:17281262-17281418
  binary
acggcgggagggacagaccagagccgaagctgcgcggagttcctcgcccctggccccgccgccgcgccccccgcccgcttcggcgctcggacgctcttcccgcggaccctccccacaccccacccaaggcacctgattcctaaggaagaaaaatct

SEQ ID NO: 29326 - DNA, 565 bp, Homo sapiens
  chr6:17281534-17282099
  binary
cgatccggagaatttgtacggtgaccggcagggggggcgggaggagagagcgaagtcaagtctccagggccgctggcgacttcggaagccgcgcgcccggcgctctcggccgcccccggccgctcgcccccgccgcgccgccgccctcgcccccgggctcgcccttggcccccggcggccgcgaaagggtgcgggagacgcggagccggaggaggaggcgcagccgctgcccgagccgcagccgcagccggagcccgagccgcggggcgggtgcgaagatgcacacgacccagaaggacacgacgtacaccaagatcttcgtcggggggctgccctaccacaccaccgacgccagcctgcgcaagtacttcgaggtcttcggcgagatcgaggaggcggtggtcatcaccgaccggcagacgggcaagtcccggggctatggatttgtaagttgcacggactgggggtgacggggagggacggagtggcggctgaccccggggatcgggagcttggagtgaggggctcggcgtgacccgtgaggagccccgcgggtagagcggcg

SEQ ID NO: 29327 - DNA, 181 bp, Homo sapiens
  chr6:17282217-17282398
  hyper
aggggtgaaaggagagacctgtaatgacggcgggatttggggtgcggagggttgcgagggaggggccgcaaccctgaacaattgcattcccgggctggatgccggttgttaagcgcgctgttgctttgtaaaaatgcgtgtgttctggtgttttggctggggcagggaggggacaccccac

SEQ ID NO: 29328 - DNA, 615 bp, Homo sapiens
  chr6:19804685-19805300
  hyper
cgaacccaaccgccagaatgtctgccgagcctagcatgggatgctgcccagcaaaacagcacccagggagagggcgactgaggaagacagcctgcaagcgcgcttcagaaaggactgggaccagagccctagaaaactacagcgagtggattccctggcaggggaaacccgcgagagcctgggaaaaaaaaaaaaacgagagggagagaaaaaaactcacccgggcgccctgaagcccagcgcaagcaagcgagtgagcgcgcaggctggctgggctgctccagctggaagtcattgtgcgggctggcgtctgcgttgtcagggcgaccgcccggccggcgccagcggagcgggggaggcgggctccgtgaatgggtgacgtcacgcagccggcgccaggcagtctgggcggccgagccaatgaatcagctgtccgggggaggcagcgcagcgcggcgcgcgggagctgggtgcaggaatgcgcctggagccgcgcggcccgggagggcgcgagacgtctccgcccgcctggtcgccccgcggcggccagaggtcccagcgtcccaggctcggccattccggtgccccccacgcccagtctgcggctgtgcccgc

SEQ ID NO: 29329 - DNA, 813 bp, Homo sapiens
  chr6:20212279-20213092
  binary
cggagggacggtggctaacactttcgcccgccccgtgcacgcgatcgctggggagctggggtcgctgcgctcccggcctgcagttacctggtccagcgggatgcccaggagctcgctgagcgggtgcaggtaggtggagcccgtggtgcggtaggaaaggctggacggctgcggctctgctgccatcctgcatcttcgggaggtggctgcccctgtcccagcccgcaacaccccctgctcggcgtcctcccgcccgggtgctcttgggtggttgccccgagaggcgcacggccgcctggttcgcgggggagcgaacgggaggccggggaatgcgaaccggcgcaaactctcgaggcgcaaactctcgaggcgcaaacttggctttggcgctggcgctgcagccacgggcgccgtaggagggccgggcccaaggcgccccgcttcccgctcccttcctctccgcgcccattggcccggccgctcgggacggccccgagaggagggaaggagggaggaaaagtggggactccgagcccggcccccaagcgccgcccggcccgcccagcctggcctgcaccgaggccgaccgggagagggaaagcgacgccagcgggcgccgccgcctggccctgcagctggaggcgggacgcgcctttcctcctcccgggctgaccgtcctagccccccgccagacaaaacgacctcacccagcgggcgccttccactagagagcaccacccaccccgccccaccctgttttggtttcgccgccgcagtcgaagcggctgagtggctgcgtttccctttcaagcc

SEQ ID NO: 29330 - DNA, 96 bp, Homo sapiens
  chr6:21664624-21664720
  hyper
cggaacgggacgcgcaggaacccggcccgacgggcgcggctcacacccgtgctcttcctgcgctctcggcctcactttgcggccagagccgcggcc

SEQ ID NO: 29331 - DNA, 175 bp, Homo sapiens
  chr6:21664749-21664924
  hyper
ctccgaccccactgcccagtactgtacgcgtccagactaaagaaacatcattcgcttaaggggctgggaaaagcgcgtgctccgctcgccctggcaccgcgggtcgcccagctcgcagactgggacgggcggtgcaagaggtggtgctccctgtccaggaggggacgcggaagag

SEQ ID NO: 29332 - DNA, 432 bp, Homo sapiens
  chr6:21665191-21665623
  hyper
taatgcccctccccccgcaagccaacccaggacatagcccccaggtccccaaggttccgtctacctcatccttctacccccaaacttcaccaacccgaaaggattccaagtctgggatggggagaaaggaaagagggtggaggcaaaggtgcgcgacgggctggataccaactggagggtgggtgttcgcattgaaatgtttttttcttttgccctagaaattgcttccccatgcgggcccctactctctcccatttcccccacctccctgctttctttttcttcaattctagtggatctagaaggaaaacgagtgctgctctgagtcactcagcgagctaatgctatggcccgaagttgggatcagggtcgaggggtgggggaccatgtggatggggtcccaattctggaggttgagaatgactggaaggg

SEQ ID NO: 29333 - DNA, 189 bp, Homo sapiens
  chr6:26987779-26987968
  hyper
cggaaccagcgcagcagcgggacgctagcccgcccacacggcggccacttgaaggtcctccagggaacacctgaggcagtgggagcgtctgccctttcctaagtctccttggaaagaagtattcgctttcgtttccgcaaacaaagcatgctccgcgctttcaggaccggtggctcccgtggagaccgc

SEQ ID NO: 29334 - DNA, 419 bp, Homo sapiens
  chr6:35181443-35181862
  hyper
catggagaccaggcccgctcccccatcgccggattgtaaattcctgcaggcagcggcccggcagcctggggagggggccaccgcgcccgggcgcgcagggggagcggccaccgcgccgaggccccatttgaaagaaaaaagggcacgaaaaaggaggtggtggagaaggaggaggaggaggaggaggaggagggggaggaggaagaaaacgaaaaggagcgaggagaggaggagaaagaggaggaggaggagaaaggcgaagaaaaagagcctgagagacggagaaagagcgagagaggaagaaagagaggcagaaagggcgtgtttctggcgctgcgtttcccctcccctttctcaggtccttcgctcgggctctgcgcgctctccggctgcagctctctcccggcgaagctgggaat

SEQ ID NO: 29335 - DNA, 218 bp, Homo sapiens
  chr6:35181983-35182201
  hyper
gctctccccgacgtccggccaggaggagccggtagcatcgggagcctcgcgccgagggcgccgcggtccgcgccccgcgactgcagcccccggcctggccccggcggggcgccccctcccctccccctcctgcgagctgggatccggccggcttccgccctcccctggccgcgagaccggccccggcggctgggccgccagtagctccagccatgggc

SEQ ID NO: 29336 - DNA, 209 bp, Homo sapiens
  chr6:39196876-39197085
  hyper
cggtccaccatggctcccgagcggccgcctcctagagaaagcctctcctagccccagctgctaccagtccgcccgccctccagcctctgaaaacagctgtttgaatttggagctccgcatgcgcagtgcccggtactcaccccccgcaagcaccgctccccggacagagttgcttggccaagttggcccacggagtgcggggagctgcg

SEQ ID NO: 29337 - DNA, 146 bp, Homo sapiens
  chr6:39197391-39197537
  hyper
gaggtgagcgctagaagaggcttggcgctccccgcgctcccagggtcagccgccaggggaggctgcgccgcccgcccagacctgcacgccctgcggtgcccgaggggttgcggtctcagggactcgtgtttgttattaggactggc

SEQ ID NO: 29338 - DNA, 129 bp, Homo sapiens
  chr6:39281999-39282128
  hyper
ggtaagccaggtaggcgagcagcaggagcacggtgctgggcaccgcgcagccccggaccctgccctcgggagccgcccgggctcgcggtcggtacatagcgggagaggcggggagccggcgccgggagc

SEQ ID NO: 29339 - DNA, 225 bp, Homo sapiens
  chr6:45982991-45983216
  hyper
tgcggatcaactctccgagaagacggccacctgccggaacctgccttcctccattccgcccaggagcctcgcagcggggcgctggcctgcggaaaggccacgggggagcacagggctccgcgccgccctcctgggagggtccggagtccagcgcaccccgagccctggtgggtgagcccggcgggaggcgcggcaggtgcggcgggagactggaccccgacctac

SEQ ID NO: 29340 - DNA, 106 bp, Homo sapiens
  chr6:49518471-49518577
  hyper
cgcttgctgcttgaaccggtcaaagaaggaacgaatgaatgacccttttgccaggatggagacccgggggcctcagggagctgcgaatcccatggactcctcccgc

SEQ ID NO: 29341 - DNA, 278 bp, Homo sapiens
  chr6:49519000-49519278
  hyper
caggtaacacaagaagtgttgcagacctcctgggccaagggtcgcatgaccacgaggactgaggagcacttcgtgaccgcgctcacttttcgcagcagtagagagggacagcctggggaacgctggggccctgctgaatcccgggctctccaggcacgaacaggggcatcccgcgtccacgccgcggggaggagggtttcaccgtctccagggacttggctcgaggaaattaaactctaatgagtagctcgagaaatgttccgggatggtggatgagc

SEQ ID NO: 29342 - DNA, 156 bp, Homo sapiens
  chr6:72129577-72129733
  binary
cgcgccggcacccgaagagttcccacggatacggttcccaagtcagtggcatgtcagtgcccttcaagctaccgcaattttatttgttctccccgccagctccataaagtattaaaggctctctccacgacttcttcccaagcccaggtgccctaa

SEQ ID NO: 29343 - DNA, 61 bp, Homo sapiens
  chr6:72130646-72130707
  hyper
cggaaagcccagccagtccccgggagtgtagccaatagaaggcgactccggcaacacaccc

SEQ ID NO: 29344 - DNA, 281 bp, Homo sapiens
  chr6:75915989-75916270
  hyper
agaagggagggagcgtagagggggacagccgcagccgggttccctgccaagggaagccgcgtactccgccacttggggcggactgggatttctttaatgaagctcgggtttccctatccctgagatttctttaatgaatttttctacattaagaacaatggggaggggaccgactcccattttcggaaatgcaaggatgcgtaacccattcacccccgctcctgcggatctccatccttcatctgatatcaccacctccatcttcctccccctctgtcctg

SEQ ID NO: 29345 - DNA, 83 bp, Homo sapiens
  chr6:80657600-80657683
  binary
aaacaggacacgggaagaatgggtgttctgtgggcaaagatgaggtaggcgtggtgctttggtccttacctgacactcacctc

SEQ ID NO: 29346 - DNA, 165 bp, Homo sapiens
  chr6:83073044-83073209
  hyper
cggcctcaagtaccactttgatggggagagcttctgaagcttccatacaacctgccgtgcctttgctgctgccgcagtagattttcagctcatttctttctgctgctgcttcgcgctgctctgtcatgcctaaatctatctcgtcactgccaaaggtgcctgaat

SEQ ID NO: 29347 - DNA, 269 bp, Homo sapiens
  chr6:83073251-83073520
  hyper
ccaaggtaaatacagtatgcaaaatgaggaaccacccaaggatgtcggggaggggggagagaaagggattccctcaccttttccggcacattcctcgttaatttccaccaggaggaggcgcgcagcccagctcccctagtctctcttcttaaatccccctacctacggctgccgaggttggccgcgcgtcgggaatctccccgacagtcctggccctcccccgccccccgggttggtttttcccagctgcggaggttgggaggttgggc

SEQ ID NO: 29348 - DNA, 214 bp, Homo sapiens
  chr6:83073590-83073804
  hyper
actcagagttggttctggaggcggcggacgcggaggtgagcagtgggagcccgcggcctgggagagacccgggaggcgtcgttggggcccctccccatcctcgggtggagagtagggttggttcgggttgccactgtaccccgagtcccactgctgctttgttcccagactctcccctcctctttggagatgacttgaacccctttgagatccg

SEQ ID NO: 29349 - DNA, 683 bp, Homo sapiens
  chr6:83073835-83074518
  hyper
cagttgtagctccacttcctgctaatgcgagaaggtacaaaaagagatcaaaaagtcctgtaacctgaaacttccctcgcatcctaaccgggacctggtggagaggtctgggcgggggcggagacacccggaggccgaccttccgccgaggcggtgcaggaaggaacgggagagggagaagtttggtagggaaggaattggggattaagcggtaagttagacgcgggagacgagtctcctcgggaaaggcggagggcgggaggccggtcgggtttatttagtgtgggccagggaagaaggaagactttgcggtctgggtgtcggatgcgcgtccccctccggagtaaaagtgaccggaggggttggggaggcgaggccggggcgggcttttggaaggaggtctctgggacagactggagacgactagactcgaaaaggccggtttttgcactccggaagccgcggcagccaccgctgttcacgcctctctcctgcttgtcccaggtccctcagaggatccagcgaggggcgccaacaagaggcgaagaggtggcaccagggcggcggcaggaagaggagcgggagcaggagcgcggagcggagcgtcccgacccgccgtgcgtactttctggagggaaggggcgggggaatcggcccctgagggaagcgcccggtggcgaggg

SEQ ID NO: 29350 - DNA, 66 bp, Homo sapiens
  chr6:83074829-83074895
  hyper
ccgtgtccgcccagcccccgctgccggaccagtgccccgcgctgtgcgagtgctccgaggcagcgc

SEQ ID NO: 29351 - DNA, 354 bp, Homo sapiens
  chr6:86159095-86159449
  hyper
cgcgcgtcgcctctgttttatcactaaggttttaattgtgaataaacaaggaactggattcgaatgatttcttagtttctgagatttttttgtctaagcatcgtagacttcgtgcgttctcaacccaacaggaagcgtcacatctcagtgagcttcggctctcacagcccgaaactgcaaggagctcctctgcccggcctctctttactcctcctctctgcccctcagctcgctcatctttcttcccgccccctctcttttccttctttggttctttgaagtgatgagctagcgcaaccacaaaccatacattccttttgtagaaaaacccgtgcctcgaatgaggcgagactc

SEQ ID NO: 29352 - DNA, 270 bp, Homo sapiens
  chr6:86159509-86159779
  hyper
ggcgcaccagcagccgaactgccggcgcccaggctccctggtccggccgggatgcggccggtacccgctccccgccgggaacaacctctccactcttcctgcagggagctggtgccagccgacagccgcgccagggccgctccgggtaccagggtcggatcgggtgacgtcgcgaacttgcgcctggccgccaagccggcctccaggctgaagaaggacccgccccggccttgacccgggccccgcccctccagccggggcaccgagccc

SEQ ID NO: 29353 - DNA, 244 bp, Homo sapiens
  chr6:86159903-86160147
  hyper
tgggcgcggtgctgtggcctgcggctggcgcctgggagcttacgattttgcacaccaacgacgtgcacagccggctggagcagaccagcgaggactccagcaagtgcgtcaacgccagccgctgcatgggtggcgtggctcggctcttcaccaaggttcagcagatccgccgcgccgaacccaacgtgctgctgctggacgccggcgaccagtaccagggcactatctggttcaccgtgtacaa

SEQ ID NO: 29354 - DNA, 169 bp, Homo sapiens
  chr7:100815484-100815653
  hyper
cgttgaggccaacgaggcgcggggcctggcgctgcaggtgccacagcagctggctctgcacctgcgcgccgtcgctaccgaaggcgtcgatgttgagatagcgccaagtgccgtcccctccgtgcgggatggggaaggggcgcgtgcacagcgtgagcacgcgcgggcg

SEQ ID NO: 29355 - DNA, 101 bp, Homo sapiens
  chr7:100815930-100816031
  hyper
ccctgcggggggcacgagtgagcgcggggagggggggcgcagcagggctggcgagcccggcgcctctcggcaggcatcttcactcccacgttcacgcccac

SEQ ID NO: 29356 - DNA, 257 bp, Homo sapiens
  chr7:100816655-100816912
  hyper
cccgggtgctgtctcttgaccagctgcgagcagaagcgctgcagcagcccggccacgcccttcccgcgctcccagggcgccacgcgcagcccctccaccagcaccgtctccccggcgtcgatcacgttcaccgactccagcgcgatctgcggaccgaggccgttagcgcggggccctccccgcctgcgcccctgccagggctgtcggttcactgggctctcctcttcccacacgctgagcactccgcgtcaccaccc

SEQ ID NO: 29357 - DNA, 260 bp, Homo sapiens
  chr7:107642811-107643071
  hyper
cgccaggtcctgctgtttctggtgccatccggagacaaacagagatggttaattaaagccacatggcccccatctgttcccagaatgaagcctccgctcagctcaggcactctcctgggcaatggatttttggagagccctcctcggtcagcaccgccaaccccagggaacctgccctctgcggtggggaaacccagggtgaaccggccgagggtgcaaaaccctgagcgggggccgcgggaggccgcaggggccggggc

SEQ ID NO: 29358 - DNA, 540 bp, Homo sapiens
  chr7:107643183-107643723
  hyper
gtccctctcccaagcccccaggatcccacgaaggtgagcaagcagcttttgggttttccttccccatgcccaagtccgtccgcctccccgcaccgtttccacggaattacctaagaaactgaaagctagcaactggagaagccccatgccggctccctgcagccacggggacgcggcagaggagtggagaagacgcccgccgagccgcctgccctttcttcccgtcttcctttctggagaggtggaaaggaggggaaaaaaggcaaatgttcaaagagagaagaggcgcccttccatttcctgtcgctcccacggaagcggggggtgggctggaaagtggggaaaatcgtgcagccactttgttctcctcacccggcgacgcgagctctcgccctgctccgggagcccccgagcccaaagaagggaattagaaagtttagccttgggaggaacagagggaggcgcctctgctcatgcgcatacggagagccggggctgaaggggcgggcggccgcaactctgcgaggaccgggtgaggtc

SEQ ID NO: 29359 - DNA, 483 bp, Homo sapiens
  chr7:113726887-113727370
  binary
cacttgttgttctctttcattttgctttgtgatgggggaaaaaggggtggagaggggagatttgctgttggctcacggatgatttttagtttggataatgcaaaatgttgcttcgtccggagagacctcggctggaggagaatgtgtgtcgaaacaccagatgtgtgtttgtttactctcttctttttaattgtttgttgtcttttccccttcctccccgcacccccacccccaacctcgggaggagaaacaacagtaaaaacatctggcggttagaagcacacactttattgatccaactgctgacctttatttactcagttgggcaagtgcacgcttctcgcgtctaagttgggcacttcagcgttcatctcagaagtacttctccaggaaggagagagatggaaaggggacactcctgtttctggagtcaagaaactcctgggccctactgacgcttcgggataaccgtgcacagggatg

SEQ ID NO: 29360 - DNA, 259 bp, Homo sapiens
  chr7:117513178-117513437
  hyper
ggatccccagccagggtggccgctccgctcccccccgcggcctccgccgtgtgggcatcccgaggaaggggggccccgatgaaggggcaccggagagtcccgggcttacggaacgccccgggggtgcgaagtcgggtccggctgggaccccggcgccgcccccggcccgcgtctacactagccccgcgcccgccccgggaactcggttaccgccgcctccgccgcggcccccgccgcgtcctccggggcccgggacaag

SEQ ID NO: 29361 - DNA, 185 bp, Homo sapiens
  chr7:117513471-117513656
  hyper
tcctgctctagcggatccgaatgcgagctcggagccgcggctccggactcagccgtctccgcgcgggcggcacttaacccgctgctgtccgggacgcgggcgcctggagccgggagccgggagccgcggcactccctccgcccctcgccaccgccctcgccgcttaacccgctgcgcgccggagc

SEQ ID NO: 29362 - DNA, 428 bp, Homo sapiens
  chr7:121512905-121513333
  hyper
ttcccttccgaagtgatgaaggagttccaatgttctgcgaacactggaaaccccagcggatccctctaactccagggcagcgaaaccactggcagcggacagagggaggattgtcggtgtgtgaattgctaccctgggatccggacccagagcggcagccgcgcccctccgccccccgcgcgaccccgggtccgaggcacgctcccagcggagcggtcctgcgcccccgccccctccaggagccgcggcgcgcacagccgggctggagcgcgcacccggcactgaggcttcgctgctctcggagcgctcagaccgcggccgccgcagccggcgaaagaggcaaagtcccgcacgccggaggacatgcgcctcggctagcggccccgggccccaccaccgtgcggctttctccagattattcctctctc

SEQ ID NO: 29363 - DNA, 465 bp, Homo sapiens
  chr7:121945147-121945612
  hyper
cggagtctaattcaggggcaaacgccaggctatatttatcaaacgccaagctccagaaagcctcggctaggaagcctcggcagtgaaatccgaggtttcgctgcttggttccactgggcctgggtgggccgggctgggccgggctgggccgggtcagatctgtgccacctccgcagacctatttcttcctccagggctcggggttgcccgctcccggaatcccggagtctccgcggcccgaaccgagtctggaccatttagaagacgccggcaggtaactggcctccccaaacgccccgaaaattaaaagccttaggaggcttgttctgtgtttgtggttttgtaaaggcaatgcccgcggcaataggcctgggaaagtcgcactttcatccacaaagttgaggagttgcaaggaataattgggtgtcacaccacaagcaaccttgactcgatcggaccccaccc

SEQ ID NO: 29364 - DNA, 620 bp, Homo sapiens
  chr7:122526214-122526834
  hyper
cgggctcacagatctggccgcgccgccgccgcccgcgcgccccggcgcgtcccgccgcccttcccgagtcggggctggaggagctcgctgcgagctgccggctgccaccagcacatcgcggctttcctcttccagcccctcgtccgactcctcttcgctggaagacgggtccagcatggtgctcggggatccccgccgctcggcccgcggtccccaagcgcctcacccccggcggctgcgcccgcgggtctgagggagccgcggggctggctgcagcggccgcagaacgaaaggaaaactggccagggctttccggacacgtcgagttagattcaggagtgtttcctaccaccagggcgaaaggggcgggcaggagccgggaggaggattgggaggggggagagggggagccgccgggactgaataggcggagttagcgttgggggtgagcttgggcgcctcaggaattgctccgccagccccgggcgcgccgacccagcggttccccagagcccgccggcagaggcggagccgcccgagcgcccggacgcaggtggggaacctgtggcgcctacaacaagcaacacgtggaattgaatgttgaagagccgcgcggggcc

SEQ ID NO: 29365 - DNA, 279 bp, Homo sapiens
  chr7:122526873-122527152
  hyper
ccgcctggagccctagcacacagtttgcaaaggcggggagcggccgagcgcgatggcccgtgtaagcgtccaccggggctgctccgactaccctcaccctaccacctgtgatcttttctccagcaggtggaggtggaatggggagcggggagggactgttccctagcaagaggttagggggagcggccgagacatctccccaacccgaatcggctgcctaggattgaaccccagcgcggaaaagcgggactggagcccttcaccacgaagtatctttgc

SEQ ID NO: 29366 - DNA, 204 bp, Homo sapiens
  chr7:123673023-123673227
  hyper
cggggccctcgctgtccacgtcgctccccgccatgggctcggaggctgtccgaacgcccgaggctgcaccgccgccgctgccgggtgcgcggagctgcagggccgagcggccgagccccgcgccgcctcctggccgctgccggcccccggggggcgcgcagggagctccgtcccggccgcggtcccgcggcagcgggggctgat

SEQ ID NO: 29367 - DNA, 296 bp, Homo sapiens
  chr7:123673383-123673679
  hyper
aggcggcgccggggctgtgaggggaaatgcagaagcttgtggaagccccatcccctccgctgcttagccccgcgcctccgctgcaggctctgggaacgtaacgcgagcagcggcggccctgcccccgccctgccaatgcccctctccgcctgcctcgacctctcccgccttctcaggccgcccccacgcgcccgcccgccgcaccgagtcccacagggtctgctcgggaaggcccggccctgcttcttcctcccggtgcgcccactcaacacaggggctccggtcgtgcggggggc

SEQ ID NO: 29368 - DNA, 50 bp, Homo sapiens
  chr7:12442871-12442921
  hyper
cggttggaggtggaattcgtgcagtatggaattcaactctgttctgagaa

SEQ ID NO: 29369 - DNA, 345 bp, Homo sapiens
  chr7:12442950-12443295
  hyper
gcagatccggcgaaagtttcttacagtaaattacaatgacctcaaagagcaggataacagcaggaaacaaccaaaaacagaaccaagggtcgtagagtaagaggaggcaacaaccgcatgtgcgcaaaagaaaagtgtagagttttcaagctggaaattgaccttttcaaagacagcagagggacagagaggaggcgggtgaggaacaaacatcgcttgctgccttaaaacgcacagggacgctccccaagtcgtccaaaaagtctagcctagtccctctaccgcccacgcggcgccactgcgcgcccacccccgcgcgccctacctcgcttaccttccccccag

SEQ ID NO: 29370 - DNA, 52 bp, Homo sapiens
  chr7:12443718-12443770
  hyper
acagaggctgtatgaaaacttggtaatcctagaaactgctcagatggacctc

SEQ ID NO: 29371 - DNA, 224 bp, Homo sapiens
  chr7:1270815-1271039
  hyper
cgcctctcggtctcctggattggctgggcctggtcctcaaccctgcgccgtcccctcctctcccgcaaggagagacaagagggtcattgaagtcggagtcagcgtggatcggcccgtccacgaccttcagttaggaacagggccagactgtgggtccagtcgcagggacaggcagtcgtgtggcaggacggggtggccttgcgcccgccaacccaagcattccc

SEQ ID NO: 29372 - DNA, 262 bp, Homo sapiens
  chr7:1277556-1277818
  hyper
ctgcactctttgtcagcgctcttgtagccggctatattaagatagatgcccaatgatatccctcattgttctgtcgcttatattgatgttgctgcgttatcagcctattgatcatgtgtcgcctgtaataggacaggcgccgccaacgcgactctttacaaaagccgtgcacatttgttctaatagggtccgggtccccaggggacccttcggggacttcaggacatctgcagcgaagaaatattagcaaacttggctggag

SEQ ID NO: 29373 - DNA, 115 bp, Homo sapiens
  chr7:1280235-1280350
  hyper
cggttagatgcagactggtttaattttgttgataaatcggttcgttgggggtggggacggggcgggggctgtggggagtggggagtgaggagagaagggtgttgtttctttgctg

SEQ ID NO: 29374 - DNA, 193 bp, Homo sapiens
  chr7:1287431-1287624
  hyper
cgggccgcaccccccggaccctcaggacctggagcgcgtggagggcgtggaccaccccggatcccccaccaccgggcgtgtctgccaagggtgtcattgggcgccgcgcagaaggggcttccgaggacccgcccctcccccgcagccgtcagggcgctgacggaggcagctgcgcctgtttaactgggagccg

SEQ ID NO: 29375 - DNA, 1005 bp, Homo sapiens
  chr7:1498587-1499592
  binary
cgtctgactcagccggcgggcgggggatgccatggctctggcccagctgcattcggtgtccgggcacactgaggccactgaggacagcctcggggggctgcacggtgggctgtgcctgcccagtcccacgcctcggctccccatcccccagccgcccgggcctcagtttccccgcccgtgtcagcgcgcagccgaacagcagaagaatcaaagggcgccaggcaggacttacatgaggtcgggccggtggcggtgcaggatggcgcagaaagccaggccgtcgcggaacgacgtggtcatgttgcagatattcacgtcgcggtagccctcgcactgctgccggcaccactgttgcagcgccctgatggccgccatgtgggcggcgcgcccgccgcgcggcggaaccgccctccgacaccttcccgcggctgtgccgcgaccgcccggccggcgggacagacgctgggaccgctacggaaccgccagacccacggcgcccagccccagctgagccggactgagggcgacgagtgccgggtccctaagagaagccgagcccggccccgcccccgccggccccgcctccttgtaggccccgcccccagccgccaagtcctgcctccggataggccccgtcctcacacctcccagccccggcataggctcccgcccaggcaggccccacctcccgacaggccccgcccccagccgccgggtcctgcctcctgataggccccgttcccacgcctcctggccccggcacaggctcccgctccaggcaggccccgactccggacaggccccgcccccagcctccaggttttgcctcccgagaggccccgccccacgccgcccggccccagtacgggctcgcgccctaggcacgtcccgcctcctggtaagtcccgcccccacgctgtcaggtcccgcccgacaggccccgccccacgccgcctggcccctccccaggccccgccccgccgctgagggccgagacccccaacc

SEQ ID NO: 29376 - DNA, 968 bp, Homo sapiens
  chr7:151572574-151573542
  binary
cggacagcccattcactgcgcactcccaccctgccccgggagagcaaaataactttctctacggagcactctggtgtgtgtgtgtgtgtgtgtgtgtgtgtgtgtgtgtgtgtgtgtgtgtgtgtacacaaacatttacttggttggctgaggcggagggtgtgacccagtgggccacacctcccaccgccctaccccgctacgtggaggcgaggaacagtggccgcgggctaccggggcgccttccgaaaagagaaccactacgcggcccgccgcccctctggctggacaaagtgaagccgcaggcagatccgagtcgccaatgtcctcccgggcggctggcgcggacggggctgaagttcaatgcagcctgcacggattagggagctccgagcccccaaataccacagagacccaaagtacactcccggggcgggggaagggaacggcggcagaggagacccccgctccaggcccagaaacgcccggagagaaactggagcggagggggtgcattggaagacgcagctacacagctccccccaacccccgccccgctgctttccccacccaccgcccctcccctctcctccctcccctcccctctctccgtctccagcagccgagcgcgggctccacctccccggagcgcagtccacaccgtcccttttcagcaaaacaacacaacgcaccgccccccgcacccgcacccggctggataccgggctacgcccagccgcccacccgccgcgcccggcgccccctctagtctgcagccgcccagcccccgccccaggcggagccccagccctggctgcacgcgggcagagagagagattgagccccggctccgccagcccagctcgggccctgtccctctaccctttccccaagccgcccgaagtgacaggaggggcacgcacggcgcgcgcggggcgtccagcgttaaccgcttcggcgccggggac

SEQ ID NO: 29377 - DNA, 698 bp, Homo sapiens
  chr7:151722447-151723145
  binary
cggaacacagatgcgtgtcgccgcgcaatgggcacagcgcatacagcgcagagctcccgggctcaagcgctgctcccgcctcagcctccggagtagccggggccacaggcagggcatttgtcattaatggggtcttttgagaccgcgggtgacagacaacaggagccaggccacgcgcggcgcctctgcgcgaacgctagggaggactcagcgcgcggcggccggtgacgtcagggcagcgagaggtttcgtcaccgcggcgcgggggcggggccgcctgtcacgcggcgccggcggacgcgcggcgctgggcggaggcagcggctcggggactgggcgagggccctgggcctgaggaggcgcggccgccactgcgcccagcgcctgcgcgacgcctggctgctgggccccggggcagttcagcccgcgccgctcctgcgggtcggactggggctgtggcgggagagaagatgccgcagcccgagtcccagaaggcggcgatcctgggctgcgggcaaggcggtgagtaccctctaggcggcggcctcccggcgtccctcagcacctcgagagctgcggcggcggcggcgcgcggggcctgggcaggctgggggcggcggcggggcagcgcctggctccccgcgggtcctgggctcccgcacgccccctgggcgaggctcgtgtctccgggagacgcc

SEQ ID NO: 29378 - DNA, 34 bp, Homo sapiens
  chr7:151723206-151723240
  binary
cagggcgctggcctcgttttcgcgtatttaggac

SEQ ID NO: 29379 - DNA, 105 bp, Homo sapiens
  chr7:155246271-155246376
  hyper
cgcccccctccccgggcgagcctgggctaagtatcaagtcaggacagaagggcggtccccagtcggctcctggcccactctgcttccccaacacctagggagctt

SEQ ID NO: 29380 - DNA, 388 bp, Homo sapiens
  chr7:155604534-155604922
  hyper
cgctccggtgttttcttcatccttaaatatgatgtcggggttgtaattgggggtgagttccttaaatcgctcggagtttctggagatcttcccttcataccttccgctggcgcctagggtcttctcggccacattggggataaactgcttgtaggctaaaggggtcagctttttggggtgcctcctcttcccgaaccccctgcccggtccgcacgccagtcccgagcataccagcagcgaggagacgaggactagcagcagacatctcgccagcagcagcatctcgcccatggaactgatgacttccgagctgtccccgtgcgggtccgtgcgcgagtgcgcgcggcgggtgtgtgcgtgtgcgctctctcttgcgctttcccttcct

SEQ ID NO: 29381 - DNA, 75 bp, Homo sapiens
  chr7:155605019-155605094
  hyper
cgctccccacccagacaggggctggaatggcaggctgccggccgctgataacggaacacatcggagttgggtcgc

SEQ ID NO: 29382 - DNA, 217 bp, Homo sapiens
  chr7:157476655-157476872
  hyper
gatttttccccatgaatgcctggccggcctattcattatctctcttctattagtaattttctgctccgtattcagcctcccaactcttcatttcctcccgtctcccagcgtacacagtgcctcttatgtcaggccgggcccgtttttatcttgtaatcataaaggccaccaaagcaattatcgccggtcttgactggaaaagctggtcattaattag

SEQ ID NO: 29383 - DNA, 107 bp, Homo sapiens
  chr7:158379699-158379806
  binary
gacagagaggcgcgcgacccgtggccgggggcttgagacccagagcctgggggtgtcgcgctggaaccccgagacccccggagcccccgacccgctcgccaaggcgc

SEQ ID NO: 29384 - DNA, 94 bp, Homo sapiens
  chr7:158380396-158380490
  hyper
cgcgcgggaggcggcgggaggcggccgagtccgggcccagggaggcgcgcgccgccggctcctcccgccgcgcctctcgcgctcttgcggcgac

SEQ ID NO: 29385 - DNA, 126 bp, Homo sapiens
  chr7:158380510-158380636
  hyper
cggacagcgcccggccccgccccggccccgcccccggcggcagggccccgcccccggacgcgcgtccgccctcaggccacgcccccggccagccccgctcgccccggccacgccccccgcccgccc

SEQ ID NO: 29386 - DNA, 72 bp, Homo sapiens
  chr7:158823238-158823310
  hyper
cggcgtctcagccccgcagaagccccgaaccgtgggcctcccgccgcgtccgacaggcaggggtggggctag

SEQ ID NO: 29387 - DNA, 77 bp, Homo sapiens
  chr7:158823665-158823742
  hyper
cacaggagggcgggggacgctgccagactctaagactgtgcgtgggtggttcggggatcgccactgccgcggtaagc

SEQ ID NO: 29388 - DNA, 105 bp, Homo sapiens
  chr7:18125868-18125973
  binary
cgttccaggtaccgccccacaatgctacctcctctttaaaagaagtcgttcagctggggcgggctggcgctgcgtggcgcgcacctgagcggccggggctccccg

SEQ ID NO: 29389 - DNA, 219 bp, Homo sapiens
  chr7:18126225-18126444
  binary
gcgtcggccgcgcgcccaggtgttcccgcgtccgtaatcccctccggcccgcgcctcccggcccgccctgcgggtctccagcgcctgggcccgcgctctcgccgcgggtccttcctcctatccccacccagccccgcccagcctccgcggcgctggggctcccggccgagcctctcctcccacctccgtcccctacttccctccccaagaagtgctatt

SEQ ID NO: 29390 - DNA, 438 bp, Homo sapiens
  chr7:191993-192431
  binary
cgggaccggtgccgggagctccgctgccctggcgtcccctgggtccaggcccagtcgctccttgggcctctctcgcggggccgcctccgcctcctccttgccgagacgggcgtggggcacggggtcgccgcccggcggggagctcatccggcggcgcagacgccccgcggctccggggagggacttggcctgggccccggccccgcgctcctctggggaggagccgagaggctgcagctggcggcggcggccccgggcgggagggggtcccaggaagcggccaggccggagccccccactcggccgcagctgctggcctggccagaaccgagcgcgccctcccggtctccgccgcttccctctgcaaaccgcgggcaggaggagccctctccttagcgggcccggagctcagaggcgtcgcggggcgcggccgagggg

SEQ ID NO: 29391 - DNA, 363 bp, Homo sapiens
  chr7:192614-192977
  binary
acctgcccgggaccccgccggccgctccccgcgcccaccccttccgcccttcgccccccccttccccccagccccggtctcccgggcgcggcgtgagagcagagcccggcccggaggagccgccccttccccgcccgcccgcccggcgcctggagaggagcgcgctgaggatcgggacgcctgcggccgccgccaccgcccaggcccgtcgcgccccggccgggatggacccacacgcccgatgagccccgcgccggcggctgcgagcgccgagcctccccctgctgcggccccagccgccccccgcgcgcccggctccgcggaccaggacccctgggctccccggctgagggcgcggccgct

SEQ ID NO: 29392 - DNA, 512 bp, Homo sapiens
  chr7:193101-193613
  binary
gaccttgacccgcgaggcggcgccgcgctcgtgcccagctgcagctagaggggcgcgcgggcagaacgcgctccaggcccgggccggcccgcgcggccatgaagatgatgctggtgcgccggttccgcgtgctcatcctgatggtgttcctggtggcctgcgcgctgcacatcgccctggacctgctgcccaggctggagcgacgcggcgcgcggccctcgggggagcccggctgttcgtgcgcgcagcccgccgccgaggtggccgcgcccggctgggcccaggttcggggccgccccggggagcccccggccgcctcctccgccgccggcgacgcgggctggcccaacaagcacacgctccgcatcctgcaggacttcagctccgacccctcctccaacctctcgtcccactcgctggagaaactgccgcccgcggccgagccggccgagcgcgccttgcgggggcgggatcccggcgccctaagaccccacgaccccgcgcaccggccg

SEQ ID NO: 29393 - DNA, 277 bp, Homo sapiens
  chr7:193708-193985
  binary
ccgggtggcggttccgccgctcacggaggaggacgtcctgttcaatgtgaacagcgacaccaggctcagccccaaagcggcggagaacccggactggtgagtgggggctggcaggtgcccacccccaagggagccgtgagcccaaggcatggtgtagagaggttcaggggccccagagggccgccccccatggaagaggccgggcagggagtgtggtgcgggaggaggcagccgcctacctcagggcgctgcctttgtctccagaataacctcctcc

SEQ ID NO: 29394 - DNA, 120 bp, Homo sapiens
  chr7:20825260-20825380
  hyper
aagaagaggacgaggagcgtttccaggggtggaagcctttgccgaaggaagaagagctgtccgagagggaggagggagacgggctggggctgcctatcttattacaggtagcggcaagca

SEQ ID NO: 29395 - DNA, 298 bp, Homo sapiens
  chr7:20826202-20826500
  binary
gctgaaaaaaagtgactctgcccccttctccccctttttcttttctccaaactcacttgtatttaaagaaaaaaaaaaaaagctctcaatagagagactgatagcccgtggcctggccggggcgactttaaccccctccaatcggcaataaaaggaaactaattaaaccagcaagagaaaatcctgagactcacccctagaagtgaagttgccatcacacaaaagtgccctcctcctctcagaggatcttttttatattgataaatcagaggcagtgttttttttagaggtgtgcaat

SEQ ID NO: 29396 - DNA, 392 bp, Homo sapiens
  chr7:2298049-2298441
  hypo
cgcaaagccggcgactctcccaacacatatgctgggagagccagatgccccagaccccccgacccctaaggctccatcaagcactgcagaaaacccgagttcccatataacgctgtgagccgtgtgcaaaacgggcacgcccaggaggggcacggaggagaacaagggtgttgtctccgcatcagtaacaggagagagaaacgcaggcctaggaagggggcacagggaagggggcgcagggtaggtaggagagacagcagctgcaggaaggacgtgctgctgatccaggaagagaggcggccgccccaggctgcacgcagaagcaccacactcggcggtgggggcagcggtggacacaggctcctcttcggccctcacacaaggctctgtgc

SEQ ID NO: 29397 - DNA, 419 bp, Homo sapiens
  chr7:27209044-27209463
  hyper
cgtgatgccccgcccggcccgacccccgcgcgcagaggtacctggagacgatttcaactgaagtaatgaaggcagtgtcgtgctgtcgagagaaaggtggatcccaacaacaggaaactacctaaatcaccgaccagttctggtgctgcccgcgaagggctgcctcgcccgccgccgccgccgcctccgccgctgccgccgccgccaaggagagaaccctgccatcgcgcctggcccggcccagcccagcccctaggcaacctgcgcccgccagtgcaacagagtgccccaggcggccgcaaatgcgtcaaggaaggggaagccacaggccccagtaaggtattcctgggagggagagggaggaaaagagagggaggaaaggcagggagagaggaataaaggcggggagcaggcgagac

SEQ ID NO: 29398 - DNA, 109 bp, Homo sapiens
  chr7:27209681-27209790
  hyper
gcccccgccccccccactctggcaagcaggaaacgcgtggccctaaggagtgccgccaggtgggggaggccgtactgggggagggggaggcccccatgcagtccagccc

SEQ ID NO: 29399 - DNA, 158 bp, Homo sapiens
  chr7:27238984-27239142
  hyper
cggctgcgtagccctggtggtagaaggcgaactccttagcgcgggagctgaactcctcggcagctgggccggcggtatccatgtacttgtccgcgaaggcggcggcggcggcggccgaggcgggctgcgcgcacgacttgatggcgttggggtgcggg

SEQ ID NO: 29400 - DNA, 78 bp, Homo sapiens
  chr7:27281871-27281949
  hyper
cgtagcttgtaaaaagacttttcagccagtttgaggttagctgccaggggcagacagttgtaataatgccgacagaat

SEQ ID NO: 29401 - DNA, 186 bp, Homo sapiens
  chr7:28995382-28995568
  hyper
cgagaagtcggcggacacgccggtgcccatggagcgcaggggccgtcgggtggagtacatgtgccgaacgtggaccggggccccgcccttccgcctagcccgcagtttcctacgcagccagcgagacgcccaggccgccaaggccaggagcaccagcagcgcgttgaccgtcagcagggccaaggt

SEQ ID NO: 29402 - DNA, 333 bp, Homo sapiens
  chr7:28995992-28996325
  hyper
gtgcccagacgatgcttcgtcgcgcgctgccaggggtcgccggcgggcgatggcgcagagccaggagaggccgttggggtgggctccgcgagggcgggatctgcccgagtcggacggccccgctggggcttcttgtgcaggtctagggactgtggagccgggcccgcggcggcagcgacggaggggctgggctgctggaggcccgggccccgccgactcagccttagggcgctgcggttgcctaccagctccctggcggccccatcccaggccaccccagctagaaatcgcccctgctgctggagctgcggctgcggcggcagctcctccgcg

SEQ ID NO: 29403 - DNA, 55 bp, Homo sapiens
  chr7:28998209-28998264
  hyper
tctgcgagcggagagcaaacggggcggaaattcgttcttcccacactctgcccgc

SEQ ID NO: 29404 - DNA, 497 bp, Homo sapiens
  chr7:29234008-29234505
  binary
cgagcgaccgcgtctcctcttcttcctttgtgtgtgcgcgagcggagttggggcggagggagaagggggaggtcgctctgtctgtccgtctcccgccgcctctgcccggtctactcgaagtgcggcgggagaggcgggagcccaggagagggtgcgggagctggcggggcggctcggagctgccaggacgccctggtcccagccgcgcacaggggagcgtggacggcagaggggctcggcgggagccgagatccgcccgtcccggctgcccctcggcctccctctgctcccacctaccccctgacacccatagaaaagcgtgcaaaggcgcggagcgggacggaaaccacaaataaatagcggcggcggcagcgcgtcatctggtggagcaggaagtgcaggcagagtccggaggctggtgctttctgcgcgtccccaggactttgccatgggctgggggccgcggaggctgcgagcggccgggcgagggcagcggc

SEQ ID NO: 29405 - DNA, 159 bp, Homo sapiens
  chr7:29234886-29235045
  binary
aggagcgggcaggctcgcactttctggcgcagctggagcgggggctggcggggcggagaaggttggggtgaagcagagcgccccgacctgtttgccgtgccgcgcccgctaccctggacacccaaatccggagcagaggggagcaaaccctcgctcctc

SEQ ID NO: 29406 - DNA, 66 bp, Homo sapiens
  chr7:29604726-29604792
  hyper
gcacagaaagtgggctgggagtctcgcttgctgtacccgcacctaagtgctcagaagcggcctttc

SEQ ID NO: 29407 - DNA, 213 bp, Homo sapiens
  chr7:32996732-32996945
  binary
cggccacgtaggagcccctcacggcaccaaacccggtgtctccagggacgggcggagaccagcgggtgggcttgggcagtacgcgcttttctcttccgactttgggccaaagccttgtccggagatcacagtgtctcgctcggggacacgccctctctaggcccagacttggtccccactggagttcccagcccccctccccgctgcggcacg

SEQ ID NO: 29408 - DNA, 155 bp, Homo sapiens
  chr7:32997454-32997609
  binary
ctctccggacaggcctttccctcctgccggacctcccctagctccgccccgtgcagccgcgctcctcccttcttccgctgcccagatcctcccggaccccagaccctccgccgcgggtgagcctcccggccctcacgtgccctaggctgccagcc

SEQ ID NO: 29409 - DNA, 55 bp, Homo sapiens
  chr7:48075904-48075959
  hyper
catgaggaacacaagcaaggaacttcagggcgccacgcaccgctacgctccctgc

SEQ ID NO: 29410 - DNA, 294 bp, Homo sapiens
  chr7:4922256-4922550
  hyper
cgaagcgcagactttacacactcagctctctcccctccttccatgaatcctatctttacagccccagcccgagccacgctttcaaatgcaaacataattcaatcagatttaattctgacctgctagctgctggagaggagaccgacttgccccccagcaaaagggactttcaagactggttcctgtctggaatgcacaagaggtggcctatattaaccgcgggacacgagcaatcagattcttctgtgcaattcagattagccaaacacttgacaggcgacagggcagggcagg

SEQ ID NO: 29411 - DNA, 42 bp, Homo sapiens
  chr7:50860152-50860194
  hyper
cgcacatgctccaaggcagtcgtcaggcaggcgtttggagag

SEQ ID NO: 29412 - DNA, 209 bp, Homo sapiens
  chr7:50861127-50861336
  hyper
cgcttccctctctgcctcctcccgacctccccaccccctcgatgggctttaaactcgcccggccccgcccgccctccccgcctctgccgccgccgccgcctccgcctccgcctcctcccccggctacttttcctgctcctcctcccgccgccgccgcccggaccgctcggcggccgccagcgcgggaggagccggggcctgggcgcagg

SEQ ID NO: 29413 - DNA, 106 bp, Homo sapiens
  chr7:50861531-50861637
  hyper
aagcgaactgtttgaaacgcacaaagtattaactgcgcagtccagatcctttatcctgggcgcagcaggacgggacggaagagctggggctgccccgtactctgtc

SEQ ID NO: 29414 - DNA, 363 bp, Homo sapiens
  chr7:51383392-51383755
  hyper
cagcctgcaccgctggccgggatgagcacggcgcacctggctcggggtctgaataatgagcagggctgctcgtcctgtttgagggaaattactctttctgagagtcaaatcctgaatgtgacgtgtaatccctgcacgcaaggtgtggggatagcaaacagaaaccgggagaggtttgggcaaaagcggaatcgcgaagacagggatgggccgccagactcgcgggtccgctacggatgtctgcgcctcaggcctggccccactaggacgccccttccactgccaggggagaccctggaataaaggcagggagggagagctgctgccatgaaaccctccgggcaatccgaacaccttccgaga

SEQ ID NO: 29415 - DNA, 462 bp, Homo sapiens
  chr7:51383790-51384252
  hyper
ctcccctccacgctgccgggagagccgatcctggggctgccgccgaggccgggagagggaagacttgatgggaaccggccaggggcaagcccgcagggaagaggccggagtcaaaggccgggcgtcccctcgctccccgctccacccctacggcaaacacttggggggcctgaggaaagctcggagctgagtgggggctgtgctggcggggacccccataaggacgcctgcatacaaaccaccccgcgcgaaaagtgcgctccggccccggcccgacacggttacctgggcaacgacccgggtgcccaaagtacacagcacgcaccaccacccaacaccagcacccaacaccagcaccgcaccacctgctccaccactaccaccagcacccgctggggcggcagagagggcgccctgcccgggagcgcgcggtgcggacgcgggcgtccgagcccagggaag

SEQ ID NO: 29416 - DNA, 152 bp, Homo sapiens
  chr7:51384951-51385103
  hyper
atccgtgcagcaaatgtctagtgcgtagggtcgcaaagtgggagtcccgaccgggagcgtcaggaacacctgggaacttgttagaaatgcagatttctggggcccaccaggtcccacggaatcagaaacagtgcgggctggagcgcggcctc

SEQ ID NO: 29417 - DNA, 295 bp, Homo sapiens
  chr7:55086689-55086984
  hyper
cgcctcggcccgcgcgagctagacgtccgggcagcccccggcgcagcgcggccgcagcagcctccgccccccgcacggtgtgagcgcccgacgcggccgaggcggccggagtcccgagctagccccggcggccgccgccgcccagaccggacgacaggccacctcgtcggcgtccgcccgagtccccgcctcgccgccaacgccacaaccaccgcgcacggccccctgactccgtccagtattgatcgggagagccggagcgagctcttcggggagcagcgatgcgaccctccgg

SEQ ID NO: 29418 - DNA, 145 bp, Homo sapiens
  chr7:55087803-55087948
  hyper
tcgttggcaaaaggcaggtggggtccgacccgccccttgggcgcagaccccggccgctcgcctcgcccggtgcgccctcgtcttgcctatccaagagtgccccccacctcccggggaccccagctccctcctgggcgcccgcgcc

SEQ ID NO: 29419 - DNA, 78 bp, Homo sapiens
  chr7:55087982-55088060
  hyper
cggagacgtccgggtctgctccacctgcagcccttcggtcgcgcctgggcttcgcggtggagcgggacgcggctgtcc

SEQ ID NO: 29420 - DNA, 116 bp, Homo sapiens
  chr7:556571-556687
  hyper
cgggccctgacccgggggccgcctccgcccgcccgcccgtcggaccgggagccgcgcctgcccttggggcctcgctccgcgggctgcccgcccggcgcacgggccagggctctgcg

SEQ ID NO: 29421 - DNA, 213 bp, Homo sapiens
  chr7:556716-556929
  hyper
ccccggcccgagggcaggcgcggggcccgcacacctggcggaggccgcggctgaactttgtgtgacacacgcggcgttttccttaaaggcgaaaacaatcccggggcgagcgagcagccctcggccgccgctgggagagaaagtggagactggaagagaaactcctgactcatccgcccgggcgcttatggctggggattggattctgacctt

SEQ ID NO: 29422 - DNA, 111 bp, Homo sapiens
  chr7:556983-557094
  hyper
gcccgcccgcgccctccccgcgcgcggagggaaggggcgcgatttacctacggagtctatctccaggagtcgctggaggtcccggatgctgtggatctgactgcgggccag

SEQ ID NO: 29423 - DNA, 77 bp, Homo sapiens
  chr7:557220-557297
  hyper
gagaccccgcgagcgccggccgcagtccccgccccagcccccgcggagccctcgccccggccctggaaccagaagcc

SEQ ID NO: 29424 - DNA, 259 bp, Homo sapiens
  chr7:79764213-79764472
  hyper
gagattcaaaaccccaaacccgggacttgggggcgctgagccgggccgggaagcagagcctggtcgtgaggaacagccgcccgttgctgtctgcccctttgcggacagcgtctccctcgactccgcttaggaagtggtgggggcggcgtggcccccgtcgggaggcgttcgaacgcccgctaggagagagaaaggattcccctgtgcttggagcccgcactcgggcgcggagggagcggcggcaggctctcgctttcgg

SEQ ID NO: 29425 - DNA, 217 bp, Homo sapiens
  chr7:79764712-79764929
  hyper
gcgggagctgggtccggcggtgcggaggcaaggcgggtccccctctcccggtgtctggtctctctccgccccggcgggcgaggactccccgcggcggggcgggcgcgtcacttcactcggatgctttcgtgcgacccagcaaagagcccaggcgcgagtccgaggcggcgggtcgcgtggaaaccctttgctttgaagtttagctcagccttgtaaa

SEQ ID NO: 29426 - DNA, 229 bp, Homo sapiens
  chr7:79765213-79765442
  hyper
ttttcttgctgtgggggcatggaagccacccaagtggggttgggaagctttgctttagtagtaggcaaggcagatactcgagtggtgaaaactgctgtgaaagagcgagagggtcacgccagacaacagggttctgtctccgctgccaccgtttctgatgaatgagatttgccaggtacacgcaaggcttttatttgttcttagcactgttctgttcgtgaaacgctac

SEQ ID NO: 29427 - DNA, 173 bp, Homo sapiens
  chr7:82073323-82073496
  hyper
cgggcggagacgggccgggagcagccctccatacaaggcagccaggaactcccaaagtcggcgccggctcgctcccgccgcccggcgtgcgcaggcggagcggaccagccccgcggggctcccgggggacggccagccgcccagcgggcatccacaggctgcagaggctccaa

SEQ ID NO: 29428 - DNA, 40 bp, Homo sapiens
  chr7:82073533-82073573
  hyper
cacatgcaggcagcgttcccccccagccctactcccaggc

SEQ ID NO: 29429 - DNA, 107 bp, Homo sapiens
  chr7:87936014-87936121
  hyper
cgatgggctggggagtggggtcctagcagcagggactggaggtgagctgaagcagataagggacgggagccttgtggcgaaaagtgacccacctgagggagaggcgc

SEQ ID NO: 29430 - DNA, 208 bp, Homo sapiens
  chr7:87936206-87936414
  hyper
gctgtggcttgtggctctcgctgctataagaagccagagaagggcgggacggtctgctggatttcgcaagagaagcggaaaagaacttgtttcctggaagagttcaagctgagaatcccagcagctggaaggaccggaacttctatactgcggtgctgctgatggtgccgctgacccccgggaagcggggattttaagggttacaccc

SEQ ID NO: 29431 - DNA, 186 bp, Homo sapiens
  chr7:89840705-89840891
  hyper
cgcgtaagaaaagcaatttctagagcggaaaggtgaccccacattacaaaaagaaatggagtagaaaaataggcttgactattctaaagctgcttcagaaagaatctccggaagaccacggaggaaccccgcaggggagccaggcggatactcagccgctcgcggtagaagggcgcgcaaagctgc

SEQ ID NO: 29432 - DNA, 92 bp, Homo sapiens
  chr7:89841066-89841158
  hyper
cgggccctcggcgccacgagctgtccgggcacgcagcccctagcggcgcgtcgctgccaagccggcctccgcgcgcctccctccttccttct

SEQ ID NO: 29433 - DNA, 57 bp, Homo sapiens
  chr7:89841396-89841453
  hyper
gcggcggagttgagggtcaagatgcagtctgcgccacgcgctgcatccatcctcccc

SEQ ID NO: 29434 - DNA, 376 bp, Homo sapiens
  chr7:93203842-93204218
  hyper
cgttagtctcagtcctccctctccgcccctctcctggttttctgacactttaaatctgtcttaggtggttcagacccaagtctaggttgtattatcagctaaaagacaactgttctttcccctggcttgctttctacctccccagagtccaggaggctcaccttcccggcgccttcctgcgctctcccagctgtgaagctgtgcgcaaacttctcctgacttaagagtctcaatcctagcctgcgctcccgccccacccccgcccgcctcccgacaggcggcagaggaggtggcagcagaattgatgagagccagccccccttcccggaccccgccaccccagtcagccccctcctgtcccaggagagggaggggc

SEQ ID NO: 29435 - DNA, 39 bp, Homo sapiens
  chr7:94536809-94536848
  hyper
cggagccaacacccgaacaggaaggggccttgccccagg

SEQ ID NO: 29436 - DNA, 280 bp, Homo sapiens
  chr7:94537598-94537878
  hyper
tgggatctattgtttcctggcacattgggaggaaaaacaaagggatttattttcattaccctgtaattttttttcttttctatttttttaaatgtggccagggagctcgtctctctccgtgtcacagtgggatccgcctggcagccgccgggagctgcagccaatgtgttaggacttcaggtgcttcttggcacaaagctagactgcgacctcctaccatagcgcttggcgtcacctgctctcccggtcctgccccagggccgagggattgcgtcccgaa

SEQ ID NO: 29437 - DNA, 101 bp, Homo sapiens
  chr7:95226207-95226308
  hyper
tgtcaagtactcctggccacaaactgtttccaagagtttggactccgcgtgctcattggtccttgctcagagcagggcttttacagtagccaacaagctgc

SEQ ID NO: 29438 - DNA, 262 bp, Homo sapiens
  chr7:96652921-96653183
  hyper
tgggcgcctatggagacagaaaaaaaaatctatcctacaacgtgacccctcagcaaccctcctccacctttaaatggctttttgtttttggaaatgcctggataaaccgcaaaactctcggcgcgctcttctctggctggctacaactccttaacccccccacccccacccagcgtgctcagggcacccgcaccgtgctagcttgtggcggctctcaaactaatcctgactgagtttttgaggcagccttctattcccactc

SEQ ID NO: 29439 - DNA, 38 bp, Homo sapiens
  chr8:105600489-105600527
  hyper
cgcccggattcggcagagcccttgcccccgaggtggag

SEQ ID NO: 29440 - DNA, 330 bp, Homo sapiens
  chr8:105600681-105601011
  hyper
tctcacagtcaagcatctttgtgtgtggattgtgccaggctacgggtcctggagcaactggccgcgggggccctcgaacccaggtcgggaagtccgcccgccaccccctcgctccgccggggccctcccggccgggccccccagcccctctccaccacccgagggtctggaggtggacgagtggagaaaagcatctccgtgtggggacacccgttccgccacatccaccccctcaccggtctttgtcccgccggtagccagggtctccgcgggagtctccaggggaacccccgtcctggaggcctcggggcccgggtcgcctcagctttg

SEQ ID NO: 29441 - DNA, 245 bp, Homo sapiens
  chr8:105601687-105601932
  hyper
agcacggtcgctgtccgagggctgggctctggcccagcgggtggggggagggggggtgggataccagctgggaggctgaaggtggttccgtgttgggggaggcgtggatggtctgaagctgacaacttgggagttccttcctctatccggtacccccaagtctccacttgctgtcggcgcggagcttcgagtgggggtgggctcaagttagtgcggccaacctggcagctggtcggtcaaggggc

SEQ ID NO: 29442 - DNA, 142 bp, Homo sapiens
  chr8:105602083-105602225
  hyper
cgactttcagggtagatatattgaaaggaggattcgcccatcacgctgcagtttccctaaagctcttttctcactcccagcaaatgggagtcctcctttacttagatccccagaacacttttctaagtacgtctgtagtgac

SEQ ID NO: 29443 - DNA, 358 bp, Homo sapiens
  chr8:106331443-106331801
  hyper
cgctcagccctcgcgctcccgggctgcttttttaattccgacccgcgcacgctgcgagtccccggcgctgtcgtccagccggaggggcagtcccgctcctttagacgcttattattgttgttgtcattgctttgtgcgattgacgtgggactactcttgggaaccacttttagtaaccagggtagaaacttctcagaaaagctgggcggtcgagacctcggggcgagggaggtaacttccccacgcggtggaaaatcagagcgtcagggtcccgatcctgggcggtgccagagccacaccaaacccgaagcgaaacaaaaagtaggtgtaaaagttcgcgcctctgcggcgggcggcc

SEQ ID NO: 29444 - DNA, 252 bp, Homo sapiens
  chr8:11550368-11550620
  binary
agcgccgccgagtttgcgccgcccgccgccccgcgctcgcctccagccgcctggggttccgcggcggccgtcagcgcgcacctcatcaataaggcctgccaggcgccggccccgcggccatccatcacccgggctgcacccccggccgcgcaccgaggcttctgccagcgcctgcggggcctctgcgtggagtgggccggcagcgtttttctacccggcaacaaatacatggctttattccacttcttaatc

SEQ ID NO: 29445 - DNA, 61 bp, Homo sapiens
  chr8:120220368-120220429
  hyper
cgatcaggggtatgggggtgcgcatggagacgcccgcggagcgctggcgctggccagcgga

SEQ ID NO: 29446 - DNA, 326 bp, Homo sapiens
  chr8:120220895-120221221
  hyper
ggcatccttgtcccccgggctgtcttcctctgcgtccgcccccggcctccttcccttcgacgtggctttgtcctgcgctccctcccggggtcctctcggtgccccgcgccgccgcccgggccctccctcctagcacctgttacgcgggcacctgctcccccgcgggcgacggaaattgcctggggagggcgagtaggcggcccggcagggccgaacattggggacgtggaggaaagaaaggtgttggggctcagaggcgcctttagaaacccagggcatggccaggggccgcgcttggccggagcgagctcctggctctcggcctc

SEQ ID NO: 29447 - DNA, 971 bp, Homo sapiens
  chr8:127569937-127570908
  binary
cgcctggccctggcaaaagcccattgcatcagcagcttctactgcttccgcctgcgccctacctgccaagcttgggcaggaagagggaaggaaagagaaactttacgccaatcccccccctcctctgctaacttcccctcccaccctcgggccctaactagccccggggacgcctcctccccaccaacgcatccatccccagaggaacaagcgaggatctcagagcgcgacctggacaggtgagtcaccctacctggctcacctgcagcgctacctcctcccggctcgcccgcccttcccccgcgcccgccctcaggctcgggttacctgcacaaactcacccgcggagaggtgaaggccgtggggcctggggaagggctccctgccgcgccccgagacttctagggcgagtttgaaggtgtaggctcggcagtccctcctctcccggcgcgggcggcagcgaggctgggcagagggcagcgcagcgggcagactaggggcatgtctttcccccgcggctgcgtagcgccccgatacttgaaggcggggggcaatccctgttcacaccgcgcttcctcccgccagctggggctgctgcccctcctcagccagctctcgggggaggtggggcgcgaggaggagaggacggcagcctcgcagcctggcggcaacagctcccgcttgggccgggcgagcaacaagcaccggagctggagggacgggattgtagatccggctccgggctcccgggcgggagcgcagcccgtggcatttaaagagacaggcgctcactccccgagctcgggtctttttcacattgcgccgagcggccgggagccccgcccccgccccgcccactcgggcctcgggactccgcccggccacgcccccgcgccggagcgggtttaaatccccctgtaaataatccacccgccgcctggggctggtgctgtgagctctgcttgccttcc

SEQ ID NO: 29448 - DNA, 151 bp, Homo sapiens
  chr8:12808911-12809062
  hyper
ggccgaccaggtgctcccgccggggcgtcttctcctacgcaggaagggccacgccgagagaggcaggcaacaagggcacggctggaggccggaaggtcaccccgtccccggcggggcgggcgcggcccagcctcacttcccgggcacgttc

SEQ ID NO: 29449 - DNA, 186 bp, Homo sapiens
  chr8:12809462-12809648
  hyper
ggcccgcgcgcgcgctcccccacggccacgcgcgcaccctgccgcccgcacccccgcgcgccctccgtctattttttcctcttcctttcatcctcacactctaaaataggtcaaggggtggaagttacacctggtgcagccctcggctctgatgcaaaagcagcttttgcccctggctgcgggaca

SEQ ID NO: 29450 - DNA, 62 bp, Homo sapiens
  chr8:12809799-12809861
  hyper
gggaggagggggcgcgacaggtcgtctagcgcgtgccccggagcccgcgcccgggtctggcc

SEQ ID NO: 29451 - DNA, 854 bp, Homo sapiens
  chr8:136469302-136470156
  binary
ttcccagctccagctcggcccttgtcccctcttcccaggatcactcgctgggtgaccttgggcgagccacttgacttctctgagccccagtttcccagtccgtgcatctgaaaggctgtaatagcgtcgtggggctccccactcggccctcagggccaaaggtgggcgccggacacgcgggaggggcccttggacgcaccccctctcgcaaacgcccggttagtcccggcggactcgcagtggagagcggccccaggaggcggcgggcggcggggcggtgggcgccagtgcgcaggcgcggcgcggcagggcggggcggcgggcgcggggcggggcggggcggagccgggcggggcggggccggcggcaggcgctgggcgctcggcgcggtggctcagagtgcgcggggcggcgcgcggcgtgcaggtcgcagctgtggctcgggtgctggcaggtgctggcgggactggcggggatcgccgtggactgcctcaggggcgccgcagcccgctcggcccgagggcccgcctaaccgcgccgcccgcgcccgctcctcctcggcccgcgcccggagcgcgggggccgccggcgctgggtactcggcggccaccggggatcggggctgagcggtcggttcccgcccccgtgccgccgccgccgccttccggccgaccgcccggcttggccgctgctgccgcgtctggcccccgggtccccgccgctgggggcgcgggcggggtcgggggttgccgggcgccgccccccgtgcgcctggagtccacatcccgggcccggcggccggcgagcatggaggagaagtacctgcccgagctgatggcggagaaggactccct

SEQ ID NO: 29452 - DNA, 91 bp, Homo sapiens
  chr8:143695816-143695907
  hyper
gaggacgccgcgcccgagctctgcgctgagtcctggccgccggctctttatgcagccagcgaggcccgtgggcggccggctcgccgagccc

SEQ ID NO: 29453 - DNA, 57 bp, Homo sapiens
  chr8:143859071-143859128
  hyper
cggctcgccgggcaagcgctgggaccccgaggccagtccaggcatctggatctccga

SEQ ID NO: 29454 - DNA, 49 bp, Homo sapiens
  chr8:143859361-143859410
  hyper
ccgcctcgctgcccatggcctccgcctgcctcccctgcgctcagctccc

SEQ ID NO: 29455 - DNA, 220 bp, Homo sapiens
  chr8:144240980-144241200
  hyper
cgcgggccccctactcaccgggcgccgagcacagcaggacggccagcagcgccaggccgaggcccttcatggctgcaggcagcatgctccgggtgggcctgggggcggcgcgggggcttggggcgcgggtcctctggggcgcaagcctggaggggagaagcatcggtcaggagaccccaaagaccctctcctttcccagcctcaggatgcaaccttctcc

SEQ ID NO: 29456 - DNA, 211 bp, Homo sapiens
  chr8:17354241-17354452
  hyper
cggggggaccaaaaccccacttagaactctgcttagaagattcggaaatgcccttgaggtttggtcctcccaggagagcacgaagtttatcctcgcgcgcagcctctcttccccggcccgcgcccaccggcctagcccggggctagcgcccgcccacgtgtgctcggctccaggcaaaccccgctgagcagcggccgcacaccgcccaccc

SEQ ID NO: 29457 - DNA, 545 bp, Homo sapiens
  chr8:17354600-17355145
  hyper
ttctgcagcgcggccggcgggcgctcctcttcgcgggaccagcgaggcggcggccgctgctccagcgtcccccagccgcgggcccccgacgcgctgcagccggcagcccaccgccgccttcttggcgcgaccccaacccagccccagtaagttgctaggtctccagccccgccgagaggccgcgggcgaggggcagcccggacgctggggccggcggggaaggagcggggcgagggcgccctggggccggcggggaactagagggtcgagggctcccggggacgagtccagctgcgcgcagctgccctgaggccgcgctccagcgagtcttcgtcagggagtcggggccgtgggctggggctgaagccgtggaccttcgtcctcggggctgcgccccggaatgcgcctcgcctcgtccggtccctgtgcagccggctctgcccggggacttcggggaccgctggaactgggagaggggctggcacggcgacttcgcggggacccttcagtcactatttccagaggagctcggcgcacccctctcc

SEQ ID NO: 29458 - DNA, 287 bp, Homo sapiens
  chr8:1771751-1772038
  hyper
ggagcaggctctgcggggaggatccagatgttgggggcggggagggcactcggtctgcccagcgacccctcccgaagtgagcgcggcccggggtccgcggggcaggagatgatccgggggcgggagcctctgccgcgcgccccctcccacgcgtgcgcagcctgggccgggcgttgggcagcgggagggggcgcgggcggccacgtggcctcgaaggaatgcgcgggcgcgagggcagggcgctgccgagaaaccggcaggctctgcggccaatgggcgcccggaac

SEQ ID NO: 29459 - DNA, 591 bp, Homo sapiens
  chr8:19796843-19797434
  binary
cgacttgctcagcgccaaaccgcggctccagccctctccagcctccggctcagccggctcatcagtcggtccgcgccttgcagctcctccagagggacgcgccccgagatggagagcaaagccctgctcgtgctgactctggccgtgtggctccagagtctgaccgcctcccgcggaggggtggccgccgccgaccgtaagttttgcgcgcaaactcccctccacctgcagacccggcgggtggccactgccacccgaactgaggatgagaagaaggaagttggaaggggcggtggatgcgcccagggactctcccagcctgggctctagccccgaaacggtccccggagtgggatccaggaggggccgggagggaatctcctcccgatcgtgaagcggcggcgcccagttcccgctttttctctctgccgggttcccgcgctatcccttccactctggctgggaccgcgttcccgggctcgcaggctccgccggggaggttccggggtgtgggggccgggacggcggaggcggggagtaagggcccggctggcggtgacctgcagtcacctctctgccggaggggccctg

SEQ ID NO: 29460 - DNA, 305 bp, Homo sapiens
  chr8:24812836-24813141
  hyper
ccacccctcccacacagtggccaaggagccaagccctatccctaagagctgcgtgcagccgcaccacccctggtctccactttctgggcgcaccaactcccccccttgctcgagtcccccgcccccctgtgtttctggccgtgccgcacctgcatagcgctgatgtcggcgttctgcttgtcctccagctcctgcagctgcttctccagcgcttcattcatgccccggcatgcttcgatttccagggtcttggccttgagcagacgacggctctcggacacctcgtccttggcggcgcgcacggc

SEQ ID NO: 29461 - DNA, 303 bp, Homo sapiens
  chr8:25041946-25042249
  hyper
cgggacccagcctccggggtatcagccgggtggggagggcgggagaaaggcaaagtgccgccagcgtcaaagtcccgccggcccaggaagccgctccagggaagcgcgcgaggcggagccgcagtcggcccccgcccggcagagcgcagagagcggcgcgggcgggagaggccgggcgcccgcggctcggaggcggccccggcgggcggagggtgcggccggcgggagggactggggcggcgccaggaggggcgcgcactgctgcgctgcagcccggcccagcaggtgaccgcgggcggcgcg

SEQ ID NO: 29462 - DNA, 251 bp, Homo sapiens
  chr8:25042284-25042535
  hyper
gcggcccgcggagtccagcgaagtttggcggaacatggcggaagcgtctggggcacgcaggagcgcggggcggcggcggccggagcccgaggagctgtagcagccttagtcgccgccgccgcggggcgaggtcgccgccatggcccgctggatcccgaccaagaggcagaagtacggggttggtgagtgcgcgccccaccttgtcccggcccgacccacgcggccaagttcgcggacagcggccctgccag

SEQ ID NO: 29463 - DNA, 171 bp, Homo sapiens
  chr8:25042567-25042738
  hyper
gggggctcggcccggctgcgcagctctgggagccggggacggtaggagtcctctccagggagcgccgatggggaagtcgcccagggtttggggactccgagtgcttccaagtgcagctgagcttcgggaccgtaatcccgctcttgcatcccaatctccggcacttcacac

SEQ ID NO: 29464 - DNA, 436 bp, Homo sapiens
  chr8:25042833-25043269
  hyper
ggagtaggtgaccagcccgggtcggcacatggactggtgctcattgtcccagtgctttctgccccccgctttcgtaggttcttctcagacgccccttaagtgaggagttgagggtggaaagccgccctgccccctttcctccagagactgggatcttgatgacagttgtgagctggatggaaactagagtcgtggcgtggaagtgatggaagggacaggaagttgtggcacgggaagggggtggctggcccctggggctgtttgtgcgcactcatcccctaacggagcctgtctggagagggtgtaaggctgccttccggatcctgagtttcatcctggagacgagaagaggacattttattaaggaaactgtgccagaccccgtgctgggcacttggcattcagaacagcggtgctggagagccccgggttgtgc

SEQ ID NO: 29465 - DNA, 500 bp, Homo sapiens
  chr8:25902969-25903469
  hyper
tttgcatggacgcgcgggattggccggcgcctggcaagccgggccgacgtcctccggcggcgcgcgccacgctctgcgttgccgggactccgggaggtgaaaggggacagaaagctgcgggcgtcgagtcctagcacgaaccccgtgtgcttgcgcaggattggggggcccccacaccctgcactgacttagggtagcaggtctctgcgggctggggacgcaggggttcggcctggctgcgggaagcctccctggatcctgcctctagatgtaggcttttgtagcctgccgggaggcacgttcgttcccggggttcggatctgtgtgcatgcttgtgagcgtggccacatgtgcttatgttttgcgcaaacgtcccccagagcacccagctccctgaatggctccccaggtctcctggagttccatggtgatatcagatgttgtgtgcggcttgcacgttgctgagagtggagaacatatgaaagaaggcgggggatggg

SEQ ID NO: 29466 - DNA, 88 bp, Homo sapiens
  chr8:25904367-25904455
  hyper
ggtccgaactgcggagattcgcttgaaaacggatagggggttagggagtttgcggggcgggtgcacggaccgtctctgcacaggcccc

SEQ ID NO: 29467 - DNA, 53 bp, Homo sapiens
  chr8:26724653-26724706
  hyper
tgcattttttaaaaagagtcaaaataagaaaagaaaaaaaaatgcagataacc

SEQ ID NO: 29468 - DNA, 283 bp, Homo sapiens
  chr8:32405171-32405454
  hyper
cgcaacctagcatctttaaggttcgcttagcccttcctgtgcacctggaaggaagccttatcttaaactcccttccacctagagtttattttcgcctgcgtgcgacagggcttttgtacttaagtgagttaaggaatgaaccccgaactcttctgggaaagccaccaacgttccccccgcacccctcccagggttcctgaccacggagactctgcttggggcacaggtgtgggagtcgcaaacttttctctgcgccgtccttttccgcgtggaatgggacgga

SEQ ID NO: 29469 - DNA, 1274 bp, Homo sapiens
  chr8:37552902-37554176
  binary
cggacacacacggcgggcggggttacagcccccgccagcatcaccccccacccacccagtggtgagaagggagagaggagagagagcggccggaaaggaggacggggcgcagagctcagggtcccggagaagtcccgtcccaggcgggggaccccagggcgaggaaggcccagtcggggggaggggaggaatcccgggagcggccgagaccgaggcagcggcggcgcgcggcgcggcccctttaaggctctccccgcccaccgatggagccggcctcagcccgccgctctccccgccccggggtcccggcgagagctgcgattgggcgggcgcggcgatccctttgaagtgtggctgccgatcgcggctatttgacgtgcggctcgaggaaggcgaaggtttttgtgttgctagccggggccagcggcggtggcggcggcggcggaggcgtcggtggaggaggggaggcggcgaggaggcgcagctcccgctgcaccgcgatcgacgctgcggagcgagcccacccgccccgggagctcgcctccccggtgctcccccgccctccccgcccccccagcggcgctgcctcctccaaatgagcgattcgcccgctggatctaacccaaggacacccgaaagcagcggcagcggcagcggcggcggcgggaagaggccggcggtgccggcagcggtgtccctcttgccaccggcggaccccctgcgccaggcgaaccggctcccgatcagggtcctgaagatgctgagcgctcacaccggtcacctcctgcacccggagtacctgcagccgctgtcctccactcccgtcagccccattgaggtcagtccccggccgctgcccccgggcgccggccccattcctcccaccgcgaccgggaccctgacccagctcccagcgccccggggctcggtgcgacacccaagtctggtcacgctggcgggctgagtgaggaggggaagaaaaccgagggatcagagcccaccagggcttccccaggcttccccgtggaagggtctccttccacgctcgcccttcggagctccgtgttttctctcggattggatttgctcctggagtcccctctgggtcctttacttttcctctgatccccagtttccagccaggagttggtctctgctgggtcttccccgccccccacgccgggctgttttctttgaagccctggctgcccgggtcccacttcgcctctgtcccatccggtgagggcgcacggcgccctggcgctcccgatccc

SEQ ID NO: 29470 - DNA, 43 bp, Homo sapiens
  chr8:495481-495524
  binary
cgtggccacgtccgctcgggtcaccaaggcaacggccgggagc

SEQ ID NO: 29471 - DNA, 69 bp, Homo sapiens
  chr8:495635-495704
  binary
cggggcctgggcgccgggcatccgggactcatcccctccggcgcccgaggtcgcgggatagtgggggcg

SEQ ID NO: 29472 - DNA, 128 bp, Homo sapiens
  chr8:53853387-53853515
  binary
cgccttcctggacgccagcttccgcaggaacctccgccagctgataacttgccgcgcggcagcctgactcccccagcgtccggctccgcaactgcccgccactcctggccagcgagggaggagccggc

SEQ ID NO: 29473 - DNA, 149 bp, Homo sapiens
  chr8:58906804-58906953
  hyper
cgtgcggacataggtgggagtgggggatagggaggaaatggaggcgccgaccgagtggaatggggggtgggtcagggatggggtgggatgggcatcagtagcggggtggagatgttgagagagaggcagggcttggagtggaggtgcga

SEQ ID NO: 29474 - DNA, 115 bp, Homo sapiens
  chr8:58907941-58908056
  hyper
ggttaccccctccagctcctcccgtggcctcaattgtctctattttctttgaaagcatacagatttgaaatagaattaaattctccttggctcactcgtgtctccatcacccagc

SEQ ID NO: 29475 - DNA, 41 bp, Homo sapiens
  chr8:62200462-62200503
  hyper
cggaggcatttaggacccaggggaaagctaggctccgtata

SEQ ID NO: 29476 - DNA, 131 bp, Homo sapiens
  chr8:62200984-62201115
  hyper
cacaactgtgtcttgccacttagacaaagcccgaggtccgcagggcagagggaaagagctcaagttgacaggcataggaaggaaagttcaggtgaacaaacccctgaaaacaaagagagacgcctgtttgc

SEQ ID NO: 29477 - DNA, 261 bp, Homo sapiens
  chr8:65492407-65492668
  hyper
tataattctcgcccggaagggtaatttagcacaagctgagacagcagtggcgagggaagggcagtggggggtggggtgcggtgggtgggggcgtctgctttccacaggactcccaggcttcgccgccgatctacaatttgctgaaggagcaaagaacatcctcggctctaagtagggcttttagtgtgctcattgatgagtgaaagtcgccacacatgtcaagctaaaggcagttgttgggttactaacaggacccagcgc

SEQ ID NO: 29478 - DNA, 340 bp, Homo sapiens
  chr8:74005170-74005510
  hyper
gtccagcctccagccgcgggcgaagcaggcggggtcccggccgggacagcagcgcccggcctcggcgcagccggcctgggccccgggccacagccgcgacagcgcgcacagcgccatccacagggtcctcatggccagggctccggcggcgcctgcgacgcgacagacccccggggcaagcgctctgatcctcggctggccgcggcccgggagctgcccgagcggccggcgaggcacagccgggccctgccctgcgcccggcccccgccctccgcgccgcccctccccagccctggcggcgcgcccgtcgaggcccgggcgggtggcggggctgccctgc

SEQ ID NO: 29479 - DNA, 123 bp, Homo sapiens
  chr8:74005539-74005662
  hyper
gacgggcccgcaatcgacggtccgggcgccacccactccccgctgccagctcgcgccccagctccagcccggggacctccggggcgcgggagcggaaaagcaggtgctggcggggcgggggtc

SEQ ID NO: 29480 - DNA, 57 bp, Homo sapiens
  chr8:74005798-74005855
  hyper
cgatgggcaccaaacgtgtctcagcagcactctgcgcgggccaccccgccttcgccc

SEQ ID NO: 29481 - DNA, 917 bp, Homo sapiens
  chr8:81785915-81786832
  binary
cgtcatcctcctcctccgcgccccctcggggcttctcctccacacgcccgagccccctccgccgcctgctcccgccctcctcgtcctcgtcttcctcccctagaagcagcagcaccggcgacgaggcggcggcggcggccccggtggcccgaggggggccggtcccggcgctgcgcggcggcggcggcagcggcggcctccagctctccggggcgggcgccggggccgggcccgggacagggggcgggagcccgggtagggcggcttccttggcgggcgcgggcgccggcccggcaggctgcagcgcggcgcccccccggcggctgcccaggctggagcgcttggctagacgccgcgcctgcatgcctgagcgcggggttgcgggccgcggcgcggggccggagagtttgtcacctcctcttcctcctctgcctccgccggtggccgcagggccggggactcgcggccgcaaggggctgcaggagccgccggccaggacccgcggctgccactggctgcagaggcgcgggcgccgccttcgctggaccggccggcggggacgccggcggccggcggctacggcggggcggcgcggcggccgcgggcgggggtgggtgtgagcgagcggcgcgctgccgcctccgccgccgccgccgccgcccgggagccgcgggccgcgctgcgctccatgcggccggcggccgagcccgcgcgcgcctctcccggccggctgcgcccgcgcgctccgggcctaccgctgccgtgcctcggcgcgagctgtttgtgttgtatgttttccaccaccgcccccctcttcgcgagccattcctcacaaccctccggtccccccgctcagacaaaacccggactggattttttttttctcttacccacagtctccgaaagtctggcgcttc

SEQ ID NO: 29482 - DNA, 72 bp, Homo sapiens
  chr8:95651655-95651727
  hyper
ggccttcgcccgctctcaggggacgagagctgccacctgtatcacgggaggccccgcctccgcctgcacctt

SEQ ID NO: 29483 - DNA, 176 bp, Homo sapiens
  chr8:95651845-95652021
  hyper
ccggatttgtacccggagtgggttctgcagggataggtgcatggttgcccgtttcacatcatgaatatgaacggggctggacacctagagccgaattattaatacttcagacagaattctgttcccaagaacaaatcgctttgagatataaaacccgagaaaacttcacctctggc

SEQ ID NO: 29484 - DNA, 68 bp, Homo sapiens
  chr8:95652747-95652815
  hyper
cgccgcgccctgggcagctccgcgccccgggcctcacctctggcctcctttcgcctccctgcacctgg

SEQ ID NO: 29485 - DNA, 378 bp, Homo sapiens
  chr8:95652863-95653241
  hyper
gtattctccgagcccccctgcacctctcagttacctccagtgggaacccctccccccagcgactccgagccctttacctctctgagccctttccccgtctggcctcgtctaccctctgggtgtcaaccgcctcttccctgcccctcacgtctccccctcctcctcccctgccctcgcctctccattcatccagccattgtctcccgccccttcctccccctcccgaagcggcctcctcccccaccgctgccacgtcgtggtttgaaggagccaatgggccggcgccgccaggtgtctcttacctgcaccacgtgggggagggggaaggggcgggcaggtaaagccacatcccaaaacagaaaagctttcagccattgc

SEQ ID NO: 29486 - DNA, 53 bp, Homo sapiens
  chr8:95653290-95653343
  hyper
cgggcaactgaatacaaaaagggcaggcctcctgcgccctccttcccaccccc

SEQ ID NO: 29487 - DNA, 109 bp, Homo sapiens
  chr8:95653451-95653560
  hyper
tcttagaagagggtttagcacaggttttttcgttctcacttccacaccaccttaccgcctcccgaccccccctctccccctccccacctatcgtcatgacggcctctcc

SEQ ID NO: 29488 - DNA, 55 bp, Homo sapiens
  chr8:97156910-97156965
  hyper
cggggtggagccggggtccatggagttcatcagcgtctggatgatggcgtggttg

SEQ ID NO: 29489 - DNA, 188 bp, Homo sapiens
  chr8:98787253-98787441
  hyper
cggaagcacagcgaggatgtccttgacacacatcctattttctgggaaaagattactaccacagtaattgagctgtgaagcggagacaaattgctctcggtggtggttcaaagtactgcaattgactggaatagcaccgcgcagttttccttcctctcgtgcaagataagagtgataggagctgtatc

SEQ ID NO: 29490 - DNA, 177 bp, Homo sapiens
  chr8:98787803-98787980
  hyper
taaaagaatctcgacccttgaatggagttacacgaacggccagatgaaagaaggaaggcccggacctccactcagggccgactaggggactggcggagggtgcacgctgatggatttactcaccgggtgcttggagctccagcagctggctggagcccgcgatgacgtcacggactc

SEQ ID NO: 29491 - DNA, 356 bp, Homo sapiens
  chr8:98788437-98788793
  hyper
ctaaagttgtattattagaaacttaattctccgggtgccgcgtccgcacttcccccggctgggccagcgccgactgggggaggccaggagtttggggcgatgggggaggccaggggcgcggggcggagggccgcactcgacccttggcgcccaggtggtgtgggtcgccgatctccagcctccgcgcagccccgcggcctcgcgtagggcgcaccggggcagacaaactgagcttatctgccgagcacgtgtttcctttcttcttaaagcccgtgggctttgtgtttcgacggctgcggacggagcggtcgcggaggtgacggcgcatattttgcagctctgtggttagggttgcg

SEQ ID NO: 29492 - DNA, 766 bp, Homo sapiens
  chr8:98881052-98881818
  binary
ggacccctggagtctgatgcccgcctgggctcaggcacggacggagtggagccaggtggcagcaggcagggcgcgccgccagagtgcccagctcccggggctgcccacagggtggggccgccctcgccgccgctccctctccgcgccttccccatccccaaagaggacacccctccttccgcccggcccgctccccacccccgccgcggcaccgcctccccagccgcccgcccttgcccagcgcctcccaggcagccagcgagcgaagggagcgctctgggatgggacttggagcaagcggcggcggcggagacagaggcagaggcagaagctggggctccgtcctcgcctcccacgagcgatccccgaggagagccgcggccctcggcgaggcgaagaggccgacgaggaagacccgggtggctgcgcccctgcctcgcttcccaggcgccggcggctgcaggtgagcgcggcgcgctttcccccggctctgcgcggccgggcggcctcgaagtgcaggcggaccgacccaccgacagaataccgagcctgggctgcccgacgcgcaggcgccctccccaggcccgcactgcagcccccagcgccccggggccccggcgccttcgacccctccgaggacagggggagagggagggcggcgctgcccgacccctcggccgggagagctgggcgcgctccctgcgcaggacaagccgcgctgcagccgccccggagtgccccgtgggggcgctgtggcacgcagcgg

SEQ ID NO: 29493 - DNA, 43 bp, Homo sapiens
  chr8:98881884-98881927
  binary
attcctattccacggacagccgatggctcccccttccctcttc

SEQ ID NO: 29494 - DNA, 75 bp, Homo sapiens
  chr8:99438739-99438814
  binary
cgccccccgcgtactaagccgatctccaccttggacttcccggccccctcttttcccctccagctcctgttcccc

SEQ ID NO: 29495 - DNA, 149 bp, Homo sapiens
  chr9:104248697-104248846
  binary
cgcccgcagaaacccaacactgctgccgcgctctcggcgcgcccggcgaacctaaggtgtggacgcgccgcgagggtcccctgcttgcgggcggccattaggcgccaggccccttggcgcttcggccctgctaggctcggcgagggtct

SEQ ID NO: 29496 - DNA, 186 bp, Homo sapiens
  chr9:104248975-104249161
  binary
ctggggacccctgcggggtcctcgcaatcctccggcaggaagcggtcggagctgcgggcagggccgctaggcaacccgcctgcccgaggcgcactgcccggggcacaggccctctgcgatgactctccccaacccccagctgccctgcttgtgccagctgtggccacccctaatccttgtcccctc

SEQ ID NO: 29497 - DNA, 283 bp, Homo sapiens
  chr9:109622327-109622610
  hyper
cgtggaggcttggagaggaggtttggtttccaaggattggagcgctgtgaagggcggggccattccaagtccatctcccctttttgtcctcttctcccgggacgggagggtggagccaagtccccccgcggccggttcgggagctttctctatctcggtcgctcgaggtgagtgtgaaagggcggcagcccgtttaattgcagcgcaggttaatttcttgagttcaccgcagtcggtccgccagccgcttccccggtctttgccaagtgggtttacgaggtct

SEQ ID NO: 29498 - DNA, 58 bp, Homo sapiens
  chr9:110249882-110249940
  hyper
cgccaccaccaccgggtggctgccgtcagggctgcctttgctgacgctgatgaccgac

SEQ ID NO: 29499 - DNA, 123 bp, Homo sapiens
  chr9:110250497-110250620
  hyper
gggaagcactgggggaagtcgcttcatgtgggagagctcctcccgccagcgctgcggggacagggcgggagagacctgtcagtggtggtcccctgttgccacccgacatactgacgtgctggc

SEQ ID NO: 29500 - DNA, 202 bp, Homo sapiens
  chr9:110250630-110250832
  hyper
cgactgcaccgcccagacatggggactggtcaggcaggaagcacccgggaacccagggcgccagcgctgcaatctcggcccactcccgggtcgaagaagaggtgatgcgtctgtattgcgggtgttatgtcctgtctgcccaattgcgtgtgagcgagcgccgcggctggtccctccccctccaggtcccgtggacgtcccc

SEQ ID NO: 29501 - DNA, 221 bp, Homo sapiens
  chr9:110252078-110252299
  hyper
acttccttcgctacagccttttcctccgccttctcccatgccccgcccctccctttcttctctccgccccccccgaggctcccttccatcgttgctatggcagctaaatcaacaaactcggcgcacgtgggggcgggggaggggaaggaggggcgcgggcggggctgggccgggccgtgacgccagccaggcagctggcgggctggagccgagctgacgcc

SEQ ID NO: 29502 - DNA, 119 bp, Homo sapiens
  chr9:110252515-110252634
  hyper
ggagaagagcgcgattatccgcgtgactcatccagccctccatctccccctccctctctgcgctcgcaggagtccgctctcgtcgctcagcgccagtgccggtggcggtgccggcgctc

SEQ ID NO: 29503 - DNA, 81 bp, Homo sapiens
  chr9:110252700-110252781
  hyper
gaggaggcagtgcccagcactgtgcagcgtgaactgggagcctcaagagaaggccagaggagtgttccgccgggaacaggc

SEQ ID NO: 29504 - DNA, 217 bp, Homo sapiens
  chr9:112260252-112260469
  hyper
gccgagccccacccggcgccccgcccgcgccctcccgccccggccccgccaggtgagcgcagcggggcgccccctccccgccccgacgtggtgcggggatcccggtgcagccgcacccgccagcccgcccgcgcgtccgccgcgcgccccagggacgggtgggggcggggtggcgccgagcgcgaccccggcccccggcagccccgcaccctgcccc

SEQ ID NO: 29505 - DNA, 162 bp, Homo sapiens
  chr9:112260523-112260685
  hyper
cccaggtaggtcgcgcgtgcgggcggcgcggaagctcgctcgcggcgcgacctggccgccgtctgagcatgcccagtgccgcccgcgggcggttcccgccggccgggctggccgcgacgggcccgcgcgccgggcggggggcgggcgtccgggctggcctgc

SEQ ID NO: 29506 - DNA, 288 bp, Homo sapiens
  chr9:113800481-113800769
  hyper
gcccccgggctggcttcaggccgcgcgcccagtcccggcggcccccgccccaccgccagccgagcccggccctccgcccgcccctcggcagtcgcccagagcggggccgccccctgcgcccaccccgccggggtcccgtgctcggccgggcggcggggagggctccgcggctccgggccctggccgccccagatccggcccgcgctccgcagcggggctggagacggagtcgccactcagggagcgtcagccgccagtcggcccctactgcccggctttggcgcgctg

SEQ ID NO: 29507 - DNA, 283 bp, Homo sapiens
  chr9:113800798-113801081
  hyper
agaggagcagcgccgacgccagcctcctctcttcctccgccttccttcttttctgcttgttccacgtagcacaagtcagcaacacccgaacccccagagtccgccctccccgctcccaagctggaccccttacctggtgtggcgcccccagcgcccctgacctctgcgccccctcctccattcattggctcgacagcccacggtggtggcagggccggggctggggggtggccttagcctcccattcattatctcagcagcctcccccgccccgcccccgagt

SEQ ID NO: 29508 - DNA, 66 bp, Homo sapiens
  chr9:120176629-120176695
  hyper
cgacctctgggcccctcctctaccctctgccaaccccactcggggcagccccgggcagggatcccc

SEQ ID NO: 29509 - DNA, 66 bp, Homo sapiens
  chr9:129375660-129375726
  hyper
cgcggaccaagcggccccgagcaggcgccgccgcccgggggactccgactcagcccccgcgaccta

SEQ ID NO: 29510 - DNA, 133 bp, Homo sapiens
  chr9:129387302-129387435
  hyper
cgtttaatcagaggctgtgccgctcaaaccgcggggccctttgtcccacggagtgaacgacggaaacttgccatcctaatccccttattcatgtcaagcacagaaaagaagccgagcaccttacaaccgtgtc

SEQ ID NO: 29511 - DNA, 52 bp, Homo sapiens
  chr9:129387464-129387516
  hyper
gagggggctccggccctgtagccccctgacgcttttcgtttccgagcgcgct

SEQ ID NO: 29512 - DNA, 259 bp, Homo sapiens
  chr9:132020659-132020918
  hyper
cgcggtaagacgtcagcccggtgagcatcctccgcactgcggaccgcccggggtcggggtcacccgggccccgccccgagcttgctgtcgtatcggccccgccccacccacgccctcccggcccctcctgctccgggcgcgctcggctccgcccccacgggcaacacggcctcccattggccgcggtttccatggttacgcgggccggcggagctgcgggctcccagacacgtgtccccgggagccgcccagaatttga

SEQ ID NO: 29513 - DNA, 73 bp, Homo sapiens
  chr9:132021110-132021183
  hyper
gagaggaacccagtcaatttcacctgctccccttcctccaggaagaatcgggtacgcgggcatctgagaaccc

SEQ ID NO: 29514 - DNA, 188 bp, Homo sapiens
  chr9:132244512-132244700
  hyper
cgcgctcctcccggaccccaccccgaggcagctttctcacaacgggatcctccccgggcggcgtggggacgcctcccgaccccgaggcccggcaggagagccgccaccgcggccgggtggtctccgcgtcgcatggcccctgccggcccccccgcccatggcagctacataattaattcgcccataaa

SEQ ID NO: 29515 - DNA, 543 bp, Homo sapiens
  chr9:132244741-132245284
  hyper
tgggatccccgttagggttaggggcgtggggggtcgggggccgcggggctgtgcgtgccggggcgcacggttttgctccgcgggcctctctcgctccctcgcgccggctttttccctttttctctttcctttttttctttcctggagcggagcccggcgccaggagtctggaaccagcttgacaggcttttgagttatggaggggggagggggagaggcgggcggcggggagggggaagggagggcgccgccgcggcgtgggggcggggccggctccccggtttggagactcgccccgactttggggtccgccagcggcggccgggcggagggcgggggaccgcaatcgtggggggagtcaccccgcggggcccggcgggcgaaacgggccgggcttcagagccgcagtaaatgaggcccggggcgggcgggggtggacacggcctcggggccacggcctcccccgccgagcaaggcattcctttccgctgaactgggcgcccgggcccgcgccgcgccctgcacgcctcgcgcccggcgatc

SEQ ID NO: 29516 - DNA, 690 bp, Homo sapiens
  chr9:132258226-132258916
  binary
cgcctgaaagccgcttgggggccgcggaggcaggtggcatggccagggcagagtccgcggggcggaaagggttaacgggctccgccgcattgggctgtccttcaaggggggagccagccaatgagcgcgcgccgcgatgaggtaatgccgggaccacgcggagtgggcggggctgacggggaccccgcagagctcagcgcttcttctctccccacctacccctcacctttgaccttgatgtacaccctcccctcccccaaccttacccctgcagaggcgcccgaactgaaagtcggctgcagggccgcgggcctcccttagtctgggacaggaactgagagacgtcccggcctcagtcacaccctctgggcctcagtttccctttctgcaagaagcagagtgggtgatcgctaaagaccctaccagctgtggacgtccttggatcccaggacagttttcagcccttccctgcccttggcccgaactttaacggtcccagccccggcttcccctcaggcggtgcccagtgccaggacctaggagtccctcgggccacggggagagagcctcaccggcccagccacgccctccatgtgaccccgacccatcccttgggtgtcgcacctggcgcgcccaccgaggccactaagctctgctagctgcaccagcagcaggacctgccggcgtggc

SEQ ID NO: 29517 - DNA, 202 bp, Homo sapiens
  chr9:132312367-132312569
  hyper
cgacccccaagagagccccggccgggacgcgcggaccccagaagctcgggcgggggcgcccctcggaggaatgtttccggggcccggaccgcgccgccgccgcagcctttcctccctctccccgcccggctcgccggccgccctcgcgccccctccagggccccctatcttcccccacccgaaccccacatcactgccctcc

SEQ ID NO: 29518 - DNA, 164 bp, Homo sapiens
  chr9:132312620-132312784
  hyper
cgcctccgccgggaagccgcgcgcggttgccaggaacgcggcaggcgatcggagctggacggcggcccgggcatctcggcactggcggcgctcggccctcctgggcggccctggcccggccctctccccactggcgccgctgcgcttgctccgattccctccgc

SEQ ID NO: 29519 - DNA, 99 bp, Homo sapiens
  chr9:13278637-13278736
  hyper
cgcccatcagcgcggggggtgaggagactaagggagagacaagaccaacgtgctcccaccaacgggagcggcggttaaaagggcgccggtgccaggggt

SEQ ID NO: 29520 - DNA, 348 bp, Homo sapiens
  chr9:13278956-13279304
  binary
acaccccacccccagccccccgacaccaagactgtgcccctctgggtcaaggaaaaggaaaaacttttaaacctcttagtcagcgagagcaaaagaaaggggtggcgggggtgctgaaaggtctaggattatccaccgcggggctggggggagtggagacttgcgagtagcaaaggaaacttctagaccccatccttttaaaaaagccacagcagcggcttccgcgaagcgccgggccgcgcggggtggggcaagcgcaccgccccaccgccccacggcccgccgccacccctacccccacccccacccccacccccatccccgcccccacccccacccccaagcgcc

SEQ ID NO: 29521 - DNA, 228 bp, Homo sapiens
  chr9:13279406-13279634
  binary
cggcgcccgcccagggccgcgacgcgagggggcggaggactggggagcaggggtcgccggggcctctggatgcctcgcctcgcccacgctcactgtcttctcttctgaagtaacgacccggcgaggagcttcggatcaaaacgcacagacactcacgcgtgactgagaaacttaatcccgcggtggcccgacgccagcctagcgctccgccgcgccccctcccccagc

SEQ ID NO: 29522 - DNA, 357 bp, Homo sapiens
  chr9:137533140-137533497
  hyper
cgccctgatctggctggatgggaagtttagtctccacccagaagaggagctctgaactcctccacgttaaagaaaaagttaggcggggtaaactgcaactttctttttaacccgaagtgatcaaacctcggggcccctctgcactggttcttggagcatggccaggtgcgggcacctggggtgggaacagtggggggaccagggtgggcccctgggctccgaggccgccccaggcccgcccgcctaccggctctcagagaaagaacagggggccgcgcccgccccacgtccgctccgccccgggccagccccttcctcgctgcgactcgcccgctgtccccaccccctcgcccgcgg

SEQ ID NO: 29523 - DNA, 150 bp, Homo sapiens
  chr9:137979104-137979254
  hyper
cgaatcaccgcggaaaagggctccagtaggcaggacggcgccgtctctctgccggcaacctttgccccaaagcggaccctctgcggggatcggagagggatgccccggcgtgaggatgggagaagccccgggacgggagggccgcgggcc

SEQ ID NO: 29524 - DNA, 100 bp, Homo sapiens
  chr9:138986173-138986273
  binary
cggctccacgacgagagtccaagaccaaacttcccccagagcctggcagaggggctgggaggtgacctctgacctccgaccccacacgatcccagcaaga

SEQ ID NO: 29525 - DNA, 825 bp, Homo sapiens
  chr9:138986333-138987158
  binary
gccccgggctccgctgagtttcttagagaaggagctggggccccccgacctcagctccgcagaggcacagaagctggcaagaggcagagccccctccccctgcggccggaccccagtttctccccaggctggggcccgagtgggggaggcgcgggaggcggtgacgacccacgaacgggcccacctggaccgggagggcgaggcgcgggcccggctgggccaggcagctgcgcagatgcgccgggaggggtgggtacctccgccctggccccgggccagtcctgccccggcttccccacccggagggctggatcggccagtcgggtccctggggaggccgcgcgggtccccagaaatccagggaaacccagcaggcggcggggagcgccccgggacgcccggagccggggtctccccgaacgcgcggcgcggcgtcccggcccggggtcgcgggcgcctccgccgggaccccccggccccgcccggcccccctccgcgggctcccgaggccggttcccgcgcgcacgcccgggccggcgcggaactcggccgcacccgccccgcgcggccggcactgcggcagggggctcgcgccaagttgggcggccgcggagtttgcgggaagtgcgggcccggcccgtgggacgaccccgcccggcggcgtaacccgggggcggccgcgcgcgccaagttggcggtacctgcgggcgcccggcccggtccggcctgggcagctgcggcgcgccgcccgcggcaggaagtgcttggcgtcccggcgctccggctcccatggactttctccgacctcgcccagcaccggcggcc

SEQ ID NO: 29526 - DNA, 563 bp, Homo sapiens
  chr9:138987167-138987730
  binary
cgggggcggggcggcggcgggggaggtgcccgcgggccgttaaagggacagcgcgccggccgcgcgcgcgcgcgcactggcagccaggtgggctcccggggtcggggctggggtccgggggccgggagggtccccagtgggggccggcggggcgtggggaaccccgagcgctggggaggggaggcggcagctcctcgcccctcgcgcgtcctccttccggagctgccggcggtcgaccctgcgcgggacacccggcgggagccggacgccgcggcgcagaggacggagctcggcggccgggtcgggaaaggacctggagcgccgccctccgccctccccgggccccggcctcggccggactcgctaagcccgggagagcccccgggcccccctaccccgcccccggcgcgcgccctgcccgcggcagtcgcgtccgcacggtgcagcctccgggatccgggcgggggaagtgcgcgcatccgcagccgccctggacgctcaggcgggccgtgaaagacgaggatacgggagcgcccttgggcgaacgtctgcggggctccggc

SEQ ID NO: 29527 - DNA, 2011 bp, Homo sapiens
  chr9:14313785-14315796
  binary
cgccgccgccgccggtgttggctgcttttcgcctgggtttggggatttgttttctattttgcagttgttgttgttgttggggtgtagggggtgcgcgaaggttcggtgtgggttggattggggtggtggttggtggtaaaatgctttttcaaaaaaggcggggaggggggcgcgggagggcgcaggagggcgagcgggcgggcgggagggagagcggggagaatgtgtcaccgcgctgggaaagttcaaggttacagccccaagcactgcggcaggatcccggagtggtgatcgcaggcgaaactttgccgcgagccgaccatgtgtgtgcgcgaggggcagcgtgagcgagtgcgcgcgggtggcggggcgcgcgcgggagagggccggggtgggggcggggtgggatgggggagaagggagaggccggggtgagggagggggcgcgagcgctgatctctggggcggaagaggctcgcggcgcgtggtccccggcagcagcagccgccgccgcccgcgccgggtcttcggcgcccggccgcccgcccgcccgcctcgccccgcgtctgacccggccgagcgtggaggctgctgttgccgccgctgcccagagcccaggggtatcaaaacgatctcctgaaaaattccaaacgataaatcccgctctcccgctcggctccaaactcctctcttttctgctctaggctcttttttttccctccctctcttgctttctttcgttgcaaaacttggaagttgaaaaattcaccggttccaccctctggaccccgctcgagctctctccaaatcagacttaaggattgttttattatttaattacacaatcatcgctttactcctcctcctgcaaacgcgcattccttttgcaccagcctctccacaccccccgcccccccaccttcctcctcctcctccttctccttctctccccccacctctccctcatttgttaaaggtatcctaccggtgctacagaaccatgactttttttttttttccaaaatagctcttctttccgctgccctccccacaccagcacacacatacacacccccgaaaacccgccctggaagaggtatttcggtgctcgctgcggactcttttaagccgcgggaacatccgagtgggagaagcaccgaaaccgtctgagcccgagaaaggaacgagtggaaaattccctcacacccaggccgcccccaggccggggctggggcgcggacactcgcacccggggcgggctcagtccgcggagcctgcggctgccgggaaaagggggaggccgagcaggcggggacctgagcgaacttgggctcaagtagttggggcgcgccggcgtggaccaggggggtgcggcgcccagcccccgacggccccgcccggagcccgggttcgcggatagggagggggtgcgggttcgtcccgggtctgcccaccaggggcccgcacccgaggcagtcgcggcgcgcggcgcttcgccgcggtttgccgccctccccgggggtgccccgtgcacgtggcctcgctctgagcgggaggaccgggccgagccgccgccgccgcctcttgctccctccacctcctccccgcgcccggcttcgctctcctcctcctcctcctgcagccccgctggctggctcccaatccccaccccccggggcccggggcgccggcggaaagcgtctccctacccgcccgggtgcaggcggggcggggccgcggcgcgcccggggctgcggggcgggccggcgggcgcgcgcgcgccgctgcagccctccagaggctgcgggccctgagccgctcggcgcccgcgccggctccccaccgcggcgctgccccgcccccaccccgtcgcccgtgcaggctccgagtgaatgaacttgattccagggattttgaagaaggcggttcgccttgcaccctttctgcaccccccgcccacatacacacaccgccccccaaatccagttttctgcttggggtggatggggac

SEQ ID NO: 29528 - DNA, 435 bp, Homo sapiens
  chr9:14347673-14348108
  hyper
aggcactggggggtcgggtgactgtgcggagtgtaaaagacatttccttaggaaacagacaaggcagggccaggagttccgcggttttttttccgtgcagaaatcactacccggcgacggctcagggcggtagagggcaagtcttatctgccaaggcgggattagattctctcgccgagggtcccagtatcccgccgcccagcaagggccgagcgcgcgcgcgcgccagggagctttggagcgacgcgcgtagtttcgcgtcgcacgcggtgtctggtctccgcgcaccacgtgcgctcgcggtccttggcggggacgttggtgctagcgatccgacagagcacccaggactaggtttttgtgatgccctaacctgggcatttatgctgggggcggaacgaagtcgcccaacccaagttctccctgcaccctggg

SEQ ID NO: 29529 - DNA, 132 bp, Homo sapiens
  chr9:16871284-16871416
  binary
cgcccccccccccccccggggagctgcgggcgtggaggtagaggtggccgctagcgcccagctgtcacacacacacaaaaaaaaattgcggggcgggggtggggagcggagcaaggagaggaggctgcgaaa

SEQ ID NO: 29530 - DNA, 115 bp, Homo sapiens
  chr9:21559133-21559248
  hyper
cgctgtatgaaagcgctctccgccaacacgctcatggacacacacaactccttcctcgaggtttagggacagagagcgaacctgtgacttcgggccaggatgacgacctgagatt

SEQ ID NO: 29531 - DNA, 285 bp, Homo sapiens
  chr9:21559381-21559666
  hyper
gtgtgcccactgccgtgtgcccaggccccgaagcctcctcaactccttgaggggcgcctccctagccagctcagcgcgcagcgggaccaaggctctcccagcttacctgcgggtccgagtaggaggacagaagcgccgcccggcctcgcccaagcgcacacgaaggggccgcttcccgccccccgcaccccagaccaggcggctcacggaacaccgcctcccagctctggcccgggaccaggcggtcccccagccggcttcggcgccgcggccggggacgcgcgt

SEQ ID NO: 29532 - DNA, 74 bp, Homo sapiens
  chr9:21559702-21559776
  hyper
cccctggcggcgccccaagttatgcacaggtcgcagctgctcaccaagctcctcctgggaggccgccctggtcc

SEQ ID NO: 29533 - DNA, 245 bp, Homo sapiens
  chr9:22446681-22446926
  hyper
cggattccccgccgccctcctcccagaaggtccccactccccgccccgggccctcccccggcttccgcgctgggccgggagcctgggtgggcggggtagcctctctagccttgccttcttggctggaggcacaaaggcattaacttagcgcccggggtctctgccaggctcacgggacagctgcacctctcagcgtctccagctccaggacgcggtcgtcccaactccttccgagtggaaagagt

SEQ ID NO: 29534 - DNA, 153 bp, Homo sapiens
  chr9:22447276-22447429
  hyper
cggaggctgcccgccggctcccgggctggagagcggggtaggcgcggtgggctgcggctacccgcggacgcccaagtgcgcccgctgtcgtaaccatggtgtggtgtcagcgctcaagggccacaagcgcttctgccgctggcgggactgcgc

SEQ ID NO: 29535 - DNA, 300 bp, Homo sapiens
  chr9:29212828-29213128
  binary
tcctaacttgacttaacccccaccccatccccaacatctattttaagttattgtctctggcaattcaagcagcagctttgctgcctcttaccttgaggcgctgttaattctccttcgtgtccttaaaatcccaagccaaggatgcgacgcacacaagtccaggggcttttcctggacttccccctcctcagctctgaaggctcctcctttccaagggatcaggaggggatggcggttcaaaagccctcaccatagaggcgcctccaagccttcgtaccagtggaaatggagaccgggacc

SEQ ID NO: 29536 - DNA, 283 bp, Homo sapiens
  chr9:35161771-35162054
  binary
cgcgtcacacaactgagggtcaaccccttgctccctgcagtaagcctgattagtgggcggagcttccttcaggatcgcaagaaagaaaggaggaaggggaccccgcctcctacgtgctcgcgggggggggcggggtcggtggactgggcgtgagttaattggctggggggcggggcaccacgggttggctccgcccaggcgctcgcgcggatcccgggtggaatgacgggagggagtcccggcagctcctacctcccagcgatggcgtcgctgtgccgcgccc

SEQ ID NO: 29537 - DNA, 253 bp, Homo sapiens
  chr9:35162422-35162675
  hyper
tattattttggcaatcacttaacaatcacttgagttctttccactttcttgttttcccccaagctcctgcaagggacgattagctctccattctggtagccatgtgacaatgttgttggactgcaggctcagatcctattaaacagtgactggggttctctagtgagagtggacgagttagaagaccgcggatggttggtgcctgtgaatggtgggcagcctctcattcttttcctcctcctcgcaccgtaac

SEQ ID NO: 29538 - DNA, 137 bp, Homo sapiens
  chr9:38619917-38620054
  hyper
cggggaattgccagcgacggaaagcagctgaggctccatttggctccgctgctccgagggtgcccggcgccctccaaggtccccgccccaggggctgccgggctgcagggaagccgggcctgcggccccctcccacc

SEQ ID NO: 29539 - DNA, 128 bp, Homo sapiens
  chr9:38620403-38620531
  hyper
cccgcgatccacccccaaatccaagatccacccccaaacccgcaatgtagctcagaatccgcgatccagcccggtccaccacagccttcagcagcgacactcgcagactccgacctctcagaccgagt

SEQ ID NO: 29540 - DNA, 51 bp, Homo sapiens
  chr9:74764247-74764298
  hyper
cgcggagccaactcgcgggagaaaaatcctattggcattgaggaggtaggg

SEQ ID NO: 29541 - DNA, 42 bp, Homo sapiens
  chr9:74764879-74764921
  hyper
caccccccgctcccccgccccccgttccaatcctaagatacc

SEQ ID NO: 29542 - DNA, 93 bp, Homo sapiens
  chr9:77501932-77502025
  hyper
cgagaccaagaaattaccaggatctccactactctcccaagcgtctccagtgctctcccaacagccaggagcaccctccctctccaagccccc

SEQ ID NO: 29543 - DNA, 381 bp, Homo sapiens
  chr9:77502233-77502614
  hyper
ctgggcacttctccagccgcctcggaaagccgcgacccccggctagtcagcgtccgggtctgagatctgtgcccgtggcagctcaaaacgcgccttctctcctccggattctcagctcaagccacctccgaactcctctccctccggcccggagcggaatcagagctgcctcctctcccggggtgtttcccaccgccccgagctgaacccccgacccccgctaggtttccgctctgacaccacctccgctatggccgcatcccagctcttgaaacgggggctgcgggacctgccctgtagtagcgtacactaccttagataggataatcatctttgggtggagaccagagaacttgaaagccggtatttcataaatcctag

SEQ ID NO: 29544 - DNA, 128 bp, Homo sapiens
  chr9:78505461-78505589
  hyper
cgtcagcgcctggctgcggccgctttcaagagggcggaggagggagaggaggagggcgatgtgggaaaggaggggtgttaaggggggcgggggaagtcatttatgcagagcaggagctgctgccattg

SEQ ID NO: 29545 - DNA, 718 bp, Homo sapiens
  chr9:78505622-78506340
  hyper
gagggagcgctgggagcgagcaagcgagcgtttggagcccgggccagcagagggggcgcccggtcgctgcctgtaccgctcccgctggtcatctccgccgcgctcgggggccccgggaggagcgagaccgagtcggagagtccgggagccaagccgggcgaaacccaactgcggaggacgcccgccccactcagcctcctcctgcgtccgagccggggagcatcgccgagcgccccacgggccggagagctgggagcacaggtcccggcagccccagggatggtctaggagccggcgtaaggctcgctgctctgctccctgccggggctagccgcctcctgccgatcgcccggggctgcgagctgcggcggcccggggctgctcgccgggcggcgcaggccggagaagttagttgtgcgcgcccttagtgcgcggaaccagccagcgagcgagggagcagcgaggcgccgggaccatgggctgggggagccgctgctgctgcccgggacgtttggacctgctgtgcgtgctggcgctgctcgggggctgcctgctccccgtgtgtcggacgcgcgtctacaccaaccactgggcagtcaaaatcgccgggggcttcccggaggccaaccgtatcgccagcaagtacggattcatcaacataggacaggtaacgaactacaggctagcccagccctcggccctgaagccactgggggct

SEQ ID NO: 29546 - DNA, 423 bp, Homo sapiens
  chr9:79520881-79521304
  binary
cgtggctaggggtttggaacccgggtactcggaggggcgcagtggaaaatctcggcccaaggaagacgagcggggtcccgggaaagtggcccgccggggcgcagcgaccgactgctccctcctgccgctctgaggcggctgcggcggaggctgtgcttgcgccctcgaccgtctcgcccagggctccccgccccacccctcgcccggccgccggctctgggcacccgactctgccctaataaggaaagtgggtgtgccgcccaggagccccggggcgcgccgggcacgctctctggcacgcgcctcgggcgccgtggcgcgtgggcggaggtgcaggggtatggcgaggggctcctccgccaatcgcagggccgtgctgcggcctcctgacgtggcgcgccgaaagctgctgcaaccatggac

SEQ ID NO: 29547 - DNA, 210 bp, Homo sapiens
  chr9:79521333-79521543
  binary
gggctgctgcagagggaggctctgccgcaggcaccgccgcggtcagcgggggaaggtgggaagagggagacgggtcccaggagagcccccgcctcgcccagcgcctcactggctggctggcgcgttacggagcactccggcggtcacttaatgatctggtcggctggcctggccgggggaggcactcagctagattggcgtgggagggac

SEQ ID NO: 29548 - DNA, 292 bp, Homo sapiens
  chr9:79632921-79633213
  hyper
tgcctattctattaatttcttggttactgttcgtctcaccctctataccgcgatggtggagctcggatactgtctcctgtctccctgcacctggtgcctcacatgcagttggcgcgcaataaaactgagatgaatttggcatttggtgaaaacaccccatgctttcttccccatgagtttttccctccagccctctaatcatcggggtttcttgcagagaagaggccttgaggacacgatactctgaacttgacccagagtgtctagcccaggaaaaagggtttgtaaggag

SEQ ID NO: 29549 - DNA, 277 bp, Homo sapiens
  chr9:80263018-80263295
  hyper
cgggaagatgcgcgcgccccttggcacaggagccggacagcagtcgggggcgcagacgagttggaacgtcggtgctcgggggagagtaggatctcctgggcctaggggtgtccccaggcgggaggtaggcgcggagtgggttggaggcaaaggacctggctggcctttgcctggaaagttctgaaaacctcagcagtgaccgcagactaagactgagtggaaaggttcccgctagcgtttgtggctctaagtggcaggaggaggcggagcatcttga

SEQ ID NO: 29550 - DNA, 211 bp, Homo sapiens
  chr9:80263517-80263728
  hyper
tttcgccaactcactcgctcggagaaggcggcagcaggctggaagaggagcggcgccaagcgtctgttgcgggacacaaagccccggacctgaagtggaagcttgcccaccagcttcaccaccacgcacacccggatttcctagactggctccttccgcttcccggacgccccggcccagctcgggcttggccaaagcccttggtcagctc

SEQ ID NO: 29551 - DNA, 322 bp, Homo sapiens
  chr9:80645546-80645868
  hyper
aacgtgccccggctccgctcgccacccgctgggccacacacacggctccccacgccaccaccccatggggtgccgcggccacgacactggaagttcaacccctctgcccacctttccacccccgcgcctctggtcggagtgatctgccatttagcagatgcacagcagataaggtacagccctcagggacacgaaaaggaacaagccaaggcaccgggcagggcagccccgacccctgtgctgcgtgtgtgtgtcgctgtgtgtgtgtgtgtgtgtgtgtgtgtgtgtgtctgtgtgtaacgcgcccgcgcgcccgcgcggg

SEQ ID NO: 29552 - DNA, 422 bp, Homo sapiens
  chr9:80645902-80646324
  binary
aggggcgaaccgcgggcgccggggggcgggggcgccgaaggcagctgccccgcagggccaaggatggtgggctgggggcgcagaggcccggcggggccccggacggtactcaccgagcagcagcagcttgagctcccggcgggcgtcccgcttgtccctgcggagctgccgctcgatctcgtcgttgatccgccgggcttccttggcctcctcgctcaggcagcacgccatgatggactccagagtcattcttccaaagtgcctccgctgcagccccgccggcaccccctgctcacagcgcgcacacacaccctcccgccctcgctcccccgaggcagcggtggccgccgagcccccgccgcccgggcgcgcgtccgggacgagctccgggaaccgccgcgggggcggcggccagggccggg

SEQ ID NO: 29553 - DNA, 663 bp, Homo sapiens
  chr9:80646509-80647172
  binary
cgccgccgccgccgcctgcgaggctcccctacgccgtgcgcctggcggcgagagctcattcaccggggtgtccccgcagcgagcggccgccgacggctccccgcgcccggcgcgcccgctcctcgccgccgcctgacacggctcccgggcgccctcggccctgtccgcgcccaccgcccggctcgcgcgcagacccggttcccgtcccgcccggcaaccgcgcgctcctccgcctccgcctccgcccccgcccccgccagacgcccaccccctgccccgattgccaggcgcggagcggctgctcagtgcgagccctccccctcgccacacacacacattttcttctttctctgaactggagcacagatccgggagggaggaggcggcggcgaaaggaggaggaggaagaggcggaggggatgggcgcgggaggagggagccgggaggcggtgccgcccggcccctcctggaaggctttcctgggctcgcggccgccgcggcgcgcctcccagtgcggctctcgcctcgcccgcgcggctcccgggctgggccggcccccgcgggctctgcggacgcctactgctcccgcaccctcggcagagtccgcgggcgcagcagtcacggccgcccccggccgaagtcggggccagacccggccgccga

SEQ ID NO: 29554 - DNA, 382 bp, Homo sapiens
  chr9:80647247-80647629
  hyper
ggtgagacaggaatatggcggcctctgcctgcctcagcccaccggcccgggagcgcggccgcggcccctgctgaagtcgcgggaggcggccccgcggagccccgcacgcgctccctgcggcgccggcgctggcgtccgccgctcccgggctgtgcctgtctgctccacggggtcgctcctcagccgtttctgtgtttcccgttcctatttctaaaacgccattcggttagaaactctcacgtcacctctgacaccggtgcagtcttagaaaataagctcctctatactgtgtggggctactggggaagggaagggaaggaattggcaccggtgcccagaggtgtagggggagattcacaggcgaagctgttcgcaaagtaac

SEQ ID NO: 29555 - DNA, 466 bp, Homo sapiens
  chr9:85677440-85677906
  hyper
cgccgccgccgcgtcctcgtcgccttcgtcctcctcgctgtcgtgtgtctccggccccgcctcagacacggcgggcgcgggatccagaggaccccagtcccggcgccgccccccgcggagggacccgaggaagccacgcgcgaactcctggaaggtgatggcgccgtcacggtcggcgtccagccgctggaatactgcctcggcgtcggccggccgcacccgcagctccgtgcacagtgcccggaactcctcgcgctccaggcgccccgagcggttcgcgtcgcaggcggcgaagactgagcgcagccgggccagctcctctccgtccccatccgcctccatcccgcctggcgggggcggccgagagggctccggagcgccgcggggcgcagggccctccctggaaggacggggccacctgctgccgccgggaggcccggcgagtttggctcgtccggctggttcg

SEQ ID NO: 29556 - DNA, 259 bp, Homo sapiens
  chr9:85677992-85678251
  hyper
caggtcccgggagcggtggggtgcgcccgggctccaggcaccgccaaggagcgcctcctgcgactgagcgcccaagcgccgaggtggctctcgccactttcccggcgggtgcagctccgcccagccagggaggaggagcgcgcgccaccgcttctccagttcccacgccccggagtccaccgctgcttgccgcgcaggtgggggagacctggctggccggaactgggattcggggggagcattgcccttcggcgtaagc

SEQ ID NO: 29557 - DNA, 432 bp, Homo sapiens
  chr9:89561318-89561750
  binary
ccagggcgggcccgcggcgcgtgtggttgagctgaatgagggccgagatgcagtgactcgggcagcgccagcgcgacgagaaagaggcggccgaggccgggaaagcggcggcggcggccccgggcgcgtcgcccccgccgtgctgcgccagcaccggcgcgcacgcctcggcgtactggttgtaggcgtagctgcactccggctccccctggcactgcagcagcgcctgccagcagatgaggcggcggccgtgcgccagccccgatccccgcggcgccgagcccagcagctgcagcagcgccatcaggcacagccaggcgcccggcactgtccccccgcgggcctcgccgccgccgcccagcagcgcggccaccatcgcgggcagcggcggccgccgggagaggaggggaaaggagacgaggcgcggggagc

SEQ ID NO: 29558 - DNA, 494 bp, Homo sapiens
  chr9:89561779-89562273
  binary
tccaagtcctgcccacttcttgcatgagtgtcttcataaatccatgcgcgccgctggctgatgccccgctggtggcagaaggtcccctttcgctctggctgcggtggcttcctggaaatgaacagctgtcgagatctggtcccgctctcccacccgagagccctccgctcggcccccggtggtggcgggagaggctcactgtcgccccgggggggtgcgggccgcggggccgtggcggggctgcaggaccgcgcggcgcggcgggtgcattttgctccgcgcctgcagatccgttgtgcggccggctgtccccgtgccggctgctcgcgctgcggccgcggcggctccttcctcctgggctcagtgcctcgccgccgccaccgccgccgcggtctctcgcatcgcgccgcttcctggcccggcgtccgcgcgctgcccgccttcccgcggcccggccgccccgcgtcccctccccctccgcccgcggcaacccc

SEQ ID NO: 29559 - DNA, 277 bp, Homo sapiens
  chr9:90112514-90112791
  binary
cgcccgcgttccgggcggacgcactggctccccggccggcgtgggtgtggggcgagtgggtgtgtgcggggtgtgcgcggtagagcgcgccagcgagcccggagcgcggagctgggaggagcagcgagcgccgcgcagaacccgcagcgccggcctggcagggcagctcggaggtgggtgggccgcgccgccagcccgcttgcagggtccccattggccgcctgccggccgccctccgcccaaaaggcggcaaggagccgagaggctgcttcggagt

SEQ ID NO: 29560 - DNA, 271 bp, Homo sapiens
  chr9:90112856-90113127
  hyper
aactcgcagcggcagggtctggggccggcgcctgggagggatctgcgccccccactcactccctagctgtgttcccgccgccgccccggctagtctccggcgctggcgcctatggtcggcctccgacagcgctccggagggaccgggggagctcccaggcgcccgggtgagtagccaggcgcggctccccggtccccccgacccccggcgccagcttttgctttcccagccagggcgcggtggggtttgtccgggcagtgcctcgagcaac

SEQ ID NO: 29561 - DNA, 115 bp, Homo sapiens
  chr9:90113156-90113271
  hyper
cttcggggagaagtgcgatcgcagccgggaggcttccccagccccgcgggccgggtgagaacaggtggcgccggcccgaccaggcgctttgtgtcggggcgcgaggatctggagc

SEQ ID NO: 29562 - DNA, 203 bp, Homo sapiens
  chr9:90340643-90340846
  hyper
cggctctgcggaccaaaaattccaggactaaggaatagcaaggttaggctgaaacagtccacacagggcttgcggtaaacgtcttttcaggagccactcgcccagtgcagtaagtcgtgtacttagttgactcgagcgctccagggagacgcccgaccctactctgcgccgccccggggcaccagctctgcttcctccaggtc

SEQ ID NO: 29563 - DNA, 322 bp, Homo sapiens
  chr9:90340943-90341265
  hyper
acagccaatcgcagcgcagccaggcggcggggcggtgccggccgaacccagacccgaggttttagaagcagagtcaggcgaagctgggccagaaccgcgacctccgcaaccttgagcggcatccgtggagtgcgcctgcgcagctacgaccgcagcaggaaagcgccgccggccaggcccagctgtggccggacagggactggaagagaggacgcggtcgagtaggtgtgcaccagccctggcaacgagagcgtctaccccgaactctgctggccttgaggtggggaagccggggagggcagttgaggaccccgcggaggcg

SEQ ID NO: 29564 - DNA, 198 bp, Homo sapiens
  chr9:90341343-90341541
  hyper
cagggcctggcccggccagacagggaagctcagtccccgcacgccagacagcggtactcctgctggcgtcaccgcaaacatcctctgaccgctacagccagtgtgtggcgcaggcgtcatgtccccggccctgccacgcctggagccctggaagctggctgcagggcgctggcttcccgcgtgcggccatatgacccc

SEQ ID NO: 29565 - DNA, 106 bp, Homo sapiens
  chr9:91149028-91149134
  hyper
cggctgcgggacacctgcggcggggcccggcagggagcgcgagactggaagagaggccaggagggaaggagagcgacgcggggttttgggggaggggctgcgtggg

SEQ ID NO: 29566 - DNA, 80 bp, Homo sapiens
  chr9:91149326-91149406
  hyper
ggcgcagtggggatgggggcgggggcgcgggatgtggtagggggcgtagtggggagagagtgcaggagtgtgggcagggc

SEQ ID NO: 29567 - DNA, 78 bp, Homo sapiens
  chr9:91149647-91149725
  hyper
cgaggcgcagttggagaagagtgcggggatgtgggcggggcgcagtgaggggaaactgtggaatgtgggcgaggcgca

SEQ ID NO: 29568 - DNA, 223 bp, Homo sapiens
  chr9:91149754-91149977
  hyper
ggtgcggtgggggagggtgcggagatgtgggcggggcgcagtgggtggagagtgtagggatgtgggcccagcgcagtgggggacagtgtggggatgcgggcgaggcgcagtgggggcgggggcggggatgtgggcggggcgcagtgggtggagagtgcgggatgtgggcggggcgcagtgggtggagagtgcggaatgtgggcggggcgcagttggggagctt

SEQ ID NO: 29569 - DNA, 237 bp, Homo sapiens
  chr9:91150385-91150622
  hyper
tgtaagggcgcgacggtggaggccgaggcggcgctgcagaacaaggtggtggcactgtacttcgcggcggcccggtgcgcgccgagccgcgacttcacgccgctgctctgcgacttctatacggcgctggtggccgaggcgcggcggcccgcgcccttcgaagtggtcttcgtgtcagccgacggcagctcccaggagatgctggacttcatgcgcgagctgcatggcgcctggctg

SEQ ID NO: 29570 - DNA, 310 bp, Homo sapiens
  chr9:95492133-95492443
  hypo
cgcgggggctgcacgtggcaaagaagtgcagggccttggggctcagggaggagaccttatgggtgagatcaaccagaaaggggtgctcacctagcccaggacgcccacctgcccacgcacctgagagtcgacagctgtgtcatgtccatgccccaaaatccaggccagccagcctcccatcgtgtacaccccaggcgagtggcccagcctccaagcaggtgccatccctctccttccctcccactgcccactacccccacatagctggcgtggcaggacagggcttccatgggtagagggcagacgggcc

SEQ ID NO: 29571 - DNA, 99 bp, Homo sapiens
  chr9:95946034-95946133
  hyper
cgctgagccccaccaggcttagccccaggctgggctcccgagggcggcggtacccctggtccttttcttcctagcctgcccattctgtcctggcacagg

SEQ ID NO: 29572 - DNA, 227 bp, Homo sapiens
  chr9:95946562-95946789
  hyper
cgcggacctcgcccggaactcggaccccgtcctcgaagcgtgatctctcccgcctcgcacgccctggccgccgggccgcgggcatggacggcgtccgctcgccctgtgagtgccgagcctcccctcaacgccgctcgccgcctttgtgtgcgcgccgcggcgctgcagccccctccccgcgcgcccctcccgcgccccgggcccgcgtcctttgtggagccgccgcc

SEQ ID NO: 29573 - DNA, 175 bp, Homo sapiens
  chr9:96717633-96717808
  binary
ctgcgccccctccccacgccgccgcgcctcttgcccggccagccccgcgtcaccgccccgccccgccccgccccgcgccgccgcccccaacccctaggctgagccggagggagggacccagaagggagggaggcggaagggaggccaaaaaggagggggccacgtgaaagaggcc

SEQ ID NO: 29574 - DNA, 129 bp, Homo sapiens
  chrX:2846679-2846808
  binary
cggggaacacggccgtgctggaaggcatcgagctggggggttgggggcgggacggggtgcctcttaggaagtggggcgggcaaggctacgcttcgggggatggagccttggggcgggacggggcgcgtc

SEQ ID NO: 29575 - DNA, 220 bp, Homo sapiens
  chrX:2846856-2847076
  binary
ctttgaaggccgaatccgggcagcggtgtagctgggcgtggaaggcggaggacccagcagggcgtgaccggcccagtttccgctccctccgggtcccggccagccttcctccgccctcccttcccttcctcctttgttctctttccctgcccttccgccttcccttcagttcggtctcctccacccgcccttcgtcccctcagtcgccccccatccctgg

SEQ ID NO: 29576 - DNA, 314 bp, Homo sapiens
  chrX:2847196-2847510
  binary
tcgccgtgctcgcgaccccctccccaggcccccaccctaggccttagtatgggccgcgtcccggggtcccaggcacctggcggcgggcgcggcgcgtcccctccgcgcggcggatcgcatggccgagcgctggcccagagcgcaggaccttgccctgcgcactccgcgcccgggcgccgctagtgccaaggcttccgccctctcagctgcgggatctgggccgggcgcccgcccctccttcatccgcgtcatctcctggctctcgggacctccgggacctgcgcgtggaaacaggttttcccaggtcgtcacac

SEQ ID NO: 29577 - DNA, 214 bp, Homo sapiens
  chrX:8699223-8699437
  hyper
agaccttgaatctttggggttccgaattgaggcgcgcacagccactcgcacccccaacacgcgcatacacgcaccctggaacacgacttggcacaagtaccctggctggggctccaagggtgggcagcgagctctgagccctcagagagtgaaaaccatctttcaaaagagacaaagtgtcggcccgcgggcacctgcggggctggggctcgag

SEQ ID NO: 29578 - DNA, 411 bp, Homo sapiens
  chr1:10707634-10708045
  hypo
cgccaccatcggcccacgcgggctggcctgctctgggacaggcagtgaggtaggagcagcagcatctttggctagaaggacatcacccgatggccatgccccagagaggctggggacagcagcaccatccgcagtgaggaacagggcctcctagcgcccttgctagcacctactcccgagacgcgaggggaacgcgggactcccggctcatcgagggactcacttctcctggaactggaggaatccgggtttgacctggggcttggcgttctctagagaagtcgttgccaagggcgaggcgggcaggtgaggcactgacgctgggatctgaggcatctggggtatggtggaagccagctgcttccaggcgagcagggtgggggtggagggcacggaggccgggctgggagc

SEQ ID NO: 29579 - DNA, 138 bp, Homo sapiens
  chr1:10713961-10714099
  hypo
cgtgctccgtgtccttggcgcccagcagcgagggcggcagccccagcgcgcccgaggagcggatgtgccggcgctcatgcttgcgcttgtgagaggtcatctggctggtggaggtgaaggtgaagccgcagccggcgc

SEQ ID NO: 29580 - DNA, 863 bp, Homo sapiens
  chr1:10719750-10720613
  hypo
cgccttacttgacagtggagacggtccccgtggtgatggagtctgttttggagaaggttgacttcaggtactcgggagtgttgaaggacagggaggcaggaggctctggccctggcccgggggcgctgggggcactgggcacgctggcgaggggtgcgggagccaggctgggggtgggcggaaccttggcggggcctggcttctggatgccccggacgtcgtacttggaagggcgccccaccttgcctgtcttgaaggcgatggccccgcccatgtcggggctgccctccccgggtttgaagaggtgcaggtacttgacattctccaggtcgtacttggatggcttcttgtaggtgctcccgttctggggccgcagattctcgccggtcttcagtttttggatgaagaagtcgtacttggaggcccgggctaccaggttctgcatctggacactgctgtgcgacggcaggggcaggatggtggccttggtctccaggtgggccgtgctgctgggcagccgcaggccgggcagggtgcccaccacctccttgcccacccgctcctcggtcttggtgctgggggccggccaggagagctgctcgccagccttgagcttgcggatgtactcctcatacttagagaaccgcgcccgcttgctgagggtatcctcggaggtgggcagcatggaggaggtggctgcctccggggtggagcccgcgtgcagcttctcaaagctgatcttcctggccagctcgtcccgcgtgttctggtcatcatagccaaacatgccgaggaactcggtcatggtggaggccgcgtagtcccgcagcgaggaggcctctcctgcagaggaggatgggggc

SEQ ID NO: 29581 - DNA, 204 bp, Homo sapiens
  chr1:118163688-118163892
  hypo
cgtcacagattttgcttgggatccataacctaggagtgctttgtaggatgatctagatagcctaggactttttaacgctgttcagaggcacttttgtcttcccctccacgagtactctgtagcgagcaatagagcgctcatccccagattggtcctgcagagcctgctgtgatcacatactcagcccgctgctttctgcctctc

SEQ ID NO: 29582 - DNA, 199 bp, Homo sapiens
  chr1:118166377-118166576
  hypo
cgctgaagaagagagaagcaagtacgactacctcatgatccttcgcagggtggtgaacgagagcaccgtgtgtctcatggggcatgaacgcaggcagactctgaacctcatctccctcctggccttgcgtgtgctggcggaacaaaacatcatccccagtgccaccaacgtcacctgttactaccagccggccccttac

SEQ ID NO: 29583 - DNA, 142 bp, Homo sapiens
  chr1:12241609-12241751
  hypo
cggtgcacagagcatgccacgcacctctccatatgcacatagaccctctaacctaagtcagcgccccttctacaaggccggtgtccagcacacctgggaaaggggacatttctggccctttcctctcagaagtcgcctgctc

SEQ ID NO: 29584 - DNA, 186 bp, Homo sapiens
  chr1:12630214-12630400
  hypo
cgatttgggtgtcacatcctctggggaagcgtcctgggctcaccttcaggcttctcctcgtacaaccggagttccgacgcttccccagcaagccctggtgtagtccccacccgtttacttgtcaagcctgtgggggccttcatggcgggtatttcatctctgatccccaggccctcacatgggccc

SEQ ID NO: 29585 - DNA, 315 bp, Homo sapiens
  chr1:12638803-12639118
  hypo
cgctgactcccggacagtccagcagccccagggtcaggctctccatgaaggcgaaggctgacgctttggatgtgcagtagtcgatggcaccggggatggcagacagtgccagcacggagttgaggcacacgatgtggccattctgcagctccagcatacgtggcaggaaggccttggtggtctgagggcagatggggtgtcagggtggagcagccgcagctctgacaacccctccacctttctttcggggagaacagcccaccccggacacacatgatgctctagggcccgagccttcctgcgagggagagggcc

SEQ ID NO: 29586 - DNA, 121 bp, Homo sapiens
  chr1:15102346-15102467
  hypo
cgggccaccgggtccagtctttacacttgaaggcgtcacaggccctttcctacagcggtcgacacccaggtctcttccacatggaaccaccatagtgagtgtggtcctgcgtgatcactgc

SEQ ID NO: 29587 - DNA, 298 bp, Homo sapiens
  chr1:152733117-152733415
  hypo
cgccgctcccagagctgtggcccgcagccctcctggggcgcctcctgccctgagctgaggccacacgtagagccacgtccactcccaagcttctgtccaccacggcgtcttgaccagtgtccagagtcaccactgcagcgatgtccacctcctgctccacgtccacgtctgcgcccagaaccatgcataagtctagaaccacgcccgcgtcctctaccacgacaactttcagaaccttgtttgtatccagaaccacttccagcactacgtccaacaccgcggccagttccccttcctc

SEQ ID NO: 29588 - DNA, 220 bp, Homo sapiens
  chr1:15283890-15284110
  hypo
cgacagacgttaccgagtgcccgtgatgtgtcgcgcagtcactgtttccagcgctgaagacccaacagtgaaggagacgaggcaggatatgcgattgggccccgctctcggatcctgtgtccaccaagcacgccgctggggagcgagtgagcctccacgtcactacggggttttgtccgggttgcctgccgtgctgttgacgctggacaggagcggagcc

SEQ ID NO: 29589 - DNA, 383 bp, Homo sapiens
  chr1:15374975-15375358
  hypo
cgagcccacatgagcctaccgttgcccccgcaggagcctcccctccatggccagagccagcgttgatccttggttgttggtcctgggtcgttgatccttggtcgttggtcctgggtcgtcggtcctgggtcgctggtcctgggtcgtcggtcctgggtcgtcggtcctgggtcgtcggtcctgggtcgctggtcctgggtcgttggtcctgggtcgttgatccttggtcgttggtcctgggtcgttggtcatgggtcgtcgatcctgggtcgtcgatcctgggtcgtcgatcctgggtcgttgatccttggtcattggtcctgagtcgttggtcctgggttgttggtgctgggtcgttggtcctgggtcgttggtccttggtc

SEQ ID NO: 29590 - DNA, 517 bp, Homo sapiens
  chr1:16464269-16464786
  hypo
cgagccccagatggccgtcctccttaagccccacctgggcaggccccatagggcacagctgccacccctggacctcacctgtctggttgatgctgacactggcagtacggaagctgcggctggttaccaggcctgagacgccattgcgggcctccacggtgaaggtgtagttcatgtggggctccaggtcgctcactgtcacactggtgcgggtcagtccgtgaggaggctccgagtagcgcacactggcctcacacggcccgcattccccagactcgggccagcactgttcgcaggtgacgctgtagacaatgtcctcgcggcccccgctgtcctgagggggcgtccagcgcagctccaccttggcacccatgcccacggctgtgaggtagtgtggggcggaggggggtcctgcacagacaggaggagtcagtgctgtgctggacccaggcggacacgtcaccctcagtcacgccaccctgacccactgcaagactcacgtgtgcaaggcatcgac

SEQ ID NO: 29591 - DNA, 170 bp, Homo sapiens
  chr1:16474862-16475032
  hypo
cgtcactcaccctggcaggcatcctccaccttctcgtagcctgcctggcacaggcactgcccaatgggcaccagccactcgccatccactgcacagtgcatacggggctcttcaccccccggtggcaccacggcatggtccacacaggtgccggccacagtggccaggga

SEQ ID NO: 29592 - DNA, 75 bp, Homo sapiens
  chr1:16475432-16475507
  hypo
cggtacacccagttggtgcggagccagttgtcctggtcgccagacatcacgttgcacacggagtacatgtagatc

SEQ ID NO: 29593 - DNA, 515 bp, Homo sapiens
  chr1:164768766-164769281
  hypo
cgccaaaactttgagccacaggggctgaaagggacgtctaccacaaactatcctagttttctttatttgcacaagtctctagaaaagcccacgtggcctaatgtcatagacttgatgcgtgttgaggcttggaccctcaatgacggtgttgattgtcctgccattccaggcctgcaacgagttcaccacccacgtgatgaatctcctgcgagagcaaagccggaccaggcccatctccccaaaggagattgagcggatggtcagcatcatccaccgcaagttcagctccatccagatgcagctcaagcagagcacgtgcgaggcggtgatgatcctgcgttcccgatttctggatgcgcggtgagtctcccatggggctgtcctgccctctctgggagtccctgatctggggctggagtccacagccgctgcccccttcaggctctagtttcaccccatcaacgctgaaccaagtgataccctgaggatggttctgcgagactagatgggccatc

SEQ ID NO: 29594 - DNA, 181 bp, Homo sapiens
  chr1:175372314-175372495
  hypo
cgcagagcccctcctcacattgtcctcgcccactgcaggcattcagacactgccgctggccgcagtcctcaccaacgtagccctcctcgcataaacaggtaccgttggcacatctccccttccccgaacagtccccagggcacctcagttccctgcagtcctcgccagtgtagggctcttc

SEQ ID NO: 29595 - DNA, 145 bp, Homo sapiens
  chr1:175372572-175372717
  hypo
cgctgtactcgctgtcacagatgcactggccatccacacacaccccccggctggagcaacccagcgggcagtagggctccgagcaattcttgccaaaccagccttcgttgcagatgcagccacaggactcaaagctaaagttgcc

SEQ ID NO: 29596 - DNA, 310 bp, Homo sapiens
  chr1:18023481-18023791
  hypo
cgggcaggcacacgagcccatgcccgatagccacgtgggccgagagctgacccgcaagaagggcatcctcttgcagtaccgcctgcgctccaccgcacacctcccgggcccgctgctctccatgcgggagccggcgcctgctgatggcgcagctttggagcacagcgaggaggacggctccatttacgagatggccgacgaccccgacatctgggtgcgcagccggccctgcgcccgcgacgcccaccgcaaggagatttgctctgtggccatcatctccggcgggcagggctaccgcaactttggcagc

SEQ ID NO: 29597 - DNA, 247 bp, Homo sapiens
  chr1:18026186-18026433
  hypo
cgaatggagcccgttaaatcacgtcacggagaaaacgactgactttgctacttcagtgaaattatcacatcagtcaccagctcatctcccatgcctccgacaacagagcgagggagggtcgggggcgccgcgaatggctcctgagacccactgaggacgtgcatcacatgtgagtggaggcctggccttagatattgataagagtaataatacccagagcgctccgggtgcctgagctcctttcgtc

SEQ ID NO: 29598 - DNA, 226 bp, Homo sapiens
  chr1:181382621-181382847
  hypo
cggcgcgggggcctcatcgagcagcgcgacatcatcaaggcccacgaggcgcacaagatgcagagcaccccgcaggcccggcgcaaggaatgggagtgagtatggcggggacgcgggggcgggcatggctggctgggcctgaggtcggggtgggttcctggagcggatgggccccgtgaggccgccctggagggtcgggagatgctttcgctgtgctgcgactaac

SEQ ID NO: 29599 - DNA, 121 bp, Homo sapiens
  chr1:181765823-181765944
  hypo
cgctcagggggcagggagcggggacgatcaaaagagcgaaagcatcttctctctcctgatgtctcccgctgcaattcagaagagcgagggacccaggctgactgggagtccccagagcgcc

SEQ ID NO: 29600 - DNA, 203 bp, Homo sapiens
  chr1:181767556-181767759
  hypo
cgacacgcgggcagcatctctccacctgctgatggaagcgaggagggctccccgctgacctcccaagctctggagagcaacaatgcttgcctgaccgagtcttccaactctccgcacccccagcagagccaacatgcctccccacagcgctacatctccgagccctacttggccctgcacgaagactcccacgcctcagactg

SEQ ID NO: 29601 - DNA, 85 bp, Homo sapiens
  chr1:181767807-181767892
  hypo
gggccgttccaacaccatcggctcagccccacccctgcggcatagctggcagatgcccaacgggcactatcggcggcggaggcgc

SEQ ID NO: 29602 - DNA, 302 bp, Homo sapiens
  chr1:203134410-203134712
  hypo
cggagggcggcggtggccatagccggctgctggatcctctccttcgtggtgggactgacccctatgtttggctggaacaatctgagtgcggtggagcgggcctgggcagccaacggcagcatgggggagcccgtgatcaagtgcgagttcgagaaggtcatcagcatggagtacatggtctacttcaacttctttgtgtgggtgctgcccccgcttctcctcatggtcctcatctacctggaggtcttctacctaatccgcaagcagctcaacaagaaggtgtcggcctcctccggcgaccc

SEQ ID NO: 29603 - DNA, 189 bp, Homo sapiens
  chr1:204124923-204125112
  hypo
cgagggggccgactcgaacctcacctgaaatacatagtccgcgctggtgagcgtgtattctttgcctcccaggtggaaagagatgtcggggagtgtagggccctcgttacacttcacgacatactggggtggggggcaaagagagccttcttgagtatggaagacgtctcagcagacaaggagtcctgc

SEQ ID NO: 29604 - DNA, 370 bp, Homo sapiens
  chr1:204197954-204198324
  hypo
cgttcagggatgaggactttgtctggagtggagagctatggaggggctggggtcaccacctctgtcccttcccagagtctcccactacagcccttcctggctccactcacctccttattgatgtccacgtcataatgctggggctctagctccattttgcgaagccgggcaatttcctcccggggtgtctcgtaggcatgcccgccaggctcctctgcccgcagggctgcctccaggttggagatgtctacctcatggatgctgcggtggcggcgcacctaggggacagcagcatcgtgattgcaccatggctacccatgcctccaggcagctctagctatgccctgtcctcgctttcccttcccagctc

SEQ ID NO: 29605 - DNA, 154 bp, Homo sapiens
  chr1:204199556-204199710
  hypo
cggggactggggtcgggggccgggctggccgggagctgcaggctcctccgcttctccctcatggagccactctggtgccgccgcattcggtcaatctgctcctccacgctcatcttgaccttcccctcgccaggaaacacagcactcttggggc

SEQ ID NO: 29606 - DNA, 383 bp, Homo sapiens
  chr1:204226544-204226927
  hypo
cgaggtggcagccgctcaaaacgggcactgggtgagcggacaggggagtaaatgcgggcacggctgtaggagccctggctgggtgagcggggcacagagtgggagcggggctgcagggacaggcggcgcagggagctagaggcggcatccagctcatcataatagactggctgccgggaggggcttgggatccagacggtggcatcctgccgcccgtagctggcgggctccttccactctcgcagctggtaggcagggccacccccattgcggaaggcatggcgcttgtcctccagggcccagggcgggctgatccgatcataggccggcatggaacagatgctctccggccgcactcctggcgggtagtactgataatcatc

SEQ ID NO: 29607 - DNA, 277 bp, Homo sapiens
  chr1:204228369-204228646
  hypo
cgccggcatgcctcacctccgaaggtcttcaggcgggggtaccccccggcgcagattcacccactgctgaagctggttcatggagctcttgcgctgggcaattttgtcagggttggtgcgtggtgggaaactccgccggtgtcccccagtctctccatcctgagacgggaaagctgtgctccctggccggcttggggagtggtactgccagccattgggctgggcaggctgttccccaccccctggcactcttgggccctcggggtaagggctgccc

SEQ ID NO: 29608 - DNA, 75 bp, Homo sapiens
  chr1:204913459-204913534
  hypo
cgccgccctgggtccatgcagccttcctcctctgcctcctcagtcttggcggagccatcgaaattcctatggatc

SEQ ID NO: 29609 - DNA, 171 bp, Homo sapiens
  chr1:204948556-204948727
  hypo
cggcagcgttaactcagccgtcctccggctgtccccgtatgtcaactaccagttccgtgtcattgccatcaacgaggttgggagcagccaccccagcctcccatccgagcgctaccgaaccagtggagcacgtgagtacccgagggctgccagagaaggctccggaacccc

SEQ ID NO: 29610 - DNA, 315 bp, Homo sapiens
  chr1:204955352-204955667
  hypo
cgaggcctccaggagcggatgacctgcaagccgagccactacagccattcccagaccaccatcgccaaggtgacctgccctgcgaggaggttgtatctcaagagaagacctgtgaggtctgctgacataattccagacgggttatgcagactgatccccgagggcacggcgggcacctgggccaccccaccaccttccgaggcagaaggcagcacgtccatcctgactgcctggaaccatctgatttgtttgccagcacccaacaccttcacggttctccccccacgttctcaagaagccgtcactgaaatagtc

SEQ ID NO: 29611 - DNA, 256 bp, Homo sapiens
  chr1:207195396-207195652
  hypo
cgaggaagcttgtcacggctctgtccttggtaggacaggcgcttggagctctgctcctgctccaggtcagccagcttgcctacctggatacctgcaaaatctttccccgtgcccagggaggccgggcggggccgagaattacgtaagacactgggcgagatcttgtccaagaaggagccctttcccagagaagtgctggttttggggctggcatctttctcagttgaaaggtagctgctcagtcccacgcctgagc

SEQ ID NO: 29612 - DNA, 214 bp, Homo sapiens
  chr1:207200605-207200819
  hypo
cggcggaaaaagtctcatttgcccagttgctctctaaggtcgtcccatcctattctctatagagccagggctgactcaggcagaaagcacccactggtgttgtgaatcactccccaacaatgaaagagaaggtgcagtgagccaggatgggtggcaggaaaggatagggcagggcagggcagggcaggtgtgcagagagcagaccaggttgcgg

SEQ ID NO: 29613 - DNA, 205 bp, Homo sapiens
  chr1:214637813-214638018
  hypo
cgtgctaagaataacaggattcttataaacacatcgtcgcttaggccaaaaaacacaacagatgccaaaaaacagatggctggtcccttcggtgagttctccttcacatacccaacacgcatgcacgcgcacatgcgcacacagacacacccctcttacctctcgcagctccagcctctgggccacagcctccaggcattcttgc

SEQ ID NO: 29614 - DNA, 34 bp, Homo sapiens
  chr1:214638090-214638124
  hypo
ttcttgctcaggacgttgtagcgccgtgtccggc

SEQ ID NO: 29615 - DNA, 108 bp, Homo sapiens
  chr1:21889603-21889711
  hypo
cgtacaacaccaatgcccaggtccctgacagtgccggcaccgccaccgcctacctgtgtggggtgaaggccaatgagggcaccgtgggggtaagcgcagccactgagc

SEQ ID NO: 29616 - DNA, 255 bp, Homo sapiens
  chr1:2275835-2276090
  hypo
cacattctcactattggggtggcaggaaggcccagcgaccaggagcatgtgtggggtctgggaaaggcctgggggacggggtgtggggtgcaggagccccaaggccgatgctgctgaggaggccaggagcggggaccgcacagacggcagttcctctggaggggggtcccgtgtgggccgggctgtgcaaaggacacactggtccctgctggcctctcagggcaagcgtgaggaccctggcctgctccggcctcc

SEQ ID NO: 29617 - DNA, 821 bp, Homo sapiens
  chr1:2276200-2277021
  hypo
gcctgcagagcctgggggcagggctgaagctggccatggaggaccttgggggccacctccaccttccagcagcaaatgccaagtccccgaatgcagaattctgccagagggagcatgaccgtctctctgttggcacaaagcgagagcatcaaagacagcgtcagcccccgcgagggtccacgcatgctcacactctgcgctcatggatggccacacacaccctgaaaacggcgtcagcctccgggagggtccacgcgtgctcacagcactcatagatgaccatatgtgccccgaagacagtgtcagcctccaggagggtccacgcgtgctcacgctctacgctcatggatggccacatgtgccccgaagacaacgtcagcccccgcgagggtccacgtgtgctcacctgcgctcatggatggccacatgtgcccgcaccctcgcacaggcatgggcggtccccaggctgccacactcagggtctgtctgtgccccggcacctccaagccattccttccaccaggccagggccaggcctggacacctgccacctaccacccgctggggcagcagccacgcactcccccactgctccctgttggcggccaggcatgggccggccttgttgggggacacaggacaattcggggcacttgtcttgcctccgtcctccttggagagcctcgggctcaccctacgtggctctgaacaacaagggccaggctctgcaccgggggaccccctgccctgccagccggaccctcaggccgctcagagggccagtcccagcacctgcccctcgccagtggacacaggctgcc

SEQ ID NO: 29618 - DNA, 270 bp, Homo sapiens
  chr1:228081860-228082130
  hypo
cgcaggagaaggggagcaagtggggcggagtgactgcatcctttgggtactggcatgggacaaggtgggtgcccgagagccctggagcacagatgtctgtgcacggctctgtgcaccagcccaggtgcagggtgtccacagtgcaagagcccacaagcacacaaccacaataggtgttcgcacacgagcccaggatgtgtggtgcctgcaggcatgtgcccaggacccaaggtgtccacaaacgtacccatgcccttcacatggactcag

SEQ ID NO: 29619 - DNA, 581 bp, Homo sapiens
  chr1:228109246-228109827
  hypo
cgctgcgtgcactgcctgcactccacatagcagcaccaacgcacctggcactggcagggccttgtcaccacccggctctgtgtgttatggccgcggccacagcagatgctctcgcagttcttctcacggtggcacctacggccagcggtgcccggggagaagcggccagccaggcagaagctaggcgagtcatccaggtgcaccagctctggagtgcggggcagcgggtcgctgccacctgcccccgaggcacggccccgtggtggggagatggcacctgcctcgccggcagcttcattggtggtgctgcccaccttgagtgccgtctcatacttgtgcttcagatgcttgcccacctcatggaaaggcgccaactgccgccagcaggtccgcaccgtgcatgagcctgacacgccgtggcacttgcaggtggtctccaccccagccttgatcacctggcagaagggtgcgggagggagggcagtgtgagggctgtgcaggtgggcccagtgagcagaccctgccctggacccccagagggaccccacacccccacccaggcccaggccctgccggcgggc

SEQ ID NO: 29620 - DNA, 129 bp, Homo sapiens
  chr1:229160222-229160351
  hypo
cgcctctgactctctatggccccgggcaagtctccaggtctccattgcctcacctctaaagtgaacgtagagtctagaacgtaagccagtgcgtgctgacggtccccacaccgcactgccaggggcctc

SEQ ID NO: 29621 - DNA, 117 bp, Homo sapiens
  chr1:233601764-233601881
  hypo
cggaggtatggagggagaggcccgggcgggaaccagggctgtacgtgaagcttgtggcgagcccgggttccggctgggtgcaggctcagtggcccgcagtcggagcggccggtcggc

SEQ ID NO: 29622 - DNA, 499 bp, Homo sapiens
  chr1:236156658-236157157
  hypo
cgctgtggcaggccccactgggtatttacaccctacacgtgtgtgtgttgggtggggaaggagaaagaagagggtaagagaacagagagggtgaggaggagaggaagcacggggaggagcggggtaagtgagagggaagaagggtgcagcaggagcgggtggggctggagccagtggaacagttcaagctttaggtccagcagaagagcaaagagcgtgttcagcaattccggtcccccgaggtccttctcaggcacacgcccaagcacggcctgcacccacttacacgggggcgtcatcccgggcctggtcctggtgccctccacctcgcggccgtcgcgatccacgcaccagcagtagccggtgctgccgtggcactgggtgggcgcgtagtgcccgtgcgcatcgcactcaggaacgaacagccccggaggaatgggtcgctgtgggtctgtcgcccccgctgccccgagaatgtgttctcgctcgtgctggcacc

SEQ ID NO: 29623 - DNA, 145 bp, Homo sapiens
  chr1:236274591-236274736
  hypo
cgagcagatccacgccaccattgagcgggacagctacgcacagattttgaggaatgtgggtggcatcgtcctggccaatgcttgtggcccctgcattggccgctgggacacgaaggacatcaagaaggggaagaagtacacaatc

SEQ ID NO: 29624 - DNA, 215 bp, Homo sapiens
  chr1:2726383-2726598
  hypo
cgagtccgattccttggatccggcctggatctgcctgagcgagagcctcctgggagtccagagcagcaagtggagaactcgctctgagaagcgcgtggactccctggcgaggccgtggccccagctgaacctatggcctgggttccaccaccctcacctcccactgctccttggtcacagtgggcccagcaggccacagcacggcattacgggac

SEQ ID NO: 29625 - DNA, 83 bp, Homo sapiens
  chr1:2726958-2727041
  hypo
tccctcctgccagctagccgtccccatcgcccggactggggaacagtcctcctggggatgccgcactcctctccatcattctc

SEQ ID NO: 29626 - DNA, 44 bp, Homo sapiens
  chr1:2846750-2846794
  hypo
cgtgcacacacatacatgcaaacacatgtgcacacacacacgtg

SEQ ID NO: 29627 - DNA, 547 bp, Homo sapiens
  chr1:2846823-2847370
  hypo
gtgggcttcttccgtgggcaggcacagaggtcgggtgtcggcccagaggttcatggaggcgctaatgagcggctccgggcccgcaggagatgcggctcacacaggtcagatttcggatggatgatgaaggaaatgagggccaggccagcctctggttacagtttaggaaaaacacgaggcgcccttctctagttcaaaaggcagagagaggcagacccaggagctaggggggccggacgggattccagtccggtttcatctccggatgccctgggaacccgcctggcgtagaccgggtgggggcggtgcagacaggaccctggagaacagggctgcggtgcgcagcagggggtggccccggtcacacagtgtcccccatggaggggcctcgatggccgggctgcgcatggcacgtgtcgtgtgtggatccacagcagggccgctgcccccacccagcgccagccgggaggttgggaagtgttagcgccaggagcagctttcagctgaaaaatccccagtttattaactttgctccagaagccagggc

SEQ ID NO: 29628 - DNA, 450 bp, Homo sapiens
  chr1:2850546-2850996
  hypo
cggccagccgggctctaacatgtcctcaactttcaggaaaccagagcctccgagtaagtatcagatgagttgctaatgttggaaaaaaagcgagaaacatgcttgggggctctgttttacggctgcacttgaagtcggaatctgcgatcgtaacccaatgctggcctcgccaacgtgttttcggtattgtcgggataattgaaagtccagacaaatttggctatcagggctccaggcagcggaatcccatggtggcccctggtgtgatgagctcgccgaggccgtctcaggtcctgcgcccaccacggtcttcgggagcagctgtcggctttgcaaaagccccaggactttccgggtggacatggggggcttggctttgtcaccgggacctcttgaaaggcagccggtcctgggcctctcatctggccccgcacccttcttggccaccga

SEQ ID NO: 29629 - DNA, 32 bp, Homo sapiens
  chr1:2851025-2851057
  hypo
gcagggccatccgtgcctcggggtctgccctc

SEQ ID NO: 29630 - DNA, 529 bp, Homo sapiens
  chr1:2938633-2939162
  hypo
cgagaacttcggcgtgcccgctttctacctgtcggaccaggcggtgctggctctctacgcctctgcctgtgtcacgggcctggtggtggacagcggggatgcggtcacctgcactgtccccatctttgagggttactccctgccccacgcagtcaccaagctccacgtggcgggcagggacatcacggagctcctcatgcagctgctcctggccagcggccacaccttcccctgccagctggacaagggtctcgtggacgacatcaaaaagaagctgtgctacgtggccttggagcccgagaaggagctttcccggaggccggaggaggtcctgagggagtacaagctgcccgacgggaacatcatcagcctcggggacccgctgcaccaggcgcccgaggccctgttcgtgccccagcagctgggcagccagagccccgggctctcgaatatggtctccagcagcatcaccaagtgtgataccgacatccagaagatcctctttggggagattgtgctgtcggggggc

SEQ ID NO: 29631 - DNA, 169 bp, Homo sapiens
  chr1:2939191-2939360
  hypo
gcttctcaaggagctggagcagctggcctccaaggacacccccatcaagatcacggctccccccgaccggtggttctccacctggattggagcctccatcgtcacctctctgagtagcttcaagcagatgtgggtcaccgccgcagacttcaaggagtttgggacctcc

SEQ ID NO: 29632 - DNA, 33 bp, Homo sapiens
  chr1:2999791-2999824
  hypo
cgcaggggtcgggtctcctggctgcgccccacc

SEQ ID NO: 29633 - DNA, 83 bp, Homo sapiens
  chr1:2999864-2999947
  hypo
ctccccatcatagccctgtcctggactgggcggcgcgctcatttcaaggcagtgcggccatctgggctgggcctggcgctggc

SEQ ID NO: 29634 - DNA, 584 bp, Homo sapiens
  chr1:3000551-3001135
  hypo
cgcgagagaagagaacaggacccttgttcggagagatgtccctgggtcttggcagacccacacgcttgtggagggagcgagaggagaggtggctggggacgaccgaatcccagcgctgctgtgggctccctggaggagaaagggccttggtgtctgctgggccagaatgcaggcctttcactcctctccttgcctgggactgcggtcctggcgggccctggggcgtctgggggcctgtacccctcgggtggggcaggttgggctggagccccctggatctggtgtcaggcagacccagaggcagggcacaggggccgcctctggccctttcaaagggacattcgatctgaagcatggggcccagtaagaagattccagggaacacagtgctgatggggccgaaagcgctcggcggccggagagagcctctccacagtctgtgctctggcacgaggccctttgtgggattatctgcccccctgggaggcacggaatgctgggggcgaggggccacagcaatattgagcttgcatgggcccccgataaagcggctgcttgctgcagttgctctgtcgccgaaattc

SEQ ID NO: 29635 - DNA, 108 bp, Homo sapiens
  chr1:3008438-3008546
  hypo
cgggggtgatggacagttcgcaggtggtcagatgcgagagaattcacatcgcagaacctgccaggaaaatcaatgggaccgtgaggactgctaggtttgggaggcccg

SEQ ID NO: 29636 - DNA, 68 bp, Homo sapiens
  chr1:3008575-3008643
  hypo
gggacgcaggtccccatgtagaggataagatggagccagccgtgggtaagggtggaccacgcaggatc

SEQ ID NO: 29637 - DNA, 253 bp, Homo sapiens
  chr1:3032644-3032897
  hypo
cggcaggcgtcaggttgagtccttggggttcagggaggtcaaggtcaggcctagcgtgggtggtcatctcaggggcagcactggtggccgttgaattgttccttaccggggagaacaggtggcagggagggatggttccagaccccatggcacccgtgtctctgcagtgtgtccctctcatggggggacagtaggcagagctccccggctgccctgcgccggcgtgctcactccgcggtgcgtgcttaatacc

SEQ ID NO: 29638 - DNA, 177 bp, Homo sapiens
  chr1:3032979-3033156
  hypo
ccctgctcccttcctgtgagaattttgccctcaagatggcagcccagcctggatgcccagaccccattcccaagccgcaggtcctggtctgggctctgtcactcggggacgcgcctgcttgtctttccccggctggggcagtgcctggtctgctcagcccttcctctctccccgccc

SEQ ID NO: 29639 - DNA, 125 bp, Homo sapiens
  chr1:3037182-3037307
  hypo
cggcagccccctgggagcgggaggatgcctgcccttgcgtctctgcgctggagcttctgacacctttcgcagtgaaaggcagggtggatagtcggtgaggagagggtctggaagcggtgggcctc

SEQ ID NO: 29640 - DNA, 145 bp, Homo sapiens
  chr1:3050813-3050958
  hypo
cggagcgccattcagctgggggacggagcttccctggaacatagtgccccgcttgattcttgaagagaggacgtggacagcagaggagacgcaggcctggggacggacagttgggcagcaggcatggcacgggcatgggctgggc

SEQ ID NO: 29641 - DNA, 304 bp, Homo sapiens
  chr1:3052594-3052898
  hypo
cgctttgtccgggagccacaggacaccaggctggggcggggctgggggcagaacgctcctccagcagcctaggagccacccctgggaagaaagggggtctcgggcagcctcgccatgggaccaccagctttgggccttcgttacaggggtgatgctgccccgctgatagggttgggggcctggggctgcagcgtagctgaagtggaacctgcccagcctgcacttcccagctggccagccccgcgcgatgctccggggtctcggcgaggcacgccaggcactgagtcctcagacccgctgtccg

SEQ ID NO: 29642 - DNA, 40 bp, Homo sapiens
  chr1:3052927-3052967
  hypo
cgaggcagtggaggcccagaaagatggaccgacagtcccc

SEQ ID NO: 29643 - DNA, 120 bp, Homo sapiens
  chr1:3111118-3111238
  hypo
cggcaactggccactgtctccccaccacacgccaccgtctccccaccacacgccaccgtctccccaccacacgccaccgtctccccgccacacgccaccgtctccccgccacatgccacc

SEQ ID NO: 29644 - DNA, 326 bp, Homo sapiens
  chr1:3111463-3111789
  hypo
gcctggctctgggcacctctgctgctccactctgcgtggagagttctgcgtgaggccaggaagctttgccgcgcttccccactcaggagcttctggatgtttctatggaggcctcacgtctaaaaccgtgagcgcaccggccagtggatgctctgaggagtgttcccgtggagccagcaccgggcagctcggcgaggcacacagcgtcgggatttggagagagacggggccctgtgggatggtgcggagcctgaggccaccgtggggacagggatgcagagaaacccatgggcctcggcgttgctccgggagaagccggcagtgcc

SEQ ID NO: 29645 - DNA, 683 bp, Homo sapiens
  chr1:3114432-3115115
  hypo
cgcgtgaacctcgcactcctcagggggcagtggcaggtcccactgccctcccgccaggcctgctgctggtcagagcttctcctgtggcaggaattctcatgggccgggtcatcagctggggtaggaatgtgctctcagggtgctacgggccaccttggcctcaaccagagatgagggtgacgcaactgctcacaggcccgctgaggggcagcgacctgaggacaactcctgtgggctgcctgtctctgctgcctcctgcacgcgggtagaatctgctcgggtcaggggcgggcactccatgcgttctctggacccccgagctgcagtgtggctgggttgctgtggttgaaggcacctgccttaaggggccaggtcggcgcagggcagcgtctctctggggtgaggagtttatctgagtgccttagagaaggccctttggagaatggctgcaagccggcacccttgctgcatggagggtttgttctgcgtggccttggctgggcctttcctgtcgtttgggacatatgtgagtagaattgcctcaaagtgactattctcactcagctgccaggatgccgtgagtgtgtctgctgtgcaggggagcgtggtctcttcttgcttttgcagctccgggcccacctggagtgcttggcgtggcactgggccgtggccttctgggacgc

SEQ ID NO: 29646 - DNA, 188 bp, Homo sapiens
  chr1:3125905-3126093
  hypo
cgcagctccgacgtggccggtcccgactggcacacctgccccgagtcacctgggacggactgcagccagccagctctcccttcttcctggggaggcctgtgaaggtcgcgtgaatgcctgtgtcccccgggacagccagggaggcaggaggccaggcctgggtgtggaataggcctcgctgggaggcc

SEQ ID NO: 29647 - DNA, 187 bp, Homo sapiens
  chr1:3172404-3172591
  hypo
cgtggccgcaccgacacccgaagccaaccccgtggccgcactgacacccgaagccaaccccgtggccgcaccgacacctgaagccaatcccgtggccacaccaacagtacagggtggaacgagctccgcctctcaggggagggacaggattacgtggcagagagcaggtatgtggcacagtgacagc

SEQ ID NO: 29648 - DNA, 164 bp, Homo sapiens
  chr1:3193780-3193944
  hypo
cgtggccggccccatgcctctctgtgcacggctggatcttgcaaacagtcgagtcctggctgctgcgccacccggggatggcatcgtctgtcacacgcttcactctccctgtggcgcactggcatccaccatgcccacctcagaggccaggaggcacgtcagcc

SEQ ID NO: 29649 - DNA, 473 bp, Homo sapiens
  chr1:3195292-3195765
  hypo
cgagaacttttccagtgtgactgctggcctctctggcagacgtgtccaaactcagaaaacctctgctgctctgaccacagggaacgtcagaggggacggggcagcggaacaaagcacaaagcgtccctgcgtcctctcaacgtggcccagctcctgcagacactcagcgagccgtggcctctcccatcctcccacgcttccctccggccggccctggagatccgtggagccacacggtgccgagcgcggcgctggccgtgtgctccgtgtctgtcatcgtcagccctgtccacctttggggcaggggcagctgggctggctccagtttctctccatgtcaactttgcaaaggaaggaggtggatgcagaagctgccaccaatagccacgtgggcagctgtggccccgagtccggggatgcagttggtcatcaggagcctcgaagcgtcgctcaccatgcctggaaagaccggc

SEQ ID NO: 29650 - DNA, 550 bp, Homo sapiens
  chr1:3228695-3229245
  hypo
cgtgtgaaatgggatgtgctgctgggtttaaatgagatctgactccaaagcacagagctcggcctggcccatctcgggccctcagtggacatccatggcgccgtcagcatcctcgccccactgggttattcccacgctcatcctctgaggaggagcagcccagcactcagcggcctgcaggctggcggggttggtagcagcagcctctcactgggccggtgacatgaggatcactgggacaggcacgggtgtggtgggaccacagggccccgagggcagcaggcagcccccagcctcctccgaggtctgtcctggaggctggccgcccacccgccggctgcacctcacagccgctcctccccagcctgctggtgtctgacgttggcatcccctctgtgggatacatcaggagcccatccggatccggggccggcaggtggggttcccgggatgggttgggagttcccagaagtccggtgaggggctttcggaaagggaccgtgcaccctcctgtgcagaacccggcctcggccaagctgcaggctctgac

SEQ ID NO: 29651 - DNA, 867 bp, Homo sapiens
  chr1:3321132-3321999
  hypo
cggccacggcagagaggaggtgggcagggagacaccagcatgtgctctgatccctcggcagcgtggtgggggctccgaaggggcactgggaacaagctgtatggttggggtcccctcccgggcagagggcaggtagtcgggccccgcagtgagcctcgtcctctgcgcagcctggagcagcacatggtcatccacacggaggagcgcgagtacaaatgcgaccagtgtcccaaggccttcaactggaagtccaacctcatccgccaccagatgtcccacgacagcggcaaacgcttcgaatgtgaaaactgcgtgaaggtaacctgcggggcggccccgtctcagccccggggcagcaggaggctgcagacgggcgcccgcccccgtgctccctacaccccctggtccaaatgtagatggagtgcggcagagtgggtaggaggcccctgcggtggctcgggcccttccgtgtgactaggaaggaaaggaagtctcagggaagaccgtgtcccccaggtcagaaggatcagggccgagaccagaacccaggcccctccagagcgcggctcctgtcctcccgccggtgtggaaggaagaggctggcggggctgagccgagcctccaccccgagcccgccagggtctcagcaccacagctgaaaacgctttctgcagccctgtctcacgcagcctcagttcaggaattgttcttgaggaaagcagccggggaggctctgcggctcacttaaggccctgcagcgggtccttgctacacagagacctgtcccggcctgcttggtgcagactgcaacgtggcaagagagacaggcagggccctgccccccacagccggttggtccgccagcca

SEQ ID NO: 29652 - DNA, 121 bp, Homo sapiens
  chr1:3322260-3322381
  hypo
cgtggcggtcgggccgaggtgggccatcccccaaggtctcccccgatccgaggggccccagtttgttcataaagcactcatggcaggttctgacatctctgccgcgtgcagcctggtcccc

SEQ ID NO: 29653 - DNA, 215 bp, Homo sapiens
  chr1:3328319-3328534
  hypo
catccttgtacccccggccgcctctgctacctcccacatcgctgctcaagagccccctgaaccacacccaggacgccaagctccccagtcccctggggaacccagccctgcccctggtctccgccgtcagcaacagcagccagggcacgacggcagctgcggggcccgaggagaagttcgagagccgcctggaggactcctgtgtggagaagctg

SEQ ID NO: 29654 - DNA, 644 bp, Homo sapiens
  chr1:3328625-3329269
  hypo
gctcggacctggacagcgacgtggacagcgaccctgacaaggacaagggcaagggcaagtccgccgagggccagcccaagtttgggggcggcttggcgcccccgggggccccgaacagcgtggccgaggtgcctgtcttctattcccagcactcattcttcccgccacccgacgagcagctgctgactgcaacgggcgccgccggggactccatcaaggccatcgcatccattgccgagaagtactttggccccggcttcatggggatgcaggagaagaagctgggctcgctcccctaccactcggcgttccccttccagttcctgcccaacttcccccactccctttaccccttcacggaccgagccctcgcccacaacttgctggtcaaggccgagccaaagtcaccccgggacgccctcaaggtgggcggccccagtgccgagtgcccctttgatctcaccaccaagcccaaagacgtgaagcccatcctgcccatgcccaagggcccctcggcccccgcatccggcgaggagcagccgctggacctgagcatcggcagccgggcccgtgccagccaaaacggcggcgggcgggagccccgcaagaaccacgtctatggggaacgcaagctgggcgccggc

SEQ ID NO: 29655 - DNA, 152 bp, Homo sapiens
  chr1:3331040-3331192
  hypo
cggggtgggcggctctgtggagcgggtggctcggcggggcgggcggctcggtggggtacgtaaccctctgtgctgttgtccagcagggtagaaaagcggaaggtcacagaccccgtgggagccctgaaggagaagtacctgcggccgtcccc

SEQ ID NO: 29656 - DNA, 238 bp, Homo sapiens
  chr1:3343487-3343725
  hypo
cgtgcactcatgcacacacgtgtacataacatgtgcgtgcataaacatgcctgcctagatctacacacacgcatatgcacacatgcaagtacatgcacatggacagtgtgtgcacatacacatgcgtgacggacagccgtgtgcgtacacctagagacacatgtacacgcatgggcgcacgtgcgtctagacacacagcagcagaacgatggtggaattcggatccaggaatgtcggc

SEQ ID NO: 29657 - DNA, 561 bp, Homo sapiens
  chr1:3351144-3351705
  hypo
cgccctgggctgcaggcctgcccgaggctgggatgggaagtgtgcctgccctcgtgtgacatggaattggtgtcaggaccgccacgtggccttcagaggaatccacaggtccccacccaagatccctcaattatatggggaagtcgagggcctgtggcttggatccgccatgcagagatgtggccgggcacccatcttccttccctcctctgtccctgcctcggccaccccacgcgggaacccagcgccgtcctctgaaggcagggccttggccacgtcctgggtctcccacctcccacctgaccccagcggctccggtgtcctccacgtggctgccctggggagcaatcccagcggatcgctccgggccaccaagccgcacctgtgcctgagactccggatggacgacacagtcgtcacgtcgctcttcctgcgggttcttggcgagacacagcttgagaacagaagggcgtcgggggaacctgccgcaaggagcagagacagcacagccccccgggcccagccgcctccctctcttgggacgcaacttcttccccactc

SEQ ID NO: 29658 - DNA, 168 bp, Homo sapiens
  chr1:3361098-3361266
  hypo
cgttgggggcgcagacgcaggggactgactgcgatgggcacggcaagacttctaggggtgaccgacgcgtcctatatcacgaccgtggttacacaggtatacattcattaaaactcacctcgctgtatattttaaaaggatgattttattgcacgtaaactgtgcctc

SEQ ID NO: 29659 - DNA, 353 bp, Homo sapiens
  chr1:3379762-3380115
  hypo
cgtggctccccgcgtgttagagacgatgccgccttccagccccaggtcccggcacccccacagcctcggcccccggggcacgaggagccatggcccatcgtcctgagcacagagagcccggcggccctcaagctgggcacccaacagctgatccctaagagcctggctgtggccagcaaggcaaagaccccagcccgccaccagagcttcggggcggctgtacttagcagggaggccgcccggcgggaccctaagctcctcccagcccccagcttctccctggatgacatggacgtggacaaggaccccgggggcatgctgaggcggaacctgcggaaccaatcctaccgggc

SEQ ID NO: 29660 - DNA, 337 bp, Homo sapiens
  chr1:3385485-3385822
  hypo
cggaaaaggcaggaggtaaaagggccctgggcgggagggctgtcccccatggcctgggccatgcaacacccggggaggggcagcagccacggtggcaccacccagccatccctctgcggccacctccagtgccaggccctgtcacgctgaccagcgcctcacacagccccgggctgtgcttccacctgcgccaggccctgacggagccccttcacgtcaccgggtgaatcctcggagtccaggggctgccatcacccccttctctgacaaggacgggggtcgttgcccagcttcagccggctcataaggcacccagccaggggcatccagggacgtc

SEQ ID NO: 29661 - DNA, 238 bp, Homo sapiens
  chr1:3425542-3425780
  hypo
cgtccccagcctctgattggatggcagcctagcccgaggggtcgctggctgctggccctgcgagcaggagcccccgggggctgggcccgcgctcaccaaacttctctgtgagcgtgtgttcgccccgcaactctgcctcttcctcatcggccccgacgtcgtcatcctggaagagttgcggcagctcgtcctggagcacggcaatgtggggcaggggccgcacgaaaggcagctcgcc

SEQ ID NO: 29662 - DNA, 617 bp, Homo sapiens
  chr1:3435632-3436249
  hypo
cgtccagaaatggagcagggagggaaacgcccgccaccccccttccatggaccaggctaagctgaccccacaacccacaccccagcaaggcccccacccctggccagggccagatcatcctgcccagcgcccgcctttctgggtggtcagctcggcccatgcttggctgcagtggtccagacccactggccaaggtgacaggtgggtccctatagacaagtgctagcagtgccctattggcctaccaggggcaccgtgtgctttagggagtggcaggcagcagctggaccacacacatggaatgaaggaggccagacggcgggggccaacaggggcactcccaggtgggagctgcacggcgcaccatgggcacccaatgcccgcagtgcttgcaccgccacacgcgcctactcgctgctgagcgtcagctccgacctgccctcctgggggaggccccgacccagggctgcgtgagcatcacacgggttcagcttctccagagcgtttaggaaggcgccttacttgtcaccagagtcccgggagggcaggcctggtctatatcgacagggcagcaacccactgcctacgcagtgcccggctccagcacaccaggcggc

SEQ ID NO: 29663 - DNA, 214 bp, Homo sapiens
  chr1:4037053-4037267
  hypo
cgtcttggaggacgcgggaggaaagcacgcccagcggacaggagccatcacgcggctgcgggctgctgctgagaacctggcgtgggccaccgtcgtcagcagcgtggaggtaactgacgaccttggccaagaagttgggtggcagcgtggaggtcatgctcagagtgagtgggcgcaagagacggtggcgggagagggagtggagatcataggc

SEQ ID NO: 29664 - DNA, 430 bp, Homo sapiens
  chr1:47685395-47685825
  hypo
cgagggccggctccatcggcggcaggcagcatggcaggatggaggctgcgggccgtgtgtttgggcgcgggctcctccgtgtagctgtccgggctggctgccccatccagggagctgccgcagctggagttgggggaaagcacgtcttgcaggaggtcatctgggggcgcgccgccccctcccccacctccacccccaccagcccccaccacagggtccttgccagtcttggcccgctgggtgccctcctcctcctggtcattgagcagcttggccaagaagttgatatacttcatggccaggcggaggatctcattcttgctgagcttcttgtccgggggatgtgtggggatcagcttgcggagctcggcaaaggccccgttcacattctgctgccgccatcgctcccggctgttggtgaagatacgcc

SEQ ID NO: 29665 - DNA, 428 bp, Homo sapiens
  chr1:48459812-48460240
  hypo
cgagcacgggcacaccacggaagcgcacgtccctctctgtgagcgagtttaccatgagcatcacccagacgggcctcttgcgctcccagttgcccgcgatggcattgaataggtagtcagcatagagccccttgccccgctgagcgggcgtcatccaggagggcatcatcaacttcacgtagtccaggtggcgcttcaagcgccagtaaagctcgtggggcagcacgtcctgcaggttttccccgtgcggcagcagctggcagctggccagggccgagatggtgtaggggtctgtaaggtccagctcaaagtagacacgggtgctagcctggaaggctgccttggagttgtccgggatgaagtcccagacgcgggtgtaggggacgtgaatagtgccaaacaggtaggccggaggatcacgccgaatc

SEQ ID NO: 29666 - DNA, 1601 bp, Homo sapiens
  chr1:7723202-7724803
  hypo
cgtgggacggcccccgggcttggggtacgtgtccaagggctgagagtctgtggcctgcctggggtaccgggcctggactttgccagggaccccagccgctgtggggcaggtccaccacggtcctagctctgactctcttttgtgtgtgcatgtgtgtgtgcacatgtgtgcctgcgtgtgcgtgcgcgtgttgtgttccgatctccgcaggagctggcggcagcgtgcatcacaagtgtaacagcgccaaacaccgcatcatctcgcccaaggtggagccacggacaggggggtacgggagccactcggaggtgcagcacaatgacgtgtcggagggcaagcacgagcacagccacagcaagggctccagccgtgagaagaggaacggcaaggtggccaagcccgtgctcctgcaccagagcagcaccgaggtctcctccaccaaccaggtggaagtccccgacaccacccagagctcccctgtgtccatcagcagcgggctcaacagcgacccggacatggtggacagcccggtggtcacaggtgtgtccggtatggcggtggcctctgtgatggggagcttgtcccagagcgccacggtgttcatgtcagaggtcaccaatgaggccgtgtacaccatgtcccccaccgctggccccaaccaccacctcctctcacctgacgcctctcagggcctcgtcctggccgtgagctctgatggccacaagttcgcctttcccaccacgggcagctcggagagcctgtccatgctgcccaccaacgtgtccgaagagctggtcctctccaccaccctcgacggtggccggaagattccagaaaccaccatgaactttgaccccgactgtttccttaataacccaaagcagggccagacgtacgggggtggaggcctgaaagccgagatggtcagctccaacatccggcactcgccacccggggagcggagcttcagctttaccaccgtcctcaccaaggagatcaagaccgaggacacctccttcgagcagcagatggccaaagaagcgtactcctcctccgcggcggctgtggcagccagctccctcaccctgaccgccggctccagcctcctgccgtcgggcggcggcctgagtcccagcaccaccctggagcagatggacttcagcgccatcgactccaacaaggactacacgtccagcttcagccagacgggccacagcccccacatccaccagaccccctccccgagcttcttcctgcaggacgccagcaaacccctccccgtcgagcagaacacccacagcagcctgagtgactctgggggcaccttcgtgatgcccacggtgaaaacggaggcctcgtcccaaaccagctcctgcagcggtcacgtggagacgcggatcgagtccacttcctccctccacctcatgcagttccaggccaacttccaggccatgacggcagaaggggaggtcaccatggagacctcgcaggcggcggaagggagcgaggtcctgctcaagtctggggagctgcaggcttgcagctctgagcactacctgcagccggagaccaacggggtaatccgaagcgccggcggc

SEQ ID NO: 29667 - DNA, 244 bp, Homo sapiens
  chr1:94495968-94496212
  hypo
cgcgtaggcacttacggaagccacccttccttcaggcagcggttgccaaagcctggcttattcaggaggacgtctgcaagtaccgtgaactgctcactgcctggttcatccatgctagacagagtgagacatgtgactgggacagagcaggcgcgtgccaacatcatgcaactcagagcctttactggatagctgctgtgtgccaggtatgtattggaggcaccgaatgctgccttgggatggc

SEQ ID NO: 29668 - DNA, 115 bp, Homo sapiens
  chr10:116050056-116050171
  hypo
cgtcctgcagaatgggagctaccgctgcaagtgtcgggatggctgggagggcccccactgcgagaaccgtgagtggagctcttgctctgtatgtgtgagccagggatggtattgc

SEQ ID NO: 29669 - DNA, 114 bp, Homo sapiens
  chr10:126711488-126711602
  hypo
cgatggcggcgaccctctatacagattctgatagggctaaaattattgatggaggtgctttctacctaggagatcagcgttcacacctccagttgctggaaaccgaggccacac

SEQ ID NO: 29670 - DNA, 1801 bp, Homo sapiens
  chr10:126714633-126716434
  hypo
cggggaggatgtattacttggttctggtgcaagcatggtggacacgatgatgggtgcccctgtgcgccgggccaccttctggtacggtgagtgaggcgtgtggaggctctggctggccggcggcagggtggatggccccaggggtgcacctggcttccgcaagacctgggggctgccgtgagggctgggcagcggagaggcggccacgttgcgctccctctttagcagctccatgggcaccgtgtatgccgtggagtaggctgttctggggcctgggtgaagggggtttgaggggcccgggttagtcaaggccacccctgcctgcagggggtacgtggggctcagacgcgctgtcagggcgcaaggggtgggagagctgtacccggagttggaggggaagtgtggggcatgggtgcccacgccaggggcagaataggtggctgccgtctccaggaggtgctgagatggtgcgctggagggacggcgagccgggtctccagctcggggggatgctgtctgcagaggagccgcagcgcccagagaagccaagtcaccatggagcagttcgcttcggtggctgaagctgctggaccgcgcccggggcagcgggcccccccggtcctgcctccgcagctgcatttcggtcctgcagctattggccaggcggctcagaacacgggcctggcccaggttgggtgcgacagacttgatatccgcgtcctccagggtagccaggacggccggggagtcaaagccctgctgcagtagggctcccagcgtggcctctgccagcccctccgcccgcagaaaggccaggaactcagggagcacggtcctcttgccaccaggaccctggaaggtggacaggtcagcttcgtaagtctcgtaagccatcttggatgggatgctttcccgggcaggcccgtagccacgattcagggcccctggggccacccctgtgctgccttcgggggcagcagctgaactggggtccacaaccaggcacgtcggggccacctgtctggcaggggcagggtcaatgggtctttcgctgatgtcgctgaagacctggctgagggggtaggcaggcacctccgccccatacctggtgtcgggctgctcccgtccataccgcccgggagatgcagccctgctctgtgtctgccgcccctgagggatcattttacctccaggatcccggtacaggtgaccggcgtcctgcagggcaggtgaccggccttgcattggatcccatgacgttctgctgccaagcactccgtagctggggaccggccggctgactcctgggtcccgatagaggggaggctctttgggtaccctagcagctccagacggatcactgtagtactcccgtggcagcagggggctgcgaccagacatcactgcctgtctgctgtcgtagaaggtgaagtcaggagtagacccctttcttgcagccactgagttataaacggcctcccggtacaggtagggctcggcggccacgggcagggcagcgtcctgtggtcggtggtttggctcaaaccaagtcccctctgctgtgccatacgtcagggagcttctcctccccagaggccgcagggactcggcgttctcccaggggccctcgtaccacccagcagcatcccagctctgagaacgaccaatatttatatgcctgctgggaactggcattggaaaaaaaatgactgcggatgaggcagaggagaagcttttctttataaatcttcaattacatacatcaaaaacagacctggctgtgtgctaacccttccgagac

SEQ ID NO: 29671 - DNA, 295 bp, Homo sapiens
  chr10:126721936-126722231
  hypo
cgccctcgagcgcgcacgccaaggtgcctgagctttagtagcaagcgagccaagtggtagaaaccaatcagagaggagtctcatttcacagctttaacactgtacgttctggaaaaggagagagggcaagaagccggcagcaaaatgtatcttggggttctggttcacagtcaccccaaatacctgtcaattaggttgagctgtgtgaagcgcgcagaaggttctccgcattcgtgcgggctgctgtctgctgctgtctggctaccctggggcctcctccaaacacggagactac

SEQ ID NO: 29672 - DNA, 549 bp, Homo sapiens
  chr10:126771776-126772325
  hypo
cgtaagaccaccagggccagcacgcattctcaacatactttccaaagctggaaaaaagcacagccaagtcactcagaaaagcctctcttgatttggcttctggataaaaaagagtctccctgtcgtgccagatggggtcaactactcggtgaaaacagaggcccattccacaggcaccactgctgagcctctgagttcccaggacagggctgtccgaggacacaacactgacagccatgtgcagacccccgacctgggcgaggataccgccctctgagactcagtcgcctgtctacaaaaaaggaaaagataccacattaccgtgaccatctagtctaatgaaaatgccaccaggatcaaagaccataacgcaaagccctctgtttgcaccttagtccgaacaagcacccaggatacactcgctgttgtttgtttgtttgttttaaggcaggatctcactctgcctcccaggctggagtgcagtcttgacctcctggactccagccgtcctgccacgtcagcttctcaagtagctgtgactgtaggcac

SEQ ID NO: 29673 - DNA, 409 bp, Homo sapiens
  chr10:126794880-126795289
  hypo
cgggaagccatcttcactgtaaagggaccctgcagtgtatgggaagccaggctcactaccacagtgtttccggaaaggcttccaccagcaagggacgcggggcgacctgagtttggggttgcttcatcggctcctgaatgccagatatacctaaggccacacatgctggcaggtggatctgggcgtcaagttcttcactaacaaaatgggggtcttgggaagggtatgaggatcacggaaagagaagcggacaccacgcctccatttcccagcataacgtcactcagtggcaacagagactcctggccccgccaagagtgagaggcaagtgtgcccaccatcctgcagatgccctgctcggaggtacccctccagcgaaggagcaactcagcaggaacccacccaggcc

SEQ ID NO: 29674 - DNA, 392 bp, Homo sapiens
  chr10:126819324-126819716
  hypo
cgactgtactgccagacaagactagcggaactctaactcccaggttgccttgatctgaacaggttctagaaactgccaagcatcgccccctcattttagagggaggcaccctgccacccagagagggcaaagggctcgctgtccaagctggagaaaatccctgggtatcgcctccgacccactgtatctcaaatacgatgtgtgttggctcggctcttccaaaaaccgaagccaagacacgatcagctctggaagagacttcttggggaggcagacaggcggggaggcagagggagacgcaagtctgacagcagatgcagatgagatggcagggaaggcaggaggctggggaggaggagtcttcacctgctgtccccggctgggagcagccc

SEQ ID NO: 29675 - DNA, 76 bp, Homo sapiens
  chr10:126828919-126828995
  hypo
cgatgactgccgcttaaacctgccctcagcctgactgatgtgatgagggaaggggacaaagaatgagctccgaaag

SEQ ID NO: 29676 - DNA, 379 bp, Homo sapiens
  chr10:126830153-126830532
  hypo
cggaacaggaagcagggagacagcacacagtaagcacatggcaagcacacagtaaacacacggcaagtacatggcaaatacacagcaggtacacagcgagcacacagtaagcacacggtaaacactcagcaagtacatggcaaatgcacagcaggtacacagcgagcacacagtaagcacatggcaagcacacagtaaatacacagcaagcacacagcaagtacacagtgagcacgcggcaaacacacgacatgcacacggttagcacactgcccggctccctccaaagccacttcccccacagagaaaggagaaagcggccctggcctggcagtcactcacagtccctctggacctggagccagcggctatggcggac

SEQ ID NO: 29677 - DNA, 213 bp, Homo sapiens
  chr10:128813812-128814025
  hypo
cgagcgggtcttcctatttcaaggaacggtgcccccgggacttgctagtggttgtgcctgcaaggggcaccgtctctgtaagctgcgcctcctcctaccccaactccccgtggttctgctgacttgaccttcacgctggtccctctcccaccctccatagtggcattcacgtcctgccagccagctaggatcatgcggtggcctccctgctgc

SEQ ID NO: 29678 - DNA, 307 bp, Homo sapiens
  chr10:129195296-129195603
  hypo
cgggcggcgactcctatgtgatctgagcatgagttacacgggcagcgactcctatgtgatctgagcatcagttacacgggcggtgtctcctatgtgatctgagcatcagttacacgggcagcgactcctatgtgatctgagcatgagttacacgggcagcgtctcctgtgatctgagcatcagttacacgggcagcgactcctatgtgatctgagcatgagttacacgggcggcgactcctatgtgatctgagcatgagttacacgggcggcaactcctatgtgatctgagcatgagttacacgggc

SEQ ID NO: 29679 - DNA, 413 bp, Homo sapiens
  chr10:129195681-129196094
  hypo
cgactcctatgtgatctgagcatgagttacaagggcagtgtctcctatgtgatctgagcatgagttacacgggcagcaactcctatgtgatctgagcatgagttacacgggcggtgtctcctatgtgatctgagcatgagttacatgggcagtgtgtcctttgtgatctgagcatgagttacacgggcagcgtctcctatgtgatctgagcatgagttacacgggcagcgactcctatgtgatctcagcagcgtctcctgcatgacacaggtagtagctcctctatgacccgggcagcgactcctgtgtgacccgggcagcgactcctgtatgacacgggcagcgactcctgtatgacacgggcagtgactcctgtatgacacgggcagtgactcctgtatgacccgggcagc

SEQ ID NO: 29680 - DNA, 669 bp, Homo sapiens
  chr10:129245272-129245941
  hypo
cgaaagcagtagcagcagcagcggagacggtcctgtggcacccagctgtttaacttccaccgaggcagggggcccgagcagggacagaagaggccggggtgaacatcaccctttctacagtggctcgatgccttgcttcacactccagttttagtgttcgtgtgatacttgctattctctttctagaacattgccgttaggagagggtcccaccctttgtgttcgctccctccctgccctcatctgctctgttgacaaacgttttctgccagatgaagtgtttctgctgtgcctgcctctctgggagggaacgtggagcagctccctgagcattcaggctccgtggggaagtcgggctgattttaaatagatcccggttttccaggcttggagctgaacggcatgacgggggcggacgtggccgatgtcccaccccctctgcctctcaaaggcagcgtggcagattacgggaatttgatggaaaaccaggacttgctgggctcgccaacacctccacctccccctccacaccagagggtaagtcggcaatctgaaacacaggctttcattgcttcgcctccacaaagtaggacgagtccctcattccagatactagcaggtttacttcgggctagtgagcacatgaggaaaaccatgtatgatgggccc

SEQ ID NO: 29681 - DNA, 118 bp, Homo sapiens
  chr10:134680051-134680169
  hypo
cggctgtgcacccggccttgctagggcgccccgggtgtgggccggtggctgagcccctgcactaggatctgggcctaccccgcatccccccagcctctcctcgctaagcagagccccc

SEQ ID NO: 29682 - DNA, 119 bp, Homo sapiens
  chr10:134694283-134694402
  hypo
cggcggtccagatcacggagcaggaagcagagctctggggagcggcgtggggtcggcaccctgccagcggcgtgggctcaccatccggcgtgggctgtggctcagggacatcgccgggc

SEQ ID NO: 29683 - DNA, 231 bp, Homo sapiens
  chr10:134733835-134734066
  hypo
gagctcctcacagagctgcagagtggcattgcctgtgtctcctgccggcgatgaggccgagccagtgctcctctgagtgggggaggctccaggaactttggagcagagtctgccaagaccctcctgctgctctgctggctgcgctgtccagctgccctccaagcagaggcacccggcctcagactcccgagctcccacccagcccctgcgtagcaccccaagtcccagcag

SEQ ID NO: 29684 - DNA, 163 bp, Homo sapiens
  chr10:134734534-134734697
  hypo
cggcagccccttcccgctccaagagtcgccaaccttcccttgcagggcgcgacccaccctgcgtctgcccatctcctcgtctcagacccgagacatgacccagcagctccactcccgaccaccatctccacaggctgcagtctgggtgacacctggttcgtcg

SEQ ID NO: 29685 - DNA, 117 bp, Homo sapiens
  chr10:134738029-134738146
  hypo
cgacgtgcctggcccggagctgggacagagggtggcccttattgagtacagggggagtctgttgcttgtggcactgtcatggcaagggggcttgggccaccttctcctcctctgtct

SEQ ID NO: 29686 - DNA, 298 bp, Homo sapiens
  chr10:134738688-134738986
  hypo
gcctgtgctcgctacgcttcccacccccagaatgcctcctccggtctgtgctacacgggcccttcccaggacaaaggctttggccaggatttcagtggagcagtctccccacactcccacctcccacaagccctgctggaccgcccaccgtcctgggctcacttggccacgtccccacagcctgtggcttccacgggggcctagccctcacgctgcccctgggctgggtggggcctgaacctcacaactccatcctgccacttggctgctgggtctgaaagcctcgtacgccggtgcc

SEQ ID NO: 29687 - DNA, 152 bp, Homo sapiens
  chr10:134758138-134758290
  hypo
cgcccgctggcgttgccatcacggggcactctcatgggcggcttaaacagcgggaaaggaggcgggaaggccgagaacaaggtgcggccggagttggttccttggagggcaccccgcgtggccgtatgtggtcgtcttcttgtctgtgtctc

SEQ ID NO: 29688 - DNA, 288 bp, Homo sapiens
  chr10:134790715-134791003
  hypo
cggaggcgcggtcatcagccagggatgggttggcctcgtgcgcgtgccctgcgcggtgctgagatcagcccagcacgatgtctagcatgttctgcccgaaacacacgcctcagaagaaagcgccaggcaaactgaaggacgcgaagccgtgggccggcctgccgagatcctgaaacgcaggcagagccgagacgctcttcagagcacgggtgtgtggcggccgaacacagcacctgaccctgggcttagtcttggacttctggaagaaaccgcggaactggtgcaatc

SEQ ID NO: 29689 - DNA, 488 bp, Homo sapiens
  chr10:134829387-134829875
  hypo
cgccgcagagtccgcacccctggaaggaggcgtcggggaaggcactgcacccacgcatggcttcgagggcaggaggcaggttgcacagcgggggtcacaggctcctctgtcccaggtgggactgggcgatcccagacacgtgtgctgtggcctctgggcctcatgcggagagcagatgccagggcctgcaactctgacctctgagcacacaggccggcctcagggaagggttgttctggctgtgggaacctgaactcgaaatggcctccgttcgctgcagacactgcccgcctgcaccggggactcagcccaggcagctctgcacacacctcagcaccacccaccctcaggcctcagccgcgctacccagcaggcgcttttgcccagaacgcctgctcagaacaccgtgagccactgcccggcgctgagccggggcctccggaacgtgaaccaagcggctgcagcccaggcccagagccaccggcatc

SEQ ID NO: 29690 - DNA, 367 bp, Homo sapiens
  chr10:134836865-134837232
  hypo
cgtgaccacggcaagagcgagctggagcggagcctcgggtagccatgactaacagacatggttcgcaaacccacgcacaccttccaaaaacgccaggctggcctcacatgaccaggggcctcaccaagtgcagtgggtccctgcgtgtcagggaggctgcccagagctgtggctgctcctgtcttagcctcaacctgtgcccggggccctgtggatggatccgcgtggggcggtggtgttccaagtccacgtggggcggtggtgttccaggtccacgtggggcggtggtgttccaggtccacgtggggcggtggtgttccaggtccacgtggggtggtggtgttccaagtccacgtgggacggcggt

SEQ ID NO: 29691 - DNA, 179 bp, Homo sapiens
  chr10:135001623-135001802
  hypo
cgtccgtccgtggatgcctgggtgctccccgtgttggctatttcgagccgtgctgctgggaacatgggtgtgcacgtatgcgtgagccctgccctcggttcctcggggaatgtggccgtgtggaactgctgtcacctgggaggtgtatgttgagcttttcaaggaacggcagcactgtc

SEQ ID NO: 29692 - DNA, 156 bp, Homo sapiens
  chr10:135025560-135025716
  hypo
cgtgcacatatgcatgcaccttcacacaatccacacgtgcacatgcgtgcacactcaatccacacgtgcacacgcacgtgcaccttcacacagccatacatgcactcgtgtgcaccctcacacatatccacacctacacgtgtgcaccctcacaca

SEQ ID NO: 29693 - DNA, 145 bp, Homo sapiens
  chr10:135025748-135025893
  hypo
atccacacatgcacacacgtgcacccgcacacgcatccacacacacacgcatgcaccctcacatccacacgtgcacactcacataccccctccatgttcccggtcccaggcagccctgctgcgctggcacctcctgcaccatccc

SEQ ID NO: 29694 - DNA, 156 bp, Homo sapiens
  chr10:1443319-1443475
  hypo
cggcagccacaaacaccgtcaggcccagcgtcaccctccccacctcccggatgagaaggagcctccggagcagctgagggacccactgtggaggcagccgggtgggggacggcccggtgtgtgtggtctggtcgtgactttcccacaaggcatcac

SEQ ID NO: 29695 - DNA, 311 bp, Homo sapiens
  chr10:1443566-1443877
  hypo
aagcctgggtcctctccctgtcagagaagacagctgggttctggggtttcacagcacacgggtacccccggttccaggactgaccatggagggcaggtgccagcgctgttcggggcctccggtgatggtcccagctcccttcccacaaaggccaggtgcagccttggaatcctctgacacttggatccccatggattcaatgggagctcgcatgctgtgaagaccgcggtgcattttaaacggcaccagcaaggaggctacactgtgtatcccgtgtccccatttctaccgaagagcggcggcttcacggc

SEQ ID NO: 29696 - DNA, 413 bp, Homo sapiens
  chr10:44198155-44198568
  hypo
cgcaccgggcgtggcccaaggccaggatcctgagagctggctgcctgcggcccgtggcatatttgctagcgccttccaggcatagaacggtggcagttttttctgtcaaggactcactttctagggaagaaggagggtggtgggcagcgcgaggccaggaggctggcgtgggcttgccggtaggcgcttctgagctgggtgggctcgccttctcgcccttcctcctctttccttccttgtttcccctaatgacccgggcacttattctagcccagctctggcctcgcgtcactacgctctgcaataggaggacggtagggtccttggccatgctggctcgcctggtcacggcgactcccacgcacgcccggactcctggtgctggtgctcgctcagcaggcgcggctgggggc

SEQ ID NO: 29697 - DNA, 234 bp, Homo sapiens
  chr10:71405328-71405562
  hypo
cgttttccccactcacggcgaacctgaagccttctccaaagggcttcacacccagggccactgaggcctggaaagcattttatttatacgaggtattcctggtaaccttctccgcctttcatagggtgcgtgagtggtcaccacagagaaacaggccaaagctgacccggtgcccaccttttctgcccacagtgtccttccaggcccctgacttgttccatgccgccaatgcac

SEQ ID NO: 29698 - DNA, 138 bp, Homo sapiens
  chr10:80848861-80848999
  hypo
cgacaggacagcgctgagcaggtacctgggctggtgccacacttggggaggtggacacgtagcctcagagcccgaagcaactggtggggttcattcccatggaggagaggttctccgtggtccacggccggagcctcc

SEQ ID NO: 29699 - DNA, 423 bp, Homo sapiens
  chr10:80878255-80878678
  hypo
cggaagcacttgagcagagtctcaaaggccaggggcccttgaaagacagagaagtggggagaagagctctgagcggggcacccagcgtgtgccaaggccggagccaggggctctgggaggccgggctgactggagcctagtggtgggcaggcaggtttggctgctgctgtggtctggctttcagggctgcggggctgctcggccggtgctggggcttcgaatgtgacgttcaggagctgcgacctttatttggcagtggcaggacggtatccagtgtctcgagtagctccacgttggtgggccagttccatcttccaggagatggcagccaggacctagaggtccatgacgtgggtgaggggctgcccgcagggtcagagcttggagctcactgccccctttcttgtctcccataggactcac

SEQ ID NO: 29700 - DNA, 253 bp, Homo sapiens
  chr10:80921761-80922014
  hypo
cgggcctctactgtgggtagacccgctgacctcccactttcattgcagcaggatggagctggagtgaggtggaggggccgcaagctgctgaccggcgtgtggaacactggtggtttgcagatcactgaggtaggtgtgccacggggctggcgggaggtggctgggtcggacgcaggtgagtcctcatgagggcaggtgctagccctagcacgctggacctttgactcgggcctcagccctgaggggcaggagc

SEQ ID NO: 29701 - DNA, 178 bp, Homo sapiens
  chr10:80928401-80928579
  hypo
cggaggctgtgtgcggactccacgagaaataatgctgtgcatcgtgtggcgcatggtcacgctctcagccctgctccctgggtatcaggtctgcttgactgatgtctcagctctgggctgtggccagtgcaggaggagagaagaggcagggacctcagtgtgacccccacaggtgtcc

SEQ ID NO: 29702 - DNA, 197 bp, Homo sapiens
  chr10:81036003-81036200
  hypo
cgcagccagttccccagccctcagcgtcctcatgtacttcaggaggacaggccagctgagacacgatggacagcccaggctgagacacgctggcctgggaggcgcttttggctcctgtggccacgtggggacagtgaacagtgaaagaaaatggaagttttccccagtccccagttcatgtggggctctcttatccc

SEQ ID NO: 29703 - DNA, 261 bp, Homo sapiens
  chr10:81050762-81051023
  hypo
cggcaaccccatggcgtcgggcatgaccaccagcaacccaggcctcaactccccacagtttgcggggcagcagcagcagttctcagccaaggctggccccgctcagccctacatccagcagagcatgtatggccggcccaactaccccggcagcgggggctttggggccaggtgagcagggctgacctgtggcagaagccatggacgccacccctcttcctccttccagtggggagggacccacttaaatcccagctccac

SEQ ID NO: 29704 - DNA, 447 bp, Homo sapiens
  chr10:81063491-81063938
  hypo
cgcgaaggcagggcctgctctgcagagacaggggaactgccacagccacctcgtctggcacacacacaccacacgtgtcccacatggagacagcagcccgggcacccggccctgtgactgccacacagtgccacacactgccctctcagcgtttggtgtgggctgggaggagaaccaggacatgccccagctgcacgaggaagtggggagcacgtgcagaccccctacctctgcaggactgtcttgccatcctcacctgtctgtgcctcctgccccgcagtcaagcggaatttcagcagcgtggctgcctcctcgggcaacacgaccctcaacggggaggatggggtggagcagacggccatcaaggtgtctctgaagtgccccatcacattccggcgcatccagctgcctgctcgaggacacgattgcaagcatgtgcaggtgagc

SEQ ID NO: 29705 - DNA, 366 bp, Homo sapiens
  chr10:81065719-81066085
  hypo
cgcctcgtccacagtgtggtgagagtgggagcaggggcctcaacaaggtcacctgggtgtctgtcggagctggaggtgcttttatgcccaaagccaggcaccccggagcctcagctctgccacccttcctcccccagctccgagtttgaagaggtcaccatcgatcccacgtgcagctggcggccggtgcccatcaagtcggacttacacatcaaggacgaccctgatggcatcccctccaagcggttcaagaccatgagtcccagccagatgatcatgcccaatgtcatggagatgatcgcagccctgggccccggcccgtccccctatcccctcccgcctcccccagggggcaccaactccaac

SEQ ID NO: 29706 - DNA, 635 bp, Homo sapiens
  chr10:88441134-88441769
  hypo
cgcgtgtggcctctaaccgctctcttctctctcccctgcatggcctgccctgtgccaggaccccgctctggacacgaacggcagcctggtggcacccagccccagccctgaggcgagggccagcccaggcaccccaggcaccccggagctcaggcccacctttagccctgccttctcccggccctccgccttctcctcactcgccgaggcctctgaccctggccctccgcgggccagcctgagggccaagaccagcccagagggggcccgggacctactcggcccaaaagccctgccgggctcgagccagccgaggcaatataacaaccccattggcctgtactcggcagagaccctgagggagatggctcagatgtaccagatgagcctccgagggaaggcctcgggtgtcggactcccaggagggtaggtaacggacatacagctctccacaggtggcctgggccacctgggtcctcggtgctcggcagagacctggtcaggtggtcagagcgaggcactggccccaatccagccagccccgagcccatgaggtcagcagtgatcctgcggcatttgccatgagccgggcatgctagcgatttatacaaccaaccacgctggggtgacatgtc

SEQ ID NO: 29707 - DNA, 499 bp, Homo sapiens
  chr11:1103476-1103975
  hypo
cgcccacggcatcgtgggaaggtgctctcatccccaggaatgtccgggggtcccgggctcattctcctttccctctagggctccatcacattcatgcccaatggatgctgcaagacctgtgagtacagggcacagcctggggggtaggcagggtgggggcacaagggctggtgccctcagccccgcctggggtggctggaggctggacaacggcctctgggtgggcagtgagggctgggggctgaggccgagcctggggaggggacgcagcgagggagagcctcctcgaagatgtggaggccctgccctaagccgctgcccgctctccccaggcacccctcgcaatgagaccagggtgccctgctccaccgtccccgtcaccacggaggtttcgtacgccggctgcaccaagaccgtcctcatgaatcattgctccgggtcctgcgggacatttgtcatgtgagtcccaggctgggagtgtgcctggagggggtggtgg

SEQ ID NO: 29708 - DNA, 313 bp, Homo sapiens
  chr11:1104214-1104527
  hypo
cacctcccgccgggcccggcgctcccctaggcatctggggagcgggtgagcggggtgggcacagcccccttcactgccctcgacagctttacctcccccggaccctctgagcctcctaagctcggcttcctctcttcagatatttattgtctgagtctttgttcagtccttgctttccaataataaactcagggggacatgctgtactgtgtggtttaggttggtgctgcaggggtgcggcttggccactgtgcatggcggaggccaccaggctctgcgtgcaggacacgggggcaccacacacacgccacgc

SEQ ID NO: 29709 - DNA, 257 bp, Homo sapiens
  chr11:119290824-119291081
  hypo
cgtgtaggtgccctcgtccttgctagtgaaggcggataagtagaggaccttcatgttgtatttgctggtgaagttggttcgggagcggtatgtgtgctcaggcacccccacagtgccaaagagcacgtgcttctttgtctcacgggtcaggctgaactcgtactggatgggtgaactgctggtattctcatggcggcagtccagacgaaggctctggtccactaggcaggccgttaggctggtcaccttctgccctc

SEQ ID NO: 29710 - DNA, 199 bp, Homo sapiens
  chr11:119505179-119505378
  hypo
cgcggcagaccgtggcagtgtggacccggacagctgcggagcgtggctggctgcagccccagctgccaccccgctggatccacccagcatttgtgctgagaccgcaattcccctagaccgctctcagccaacaactagacaggctgggaatccagcgcaggccctttcctgtgggacgcaggagtcctctaatagcagc

SEQ ID NO: 29711 - DNA, 261 bp, Homo sapiens
  chr11:119506104-119506365
  hypo
cgccaacgaatccgagttctggggataaatccttttctcgcccggtaattgctctgtaagccaaaaggaattacactttttggcaaccacaacagagcctccccaggacgccagagcttcccttccgctggtgacttccacacaccaccccgcaggccgttcacaagcctctgtccatccagacgccctaaccacggcccctgggctcaggacatagggtgtaggtgctctcttcgccccctcaacctgccgctcctgccc

SEQ ID NO: 29712 - DNA, 130 bp, Homo sapiens
  chr11:119506981-119507111
  hypo
cgctcccctacctcccttgctttcgggcctgggatgatgtgctctctctctcctgaggcaggcgtgagctggtgtctgcaggtgggagattctcgccctgcttggtgcttagaatgccctggcccccgac

SEQ ID NO: 29713 - DNA, 750 bp, Homo sapiens
  chr11:119535401-119536151
  hypo
cgtgcggggaggggctggggaggagcggtcacagacagaggctctggaaggggggctacacgtaccactccttcttggaaatgaaagacccgtcgttctgagaaaccatgttctcagccaagtccagctgctcagggtcgtactggtagcccagagtccggtccccgtagccgtcctgacgggcctcggcctcatccacggtgaagtagggccgcttggcgtcctcgtcatatttggggtgggggccgcccaccttgcgctcgccccctccaccgccctcctcctcctcctcctcctcctcatagctgcttccacccagtgggccggccttcttctcgtcgtctgagtcgtcggggtactgcaggttctgtgccattggtgggtggtgctgggggatgcctgccttgctgtagccgttgccatacacgtgcttcttggtgctgtagtcacccttgaaggtgtgccggcgccgacgcagggcgaccacgatcccgccgaccacaatcaacaccagcaggatgctccccgccacgcccccaatgatggccgtgggcaccggcccggcgcgccgcccatgttcgggaggagacggggtgtaggggaattctgggtgaggaaaagagatggaggggacagcatcagcgtgtgctcctggggtgtagagggggtgggagggaggcagggaaaggagaggccaggaaggacaggctgtctgcaccccaggtttgagcagctccagttcgaggcccc

SEQ ID NO: 29714 - DNA, 286 bp, Homo sapiens
  chr11:119574555-119574841
  hypo
cgcggctcagcctgttcagcctgtcacctccactgcatccaggatgccgggctcggaactggcacacaggtgctcaggaatggcgctcacagggagagagtggcctttatcatgcccatcctttcacactcggagtacgtgttagtgtgcctttttgccacctcttctccaagacaatggttcctcctggcaaatctccccagctttacccaggaacacggttctccgggcaagaagctgcctcaaaaggctcacccaaggtcacacagctgggtgcacccctcac

SEQ ID NO: 29715 - DNA, 471 bp, Homo sapiens
  chr11:119579320-119579791
  hypo
cgggggagggaaaatggggagtgactgctaatgaataccgaggttctttccgaggtgatgaaaatgctgtggattaggcagtggtgacggcctattgtgaatatactaaagccactgactcgtatacttcaggagggcgaattttgtggtttgcgaattatatctcaacaaagacaaaagaagaaaagaggcacatgaagaaggatggatgatggcagggctaggctggagacaagcaggctaccagaagacctctgcaagcctgcagcacccccaagcgtgggggccctggggtcccacggctcagcgcagctgctaagagcaccggtcttctgaagtccaagactcagcttccctcctcaggactgcccaggactgattctgcccaggactgattttgctgggggagggggcaccggagagatcctgagacactctaccccccacgcccgcccacatagccaacatatc

SEQ ID NO: 29716 - DNA, 283 bp, Homo sapiens
  chr11:119587853-119588136
  binary
cgccgaggactgatgctctctccctcttccatcatcaccgccccttcaggactggccacgaggcccatcatctgacccctgggagggtggggaacggtgctgtggtcagggcagaggcaggccgggagcagggggctgtcgcacacgttcccccaaaggcctatccatcacgccagtggagaccatcagagtgctctgccggcccaggacactgatgactctccaggcaccataaagacagggaataaatctgggaagttgctgggtaggagggtgcctcaac

SEQ ID NO: 29717 - DNA, 123 bp, Homo sapiens
  chr11:119589823-119589946
  hypo
cggcctccaaaagcttcggattttggattagggatgttcaacctgcgccaagactctctgaagattcagcactaataactccccaaatgcatcaggcatggacaactacaacaccaggttatc

SEQ ID NO: 29718 - DNA, 128 bp, Homo sapiens
  chr11:119590586-119590714
  hypo
cggggggagcgggtcatgaaagcttcacaatagaagtggctcttgacttcagtattcagatttcatatttatgggaaataagcgggaatgggggaacagcatgtgcaaaggcacggaggcaggaaagc

SEQ ID NO: 29719 - DNA, 83 bp, Homo sapiens
  chr11:119606553-119606636
  hypo
cggcactcctgattagggatgggagcacttaaaactcaacggtgatactgagaagagggtttcatccaggatccgcatagacc

SEQ ID NO: 29720 - DNA, 291 bp, Homo sapiens
  chr11:119970240-119970531
  hypo
cgttatcaggcacgaggcaacaaggatggcctggtgggcacacggttggagcagggtcccgtcctatccctgttcacaacgtgtcatttagaaagtcaccaatacacacagcctctctgtttcttcatctgtggaatgggacgtagtaagtaatgctgcttaactacccacagttgaagtgacgacgaaggccggctgagatgaattctggcccccatctgaatgctcaccgtgtgctttcgacacagcttccactttcacgccgcgtaacacggtgagggagaaaccgcc

SEQ ID NO: 29721 - DNA, 357 bp, Homo sapiens
  chr11:12182020-12182377
  hypo
cgtgcgctggacatccccaccgcacctcctcacgaatcctgaaccttgaacttgctgtcattccaccactgtcccgctctttccacactcacatccctgtgtgggtatttccatggcctggaatgtccactgcccagtcttctagtaaaataaatctcattcctaaaattgaagctttcttgagatttctctcttgtggcccctctggactcctcgaggctctgttggacaccgcctgctctgggcttccatgcccttggttcatattccacaagcacttgcctgtggtcttgtaatccatctgcccctgtgggcggggcctgagcctacgtattcccggccccttgagtggtgccc

SEQ ID NO: 29722 - DNA, 372 bp, Homo sapiens
  chr11:12183631-12184003
  hypo
cgtttctccagatacttcatgctgttcacctgtgtcctcgccgcaccactgccgcacacgactcctgaaccatgggggaaaacgaggatgagaagcaggcccaggcggggcaggtttttgagaactttgtccaggcatccacgtgcaaaggtaccctccaggccttcaacattctcacacgacacctggacctagaccctctggaccacagaaacttttattccaagctcaagtccaaggtgaccacctggaaagccaaagccctgtggtacaaattggataagcgtggttcccacaaagagtataagcgagggaagtcgtgcacgaacaccaaggtaaggggaaaccctcctagtcttacctttgcagggc

SEQ ID NO: 29723 - DNA, 78 bp, Homo sapiens
  chr11:12225829-12225907
  hypo
cgcactgccattgaacttgcctacctgggagccaaagtggtcgtggtggagaagagggactccttctcccggaacaac

SEQ ID NO: 29724 - DNA, 63 bp, Homo sapiens
  chr11:12230977-12231040
  hypo
cggggggtataatcattctcttcccacctctctctgccaactcatctcatttctctgtcctgg

SEQ ID NO: 29725 - DNA, 58 bp, Homo sapiens
  chr11:12231069-12231127
  hypo
cctacagaccattctctgtcggagtttgagtttgacgtcatcattggtgccgatggcc

SEQ ID NO: 29726 - DNA, 258 bp, Homo sapiens
  chr11:12240017-12240275
  hypo
cgtccacgccaggcactgtcttcactgtgtaatgtcacccactccatcttagggatgcttgggtcatattttgaagggggggtgtttgagacctctcccttctctcttcccccatctcacctccacgccttcggagagagaagtgatcatgtgaccgcggaaacagggatcagaaaggaaatcaaataacaggaattccatcctggacactggggcctgacaaagagctcttggaccagtgctggatgcaatttgggc

SEQ ID NO: 29727 - DNA, 251 bp, Homo sapiens
  chr11:12247662-12247913
  hypo
cgccacacctctgcctcctctccctgaatttctctgctttgttttgattctctagcaactttgactctttgaatgaagatgatgctgtggagaacaaccagctcgcatttgatgtggccgagcgagagtttgggatccctccagtgaccacgggcaaagagatggcatctgcccaggagcctgacaagctcagcatggtcatgtacctctccaagttctacgagctcttccggggcaccccactgaggccc

SEQ ID NO: 29728 - DNA, 264 bp, Homo sapiens
  chr11:12248553-12248817
  hypo
cgctttatttcccaacagattcttggcgcaaaaactatggagaaaatgctgacctcagcttggccaaatcatccatttctaataactatctcaacctcacatttccaaggaagaggactccacgggtaagttttggcctggtttcggttttatttcccattgcacatggacggggtatgaggaacggagattgtcacattctcagcctgttgaggctagtaagttacatggatcaggcgctcccggaagatgctagtaaaactc

SEQ ID NO: 29729 - DNA, 97 bp, Homo sapiens
  chr11:12262569-12262666
  hypo
cgcctttcttctcccaggaacgccgtgtctcagggataggtaagccggtcctgtgctcttcctccggccctcctgttcactcttgctgccccaagcc

SEQ ID NO: 29730 - DNA, 180 bp, Homo sapiens
  chr11:12267687-12267867
  hypo
cgggcattagatccttctaagagacggcagggagcagcctgctggaaacatgcagagctgctgggtaagacagagatgctgtcagccactaagcgtgtccccatcacatcagcatcacaccggctgaggccctgcctgctgctgtctctggctcttcaggcagccctcccctgaggactc

SEQ ID NO: 29731 - DNA, 352 bp, Homo sapiens
  chr11:12278228-12278580
  hypo
cgaggtccccagcattcagtgtggaatttctaaaagccttggcctggcatttgaaggctcgggataagccataatacacccactcttctctcccgatccccaggaatctatgcgaaagtcatttccccttaacctgggaggcagcgacacgtgttacttctgtaagaaacgtgtgtacgtgatggaacggctgagcgccgagggccacttcttccaccgggagtgtttccgctgcagcatctgtgccaccaccttgcgcctggccgcctacacctttgactgcgatgaaggtaaccccaggggccagggcagcactgggctctggccttggcctcaggtgtgaccttggctc

SEQ ID NO: 29732 - DNA, 141 bp, Homo sapiens
  chr11:12279396-12279537
  hypo
cgcacagtggtcctgggcagtggcagtttcccagtgcgtgccccgtctgggtcttttcctccccatcactgctgccatttgctctcagcatttcccacccgccaggtattccacaaagaaagactgagggtgttcatactc

SEQ ID NO: 29733 - DNA, 301 bp, Homo sapiens
  chr11:12281112-12281413
  hypo
cgatcaaaaggcatgcatatttttgaaggctcgtgactcctatggtcagttggcccctagaaaagtgcccgtgttcagcaccggcttcagcatgagtcggggggctgagattattgtgggggctggttgcagggtctggcgagttcagtttgtattggctgttggctttgttgaagtagtcctctggaagacttacagacaaatgccctcatttccatctctttctcaggaggaggcaacatggcaagagcaggaagcccctcggagagacactcccaccgaaagttcttgcgcagtggcc

SEQ ID NO: 29734 - DNA, 434 bp, Homo sapiens
  chr11:12283321-12283755
  hypo
cgcctctgtccttgttggcactgttctcagtccgatgacttgcattgtgttttctccaatttttgctgggattttaatgttcagcatggtgggaggaacccttgattccttttgtttgagtatagaaagtaaatttttgaggtcatgatgtgaacggccatgttattgtgattatcttcagctcaggataggctgagatgctttgtggagtgttccatgaagcccgagtcggaatctctgactgtcgtgtacagccataaggagactggtttgaattactgtggcgagacagggcgtgcctgtcagaaatctgagatgtttgtacgctctgagatgttgaacctttctggtgggcagcaccgacacccaggggtggacccccgaggatgaatgcctctaggcctccgcaacatattcaagaatgaatgggagac

SEQ ID NO: 29735 - DNA, 366 bp, Homo sapiens
  chr11:12284011-12284377
  hypo
cgccatggccatcagttcatttcagccttccagtgctacacccacttcttggctgacacacttctgctctaaggtgactggttttcttgccaattttcaaagagtggtactaacccccaacccgctttccgcaccccgtcctctccgccagcagtactggttgcactaactgtgagtgtcttgcatactgatggactcatttggtggcatggttggctaacagcatggcggggggtgttcagcttgagacccatgcctgtgttcatttcccatggagctggcagcctggtctaccccaagtgcatgccccgcctctcctctctcccttgggtctgcctgcgtgcatgcttctccagttgcgtctgc

SEQ ID NO: 29736 - DNA, 268 bp, Homo sapiens
  chr11:124794665-124794933
  hypo
cgtcggtgatggagatctcgacctcataggtgccctcatcggccagctgcaggtcgctgagaagcagggagccattttcaaagagtcggatacggtctcgatagtcaggccgcagggtgccgatgacctctgtgccaatggactgcaccacggtcactggcttgtcccgcttcagctgccacttcactacaggcctgtcgctgctggtactgctgtactgcacagaaagcagagccgacttccccacggtgccatggatcaggcgcac

SEQ ID NO: 29737 - DNA, 400 bp, Homo sapiens
  chr11:125817639-125818039
  hypo
cgaggtggctccgtggagctggcctgtggctcagggcctgccccgctgctggtcctctggagcttcacccccctgggctccctggttccccggcctgtggccgtcaccgatggagccatgtccaaggtggaggccatcgcctcggctctgggagtcgtgagtctgaggaacagcagcctggtgctgggggagcttcacgagggtgcccgtggccacttcctatgccaggttctgcacgtggctggcggccagctccacgctgcctactcccacctcacgctggctgtgctgggtgagggcctggccccagctgcagctggtccgcgggctgctttggatttctctggaagtgtgctgcccattccctttgtgtgtgtgcgggacccaggttctaaagggc

SEQ ID NO: 29738 - DNA, 168 bp, Homo sapiens
  chr11:125971144-125971312
  hypo
cgagggccacagcggggcagttgggcacagacagcttggggatgtgcggctcccccaaggcggggctgggatatcaaagttggaagcgcgggggcatgtcagcctggctttgtgagtggggctcccatcagtgcatgaaagccttgctctacaaactgcattcgctgc

SEQ ID NO: 29739 - DNA, 720 bp, Homo sapiens
  chr11:133790547-133791267
  hypo
cgtgctgttggatgcattctctccattctcctcggggatggtggggtggccaaagggcccctcggtgggcaggggcggggacgacatgacggagctcagggggctgcccacttctggcacgtagaacgggggcggctccacctccccagggctgctgctgctgaggtacccataatactggccatggtggaagggccggggggcagggggccgggcctggcctgtggcctgaagccgaccttccaggccaccggggccctccagcccgcggggctggaaccgagggctgtatgctggtggtggcaggtaggactcctggctggatgacagaggggtgagctgggacttcagggcggccacagatgtgggcaccagtgggtcctcgttctcctcgtccgactggcggaactcggggtacatgtccgtctcctcggcgaaggggaagccctcgatgcgcctgctcttcagcgagggctccatctcggcagggtccatcacgaagcggccgtcagggcctctgctgatgagctcgatgggcgtggtggcctctgcctcggcctctgccttggccacgctgtacttcttgctgctgatggcccgcttggtcttcttgtacagcgacagctccttctcacgggtggggctcagcatcctcttggccgcgggctggccctggtcgtcggaggattctgacggcgctcggagcgtgcggatgctctc

SEQ ID NO: 29740 - DNA, 176 bp, Homo sapiens
  chr11:134608740-134608916
  hypo
ctgtgtgtctctctgtgcgtgtctgtgtgagtccgtgtgtctctccgtgagtgtctgtgcgagcctgtgtgtctctccgtgcatgtctgtgtgagtctgtgtgtctctccgtgcgtgtctgtgtgagtctgtgtgtctctccctgcgtgtctgtgtgaatctatgtctttctgtgc

SEQ ID NO: 29741 - DNA, 182 bp, Homo sapiens
  chr11:1446149-1446331
  hypo
cgggaggggtgttctccccgcctccatgggcaaagaatctggggcccttgtcagagaccgcggggtcagtgggattggcgcccaggccctgctgtgacgccacgtgtttcccactcagcgaggctgttcctgccaggcgtggggactcggaccctggtcctgagtgctgccccgaggcccgt

SEQ ID NO: 29742 - DNA, 50 bp, Homo sapiens
  chr11:1446400-1446450
  hypo
gagtctcagctccccgggtcatcagtccaagccactcagcaggtggcttc

SEQ ID NO: 29743 - DNA, 189 bp, Homo sapiens
  chr11:1795707-1795896
  hypo
cggcgcccaggaagggatgcgaatgtacatggactacccgtgcaaatgcttatggtgaaatgttctgtgtcaacttggctgggccacagtatccagatatttgcaaacgctagtctagatgtttccgtgaaggtgtttttcagaggtgattctcattcccatttaaatccgtagactttgagtaaagcc

SEQ ID NO: 29744 - DNA, 150 bp, Homo sapiens
  chr11:1800836-1800986
  hypo
cgtgggacatgctatagcccctcactcgctcaccccactgagtttgcagggactgcgcccctctctgggcgacacctaacacgggagagtgcaagctgggcagacggaaagggggttctcggggtccgtggctccccctgctccttgtgc

SEQ ID NO: 29745 - DNA, 400 bp, Homo sapiens
  chr11:1824649-1825049
  hypo
cgccgtggccacctcctgcttgaagtccagggcaacatagcacagcttctccttaatgtcacacgtgatcgcccgctcggccgtggtggtgaagccgtagccatgcgcagtgagatctttgtgaggtagtcagtctggtcccggccagccgggtccagacacaggatggcatgggggagggtgtagccctcatagatggacactgtgcaggtgaccccgtcgctggagttcatcatgatgccagtggtatggccaggagtgtacttggacagcacggcctggatggccacgtacatggccgaggtgttgaaggtctcaaacatgatctgggtcatcttctttctattggctttggggctcgggaggcctcggtcagcagcaccgggtgctcccgcagctc

SEQ ID NO: 29746 - DNA, 282 bp, Homo sapiens
  chr11:2026733-2027015
  hypo
cgggtacggcacgtcacctggatagggacacgggtacggcacgtcacccgggtgggacacgggtacggcacgtcacccgggtgggacacgggtacggcacgtcacccgggtgggacacgggtacggcacgtcacccgggtgggacacgggtacggcacgtcacccgggtgggacacgggtacggcacgtcacccgggtgggacacgggtacggcacgtcacccgggtgggacacgggtacggcacgtcacctggatagggacacgggtacggcacatcatgc

SEQ ID NO: 29747 - DNA, 39 bp, Homo sapiens
  chr11:2108016-2108055
  hypo
cgaggaatgcacgtcagaaccagtaggacagctgccatc

SEQ ID NO: 29748 - DNA, 64 bp, Homo sapiens
  chr11:2108109-2108173
  hypo
tgctggggatgggccgtggtgccaacgctatggggccgtgggctcctcacacatgtaaacctac

SEQ ID NO: 29749 - DNA, 331 bp, Homo sapiens
  chr11:2117541-2117872
  hypo
cgtgcacacagggaccacgcacgtgcacccatgtacacacgcacctgcacacatgcacatacatgcttgcacatacgtacgcacgccagcatgcacatcacacacagggcctcagggtaaccttttccccagtcccggctgtgatattgcgaaaggagctcagggtggggggcgggctgctgggtccaggcccccaccgtcctgcctagcagtcatttggtttctctttgcctcagtttccctttctctgcccctcacacctcccaaagtcctttggagaatccgtgagatgggggggtgacaggccctgtatgtcagcacacacagccac

SEQ ID NO: 29750 - DNA, 42 bp, Homo sapiens
  chr11:2122493-2122535
  hypo
gctgggtccctggactcaccaccttccctcactggacccctc

SEQ ID NO: 29751 - DNA, 450 bp, Homo sapiens
  chr11:2124971-2125421
  hypo
cgagggccgtcctgtgcgtgctccactccaaatcccatctgctcccacactgctggcccagggaaaatctgggtagtgacagtggccgtccctcacgccctccatggccaggtgccagtagcgtgttccacaagcatcaccttcgaaaccctgaaggagtcaggactgtcgctgttccagacaaggagactgaggatgagtctccattaagtggctttcccgcagacacacagtaagtggcacaagagtcaggagtttgagcccgggtcagcccagctccagccatggtcgcaggggctgcctgcaacccctgacgaggggcaccccggggaggcctggacccagcacctgcagcccaacctgggcagaggctgatccagcagctaggaagggcatgggtccaggagatggcagagcagggaacagagcgctgccgctcagggtactccc

SEQ ID NO: 29752 - DNA, 339 bp, Homo sapiens
  chr11:2334660-2334999
  hypo
cggccattgtgtgaaggccccatcgttgatgttgggaagcactgtgactggctgcccagggacccaggttccgctttggggagatccacctgctacaaggagggcagtgctgggacgtcactcagcactaagggcccactagcgtttgggatgtcgtggggagggggctgtgtccccggatctcccaccagggccaggacctccctgtggtctctcggtgcaggtggaggacgccatgctggacacctacgacctggtatatgagcaggcgatgaaaggtacgtcccacgtccggcggcaggagctggcggccatccaggacgtggtgagcgtggggac

SEQ ID NO: 29753 - DNA, 380 bp, Homo sapiens
  chr11:2337172-2337552
  hypo
cgtgtggcccaacatggacgctcaggacagctgggagacggcaccggccgggcccagggcagtgccagagtgcccacagaggccagccctgtcccactgggcttcacctgctcgtgctgcctttccctagagccctgggggcttcctaggaatgtgccgcacccgccgccctgctgccctggcattggcctaggtgggcgctgcagctccatggccccacagaggccgcttgtccaggcagggagggccgctcagggcgggtaccatgcctgctgccctctcacaggactgccttcagggcatccggagcttcctgaggacacaccagcaggtcgcctccagcctgaccagcatcggcctggccctcacggtaccctctc

SEQ ID NO: 29754 - DNA, 174 bp, Homo sapiens
  chr11:2362566-2362740
  hypo
cggttaaaacggattaaatatcccgttcgcactttaagcaaaagtgaccattaagcttgtgggcgcggtaggccagaggctcaggatgcctcctttccactgggacggtcctcaaatcaagcggacatggagtgcgtggtagctcttttcgaagattccaccacctggaataac

SEQ ID NO: 29755 - DNA, 558 bp, Homo sapiens
  chr11:2412921-2413479
  hypo
cggggccgtggtgccctcacaggtggtgtcaggaaggacgggaaaggctgcttgtcccaggggctcatgtggagaccaccccctgcacgcagctggggcgctcctgcctgtgtcctcagaagcactcggcttagctttgcccatgtgcctgggctgtgggtggcagagcccggccagcatcctccgatctccaagggtgcatctctactggaggcccctcctgggcctcttgctccccgcttcccagatcattaggatatttggggtccagaagggcctcccagccatcctgggccttgtcctccggggccaccagtccagccagtgacaaccacagcatccccggcctggaacgaggctgcccccagcacgttcctcgtactcctgtccagggacaggaggggctgcccctgccaccgagtccccttctccaggacctggggcctgtgggtgtgaggcaggtgttcttggaaggggtcactctccaggcacccggcggccaaggcttgtggctggagcagctcccgctgtggggtcggcgtcgggccccgtgtggcc

SEQ ID NO: 29756 - DNA, 559 bp, Homo sapiens
  chr11:2435414-2435973
  hypo
ctgtagcactcggagaagaggtctgcccccggaggccctggccgctaggacgagacgccgatgcccggcccggcccccgacgcccctcctccatcccctgcccagacctgggctctgcagccgcaccctgcgttcaacacgcagggcccagccaggccttctgccccctccggcctgctccgggcccttcctgaacctccgtccttctccggctctgtccctcccccagcaggacaaagggaacctctgccacgctaaatgtccctcgtcctgcggcagggcccagtgtatgcccggggtgtgaggctgtatcgtcctcaccacgtgcacagcggtcccacactcagggtctggggccgcctccaccccaggcagagccgtctgtcctctcctatggaggaggcccctgagggcacctggagccccacggcggtaacaggcagccctggcgaggcccaggacccttcgtccgacccctccgtcacatcctcccccgcgcgcgggcccggccccagccgccggtcactcaccaagggccagccgctcgtatttcgcctcg

SEQ ID NO: 29757 - DNA, 408 bp, Homo sapiens
  chr11:2436014-2436422
  hypo
catctctttgaggattttgcaggcggccagtgcggctgccacaccttcctggccctacgagacctggtctcaggaggccgcccctcccctgcccccgcgctgggcccgcggcctgggctcaccatggcccagaagtaggtggccatctcgtggcggttctgcagcacggcccacaggaacaggtcccgccaggggttctcgctcttctggttcaggtccagcagccacttctggcccgtgggccgcttggccgggcccttctcctggaggacacgggcgtcggcctcctgctgcggccccagcctcgccctccatccccacggagcccccgctcaccgccctcctgcggtcccctggccggccgtcctggtagaagcctcggcaggcgtcctgcaggaagtccttgag

SEQ ID NO: 29758 - DNA, 136 bp, Homo sapiens
  chr11:2436611-2436747
  hypo
cacgtctgcgccgttgtccacaaagaggcgcacaaactcgggcttgttgctgaccagggcgtccaccatcacctcctccaggtcacaggacttggcggccatgggcacccgagggaagggggacaagagagtgagc

SEQ ID NO: 29759 - DNA, 716 bp, Homo sapiens
  chr11:3243313-3244029
  hypo
cgcacagagggagaccggctgcctgggtccctcctggctgcctcaccatcaggggcgggatgaggagctcagcctcagccacagtgcgcaaggtgaagagttttgatccctcgtacatcctcgagccaggcagggcgcccggcttctatcccaggtagcagagtctcctatcccaggtctccgacggcgaccgcaaccctttgcccgtggaggacttcccctgtctaagggccattgggagtgggatggcctaatttctggggtcgctttctattgggcacttcaaacagtgctgggcaagggcagtcgtttgaggcagcttggagtgaagttcttagggaggaggtcctgcgcagctcggccagccccggtcaggcccaggcagccaccaaccctggtttctccatcacccctgacccctcccacagccccttctcgtgtttgcccaccgtctaggccatgcttccactttctcacctggctgggtatcccctatggggcacgggtgtcggccccgccgaggctgggctttggtctgtcttgttctctctgggaggggtctggtgcgggtggaatacgtggagggagcctccgtggggggagcaactgctcccggtgttgcaaggaggacagagccaatgcccgccccatcgtgtcatggccgacggtggcctcagaagatgtgtccacgtccccagtcgctggaagctgtgcac

SEQ ID NO: 29760 - DNA, 142 bp, Homo sapiens
  chr11:44608911-44609053
  hypo
cggggccccgccggccacacggggagcctggatttaaagtgagtatgtcttcagccacattgcctttggagagtcacagacaggagtgacgagatctgggtcgtgtttttcagagtcctccctgctgctgtgtggacgacac

SEQ ID NO: 29761 - DNA, 151 bp, Homo sapiens
  chr11:44621715-44621866
  hypo
cgcagtgatcctgggcttcggggtgtggatcctggccgacaagagcagtttcatctctgtcctgcgtaaggacccctcagcttccccagacccaggcccactgaagaggggagggccagggcgcagatacagctgctcccataagtgcttc

SEQ ID NO: 29762 - DNA, 237 bp, Homo sapiens
  chr11:44625100-44625337
  hypo
cgggttgtaacggactcaagcatctgcatccctaagaggctcctctgatccacactactctccagccttctggagacgccagcaccctcgccctccaggtgcgtcccatgccctgggggtacagtgtacccatgctggtgagttagagatgacatgagctttaccctgtgtgatgggttgggtgtcttaggaaatgttggccaagtgcccctgcaggactcctgacctctacctccc

SEQ ID NO: 29763 - DNA, 457 bp, Homo sapiens
  chr11:44639755-44640212
  hypo
cgctgagctcatgaatcgccctgaggtcacctacccctgttcctgcgaagtcaagggggaagaggacaacagcctttctgtgaggaagggcttctgcgaggcccccggcaacaggacccagagtggcaaccaccctgaggactggcctgtgtaccaggaggtgtgcggggggctgcggatcgggggcggggctccgagggcgttgggggccatctgggctactgctcagcaattccttcctgcatttagttccttcccttaattcatctgtcatttgtaccttcatctacttctttgttaatgtatttattcaaggaacaggcagagccctctgtaggggcttccgggctgggactggggggctctcggtggttctgcatggcggggtgggatggtgcagagcggggtgatgtgaccgcattctgcccttgcagggctgcatggagaaggtgcaggc

SEQ ID NO: 29764 - DNA, 495 bp, Homo sapiens
  chr11:44640545-44641040
  hypo
cgtctgaggccgggacacccagcctccctctgactctccgcctctccccacagctcctggggatggtcctgtccatctgcttgtgccggcacgtccattccgaagactacagcaaggtccccaagtactgaggcagctgctatccccatctccctgcctggcccccaacctcagggctcccaggggtctccctggctccctcctccaggcctgcctcccacttcactgcgaagaccctcttgcccatcctgactgaaagtagggggctttctggggcctagcgatctctcctggcctatccgctgccagccttgagccctggctgttctgtggttcctctgctcaccgcccatcagggttctcttagcaactcagagaaaaatgctccccacagcgtccctggcgcaggtgggctggacttctacctgccctcaagggtgtgtatattgtataggggcaactgtatgaaaaattggggaggagggggccgggcgc

SEQ ID NO: 29765 - DNA, 541 bp, Homo sapiens
  chr11:46337908-46338449
  hypo
cgccacccagactgggacctgcctcatggtaggtgtggctccctccaccacagacccacaggaggagagttcttcccaaggctggctttttccagggttgggcagagctttaaggatcggtaacatcgtgggcagcgtcccagggtacaccatcctggcgcctggtgggctggttctagcagactccagactccttctccaagcccatggtgccttctgcctcacaccggtccccgactggttaacacagtgtagatgtgtaggtgactccagtggccccagctaggggacagctgggcaggttccttgaggaggcggcttccacaggccttgtgcagggaagggcttggggagactcagggaagaacggacatggttctttctggaacagatggcagtgaaaaggctgaggaaacccctggaaacccggaaggctcccagggcgtgtttcagacctcttccagtccctcttctatcttcttctggaaatggccagtctcttgccgcctggctcagcatgccccggccctccgagaccctc

SEQ ID NO: 29766 - DNA, 365 bp, Homo sapiens
  chr11:57182515-57182880
  hypo
cgccgagagaaagcgtagctccagaaggagcggagttcctgcttctgccctgcccctggggtctctaatggggagaggaggatctgggcgtgaattacgaggaaagtggacaggtaggatggggagtgtggaggcttcaatggaacatttcagatccgggcccaccttctacccttggctcccagaactcacccggcgtgctctgcacctgcctcggactcacacatccccacctccctgctttgtcatgctggccctaccaccttggatgaccctctgtgttcttctctattgaaatccgatctgtctctcacagcctggtcaatgacacttcttgcagtaataccttcctgatctttctcagc

SEQ ID NO: 29767 - DNA, 233 bp, Homo sapiens
  chr11:57188507-57188740
  hypo
cgaacggtgttggccaaataggttcccaatctggggatgataggactagcctggatcacttatttattcatgaaacagatacttcctgagcacccagcatgtggcagaccctccttatacccaaactcaccctccaccgctagagctcccacctcagcttgggccaaccccatctgaggcagccaattatagaaaagggtctctccttccctccaccttcccgccaccctgcc

SEQ ID NO: 29768 - DNA, 169 bp, Homo sapiens
  chr11:61490202-61490371
  hypo
cgctgcctctgcctttgctactgagctggctgaaagcccagcgataggaaaggccaggccggggttctaggcccttccctggcatgcaagtggcagccatccttcagccaggcctgctctccttgcagccatcctggtgatcgagttcatctacgccatcgtgggcatc

SEQ ID NO: 29769 - DNA, 591 bp, Homo sapiens
  chr11:61511518-61512109
  hypo
cgctgcacaatgggcgcctgggggactcgcccagtcctcaggtgctggaattcgccgagttcatcgacagcctcttcaacctggacagcaagagcagctccttccaagacctctactgcatggtggtgcccgagagccccaccagtgactacgctgagggccccaagtcccccagccagcaagagatcctgctccgtgcccagttcgagcccaacctggtgcccaagcccccacggctctttgccggctcagccgacccctcctcgggcatctcactctcgccctccttcccgctcagctcctcgggtgagctcatggacctgacgcccacgggcctcagtagccaggaatgcctggcggctgacaagatccggacttctacccccactggccacggagccagccccgccaagcaagatgagctggtcatctcagcacgctagcaccccagttgcgtggccagccgggcccaggcaggagcaggtggccctgtgggcacctggtgcctgccccctgccgggcagctttaaggacagacccccaggggcagtttagcctcaggcacaggcatcgctgctgagctgggggtcc

SEQ ID NO: 29770 - DNA, 309 bp, Homo sapiens
  chr11:61640585-61640894
  hypo
cgctgcgcggggccctttcaggccccccatcatggagggctgtgggaggccagtgcaggtcaagaggcacaaccgtctttcccagtccatgtccagaagcgtccgcagacatggcccccagccctgggtcctcatctgctgggcccgctcatcccaccatgcagaagcgtcaagtgacttgaagcccagcatgaataggaagtgaataggccctcgggcaggtccgagtccaggcatccctgggctcccaggcccagggcatctagagctaaagggagctccttagcgctccccctcaaccccgccgcc

SEQ ID NO: 29771 - DNA, 200 bp, Homo sapiens
  chr11:61668820-61669020
  hypo
cggcaggggagggtgggagctgggattcctagaggccccttggcactcacggccgacttaaggctggtgcaccagacgcaccgctgaaccttttccaaagcttcggccagcacctgagtctgggcgtcaggagccccgcactctaactggaactctagcatcactcctggattaggtgacattgaatgacagaggggggc

SEQ ID NO: 29772 - DNA, 214 bp, Homo sapiens
  chr11:61672924-61673138
  hypo
cggccaggccggctcgtaggtgaggtgaaccgccttgctggggaccacgcagaggagcagggagagcagcggggccagcccgggctgggccggatggacagacagacagacagacagacaggtagacaggtgcacagagacagaacaggaggaaggggagaagttaatgtacattcagaagctcagagctcaggaggtggatgagggcctgctc

SEQ ID NO: 29773 - DNA, 371 bp, Homo sapiens
  chr11:61673908-61674279
  hypo
cgtgcccagagcccgcttcccaccctcacctccttgccctctctgtctggggtgagggtgtgtcccgcagcgggacacacggcggggcagagggtgctgctggtgctcttgtggcgagagtggccctttcggggcccggccttggtggggctcagcagctgggggtgaagctcgcggttgggagaggctggtgtggacgtgatgaccagcgtcttcaaggctgtcacctctgcctgcagcatgtcgatctgcatgggatgggatggctgtcaaccctcacccagactggatgccatcctggctgccaccgcctatcagcctaactcaggacaatgcacccctgcagtgacaggcacttagtcccacccgac

SEQ ID NO: 29774 - DNA, 97 bp, Homo sapiens
  chr11:61674760-61674857
  hypo
cgggccaggtgagcgtccactcgggcagcaaagctcagtgctcgctgagccgggaggcagggggggtgcctgggctggcctgggcaggcggggatgg

SEQ ID NO: 29775 - DNA, 85 bp, Homo sapiens
  chr11:61675100-61675185
  hypo
cgctcacattcctcgtcctttagcttcagctcctggaggaaaagaggcaggcacttgagcacctcagcatccccaggcctggcac

SEQ ID NO: 29776 - DNA, 180 bp, Homo sapiens
  chr11:64323500-64323680
  hypo
cggaggcgtgggcctcttccagaccctgcaggtgctcaccttcatcctcccctgcctcatgataccttcccagatgctcctggagaacttctcagccgccatcccaggccaccgatgctggacacacatgctggacaatggctctgcggtttccacaaacatgacccccaaggcccttct

SEQ ID NO: 29777 - DNA, 322 bp, Homo sapiens
  chr11:64323741-64324063
  hypo
ccacagtggcagctcttggaccccaatgccacggccaccagctggagcgaagctgacacggagccgtgtgtggacggctgggtctatgaccgcagcgtcttcacctccaccatcgtggccaaggtagggcctcccccagagccactcgagtcccgtcaccttggaggtcagagtcatggatcaggttggttggactccaaggtccagtcctgggagggacccgcctcctctcgagcctctcagcccctcgtcagccacacacaggggagtgggcggcagggatcagtctacagatggggccagcccaggctcctggtagtgc

SEQ ID NO: 29778 - DNA, 328 bp, Homo sapiens
  chr11:66655218-66655546
  hypo
cgcctggagtgatgccaaaagtcccactcagaagaaagatcagtttgggatgccaaaagagacctcccactctctttcagtttgggaggtcaaaaatccaacatcactttcacaggccgaaaccaagtgagggcagggctgcgcccctccgagggcctgcaacgaatccctcccgagtcttttccagcctctatggctgccgggctcctttgctcgtggccacatcactcccacctctggctctgtctccacatcgccttctcctcagcataggtctctgtcctctaaggacacttgtgatggcattcggggcccacctggatgatcc

SEQ ID NO: 29779 - DNA, 250 bp, Homo sapiens
  chr11:67432668-67432918
  hypo
cgagtccagactcgtggcccagccgtgggccctccattgagaaagggtcttggcccaggtgggctgcggtagggcagcaggactcaccgatgtagcgatcgctctcgttgctctggcccccaatggccacgcggctgcagcccagcaatgcccgcagccgctggaactgtttctggttgatgatgtggcccaggtttggggagctctgggggtcgtcgccatagaaacgggtgatggtgctctgcagggc

SEQ ID NO: 29780 - DNA, 134 bp, Homo sapiens
  chr11:68772692-68772826
  hypo
cgaagggtcttggaggccgcttcctgcccctgcctcctccaggcgctggagtctcaggaggcgttccccgggggacactgcatctccatggtgactgtgttgggcgtgctgcccccggcctcccccagctcagc

SEQ ID NO: 29781 - DNA, 267 bp, Homo sapiens
  chr11:69931095-69931362
  hypo
cgagatgacatacctgggccgagaaacagcgtcacccttagtcgcggctcctactaaggggggccgcaccttgggcgtgcagatgggacttgaggctgagctcagcctcccgcctgcgctgtaacccgggctctcctgccctgctgggcctcagtttcctccttggcgaattgagaagaatagctctttcgtgcttctcctgcagaaggaatgcaggccccccgtgctggctacagacttgcgatactggggtcttccgtgaacccc

SEQ ID NO: 29782 - DNA, 476 bp, Homo sapiens
  chr11:69946965-69947441
  hypo
cgttcgttcattccataaatatgtgcaaagcggctgctctgagccttccgtgggcagcagggcagcacagaggaggcctgagcggtggtgctggggagaggatggcgtagggcaggcctcgtggacgcagccgggggcctcaccatcagcataagcgaccacggtgggcttcagaaggagcgatgagacaggattcaccccattgccatttgcttttctatcggatcaggaagaagcatgggatgaagctggggtgtcaaggagggtctcccttcctcggtggtcacctgaggtgctggggccccacctttaactctctctgctggacctggaagctttgcccaggtccctgggaccgtcgcgttcacaggcttccaccgaggctctcgctgggtacattgacttgacccacttcagattttgttttcttaaaactcatccccaagtacactttgggaggccgaggcaggcagatc

SEQ ID NO: 29783 - DNA, 422 bp, Homo sapiens
  chr11:69962357-69962779
  hypo
cggccaacagggacgtgcacggcctttctatcataacgggggcacacctgggcaaccctcacactctgtgtgaaatgttgccccaggatgatcttaatttgtgtcaacgagagctgctggggtttatgttttgaaacataatggatgtgagcgcctccaaagctccattggatgataagaacgtccctttcctctttttttaacagggagactacaacggtgaaaacgtcgagttcaacgacagaaaagtaagttgatggagcggagcaggaggtggctctgtcagagcctggaggcgttctggggcggggtgggcctgcagctggaccgaggacttaccggcctccagggcctccccagggcgctcgctgcagggggctgagaagcgggtgtcccctctcaccttttcaggagaaaagtcc

SEQ ID NO: 29784 - DNA, 540 bp, Homo sapiens
  chr11:69982802-69983342
  hypo
cgctcagctccaccacacgagggtgtgggcagagcagtgtgagggacaggtcttgctttcccgggattccagtcacaggtggggacagacacgcacagaaatcagcatagcctcgagataaatgcagttgtttctcttcgtggacaaaggcgttcgattttccagaggaggccaagaatgggagccgtgggtccgtagcttggtgtagggcgtgagttccagtggtgagcagtgagacacgctgagctgggctggccagggagggggtgagcgccccgtgctgggaagcattcaagctgaggttggaggacttcttgctggggcaactgcagagcattgggaggtgatgtctatgtgtgatccaaggccacgtggcttattgggaagattcccaggcctacaacccagctctggtttttaatttggggatcaaaatgtatcgtaaatttagaattataaatgtagggtcagcagcagtctgtcaccgctgaagcacacgtgccagagctcccgttgtttatcacactgtatccgaacagc

SEQ ID NO: 29785 - DNA, 206 bp, Homo sapiens
  chr11:70016958-70017164
  hypo
cggggtgctgactagcactgggctctctctgcagtcatccagtttggcttcgtcaccctgtttgtcgcctccttccccctggccccactgtttgcgctgctgaacaacatcatcgagatccgcctggacgccaaaaagtttgtcactgagctccgaaggccggtagctgtcagagccaaagacatcggtgagtgaccccacgggcc

SEQ ID NO: 29786 - DNA, 196 bp, Homo sapiens
  chr11:70028548-70028744
  hypo
cggccggcccttctgcgcccaggctgggggtccccctcactgccatgtcccctgcacaggccttcgtgatctccttcacgtctgacttcatcccgcgcctggtgtacctctacatgtacagtaagaacgggaccatgcacggcttcgtcaaccacaccctctcctccttcaacgtcagtgacttccagaacggcac

SEQ ID NO: 29787 - DNA, 297 bp, Homo sapiens
  chr11:70031529-70031826
  hypo
cgtgggtgcggggccatgggctgctcgcccaagagagggctgccctcccggaggcagccgcacaccaagctgagcctctcccaggcgtccctcgagctgcctgactccagccagagcctgagccccaccgaagtcccaccctcgactccaccacggtcttttgcaggtataaagactaccgagagccgccgtggtcggaaaacaagtacgacatctccaaggacttctgggccgtcctggcagcccggctggcgtttgtcatcgtcttccaggtgcggtgggtccctctttgtttcc

SEQ ID NO: 29788 - DNA, 202 bp, Homo sapiens
  chr11:73063854-73064056
  hypo
cgaccctgtgggtccttcagggctacatgcagccgctgaagcagccagagaactccgtgctctgtgacccttcactggtggacgagatcttcgaccagatccccgagctcctggagcaccacgagcaattcctggagcaggttcggcactgcatgcagacctggcatgcccagcagaaggtgggagccctgctcgtccagtc

SEQ ID NO: 29789 - DNA, 233 bp, Homo sapiens
  chr11:74994376-74994609
  hypo
cgttcctgcagccgcgtcaggggcttcttgtcctcgggggccggtgggaacgactgtacgttggccacaaacaggtccttgcgaaaggtcaggcccaggacatccaggtcctcccggccatagcggaaggcgcaggtcagcgtcacatagactgtggggagcgaggagcactgaggaggggcctgggagagcagcaagcgagccccccagagtgccggcagcagccctgggac

SEQ ID NO: 29790 - DNA, 58 bp, Homo sapiens
  chr11:85906179-85906237
  hypo
cggccaccgagggggtcggggaggctgcgcaaggcggtgagccccggcagctggagca

SEQ ID NO: 29791 - DNA, 208 bp, Homo sapiens
  chr11:85906275-85906483
  hypo
agcacgaggaagagatggcagcagaggctggggaagccgtggcgtcccccatggacgacgggtttctgagcctggattcgccctcctatgtcccgtacagggacagaacagaatgggctgatacagatccagtgccgcagaatgatggccccaatcccgtggtccagatcatttatagtgacaaatttagagatgtttgattacttcc

SEQ ID NO: 29792 - DNA, 99 bp, Homo sapiens
  chr12:117531122-117531221
  hypo
gaaaccagcgccacccccaccagccacgcttggctacgccagtcctccctgccatctctagctccttctccaaatgagattagaccaggaatggaatcc

SEQ ID NO: 29793 - DNA, 230 bp, Homo sapiens
  chr12:129189650-129189880
  hypo
cgtggctgcagttcagtgatggctctgtgacgcccctggacatctacgacaccaaggacttctccctggcagccacctcccaggacgaggctgtcgtgtcagtcccccagccccgctctcccaggtggcccgttgtggtggccgaaggggaaggccagggcccactgatccgagtggacatgacgatcgccgaggcctgccagaaatctaaacgcaagagcatcctggct

SEQ ID NO: 29794 - DNA, 206 bp, Homo sapiens
  chr12:129189909-129190115
  hypo
cggacagaacgatgctgactccagccccggcggggactatgaggaagatgagatcaagaaccacgccagcgaccgccggcagaagggccagcaccatgagcgcacaggccaagatgggcacctctatggcagctctcccgtggagcgtgaggaaggggctctccgaagagccactaccacggccaggtccctgctggacaacaaag

SEQ ID NO: 29795 - DNA, 63 bp, Homo sapiens
  chr12:129190144-129190207
  hypo
aggctggcaggagaggggcagctgcagaacatccccattgacttcaccaacttccctgcccac

SEQ ID NO: 29796 - DNA, 74 bp, Homo sapiens
  chr12:130909511-130909585
  hypo
cgaggggggggaagcatgcgtctactcaggccgggggcatgccgtggagggctctgcaatgaaaacagaatggg

SEQ ID NO: 29797 - DNA, 475 bp, Homo sapiens
  chr12:130909737-130910212
  hypo
agatggtgggtgtggccacggtgccaggggagactgcccgggggctacatcctcagaaaccctgagggcagctgccactggaggccgtgtgtgactggagacagttcaccagacacggagcctgacccgtccctgtccatccactgggccaacttcccttccagcgctcggcaccctctgcaggactttctagttaggctgacgtgtcacccttctccctaagatacaagctgcgtgaaaccacgccatccccggccccaccaacagcgcccgcacaccatcgtgcagagtctgtgtcagcaaaggactggggtccgcctgtctcctctgcatcctgcatcaagtccctgagagccacacttgagccatcacagtctccagtgggtggcacagagctggccacaccgggagctgcttaaccagaccagtgtccatgacttttatactgcccgtctgcacgccatcactctctgcc

SEQ ID NO: 29798 - DNA, 429 bp, Homo sapiens
  chr12:131095743-131096172
  hypo
cgggaaccgccgcagctcctggaactgcacattcccctcccatcccacgagctctgtccccacgtcccccagaccccacaggggaagcactcagtgcctgcctctccaggagccgccttctcctccctgatgattgacgtccctcccgtaaaggatctctttgagctacagcctccatcagacaatacgttgcaggatattgggggcccttttgtcttccactcccgcagaagccagggcacctggggccgcttcatttacccgcatctctgcccccgatcctccgctggaagacaccggctgccggctaccgggcttcgctgcaggtgtaagtggcagatgccaccatgctggcggcgacgcgtctcctgcggagaggatttacctccgtagcctgggctaggaccttcaggaggcctgcacagcctc

SEQ ID NO: 29799 - DNA, 454 bp, Homo sapiens
  chr12:1943616-1944070
  hypo
cggggctgagccggagccggagcccagcacagcctgcccacagaagcagaggcaccggccggcgagcgtgaggcgagccatgggcacggtgatcattgcaggggtcgtgtgcggcgtcgtctgcatcatgatggtggtggccgctgcctatggctgcatctacgcctccctcatggccaagtaccaccgggagctcaaaaagcgccagcccctgatgggggaccccgagggcgagcacgaggaccagaagcagatctcttctgtggcctgagcgcccatccccacccggccaggtaggaagggcggggagagcacacggcattgctcagccacagctcccaccttgacccggcgctggccactgcctccccgagtccaccctcctccccgccctccagcagacaagccacaccgggttctctccctgcactttcgaggctccctgaaagccacc

SEQ ID NO: 29800 - DNA, 155 bp, Homo sapiens
  chr12:1992067-1992222
  hypo
cgtggtcgtggttgatgaccatggggcggctgagcacgtgcaggtattccatcacgttctcctgggtgtccgccagcgttgagatctgcgtgtagtagcctgcggtggggaaggccgcgtgggtgtggaaggcagggcttccctgggaacccctc

SEQ ID NO: 29801 - DNA, 75 bp, Homo sapiens
  chr12:2023599-2023674
  hypo
cgcagaggccacagccctttcaccttctacggcccgagcagcttccagggccctgcacgtgccctccaagtctcc

SEQ ID NO: 29802 - DNA, 116 bp, Homo sapiens
  chr12:2613903-2614019
  hypo
cggatcctggcgctgcgtgggtcagtgtctcgggagccggggaccggcactggccgtgctcggttgctgagtgtgcctcactaactatcattccgttcttccaggtcaatgatgcc

SEQ ID NO: 29803 - DNA, 482 bp, Homo sapiens
  chr12:3103789-3104271
  hypo
cgctttgcttcctgagcaactgattcgggctctggcactccccggagtgccttcatcccgtggcccacgcagttcttccactgctcaccggggctgtggttcctgtccccacaggtccaacgagcgctcctccaagcggagccttggagggcacggccggcaccattacctccaacgagtggagctctcccacctcccctgaggggagcaccgcctctgggggcagtcaggcactggacaagcccatcgacaatgacgcagagggcgtgtggagcccggatattgagcagagtttccaggaggccctcgccatctacccgccctgtggcaggcgcaaaatcatcctgtcggacgagggcaagatgtatggtaaggagcccgtcgggttcagccctgtacctgaggctgaggcaaggggccgacaccagaaccttggggttcctgccgggccacagaaggggatgaccacttggggctttgtc

SEQ ID NO: 29804 - DNA, 144 bp, Homo sapiens
  chr12:53007462-53007606
  hypo
cggcctcaccttggtctggtacagggcctcggcctcggccttgctcttccgggcgatctcctcatactgggcacggacctcagcaatgatgctgtccaggtccaggttccggttgttgtccatggacaggatgatggacgtgtc

SEQ ID NO: 29805 - DNA, 617 bp, Homo sapiens
  chr13:106912373-106912990
  hypo
cgtcatcagaagacgcagaaacccacagagagcggaacagcctgcgaagacacagacgtggggaaggcgccctgcggccatggaggcgcagattgcggtgacaggactgcaggtcaggagcgccagtgtcctccaccgaagctcggagagagagcacggcccgcccccgtcagacttctggcctccagaaccgtgacagaattgattgtgttgatgtaagccacccgttttgtggcagttagctacagcaggcacaggaaaatgatacgggtgtgttaaatttgttacgtctactcccccctgagaagccagttttctgctctgaaccggagatccagaaggaccctccagggatgacctcccaactctttgcctagagatcggcaagcacgttgccggaggctctgtccagaacatccgctctgcggctcacttttcatggtcccacctgaggccacgtctgccgaagctgcctccgatgtcgctcacctgccatcgggagagtatgcagccttcccgcctgtgcctccttcatctccggctgctcgcatcccccaggcaccgcctcaaccccgtgagcacctccctaagtgagaggccctcctaaccggcctttc

SEQ ID NO: 29806 - DNA, 178 bp, Homo sapiens
  chr13:113797753-113797931
  hypo
cgcacacgcccagcacttgggttctcctgttggcatcctccggccagatgcattcatcccatttcgcccggcccgtttgtctctgtccatccgtcaagctttcttgacttcttggtgcattttcaggcaaaccgcagacgccaacactcccctcgctgcctgggttgctgcctggcgt

SEQ ID NO: 29807 - DNA, 112 bp, Homo sapiens
  chr13:113797960-113798072
  hypo
aggccaacgctcggacagctgcgctcacctgcagatccgacccctgccgacgacgtggggcctcgccctgcaagcccgctgcccctccgggtgcccctgcgctctgcctccc

SEQ ID NO: 29808 - DNA, 150 bp, Homo sapiens
  chr14:101134041-101134191
  hypo
cgaaatgtcctcggtcacccactcacgttccaggaggcaactgggccccgggaagcgaattctccaggcctcctgaggagcattcattagccacgcacacagatggagagcagcggcgcccgggaggccggaagcggcccctcgctgctc

SEQ ID NO: 29809 - DNA, 415 bp, Homo sapiens
  chr14:101489771-101490186
  hypo
cgctgtcttcggggaggaacggttggacccaccaccacttctccatgacacccgaagagatgattttctgtatggcatgtgtttttctgcatgatgcaaaatggcataatctcgctcctcttaaatcaagttctgccttgggaaatcgcgccatccctggggaggagaccttgattcttcccggaatcagtgccattccatggtgctcaatgacgtggttgactacgctacgcttattcagtagacaccgtgacctgcttcttctcagcgtcaaatgcagcctagaagaagcgccctcaggcaacttcgtggacatgagccttcttccagccaccaccaccaccatcgtgcggtacttgaagaaatggtttaccgtcccacatacattttgaatatgtatgtgggatggtaaacc

SEQ ID NO: 29810 - DNA, 495 bp, Homo sapiens
  chr14:102068306-102068801
  hypo
cgcgaggagcctggcacgggactggcgcttgtcagcccctcatgtgggtgtgcctgcatctgcgtccccacgtcgcacaggatagggcttatgcatggcctagcttgtcgtgtgaggttgactggcatgtcacaggcactgtcacagattctcagagcccaggagcacatcccctgaaggactcctcagccggggctgggctggaagcagggcctggagaaggtcagagaggccccgccctcctggcactcccagggcaggggacgcagcacagagcgggtgccggtcagccagggaggccgggacgggacgcagcacgaggagaacactgcgcaaggcaggcccgcagtcagtcaggacagctgcccagagtaggtggcgtttgggccaggcttcgcaagctgtgtgggggttcgcccagcagaagacgggagagggcgttccaggcagaaggctcagcatggcccaaagcacagaggcacggcaatgtccggc

SEQ ID NO: 29811 - DNA, 237 bp, Homo sapiens
  chr14:104618440-104618677
  hypo
cgtctgcgccacacacctgcagcagctcacacgggaggccatgcacctgctgcaggcccctgccagccatgaggaccttgacgccccccatggaggccccagcctcgcaccccccagcaccacgaccagctcgagggacacgccaggaccagcgggtcctgcagggaggcagccaggacgagctgggccagacaggaccaaggggctggcctggtcccccgggcccagtgtccaggt

SEQ ID NO: 29812 - DNA, 100 bp, Homo sapiens
  chr14:104623761-104623861
  hypo
gtttgatgggggagaggcggaaagtctggcttctggaccaccatctgcctccctctctgcctccaaggagtcctgctggggcagaccgcccacacacccc

SEQ ID NO: 29813 - DNA, 226 bp, Homo sapiens
  chr14:104633637-104633863
  hypo
cgtggggcgggacagccaggtcacggggctcccagggactaaggttgggtttgatccagggaagccccttgcgtaggctccactgagacgcagccctgagggggctgggggcaggaggggactctctgctctccagagtcaccgtgtgcaggcgggcccctgccatgggaaagcgggatgcgtgatgggttgattctggcgccgcgctccacatgggaagactgcc

SEQ ID NO: 29814 - DNA, 138 bp, Homo sapiens
  chr14:104640046-104640184
  hypo
cggaggccgcagccgcctgcacctcatcgacctgggcagctgtgaggcggcggctggcagggccggggaggctgctgggggtcccctgtgtctgtccctgtcggccctgggcagcgtcatcttggccctggtcaacgg

SEQ ID NO: 29815 - DNA, 101 bp, Homo sapiens
  chr14:104640582-104640683
  hypo
cagagacactcagcaccgtgcagctcgccgcccgcatccaccgcctgcgcaggaagaaggccaaggtgctccccacctcctgcccgccccatctcggggcc

SEQ ID NO: 29816 - DNA, 140 bp, Homo sapiens
  chr14:104641166-104641306
  hypo
cgctcccagcgtttggtgggacatggttggtggtgcctgctgtagttttcatcacagtgaccgcagcattggccctgtgctctggggagggtcggggaagcgggggcgtgtaggggagactgggctcggcagctccactt

SEQ ID NO: 29817 - DNA, 212 bp, Homo sapiens
  chr14:104642243-104642455
  hypo
tgtccctgggggcgcttgccggagctgggcggcccaccagcctggctagcttcgacagtgactgctccctgcgggccctggcctcggggtcccggccagtcagcatcatcagcagcatcaatgatgagtttgacgcctacacctctcaggcccctgagggggggcccctggagggggcagcctgggccggcagcagtcacggctcctccatc

SEQ ID NO: 29818 - DNA, 119 bp, Homo sapiens
  chr14:104642742-104642861
  hypo
ccactccagcctcccccggaaaccgaggactgcctctgccaccacccgtgtgggctgtgctcgcctgggccagagcccacctggccgtggaggcctgtttgaggacccatggctgctcc

SEQ ID NO: 29819 - DNA, 164 bp, Homo sapiens
  chr14:104645553-104645717
  hypo
cgcccgccctgcctcccagggtctggcgtgcgtcagtacaaggctgcggctggcggagcgcaggcagcagcggctgcgggaggtgcaggccaagcacaagcacctgtgtgaggagctggccgagacccagggccggctgatgctggagcctggccgctggctgg

SEQ ID NO: 29820 - DNA, 563 bp, Homo sapiens
  chr14:104746303-104746866
  hypo
cgcaaccccattcatgagggaggtttagccaggtcagtggtcgggcaggcagcaggcctgggctcctcacgccgcagatacccactgatgacctgtgaggggcctggtgtccgtccaggttccaggacatccacaaaggggtggcgaaggctcctgctcaccttcaagtgtgaaatcgggtcattcacgaggaaacgggatctttgcagaaagctgtttggcgcgtgatctagaaccacaggttccgcgggggagcgggggcctgagtcggaagaggggctgcaggccgggaggcaaggaggagccattcccagggtgggagaagagggctccaagcagaggctggtgggggcgtttgctgtgttcccggaactgcggggggccgctgggacctggcaaatgatgggaagccatgggtgggttttgagcagggaccgctgtggtctgatcagattgaagggaatggcactggccagggaggaagcagggagcggagcagtgggctggggccagacgaggtggtcgcagtggacaagtgtgcacgtgtgtgtacgagtgtgtgc

SEQ ID NO: 29821 - DNA, 786 bp, Homo sapiens
  chr14:105517526-105518312
  hypo
cgggaatggtccgtggccagcacgtagataatggggtcagccacgccgttcaccgtggacaggcacagaaacaccacagaggctgtgtacagcctttcctccaagccgcacatggcgttcctgtctcctctgtagtaggaaaaggcagcggctttgacgaggagaaccaggtggtacggggcgaagcagactaggaagatgacaaccaccgcgatggccgagtgcttcaccttggccttctgggcagcgcttaagcccatgctctgcttgatgctcctgaaaatccggtggttggtgaaggcgatgatggagagagggatggcaaagccaacggtgaacctggcgtagtagtacccggcaatcctgctgtccatctgcagcatgtcaaagcaggtctccttgtcttccgtctggaacaccgggtagtgaacgatcccgacgaggatgaagatgcaggcggagatgaggatggcggtcctccggcggcggcggccccgactctccagcgcgtacaccacggccacgaagcggtcgcaggagatgcagcacaggaagaggatgctgacgtagatgttgcagaagaagatgtaggcggtcaccttgcaggccagcaggcctagggtccagcggtgctggttgcggatatagatgacccagagtggcagcgtgcctgtgtacagcagctcgcagagtgccaggcagagcaggtagacggccagcacgttgccctgcagtacctgcagcagcgccagccacgcagtcaggcagttggccggcacccccagc

SEQ ID NO: 29822 - DNA, 897 bp, Homo sapiens
  chr14:62162333-62163230
  binary
cggagccgggcccggaccccggcgattgccgcccgcttctctctagtctcacgaggggtttcccgcctcgcacccccacctctggacttgcctttccttctcttctccgcgtgtggagggagccagcgcttaggccggagcgagcctgggggccgcccgccgtgaagacatcgcggggaccgattcaccatggagggcgccggcggcgcgaacgacaagaaaaagtaagcccattccctcggcccgccgccttctcccccggcgaccccgcccgcctgcccgccctgggctcctgggccggcctcggcgttaatgggattggggggggcagcctttttgtttctgctgctgctcccctcccctctcttcccccaacctcgccggccgggctcccccgctgtccacgtcgccatcttgtcgtggggggtgggagacgcctcgaaagtgctttcaggggccggggtctgagccctgcttgccctccccgccggccgtgggggcctcgcgccgcccacctacccgcctcaaaaacccagcctgctctgtggccccatccggaggggactttacccagcctgaaaaccccgggaagagaaatgagctgcagctcggtagccgcggtttgcacccggagcttccgctccttcccgcccccatcctctccagttccattgaaaactcggccctggggcggaccctgcacgctggtcctggctttccagtggacttggggccttgagttcccgactgagggactcgcgtggtcggatgcgatcttgtcctgtagttgtccagccgtcgcgggtgtctttgcctttgtgcattagggatttgccgcgatggccttaagatgcgaactttttagtttgcacgtgcaggttttgtttcgttttaatc

SEQ ID NO: 29823 - DNA, 227 bp, Homo sapiens
  chr14:65207965-65208192
  hypo
cgaggaggaagaagaaatgggaggtgccgcccaggagcctgagagccttctgccaccctctgtgctggaccaggccagcgtcattgcggagcgatttgtcagcagcttctctcggcggagcagcgtggcacaggaggacagcaagtccagtggctttgggagcccgcggctggtcagccggagcagcagcgtgctcagcctggagggcagcgagaagggcctggccc

SEQ ID NO: 29824 - DNA, 126 bp, Homo sapiens
  chr14:65209843-65209969
  hypo
cgcctgggggccggccctccgcccggagccccctcagccccacagagaccttcagctggcccgacgtccgtgagctctgctccaagtatgcctcccgcgatgaggcacgccgagcagggggcggcc

SEQ ID NO: 29825 - DNA, 127 bp, Homo sapiens
  chr14:65236155-65236282
  hypo
cgggcctgtgtgtagccccgatctccatgagtgagagcaagacaagctcctcagaaaagctgcagctctcatctccctcccaggaggctgcctggctggcacagtggggacggagacggaggagctc

SEQ ID NO: 29826 - DNA, 50 bp, Homo sapiens
  chr14:65239794-65239844
  hypo
cccagggcaggcctgcatcggctggtcccgcctcacactggggaggttac

SEQ ID NO: 29827 - DNA, 185 bp, Homo sapiens
  chr14:65271617-65271802
  hypo
cgatggcagcagccccggggcccacagaagggactttaccagcatctctccagagagcacctccagcagcttgatgagcatgcgcccatcccgcaggtccttgtagagatcggtgatgcggcaggacactcgagccaggtgcgagttcacccatttcgtgaaggtctttttctgaacaacttccc

SEQ ID NO: 29828 - DNA, 409 bp, Homo sapiens
  chr15:101910626-101911035
  hypo
cgaaccaccacgtgctccaagtagaccacccgctggtccgagtgctccgcgcaggcgctggtcagggccgtagtccgcagcacctgcactaaggggatgctcctgggggagaagggagggctcagcacttggcaccggaagcatgaagtctcacccacacagccaggagctccagcgcccgtccactctatccccactgcagcctcagggccctgcgggccccggggagccgcagcagcctctgactgcctcacgtggatgctccactgtgaactttatcacctgtcctgaagacgtttatgcctctggaatttgcttacagagatttgaaagatggttcggctgggcactgtggctcacgcctctgatcccagctctttgggaggccgaggcaccgcctgctgccacc

SEQ ID NO: 29829 - DNA, 247 bp, Homo sapiens
  chr15:101938625-101938872
  hypo
cgaaagcctgcttagccagtcggccgggcccgtccaccgtcttgccgtcgtcgtccggcccccagctggcactgtaaatgtcgatgtagttgggtctgatgcccagcgactttgcctcgaccacatctgtgacatcgccgtccagcatgcggatgcctgaaagcacagaggaggctcggtgtcggcgcccaggctccgggcacacagcgacgggaacccgggcccaggaggctcggatgaggacacc

SEQ ID NO: 29830 - DNA, 216 bp, Homo sapiens
  chr15:102020345-102020561
  hypo
cggtagtctgctccatttgggctgtttctgcccactctcactgagaagatggattttcccaacaaggactctagaagtgatggatgctggccggtggcagaaatacaagagcccccgaggaagattagagaactaacagtgacagcctcttcccagcccaattcagtaaatgggtccatgtgcggctgggcagagccacaggtcgggcgtggctgc

SEQ ID NO: 29831 - DNA, 544 bp, Homo sapiens
  chr15:102076822-102077366
  hypo
cgtggggacagacccggggaaggtggcagagaaagaaccccagtcgggtggtgggtggtccccagctcagcgctgtcctggggccagtgattcggcctccgggccccagcttcattgtctgggtcttcctggcagggcagtggcgaggagttctacgagctaacgggagtggaatgcctgccctttctcatctccctgacgtgaatcagtttctccaagttcttcacctaacagagcagaaatggtgactcgcggccacacccggggctcttagtcttggaggcctgtccccgccccatctgctgctgcccacagggaaccctcctagagccgtcacggggcataaggcccagggggcctcgcgagctgatctttcctgtgcggagccaaggatgcagcagagggtgtgctcacggcgaggtgtccctctccggaggcagctcttcagggtttggcagaggagaggagcgcagtgaccacccagcactgccctaaggtttgcaggcacccgggagggacaatggctccatggcgggcggaggcc

SEQ ID NO: 29832 - DNA, 203 bp, Homo sapiens
  chr15:26026151-26026354
  hypo
cgtgggtcacttacaagctccgagaagccgcggaccacctgccgccgcttcaggttggtctctccatccaggttggcggtctcgatgtggcatagcccgtcggggtcactggaggagagcagcagaatgtccgcagggaagatttcgttgcagcgaagacgcacaaagtctcccacgtggatttctttccagaatcggttcac

SEQ ID NO: 29833 - DNA, 273 bp, Homo sapiens
  chr15:29415573-29415846
  hypo
cggcctcctcctcgaggcgctcctcgttggtgacagccaagcgcatggcacccaccatgtgctgtgcctcggtggggagggcacagtgtgagtgttccaaaaacttggccaccaaaaccctggcatccgcataggccttgctgtccactaaagagcgtggccgctctttggaggtcgctgggaagggctctggtgttggccgttggtcagttttccaggtatctgggtcccccgctggtgaaagctgggcccgacaggcagccgtggcagagc

SEQ ID NO: 29834 - DNA, 245 bp, Homo sapiens
  chr15:29417894-29418139
  hypo
cgccgggggtgcccaagactcccggggagctactgtgaaatgcaaattcctgcgctgctggccacagggacctggtgccaggtcctaggctccagggcactgcccgcagacacagtcgcatggggcgatttttgaaagctctgggctgtgtggagagccaagctgcctgggaaatgctgctgaaaacgcacctgtgtctgcgtggggcggctccagctgatgacacccccatgcccagagctatc

SEQ ID NO: 29835 - DNA, 67 bp, Homo sapiens
  chr15:29418595-29418662
  hypo
cggagggtgctggggcgcccacagggccatcgggggatgggctggaacctggcgtagcagtgccctc

SEQ ID NO: 29836 - DNA, 139 bp, Homo sapiens
  chr15:31453201-31453340
  hypo
cgggtggccaggccagtggcacaggggctgccctccctgggtgggcaggagcggagccacacactcggcggcagccccacactcggcggcagccccacgcactgggcgagggggccgagatcctggggcgaggccggcc

SEQ ID NO: 29837 - DNA, 497 bp, Homo sapiens
  chr15:62753676-62754173
  hypo
cgaataatgttatttatgtcttcaacacggatgggtttatacctagacgtagtatttagatgtgtttgctttgcttttcctagtgcattcatttattgagtaaatagttactgagcatcactgcgggccaggctctggctcaggccctaggggtgagagcagaaataagacaagcaaggtgtgttagagggagaggagcagttgttttggatggtctctaaagagtcgacatttcagcgagggcttgaaggatgagagcaaggccaacaggtaagaggcgcctactccatgcgaggggaagagcatgcacaggagcactcacagaaattgctggtggctcaagagtggcctggtgagcgcagagtgaccagctgttggctagaccctatccaagctgaggaagtcatggcctgggacatttaacttctcattgttggagtcaggaggaagggctgtatctgtctgtacttttaactaggctgggcgtggtggctcac

SEQ ID NO: 29838 - DNA, 310 bp, Homo sapiens
  chr15:62993112-62993422
  hypo
cgccattgagtatctcttgctccttaagaggcctgttaaggatactgtttaggataacttaagggccctgtcggtgctggcctcataagaagaatgtagccaaaatgctggtgtgattttatggcggggcttctccggtctcctgggtaattctgtgctgtgattgtgttgtgccgttgtctggctttgcaggcatctagggtatgggttcagaacaaagtcgacgaatccaaacacgaaatccattctcaagttgatgctatcacggccggaacggcttcagttgttaacctcacagctggtaagtccc

SEQ ID NO: 29839 - DNA, 222 bp, Homo sapiens
  chr15:63000769-63000991
  hypo
cgctcggtggagaactgtgtccgtgcctgccaggcggccactaccgatagtgagctcctgaagcaggtcagcgcagcggccagcgtggtcagccaggccctccatgatctcctgcagcatgtgcggcagtttgccagccgaggcgagcccatcggccgctacgaccaggctactgacaccatcatgtgtgtcaccgagagcatcttcagctccatgggtgac

SEQ ID NO: 29840 - DNA, 220 bp, Homo sapiens
  chr15:63029125-63029345
  hypo
cgcccgtggagtggctgcatcgacaaccgaccccgcggccgcccatgccatgttagattctgctcgagacgtgatggagggctccgccatgctcattcaagaggccaagcaggccctgattgcacctggagatgcagagcgtcaacaaagactggctcaggtgaggctaggaatgagaaattgtggttgtcatggtcatcattaacgtggacatgtggtc

SEQ ID NO: 29841 - DNA, 290 bp, Homo sapiens
  chr15:63030480-63030770
  hypo
cgtggccttgaagagcatcggggagtccagcaagaagctgcttgtggattcggtgagaggttcttagattgagaaaggacactgggggactaggctcgcgttaggtgtgagtgaagtcttcttctctccatgagatctctgagcagctaacccttcctttaggagtcctgtttttcccgccagtctttgttttccatgttttgctgtctgatcaacaaagttcccaggtggagcttttaaagtttactttttctttgagcccatgttgccatttcctctcggatcgtccc

SEQ ID NO: 29842 - DNA, 67 bp, Homo sapiens
  chr15:63059828-63059895
  hypo
cgcccggctggcatatttcatttcttagctgagtttctttatacggcaattagaaaagggcttgtcc

SEQ ID NO: 29843 - DNA, 131 bp, Homo sapiens
  chr15:63072875-63073006
  hypo
cgtggatagccatggactcgaccattcctcaggaagtgcttcctgatggagagtctgcctcctttcccacctcatcttctggcactttgcgcttccctagaagtgtcaggctggctcccgcctccatgtac

SEQ ID NO: 29844 - DNA, 374 bp, Homo sapiens
  chr15:63075618-63075992
  hypo
cgctggcgaggggctggcacactcacctgccagagggtgggccctgggcactggctccaagctgcacagcccgaacgctgagcatgtgcccactgggcccggccagaatctgtggcctgagcggggccctgcgagggctctggccttttgtgtgcaatgcagcatgggcttggcttgaattgccctctccagcatctagccccaaatgcaaggcctggccttcaccccctcaggagcttaaaagtgaatgaaaccctttggcttccagtgatattaacacatggttctcatgcgtttctctctgtgtgtgtgtgtgtgtgtgtgtgtgtcttgcttgttttctttttccagatgactaagtcggttactaaccc

SEQ ID NO: 29845 - DNA, 222 bp, Homo sapiens
  chr15:63088341-63088563
  hypo
cggctctccaggccgggaacaaaggaacccaggcatgcattacagccgccaccgctgtgtctgggatcattgccgacctggacaccaccattatgtttgcaacagcggggacgctgaatgcagagaacagtgagaccttcgcagaccacaggtacgtgggggtcctggacggggagaggttcaggctggcctgcccctgaaactcatgatcgacttggagac

SEQ ID NO: 29846 - DNA, 142 bp, Homo sapiens
  chr15:63115985-63116127
  hypo
cgctggtgcatgtgctgacagtattgttaatggcgccgtttccacatctgcaggcagacttgtgctccaaagacagttatcggagttgctgcaaaagtgaccaccccctgcagccgtaaccttcaatactgtgcctagtctc

SEQ ID NO: 29847 - DNA, 1024 bp, Homo sapiens
  chr15:63132478-63133502
  hypo
cgtgttttcatggctcagctgggtcattagtctcaaaacccaaacagtgacagaggctggtcgccagagctaagaaagctgttccggatgtgctgcagtgtcccacggtcgcgggagccgtggagctcacatgagcagtggggtgggtcggagggttttctacaaagtgttaggtccatccagcttgttgctttctttctagatcatcgccgcccaggaagaaatgctaaagaaagagcgagaactggaagaagcaaggaaaaaactggcccaaatccgccagcagcagtataagtttttacccaccgagctgagggaagatgagggctaaaggtgcgagcccagatggcgagccccaggggatggccctggctgaactggacagacagtgttcctgagaggctgggcacttagctggaaaccgcccacctccctcccgggtgagcctggagccctgcgtgcttgttctcacatctctgtcccgtcggcactggctgcatgatcgtgatgtcacacggtacaatgtcctacccacaactcctctgccgcctcccctcatgcctcaccgtgtctcaggagagaggggtgcacgtttcatggactgttaccaacaaagaaaagtcagtattatgttgttctcagacactttggcttttgttggtccttctcttaggcctgctcctggacctctttatgatattgtgatagggaaaaaaatcattgacgtcatagaatattcttcttcctctcaggagaagacggaagctggagttggacatggttcataaaagccagaaacacaaacccgtgtggactccgggagggtgactcaggtcctccttccatgtcttgagcactggctcacccagggggtgaaaaattcccgcccctgtttgcacgctttcttgcctccgtgtgtaagctccttgtacaacccagacccatcttgtattttgtggcccagaaaactgaacgattattttgttcctccgtagtccaaagggcagagttgcggaaggccgtc

SEQ ID NO: 29848 - DNA, 421 bp, Homo sapiens
  chr15:66946036-66946457
  hypo
cgaggccctggcatctctctcggggggccctgccacagcctcccagttggtgtccctgcttctgtcctcaccctccagtccattcaccacacaatggccagaggactctgaaaaacacacccgggtcatggcactccccgcctccgaccctctctctacctcctcgccaccacccctgacgtggaccactgaggcccatgccttctggcttctgccctctcctttcacgtcttgggcccctgctctgaacaaggggcctgtttttcgctctcagatctgtgggggtctcctctggcttcagcacctccacccagaagaccctcacggcccacactctcacccttcacctgggtcaacccgccctcagatctgagcaatcagtgtctcccaagggaagcctccccgaacacccgctccctgc

SEQ ID NO: 29849 - DNA, 115 bp, Homo sapiens
  chr15:68888212-68888327
  hypo
cggagcgggcgtctgggaggaggaggtgttggagtgtggctctgaacctaggtgagggaaggagcagcgtgagcagaggccagggcagcgacgccgtggggtgctcccgagccac

SEQ ID NO: 29850 - DNA, 99 bp, Homo sapiens
  chr15:68893753-68893852
  hypo
cgaggataaaacggtaagtgtggcagaggcctcagcctgcacggagcttacagtcaagagtggtgtgaggtggggattgcggccatgagcgtgcagtgc

SEQ ID NO: 29851 - DNA, 174 bp, Homo sapiens
  chr15:68937507-68937681
  hypo
cgtccgcaataccgtagctccaagttccggaatgtctacgggaaggtggccaaccgggagcactgcttcgatgggatccccatcaccaagaatgtgcacgacaaccacttctgtgccgtcaacacccgcttcctggccatcgtcaccgagagcgcagggggcggctccttcctc

SEQ ID NO: 29852 - DNA, 274 bp, Homo sapiens
  chr15:78010517-78010791
  hypo
cggaggggtcttgccgtggccctcagcttcacacgcagacctacacaggaagacacgtatgtgtgaacatgcagggacagagctggagaagtgcagcaccccagacacgcgggtttaacagccacatgtatgaatgcacacgctcatgcatacccacgcccatcccatgtatacagaggagcatgcccacgcatggctgtgcatgtgatatgcacacagcgcccacatgtatacacacacgtgtcaacatgcacacctggacgagctcacacac

SEQ ID NO: 29853 - DNA, 124 bp, Homo sapiens
  chr15:79081981-79082105
  hypo
cgagggtgaagctcggctctcagtgtagcaatgggggcaggcacagtacctgtgcccgagctcgtgggctacagtgaaggccagcggcaggcccgtgtcctcgttgatgctgcagctgcggtgc

SEQ ID NO: 29854 - DNA, 121 bp, Homo sapiens
  chr15:89386721-89386842
  hypo
cgccggctggctggccgaccgcagcgtgcgctaccccatctccaaggcccggcccaactgcggtggcaacctcctgggcgtgaggaccgtctacgtgcatgccaaccagacgggctacccc

SEQ ID NO: 29855 - DNA, 230 bp, Homo sapiens
  chr15:93595181-93595411
  hypo
aagggcagggctgtgccctacagccgccccctcccccttaccttgctggtggcagtggccgctgagccgggcagcacaggcgtgttggtgacctgcacgttcaggtaattattgtcgatgagcggccaggcgccctgcaccttgcaggtctggaagcggtcggtgaaagtcctgaggtgtgggtccccgaagaggccacagtgcgtgtagttgggggtggccgagtgctt

SEQ ID NO: 29856 - DNA, 121 bp, Homo sapiens
  chr15:93595508-93595629
  hypo
gggccatccttggagcagttgtgctggctcatgaggtcctctatgccatggacggccgagtggtaggccaggtcaccccggcaggtgcgggccgtccgccgcgtgcacagggcgtagctgc

SEQ ID NO: 29857 - DNA, 133 bp, Homo sapiens
  chr16:1270065-1270198
  hypo
cggtgaggccggtgacccaggggggctccctgcagtccccaccacgctccccacggcccgccagcgtccgcactcgtaagcataccttcggacagcgctgcgtctccagccggccggcggccccaggcggaga

SEQ ID NO: 29858 - DNA, 332 bp, Homo sapiens
  chr16:1270449-1270781
  hypo
ctgaggccgagcccgctctgggtgcgcgcagaaagaagaagatgagccccccctgcatctcggtggaaccccctgcggaggacgagggctctgcgcggccctccgcggcagagggcggcagcaccacactgaggcgcaggaccccgtcctgtgaggccacgcctcacagggactccctggagcccacagagggctcaggcgccgggggggaccctgcagccaagggggagcgctggggccaggcctcctgccgggctgagcacctgaccgtccccagctttgcctttgagccgctggacctcggggtccccagtggagaccctttcttggac

SEQ ID NO: 29859 - DNA, 157 bp, Homo sapiens
  chr16:58078950-58079107
  hypo
cgacaatgagcgcctgcggatggagcccggctaccccaagtccatcctgcgggacttcatgggctgccaggagcacgtggagccaggcccccgatggcccgacgtggcccggccgcccttcaacccccacgggggtgcagagcccggggcggacagc

SEQ ID NO: 29860 - DNA, 177 bp, Homo sapiens
  chr16:67221106-67221283
  hypo
cgctgccccaaaggcactgaccccaggtacacatgcagtgcccagtgcagcaaggcgaaggcatccgcagcttctagctcaggccctgcaaggaggttctgcaggctgcggcgcaaaccactatgcagcgtgtgggcccatagctggaccacgttgtactgtggcgggcagcaaggc

SEQ ID NO: 29861 - DNA, 477 bp, Homo sapiens
  chr16:72991953-72992430
  hypo
cggctccgggtgcttctccttcatgtgtgcctccagggtctgctggtacttatagtgccagttgcacttggggcacttgagtgtcttacacgagttacgagaatgcatcatggtcatgtggccgcccagcgagcgggaggagcccaggaccgtgtcgcatttggggcactccacgccactccccgaggggcactccccaaccccaagctcgcagagggagccagcgtgctggtgatggggaacgaagcccccatcgtcaccctctgtgctttcatttggttctggtgctgtggcattgtctttattggcactttcgtcagcgaagtccagcctcctgccgccctctgccacattggccctgacgccctcactgttaaagcttaaacgattcctcctgttcgcaccatcaaagacaacaaaggaagaagcagaattagaactagtagaagctgtgcccctcgacagggtctggagcac

SEQ ID NO: 29862 - DNA, 166 bp, Homo sapiens
  chr16:75127929-75128095
  hypo
cggcttagcagaggggcccagagcaagcacccgccctccttggggaggtgggggctgtgtgctggtggcatgcatagagtgctgggaagctggtcgtctccttgtcacgttcgaactcggacgaacacctgatttagtcctatgagtccacaccagagagcttgac

SEQ ID NO: 29863 - DNA, 368 bp, Homo sapiens
  chr16:80646305-80646673
  hypo
cgccatgcagagtgcatggtccatacactgacatcatcgccatcttctcaggccgggctactccatctggcactgaaggtgtgaaggacatgaggcagccaagccaatctgcaggctgacaacaccctcaggtttctagccccatgaagagcccctaaacccaaggcagaggaaggatcctgctgggacccgaatccaggtatcacaggaggcttaccagcgcgacgcccaggatctgggggaaggtgtaggaggagcagccagcaggcgtgaggcggatggtggcgtagggcgtctggaaccaggccttctcactggcccacacgatgtcacagaggggcaggatggaggcacccaggcccagggcc

SEQ ID NO: 29864 - DNA, 257 bp, Homo sapiens
  chr16:85407706-85407963
  hypo
cgcgtggccctcagtgtgtagtgtgtgtcagtgtgcatgtgcgtggttgcatgtggccctcggtgtgcagtgtgtgtcagtgtgcctctgtgtgttcacgcgtggccctcggtgtgcagtgtgtgtcattgtgcctgtgcatggtcgtgcgtggtcctcggtgtgcagtgtgtgtcagtgtgtatgtgcgtggttgtgtgtggccctcggtgtgcagtgtgtgtcagtgtgcctctgtgtggtcgcgcgtggccctc

SEQ ID NO: 29865 - DNA, 260 bp, Homo sapiens
  chr16:89189500-89189760
  binary
cgggaacatttccagttcagccaaggagtcggtgcagcaggtggagtacagctgccctgcggggcctggctccaccaggggccaagacccttcgtggggaggagcacagcctgagggcctcagggtttgtgccctccgacacctgagattcagggctcccagaggggtgggtgggcgccccaggacaaccaggtgatgatgggcgctgtgaactctgaaaagccccagcatcagagacctgctgctctctcatgtgaagg

SEQ ID NO: 29866 - DNA, 199 bp, Homo sapiens
  chr17:17637969-17638168
  hypo
cggacctggtgcagaccagtgggcccacacctgctttcctatgtgcgggtcagagcgtgtaggtgtattacatgcctgcctgtgtgtctgcgtgtgagctccttggacacacacaggggcacatatctgtgcttgcatgtttgtacatctaagtgtgtgcgtatctgtgtgttctgacaccagctcgcgacaccagctc

SEQ ID NO: 29867 - DNA, 508 bp, Homo sapiens
  chr17:39658629-39659137
  hypo
cgtcctggccctcgagcaggctgcggtaggtggcgatctcctgctccagacgtgtcttgatgtccagcagcatcttgtactcttggttctggcactccatctcactgcggagctcgctcagctgggcctcgatgctgctgatgagtccctggatctgctgcagctgcagggcatagcggcactccgtctctgccaccgtgttctccagccccgctttctggtggagcgacagacaagaagttacagagggagccaggccagagggaaacctagaggtggtcgccaccgggcaggaggctgcaggcataccatgctcagctgggactgcagctcaatctccaggccttggagcgtgcgcctgagctccgtgatctctgtcttgctggtctgaatcatggcagtgttggtagacacctccttgttcagctctgcactctgaaatgcaagcaggaagaaggtggtggggaagctcagctcgagcagcctgaccaagaggctgtgtccgccc

SEQ ID NO: 29868 - DNA, 104 bp, Homo sapiens
  chr17:39659216-39659320
  hypo
cggcggttcctctctgccatggcctcgtactgctccctcatctctgccagcacgcgggtcaggtcaatgcctggggtggcatccatctccacgttgacctggcc

SEQ ID NO: 29869 - DNA, 191 bp, Homo sapiens
  chr17:39788236-39788427
  hypo
cagcccccatctccttgctcgggaggctttgggggcacagcgagggtcggctgtgaaaacacggagagaatgcgtgtagggtgactcgaggcacagccctggtgcgtgctgcgcggcggggttggtgatgaggtgctggctgatcccgaagatcaggagcactgactcaccagggctcccctgggttcccc

SEQ ID NO: 29870 - DNA, 649 bp, Homo sapiens
  chr17:40371760-40372409
  hypo
cgctgcaaccaggcctccagagacacctgcttctgctggagggccgtctcccggctcagacgctcctgggggctcagctgggccagcgggccaaactgagctagaggaggggagaggaaaccatgaccatcacctcccagtgtccaacaggaggcccagagaagcccactcacccgttctggagcgagaccctcctgggctcagatactgcattaagggcaagtcggggttcctgacagccaggggggccaagatgaatgggtgccccaggaggcgcctctgggccctgctcgccagcctcctgactctgagccgtcccctctgggggcacacgggtgctggggcagctggggaggaggcctgcctgcctcctgcccgcctgcctcacagggctgccagccctcttctcgcggcccagcatgggtccaggctgtctggggtgtaagtgtgcccatgcccttgactgcaggtgaacctgggcaaatcgctttcctttcctgtgccttggcttccccacgtgtaaaacgggagattctcggcacctgcctcagtggggtgcattaagattaaatacatgaggacatggaagatgccagaaagctgcctgacatgggtgagctctgtgtgaggttcgtgcttcttggttaac

SEQ ID NO: 29871 - DNA, 139 bp, Homo sapiens
  chr17:40372634-40372773
  hypo
cggacagacagacagaccgcagagggagagcatgtccagggccactggggatgcagagccaccaagattctctcaggaaagggaggccgaagggaggcggcttccctccacaccatctgtgaggagtctcattgatggc

SEQ ID NO: 29872 - DNA, 418 bp, Homo sapiens
  chr17:40375292-40375710
  hypo
cgctgcctccgaatggaaagtgtgctttctcccaaccccaccagagctgctttccagtccccaggcccaatcctcaagttgcacaatgtgcctccaccgcgcctcaccttggatcctcaggctctcctggtactggatgatgaagtactcctgagtctgctgcagcttttttaactcattctctgtgtcctgcgtgaccagtcgcagctcctcaaacgtctggttgatctggaggtgtttctgggacatggcatcagcaaggcttccagctggagagctaccctgggaacatatggggggcagtgcaaggcagtgcgaatgggaggaagactgaggccttaatccccaggaaaagccagctcctacaaccagggtaagaccccaaaaggtaaattttgagtcgggaggaaaagcaaac

SEQ ID NO: 29873 - DNA, 249 bp, Homo sapiens
  chr17:42334648-42334897
  hypo
cgcacccggccactgtctcagtcttatacacaacctcccgtgtgcattaacatccccataggcccccaccttgatcagcttggagaaagtctcatagatgaagatgagggaaatgaggaaggagaagatctcctgggtatagcgggagatgaagcggaccaggaagctaccctcgaaggccaccaccaacaccaccagcaggatgagccagaagccgatccacacgcggcccacgatgtactctagacc

SEQ ID NO: 29874 - DNA, 93 bp, Homo sapiens
  chr17:42335362-42335455
  hypo
cgccgaaggtgatggcgggtgacagtgcagcaaagtagatgaagatgacggcagccaggacctgggggctgaatgcatctgtgatgtcactca

SEQ ID NO: 29875 - DNA, 99 bp, Homo sapiens
  chr17:42338019-42338118
  hypo
cgcagctctaggaggctccagaaggtgaggtgagagaggtgcgggcggccccaggccccattctcccccaggttctcctccagttgcacccagcgcgcc

SEQ ID NO: 29876 - DNA, 336 bp, Homo sapiens
  chr17:4392128-4392464
  hypo
cgcagaggaacccacgcctatacagacacgggcgcagcggccccagaaccctgctgaggacttgagtggccgtgcagggatcctcctggcctgcccagttctgtagccccggtcttccctgggtccacgctctgaccccagcacagcgtatggggagggctggctctgcggggcccacgcttgccactgggttcagagcagctgggctcagcgggccctgtgggagatcgacagcttccaggcgggcagcagtggggaggcttgttctcatgttctttccgcctcccctggtgcccagccaggcgatcacttgctcactcaccgatggccaccttc

SEQ ID NO: 29877 - DNA, 520 bp, Homo sapiens
  chr17:4500096-4500616
  hypo
cgcactgggagatggcagctggaggggcccccgcagcaggcctgccgtctctccgcagggggaaaggcgaggcccgggccaggctgaagcggtcgcagagcttcggcgtggccagcgccagcagcatcaagcagatcctgctcgagtggtgccgcagcaagacgctgggctaccaggtgagccccggctcccctccggctgctgggacgccccagctaaaagcttgaccaagcgtcgcccctgtccttgttctcccgcctgggcaggagcccgctgaggctggggttaaggggtaggaaccacggtaattatgccttccgagtgggtgcccagctgccctcccgcactgaccccactcaccctgttgcagcacgtggacctgcagaacttctcctccagctggagcgacggcatggccttctgcgccctggtacactccttcttccccgatgcctttgactacaactccctgagccccacgcagaggcagaagaacttcgagctggctttcaccatggcc

SEQ ID NO: 29878 - DNA, 50 bp, Homo sapiens
  chr17:56435251-56435301
  hypo
cgtcaactgggccaggggctggctcagggagggccctggggcactgtggg

SEQ ID NO: 29879 - DNA, 215 bp, Homo sapiens
  chr17:56435330-56435545
  hypo
gttggatctggtgacttgctgatcaggagaaggtggctctggctggggctgtgtccgaggaataggaggcctggactgggggactccggtttctgggccaggcttcctgccatgccactggaaccgctttttgtagtggtggtgccggtggcggtggtagtggacatggctggaaacctgggtttcccctgtgggcaccaccgagtccaaggaac

SEQ ID NO: 29880 - DNA, 80 bp, Homo sapiens
  chr17:56439864-56439944
  hypo
cgcacacgttcaccgccgccaaagaccccacactgctcaccggcctgctgtggcgggggcggcaccggatgcgcagcacc

SEQ ID NO: 29881 - DNA, 214 bp, Homo sapiens
  chr17:60754652-60754866
  hypo
gcgctggccactggcagcgccatggggctgtgggaggtgaagaactgtacctcgttccgggcccgctacatctgccggcagagcctgggcactccagtgacgccggagctgccggggccagatcccacgcccagcctcactggctcctgtccccagggctgggcctcggacaccaaactccggtattgctataaggtagggcagcctgttggcc

SEQ ID NO: 29882 - DNA, 207 bp, Homo sapiens
  chr17:60766578-60766785
  hypo
cgtgtggcgtcaaggaccctgaggttccaggtccaagacacctccagctccatgcgtaggtggcctctgcgccgggttccttgggtaggaggaggtcaaggccctcacctccctgtccatttgttagcaaacatgtattattaataacaacagggctgacacctaccaagccttggtctgggccaagcgccgagtctggtggagacc

SEQ ID NO: 29883 - DNA, 103 bp, Homo sapiens
  chr17:60766832-60766935
  hypo
cggggtgagggaagcagagcccagcctgaaccctgaccccttccctgtagacccctccctgagcccgtccccagcagcgctgccccccgccccgggcactgag

SEQ ID NO: 29884 - DNA, 224 bp, Homo sapiens
  chr17:60767107-60767331
  hypo
tggctggcgaggaggtgggctcccgacacttttgccctgggccccagccttgcccgggttcccctccctgccccttcctgcccccgccttatccgcaccctatcctgactattcccttcctcccaccccatggccccccatgcccagggctctcggcggtactcctgggtctcagaggagccgctgaactacgtgggctggcaggacggggagccgcagcagcc

SEQ ID NO: 29885 - DNA, 256 bp, Homo sapiens
  chr17:71431621-71431877
  hypo
cgccggctgcattgcgggcgaagcactggaacatgccggtatcatcgggcaccaggccgctgatctgcaggcccccgtcgttgcgctgccggaagcgggtcaacttctccacctccaccacggctgcgtccttgtaccaggtgatggagggcggcggcacacctgtgggcaagacgtgggcccaccgtcaacctgcctcctgcctcctctccgcctaggaggggtgcttgggaggaggccgggcccggaaatctgc

SEQ ID NO: 29886 - DNA, 194 bp, Homo sapiens
  chr17:74013689-74013883
  hypo
cgggtctgtccacacccttctccatctccatcccagccaccgctcctgcacttgcctcacctccctcaagtgtgagcaccagggccgggccgcttctcatcccagccgccccttcccgctgctcacccacctcatggctgtggatgcggccctccaagtcctccaagggtgtggggcggctcagcggggcccgc

SEQ ID NO: 29887 - DNA, 127 bp, Homo sapiens
  chr17:74019389-74019516
  hypo
cgcgtgcccagtcgaccctgggtcccacgtcggggggcagcaccatcttctcgtacagggcacggtactccgcacactcctgggtcacccgctcgtgcagctgcttgatgctgtcaagaaggtggcc

SEQ ID NO: 29888 - DNA, 269 bp, Homo sapiens
  chr17:74621445-74621714
  hypo
cgctggtacagccggattatcccttcatcgtgtagccgcttccagacttctctctccagcttgaagtcatggtttatgtaaaagatcagccgcttccatgatgtatcatagtagtgatcagaaaagcgctcatggccctcagtgatgaagccataagcactcacctacatcacggttggaggagaaacacggcctgtagttgctgttgcccaggcttcttctcatggctaattctgtgttgaggggtgggggttcttttccctggctcc

SEQ ID NO: 29889 - DNA, 119 bp, Homo sapiens
  chr17:74625074-74625193
  hypo
cgtggtggcaaaaactcaccgtctgaaggcctcctatttcgaagctgtatttttcctcaaaatcccaccgaggctcagatttgaagttggcggccttcagtctttggtttctctgcgtc

SEQ ID NO: 29890 - DNA, 47 bp, Homo sapiens
  chr17:77126804-77126851
  hypo
cgataccgagcagtcttctgacacagtccctggaacgagtggagtgc

SEQ ID NO: 29891 - DNA, 245 bp, Homo sapiens
  chr17:77126880-77127125
  hypo
atggggcctgccatgctctaagctctggcctccctgcctggaggcgggacctggcccaagcctcaaagccgaagcacaaattcctcatcagtgaagatccagagccgccgtggtgctaggacacggtgcgcgggaatcagccccgcacctgcaaggcagcgtgctctgcgtgccctgcgtgtgccccatgtgtactgtgtgccccgtgtgtgagcatgtgtgccccatgtgtgctgtgcccccat

SEQ ID NO: 29892 - DNA, 295 bp, Homo sapiens
  chr17:77127177-77127472
  hypo
ccccgtgtgtgcacatgtgcgccccgtgtgtgctgtgtgacccgtgtgcttgtgtgtaccgtgtgtgagccatgtgctgcgtgtgctgtatgctgtgtgctccgtgtgttctgtgcactgtgtgtgccctgcgtgtactgtgtgctctgtgcccatgtgtgctccgctcagtctccatgtgccctccgtgtgtattccatgtgccctccgtgtgctgtgctctgtgcacgctgggaacagcgctagagcgtctgtgcttctggacaggaaaacaagcccctcgtctaccttcacc

SEQ ID NO: 29893 - DNA, 741 bp, Homo sapiens
  chr17:77914408-77915149
  hypo
cggtggctgcgcgttccactgcagcgtttcaggagctgactttcctctgggtggctgtagatctgacttctgtcacttccagactctaattttgtcattaatatgaaaaggttcctctcatgttgcccaaaagcattttccttaggtttctaccgtcccctgtccccttcacgcccagccccaccccctcccgtgcccagggcctctgaggaggtcccctcaacccctgtccggtgtcgggggcccgacctatctgcggaagccgaagccgtcctgcggcgtctttgggcccttcttgccttccctcagggacttgggggaaggcatctccaccgtgcccccgtagggacagctctccgagccgggatggtggccggtgcactccaccgcgggcatggagccgctgtcccacatgcctgacccgcacagcttacacagatcgtgcaggctgcaggggatccggggcaggaggcggaactggtacagcaaactcctcgcctgcagacagaggacggggggtgaggaggggccgggggacagcctggcagcctagggtccccatgggagtggccaaagacagcaacagcagcaacaacggcctgcacctcgggggctcaccgagtcctggactgagggctctgcctgcatctcccaccatcaccggcaccacggggccctgggtcttaggtggctgcagtgatgggacccacaaggcactcgggctgtgctcacaggtggctc

SEQ ID NO: 29894 - DNA, 445 bp, Homo sapiens
  chr17:77928738-77929183
  hypo
cgctttggcagtcacggatggagggccccctccctgctgccgtggccacagaagactggtcccctggagggccggagccgatttcaaaccaggcaagagtccaggacacaggggccaccacacacctcccccagcaacgtgcctccaggcaggagttggcttaaaccctctcgcaaccccttaggggcaaattatttgcattaattaatggattgattcattaattcaagatactgtgcttgggacctacagctggggttccataagctcaaactagagcgaaggtgatggagacctcagttcgctttcattggggtacgtctggcaggtaccccaggccctgtgtggtcatggaggacgaggtctggtgcccctcgaggccggctgctgtggggtgggggttgcatcgtgtctcttcatcttcagctcccagccctggcttggc

SEQ ID NO: 29895 - DNA, 75 bp, Homo sapiens
  chr17:77930343-77930418
  hypo
cgctgggcccggtggtcgctttaagttgctgagtttgagggcggtttgtttcacagcaacggatcactgacacac

SEQ ID NO: 29896 - DNA, 431 bp, Homo sapiens
  chr17:79048174-79048605
  hypo
cgtgcacggatacgtgagtgctggtgtgcgtgcatggatgcgtgtgagtacgtgtgtgtatgcacaaatacatgtgagtgccagtgtgtgtgcatgcacggatacatgtgaatgcctgtgtctgtgcgtgcatggatgcgtacgagttgcctgtgtgtgtgcacgtgcacagatgtgtgagtgcctgttcgtgtgcgtgcatggatgtgtgagtgcctgtgtgtgcgtgcacggatgcgtgagtgcctgtgtgcgtgcacggatgcgttgagtgcctctgtgtctgcgtgcacggatgcgtatgagtgcctgtgtgtgtgcatgcacggatgcgtgtctgtgcgtctgtgtgcgtgcacagatgcgtgtgagtgcctgtgtgtgtgcacggatgcataagtgcctgtgtgtctgtgtgcatgtacggatgc

SEQ ID NO: 29897 - DNA, 403 bp, Homo sapiens
  chr17:79053502-79053905
  hypo
cgacggctctgccggtctgttctggctcatgtgctgtgtgccctggcccgctggcactcagcttacatttgaacctcgtctttagagttaaggtcccacctgtgctgtggaccagacgtgggcctcccagtgagtggggggcatctgataggtgaggctgcttaggaagcctggcacaccctgtccctcagcagggtgggcctgggtaagtctgcccgccgcatgggagggagtgtggagagatgaagagatgagggagcccgagaacgcatggcctcacgtctcaccccaagggaggctctcaacggctgtggagccctcgctactccgtcttcaggcccctgaaggacacaggcaaccgcggacaagacttagttgctcagcggaactcactgcccctacc

SEQ ID NO: 29898 - DNA, 196 bp, Homo sapiens
  chr17:79060680-79060876
  hypo
cgggagtccggtcccagtttgttcctctaagcggtcgtggcctccgcctgcagggctggccactcgagggaaggtggtacttcaggttcctcgagggagcggcttcggtgttgtttctctcaccgtcccgccggcgtcaccggtgctgcgtgctgagtgggctgggacgtaggaaggcctggccgatgacaggcac

SEQ ID NO: 29899 - DNA, 264 bp, Homo sapiens
  chr17:79072884-79073148
  hypo
cgtgctggcccctcacctgggcacaccctgttccgaaaggcgtgacctgtggatctgatcttgctgtccccgtggacgctggtcttgctttctgggctcccagtctccgctcggtgacctcttgtctgatcctccccacgaacttccttctcacgttctcccttggtgcacgcttatccggaaaccaggcagccaggtgtcttagcgtcccgctccccgtcattcagagccggagccgggtgggagaggagatgaggtgcgccc

SEQ ID NO: 29900 - DNA, 257 bp, Homo sapiens
  chr17:79074754-79075011
  hypo
cgtgacctctgagagacccctctgcccgtcatctgttgagggcccctccttgggccggtagactcttggccctgtgtttcccgctaggcgtcccccggcacagtcctgcggccctgtgtctcccgctaggtgtcccccggcacagtcctgcggccctgtgtctcccgctaggcgtcccccagcacagtcctgcagccctgtgtttccggcatccccagccttgtcgttccttgtgggggaatcccgccctgggatcc

SEQ ID NO: 29901 - DNA, 659 bp, Homo sapiens
  chr17:79077368-79078027
  hypo
cggagcgcgcggtgcagctcatgcagcaggtggccagcaacggcgccaccctccccagcgccctgtcggcctccaagtccaacctggtcatttccgaccccattccgggggccaagcccctgccggtgccccccgagctggcaccgttcgtgggggtgagtctgtggcctctggaaagcttcacgggtgtgggtgggagggcagcttgttgtcagggcggggggccgccagggtgcagagtccaggggcccctgctgagggggcggagggttctctttccccctggtcttgcccggggtgggctccagcaacagcctgctctgcctgcttccctgcagcggatgtctgcccaggagagcacacccatcatgaacggcgtcacaggcccggatggcgaggactacagcccgtgggctgaccgcaaggctgcccagcccaaatccctgtctcctccgcagtctcagagcaagctcagcgactcctactccaacacactccccgtgcgcaagagcgtgaccccaaaaaacagctatgccaccagtaagggctccgctggggtgttgggctggggtccctggacgtgcctcctcagaccctacagtcatgccacaaccctcaataggggcctgggagaccctgaggctcacaattatgtgacc

SEQ ID NO: 29902 - DNA, 508 bp, Homo sapiens
  chr17:79082625-79083133
  hypo
cgcccttgtcctgggtcttcctggagggtcaggaggccaacgggagctgctgaaaggggcattgctcggtgctggcggactcgccgcctgtggctgggcagcgtcgtgcagccaggcagccgtcctgtgctttgtttcacagtggcagcggcacgctggtgtccacagtgtgaggacgctgaccccgggcagccgctgctctgaagagcttccgcgccttccccctggtctcgtccgttttcctcctcagctctcgctggtttgttcttgggttgtttttcttttccacctgccccatgccttttggttggtgaccccagactctgtgatcccccagggtccatggtgctgctccatccgccccccctcccctgtgtttacgcgccccatcctgtgtgtcccagccttttgagcagaaactgccaggcaggacctgctgggccgtgcggggcaccctcggcctcaccctgcagtgtctgtggcactcactgcttttctaaggctcgcc

SEQ ID NO: 29903 - DNA, 241 bp, Homo sapiens
  chr17:79084476-79084717
  hypo
cgggctctgcggggggccgtctgcagctgaggcaggctcctggctccctccaggcccgcaagtgaggcaggctccgcaggcgccgtccagggagagccagagccccagctgtgtgccgactccgagtgctccagggttctaggtctcctggcagctcgcccgtggtcccccctcctctgcacccccgagtcctcagaccccatgctgcctccaactgagccttgtgtttccttgcagcgcc

SEQ ID NO: 29904 - DNA, 168 bp, Homo sapiens
  chr17:79086354-79086522
  hypo
cggaggcccaagcgcccacgctggacccgattccagaagggcccaccttctgaagacacgaagaaacagctgacgcgagaagacagaaaacaggtgctgtccgcccggctctgggtctggagtcacccaactggtcgaaatgcatttgtgacggctccgtttcttctc

SEQ ID NO: 29905 - DNA, 158 bp, Homo sapiens
  chr17:79086890-79087048
  hypo
cggtctcccctgcggccttgcttaggggcctctgaggggaggctctctgtgaggagacagagcccaggcctctgcattctgaggccagcgccctgcccgcccaacagctcccccacacatgacgcaggccctcctcagggtcctccgctcttggacac

SEQ ID NO: 29906 - DNA, 206 bp, Homo sapiens
  chr17:7951722-7951928
  hypo
cggatgagcacttcacagaggaggcccctcggcggagcatcgccaccttccagagccgcctggcccagatctcgaggggcatccaggagcggaaccagggcctggtgctgccctacacctacctagaccctcccctcatcgagaacagcgtctccatctaaatcccaggggaacacaggcccagatgacatccctttgaccacatc

SEQ ID NO: 29907 - DNA, 389 bp, Homo sapiens
  chr17:79612376-79612765
  hypo
cgcagtgagcctggctggctacctgggcgccctctgtgagaacacctgcctgttacgtggcttctctgggggcatccttgccttcctggtgcttgaggccgtggcgggggccctggtggtggccctctggggcccgctgcaagacagcctggagcacaccctgcgtgtggccatcgcccactaccaggacgacccagacctgcgcttcctcctcgaccaagtccagctcgggctgaggtgctgcggagctgcctcctaccaggactggcagcagaacctgtgagtcttggagtgggcgagggacagggccaccacagggtcgcagaggccacacacccttgtgcgtgtacacacagtcactcacacgtacatactcattcgtgcatgcc

SEQ ID NO: 29908 - DNA, 196 bp, Homo sapiens
  chr17:9631380-9631576
  hypo
cggtggtcctttggatccaaggagaaaccaccaggtgcctccgtcgagttggtggagtacttggaatccagacgaagacctcggtccacgagccagtccattgtgtcgctgttgacgggcactgcgggtgaggatgagaagtcagcatcgccgaggtccaacgtcgcccttcctgctaacagcgaagatggtgggc

SEQ ID NO: 29909 - DNA, 477 bp, Homo sapiens
  chr18:10165791-10166268
  hypo
cgagattgtctccacggacggccgggggattcctgtccctcacagaggccttttttcttctctgaatcggtgtctctaagggccgggtttctgtgcactgggtggtacctgccagatgagtttaattctgccccgcacataccggcgaggacccatcccgctcaagctctctgctggggacttcaggcccaaggtgaatgcgcgcagggcctgtggcaggggatgagggctagtgcaggccgaggggagcagctacagaggtagggtttccatacccagagacgggcatggacactagaaagggaggatcccctagctgggagggaagccaggacagtgaagacgtagtgggtctaacggggggtaccgcatgagccgaggtgcagaggctggacccagcggggacgccgaggggactgctcctgcagcctggggaaaagaagggggcgtcagaaggtctccgagccagcggggatc

SEQ ID NO: 29910 - DNA, 257 bp, Homo sapiens
  chr18:10485485-10485742
  hypo
cggatcatctatcggtcagacgagcaccaccctcccatcctgcccccaaaggcagacctgaccatcggcctgcacggggagtgggtgagccagcgctgtgaggtgcgccccgaagtcctcttcctcacccgccacttcatcttccatgacaacaacaacacctgggagggccactactaccactactcagacccggtgtgcaagcaccccaccttctccatctacgcccggggccgctacagccgcggcgtcctctc

SEQ ID NO: 29911 - DNA, 2276 bp, Homo sapiens
  chr18:3449180-3451456
  binary
cgggtgtttacttaatggctagtttctgtttgaaatgggaggagggatcccctagcagggttccaatccgaagagtagacactgttgaccgaaacagacgagcaggcacggcgtggtcaccccttagctataaaagtggccgctgccggggttcggcgactcggggtgtcaggcggagtcttggtgaggcaggcgcgcgcccggccgtccccgggcagagacgtttaaagagcatgtgagcgtgacaagtgtctgtccgcaacgtgtcagatttcgaaactgccttgcaatccagtccggaactcgcagctttagcccgggggaacagacgttcgtttaggctgtgtctcatcattcccccccgccccacccccgccgacctcccactgtcgctgctggaggaagagccccgggaggagaagggtgcgccgcgccgcgcccgcgtgtcaatggcagccgcgcattctggaagaagttggttcttgtctcgaatacttttcctcccgtgccccgccccttgaatcagaggcggctgtctcgtgcggctagagcagggccagtagagttcggggcagctgtcaaaaacgagacggggaggcttttcttcccgggggtggaggagggaaggagggaggtgtccttttttccatctgttgcagtttccgaaccaaacgcaccctcgccagccccgggaagaaaggcccaagggagaaacctggggcgctcggctggtgcccccaccgccgggcgagggatgcgggcggtccgtgcgcggcaggcggaaaggatcgtgtttctggacccggccaccccccgcgtccgcaccgccgcccccgagggacgagtgacagcggccgccgcgctcggtccagtcttcccggctggaaggtgcgggggaggggcggaggagcggcggggcgggagggggacggggcgggcggctgggggcggaggcaggacctcctgtaccttccctcctcgcctctctcactctgacagcgccgaggtgcgccgagcaggagcagggaacaaaggagcggagaggggaggggagagagttgggcgagggagagcccccggccggctgccagaagatcccggcgggaggaagcccaagtgtcacttgaattccacccaaggagcgggcgcctgggatcagagcgtcctgtttagcaataacggctggagcacgtcctacaagttacgggagagtcggctgtgaaggagacgttcgcttatcccctgtgtccccgctcctggcccctccagacccccgccttgcctcgcgctgggaggggagatccagaatgaaaggcaagaaaggtaaggcggccgcgggctgcgcgcaccagaagacgcgagtccggggaaacgtgctggccgggccgcgccgcgcggagtcacttggtggacttttccgcccaggggctctcatgctggagtggcggccgtgctctttgttgaggctgcgtctgaaacggcagcggctgttttcctgctagacacaacacgaggggctgttgtggggcgagcctctccacgctgctggcacgttgtcaagaaacacgctcagcgccttgtttgtgcgcctgcaagtttcattgtctccgccgacaccccacgctcggcccagccgccgcgtggcttctcgctctttctcgcgtgctggggatatggggtccgagtagggaggacccagcccctcgtttttcccgatccggacccaggcggccggggccgcgggaccgccgcggctttgtctgaaagttccactcctaggctccccccgcccccgcccccgccgcccccctactcccagccgggccctagcactgttctttagggatgtggtgtttttacgatcgaaggaatgcgattctggaccccctcatcgccctcgggtgtaaacagctttggaaagctagacttttacaaatccccagtctctaaaagttttcccacgatgaattttggggcaggaggaagagttagcacccagggccagcagcttcaagcggcatgcagtcaaaatgcgtccaaatgtgacaagcaggcttggttgtaagtgcaaagagcaaggctgtcattgtttccacgaagtgttctggaagctttacaactaaaacttgccgtcagtttggtttaaaaacaaaatacaccggagggggacggggggtggagaaaccacacaaaacaccccgaaaggtcagagtgtgaagtcccttttgaagttaacaaaaattgagtccctggctgggaggtcccccgagtgttcc

SEQ ID NO: 29912 - DNA, 414 bp, Homo sapiens
  chr18:35249615-35250029
  hypo
cggcttaacctcagcaaagcgtcagcaggcctttgcaggggtagggaatgcaggaccccgcagtacctacagacggagaggcaggcgctactcctggcacgtttcccgtgtgcgcaggtggcccaggggaaggggtgactgctcgccgttgctccgagcttgtctctgggccccggagggcagtgggaatgccaccctgagcagacgtgagactcacagggcatccccaggcgcactctaggcttcagtcgtgcacacgtacacatttactgagcctgtaccgtgtgccaagtgctggggattccgcaagcaagaaaacattcggagtctctgacttcacagagctaaaattcacacgggaggaggcggtcggcacataacagacaactagagaatgacgcgagttgagatggc

SEQ ID NO: 29913 - DNA, 486 bp, Homo sapiens
  chr18:59483218-59483704
  hypo
cgccccgcctgtcctgctcctcctccaccgcctcctggggagccccaccttgcagaggctgctgttcagcagggatggtcaccacggtgacggacttctgctggctcccgggcagcaggcggcagcccatgtctccgggcagcagcgcacgctccttggagatgggcaggggcagcatgtagcacccattgctgggaagtttgatgaagaccggggtgtgttcggaagtgtgtggaatggcgatgacagccaggacctccgggtcgtccgggagctgcgacacggagaagccgggaggcagcttggtgacaccgcggcaccaggggcaccgcacatccttctggctggtcctcatctgctgcaggcacactgaacagcaggtgtgcttgcagtccagcaacttgggcctgcgccgggggctgtagtaattgaaacagatctgacattccagcagagagtcctgggacagcgtctccatggtggacc

SEQ ID NO: 29914 - DNA, 164 bp, Homo sapiens
  chr18:60120657-60120821
  hypo
cgagaaaatagatggcatccgaaaagaacttgcctgtcccacctccccgtctactatcctcctgtgtctgtcccgaaatactgtctgtttgctccatcactgtagtgaactgttcctcctccatgtacaaatggtgcatcccttcccacttactcaaaaatgtc

SEQ ID NO: 29915 - DNA, 115 bp, Homo sapiens
  chr18:74068664-74068779
  hypo
cgatgaatgcagccattcgtggtaaggttttacattgttgggggtggggggcgtcatgatacccagcttccgcacctagcacgacatgggcaaactgcagacacggagaccccgc

SEQ ID NO: 29916 - DNA, 153 bp, Homo sapiens
  chr18:74069268-74069421
  hypo
cgcagagtggcgcacccagcgcagagtggcgtccccagcgcagagtggcgtccccagcgcagagtggcgcacccagcgcagagtggcgtacccagcggagagtggcgtacccagcggagagtggcgtacccagcggagagtggcgtacccagc

SEQ ID NO: 29917 - DNA, 163 bp, Homo sapiens
  chr18:74073695-74073858
  hypo
cgctagctctcttccgaggcggaatctacgcattcccacagacgtgtctcctttgccagattcgctcagttcgaatggtgggaagaatggaacaggcacacggccccagggaggagtgcgatggagccagtgaacaatgagggtctcatcatcatacccctcc

SEQ ID NO: 29918 - DNA, 684 bp, Homo sapiens
  chr18:74083302-74083986
  hypo
cgccgcctggtaggggctgaaatctcagtatctccctcgctgcggatggtcaagccactgacagaagagacccctcttcctctgctccccttggggatagctgggcgggagggcgatacctgagtgtgcccgcatgtgggccctgaggtggccgggctggtggaagctctttccgcactcgatgcagacgaactctcctggccgggcctgcgtccggagtgtccctgcggtggcgaggtggtggtggtggcagggccgtggtggggttggcgtggaggtgaggaggcaggagagcgagggggaagcgagaggaaaacatcattagtctgtctaatgtgtcatcatgtgaggctcccttcaggccctggtgacaactgtcagccttcatctcggctctgctgacaggccaggcactctcaggactgcaaggatgcataaattacagcgaattaaaaaccactccctgggacaggaggtgcccgccaggcagcacgtcgggctgtgcagctccgagcaactgcaggctgggcacagccatcacccggctctgtcaagcagcacatccagcaaatcagagtgacaccggcgtgacagagacgaggctcatggaaaataggaagtgagcgggaccagagcccaccgtgacccggccgcgatcctgggagacccacgcagagtgagtgc

SEQ ID NO: 29919 - DNA, 1404 bp, Homo sapiens
  chr18:74090923-74092327
  hypo
cggccaccggctcctgtttgatggagtgtaggacgggggggcgccccagccacgccgggctgggcctgcaaggccgcgtcgcccctggaccccgcagcacaggtggccagagtcctcagctcctgggctgccttcgaggggggctcgcggggaggtagaggaggagcgcccccttcgccctttgcaggaggtggaccctgaggctgagcactgaatttggctttcagggagtccggggcactgtgcttatttgtgggggcaaagccagcccccgctggggggaccccaaacttctccacaggcttgctattggccgagggctgcgcgccagcccgggcgatgacggtgggcgtaggggtggcgctcctgctgaagcccccgccacccggggcaggcaccggtttggagctagcctcctgcctgggcttggccaggggcccctgtgtggccgcgccatgtggctcctggccgtgacaaggtttggtctgtcgatacccgtcagggccgggcgcccacagagcgcagggacctccggaatggctctccttattcttaggcatgctagcggcttttgtgaccactcccaggggagaagagccacttttggaccccggcatcccccctggcacctgagtgcgggtgaaccgagcaaggagcaaaggctggcattctttgccaccgagggcaggcggggggcccgtgcgtccgctccgggaaaggaaaaccaaattgcttctgatgcttttgtaaccattgggctgaatccacgggggagccacggagttgcagctgacgcggtgccagatgcgtttgtgcatccacaggacctcggggtagtaggtcttgtggctgcagtaaggacacgggtgaacgactaaagccgcctgcagggaggaggccgtctccttattgctggggtcatcccgcgtcgacctcgcacttaaatctagcggcatgaggtctggggccagcgcccgcttccctcccccagagtgttccttgttgtgcaaatcggacagcttttctgcagggtgacccgtctggccctccgctcccgtactggaagggaactccacaccatcaccagggacgggcacctcctgcttggggtgaaatgctggcatctttaagtccatagaaaatctgtgctgctcttgccttctagaagtctctctgctactgttttcaagtatggacacagaagctgcgatccctgccttggactcgccggtgtctctttccgaggcgttatctcccatcttgtgactctggtctccactggagagctcggtcgaagtcacctcttcggaaaagcagcagcggcgcggctgtccccctagaggaggcaaaatatgaaacgggaagttaccatttctcatcagaacacagcaagacacacggtgc

SEQ ID NO: 29920 - DNA, 874 bp, Homo sapiens
  chr18:74096607-74097481
  hypo
cggtggccctgatcctgaaacggaagaactcggctagagaagtgtccggggagggggctccagctccctggttgaggaaatgcctggttccgtggctcccatgccacacagggagaaagtctgcaagaaaaagcacttctgctcctcagtccccaccaatctgacagcccctgggtggcagtgctcaccgggcactttattagaattgaaggaaagagaacggtgctgatttgagcatggcgtggccctgcatagatggctgcctctaaccctgaccgcagtgccgagggcacacaccagagagggaaggctggctcagaaaggcctggcagcggccctgtgcagagggagcaggatctccaacactcaccccatgctctccgggtgcacggaagcacgtgccaggaggaggcagccgggtccgagcagccctagagaaggcgcacgtcgctcccaaccccacgagtgtgcacacgcgtgccacagacggtgactatggctgctctgtcctcggctcaaacacaccaggggctcccgggttcctttctaagcaggaccttcctagatgtgtcttggaaacacaaacatggattaggtcttgggtgacttcactgcgtcccaagctggccctggcctggctggtgccgcacaccgccgacaagcatgtttcacacggggcccagggagtggcagacttgcactgtctgaagtccctgaggcaacatcttcaacacacacaaccgccctcaaaagcacagaaatgcggtgagggcactttgtataaagttactcccctttcacttaaaatattttttattactgtagtaaaatatacataacaaaaaagtctgcagccacgcagccacgctgaggc

SEQ ID NO: 29921 - DNA, 451 bp, Homo sapiens
  chr18:74120305-74120756
  hypo
cgaggggctgcggcgtgcgtctctcctgacagcgacacacttgagaccctccgggagttccagccggggtgaaaccagtcacaagggaaaatagcaaaaattaagaagaagtgcatggctctggtatagctcggaaagtacactgtgaggtttaagggatggtttaaaaggaaccaggaggtgaaaaacgtctaaaggcggaaggtgtcaatgtttgtcatccaactaggaaactgagggcacatggctcccaagactgtgtgagacactggcaccctaacaccaagaagaacatgaccgctaacgacagaaagaggcgtaaaaagaggcctttccaaactgacccacgtgaatgtttgcatagtgacacgtttgtgttcgctcgctaattcacagaaaacaacttccacaaagctgtccttagatttccagtaatgtatcaccctcagtc

SEQ ID NO: 29922 - DNA, 158 bp, Homo sapiens
  chr18:74134955-74135113
  hypo
cgtctggccacctggagtttgcatggagaccctgggctgtgcacaccgcaggactctcacctggaacactcggagaccccaggattcaagcactctgcagctggcagcacaatctaacagagacccattaaaacggatgtccacaacacaatttacac

SEQ ID NO: 29923 - DNA, 1161 bp, Homo sapiens
  chr18:74144952-74146113
  hypo
cgagacctggccgcacatcctgagtccacacatcctgagtggcaacgacactgaaatccacacatgcggcactttccattgaagactctgtaggcttctgagatgctcccattaaatactaactgtaaggccagcctctgctgcgactgctgttcatcgctgtttctgttatcagacaggaagatctctagagtctagacatccagtaaaaagcaccactgaccgctgagtactcccgtgcaaaactacccactcccgaatacaacatttctccatggagttcgctgtcaactctgaagaacagaattcatcaaggtgcagctccagccactgttctcagcgtgagtcctgcggggccctcaagaaaaagcaggtctggcccctgtcttcaatgagatggcaatttgaggatgcctgacgcaaggcggatgctggggacagagagggtcatcctgcctgaaaagaatgtgtccacgcaacagggaggaatggggccagcctgaggcccaggtttgcattccaccctgggtgccgtaccgcggctgcacgctcaggccttgtggaggagacatgggagccttgagtctgggcatagcatccgggtcacagcaaggtggagaggggagaagacgggcaggtgccagagctgaaatgcatatggagctgggagccacctcagcttgcaaggaggaacaccaaagggctgggcagaagggtgggaatccgtgcgttaagcaaacgcctagtgaagaatcgagaaaggatgggcttagtcgcagcacatcacggatacaggagggcgacaacacaaccaacacaggcaggtgcagaatcatcagtcggaatgactagaatctcccaaaaagctcagcagcaaggcatcatctcacagtgccacgtccccagctccacaggggtgcacaccgctccatggcatcacacctctcctggccgggaaaccccaccgcgaccgccagcaccttttctcacaggtgcaccaagccctcggcaacgccttacccaacccagcacctgctgctctggccgttgctgtccgttcttccagctggtcaggaactgacggctcggagtggaatcagacctccctctttaccaggagcgatcctgcctggtccatgagatgccctatctcacgggaac

SEQ ID NO: 29924 - DNA, 266 bp, Homo sapiens
  chr18:74148373-74148639
  hypo
cgttttgagcctctcgtgggacccatgatgaacactgtgtgaggacaagcgctcctcccaacccatgacttggcttcagagagagctttgcccgtgttgcgtccaagccaggacaccgctgagtccccgagagactcagcatcgcgagtggattcagctgcaaggtcagtgcgcgaaggtattgtgagagctcctcctgctctaccttgaagaaacgcttagaagaagtaccatataaaggttgcccacacccagcaggcttggcc

SEQ ID NO: 29925 - DNA, 308 bp, Homo sapiens
  chr18:74170482-74170790
  hypo
cgaagggaatcccgtccctgagaggaccaagggcacaggagtagtgctcgggaccctcaggacggggcatgcactgtgggcaacgccaggcctcaccgtcgtgcgtgtgcatgcctcaccgtcgtgcgtgtgcgtgcctcaccgtcgtgtgtgcgtgcctcaccgtcgtgtgtgcgtgcctcaccgtcgtgcgtgtgcatgcctgtaggcaatgccaggcctcaccgtcgtgcgtgtgtgtgcctcgtgtgcgtgcctcaccgtcgtgcgtgtgcgtgcctcaccgtcgtgcgtgtgcgtgcctcacc

SEQ ID NO: 29926 - DNA, 367 bp, Homo sapiens
  chr18:74171117-74171484
  hypo
cgctgcagcagtaacggggcgccgggcccacctgctgcccctctcctgtgcatagggcgctctctccctgccccgagcttcggcttctcctccatgcacggtcactgctggaggcacactggacccagtgccagctcgggaaatcctgggccggtgacagccctgacccgtggccaccatccactcaacatcattgagccctcccacaggcacccaagctctctgaggacagccgtcctagcttccttcgtgggagaaaactctggccctccactgccggccagggaggcctcgcgtgccaagctggccctgagctcagcccaggatttgtgccattcaggacgtggcggccgtgtgcaccccatcg

SEQ ID NO: 29927 - DNA, 122 bp, Homo sapiens
  chr18:74171505-74171627
  hypo
gaatgtattccagcactgtctgccatgatgccaacagcaacacttctcaacaccaagcctttaaatgtccagcagctccacagcccgagtcagagtggcccagcctcccctggacctgatgc

SEQ ID NO: 29928 - DNA, 177 bp, Homo sapiens
  chr18:74175495-74175672
  hypo
cgcatcacactgccgaccgccagaaatgccaggcccctgggtggctctcgctcttcttggggatgggtctgtggggcgccacctactcacctcctccgcagcatctgcgtttacaaaacacactagggtactagggagccagtctgtgaccgcaacgcagacgtgcccactgaaatc

SEQ ID NO: 29929 - DNA, 124 bp, Homo sapiens
  chr18:74176907-74177031
  hypo
cgaccccagggatacagccgtgcatccgatgagggcagctgcaccctcctcaccttcaggcaacctcgaggggagccgccagaggagagaggctccagaggtgccagggcccagggctcgccac

SEQ ID NO: 29930 - DNA, 147 bp, Homo sapiens
  chr18:74183568-74183715
  hypo
cgacagctgggcctcagccaggcaccagtcggggcctcactagatcccgtcacgctagatcctgtcacatcgctgaacgggagatcccagaattggagccgacttcccccaggagccgggtccagcatgcagtcatgctgccagtcc

SEQ ID NO: 29931 - DNA, 427 bp, Homo sapiens
  chr18:74194245-74194672
  hypo
cgcgacctattattccattgcccgttctttatttttgtttgtattttactgtagatggtccccaacttaggaaagtttgacttacactttttcaactttaccaggtgaggaagccacaggcagtcagcagaaagcagtgagctgctccctccacaggcccggcagcggcagccccgcgatctccagggtggacgtcggtacttcatggcaacctgcactgccaggtgctcctgcccaactgtcggctaacatttacccattccaagcgcacttaaggtaggtgaggctatgttaccatgttcagtagactgaagggtattaaacgcatttccgacttaaaagtatcttcaacttaggatgggtttctgggaaggcagccctgtcgtaaattagagagtatctgtctgtatcaaacgtgtgaccttac

SEQ ID NO: 29932 - DNA, 246 bp, Homo sapiens
  chr18:74325503-74325749
  hypo
cggtctcgtgcaagccccgcctctcccttactagcaaagttgtgaggacagcgcctgcacgcaacacttgcttactaacttgtaactgttattacagaaagcgtggagccaaacagatggcagaggcccaaggaagagcgcgctaaacccgaagtagatctgatttcacatcttgacttggcgattgtttagctgggtcagggtaaatgcctcactgttcctcgtctgtaaatgaacacgggtgct

SEQ ID NO: 29933 - DNA, 173 bp, Homo sapiens
  chr18:74325938-74326111
  hypo
gacaggggacactggaacaggggagacgacatggaagaaatctgggggagccaaaagccgccatgccgagaagggggtcggaggaggcgcgggagagaaaagcccagggctgtacactcgcatccctctgctgccggcccttcgggtacattcaaatactgggcatgagtccc

SEQ ID NO: 29934 - DNA, 140 bp, Homo sapiens
  chr18:74721790-74721930
  hypo
cgccggcgtcttaccttgtacatgttgcacagcccaggctggctgcgggcatgagagggcagagggctccggcccggctttagccagggtacctgccgggggacacagagtgggctgcgtgagtccgggtgggcgccgcc

SEQ ID NO: 29935 - DNA, 1775 bp, Homo sapiens
  chr18:74736601-74738376
  hypo
cgacggagaatcggccgtcgtggcagcgccagggcctgcagtcgccagggtggggctgaggccagggccggaggtctgggcagaaccacagggaaggaccttggaggccgacctcagtcccaacactgaccagccgatgtgctccagcaagtcgctgagcccagatgtgcctgtttctgtgtttatgagatgggagcattcatttctattcttacctgaaataaccccaggctcctttccgcagcagcacactgacctgggtgacgtgtcctccccatgccaccctcccacaaacgctgccttccacccacagcacccgcagagagtggcagagagggcattcctgagcagattgcaggagttttgggaggtgcatgtgtgcattctcgtaactctccgaggcgggtggttttagtagcccttttattcataccagaaactgagacttagcaaagttaaggtgggattgatggaggagctgccgttcactcctgcctaaactccctccgtatgttctagaaacgcaggcgatcccccacctctagctgtctgacaccagcccttctccagcccaaagtggctttcactgcagccaggcttttcctctcagggtaaaattgaactgcagataatcgatggctgacgcatctgtggctagcagctgcttcacggagggctgaccaggagagacccagaggctttctgatctgtcgggagccaagagctgagccagggcccccgcctgcagccacagggacctcgagtgcactcagcggtcttggtgcaccatagccacctggacatcgatacgttaatgactgttaaacatgaacaaaagccgagtcccacactccaggacattcaacacccacccgacagtctgtccgagtgttacctccaacagtatgaagctcaccgtgcaacggctccaggcttgtttaggaaactgtcccactctcatcttgctctaatcagaacatggcaggaatcaaatatccatacctgactgtctccagtagaatggtgatgacagagcggacactgtcctctattgaaatacttttttttttttttttttttacctagagcatgtttctcgtgctccattcccctgcatccgtggaaatcacatcgcacaagtaacttccatcaaaaccagcacgtgtgagagacaaacatctgggttcccaggcacaccccacaccctgagtaaaccaggacggacaggccgaggttccgctgctgcctttctggcacacgcaggggagcagtgggcagcgggttactccctctccgaaaaaccgtccttctccccatgccctgcggcaccgtgagtgcatcgctcatcccgctcgctgtgctcccagcctgtgccatggaacctgctcaactgcggagcctgggatgaggctgagcctgttgctcttcctgttgagtttggtttcgaccaccctgcatgaatctttgtgcttccaatgcttctggtcagggggccctgccgcctcgtttcagggacggtgcctgcaggccgctgtctgtgcctgaactcagcgcttttcacgctggcttgacccacggagggcggctgtcagccgcaaccggaggcagagcgcgggcgttctgaggctattggatgaggctcgctggtgataccttctgggtttgcaactttgttctaaagccaggggttttcaggccaacagaaatgcatttagttagtaatccagagcatgccataggaaaacataacgaataaaactagaataaaacataac

SEQ ID NO: 29936 - DNA, 48 bp, Homo sapiens
  chr18:74755425-74755473
  hypo
cgtggcatctgaaaatgtaaataagtgatgtaccctgtggggtagctc

SEQ ID NO: 29937 - DNA, 368 bp, Homo sapiens
  chr18:74755590-74755958
  hypo
tatgaaatgtcatccctagaaatggcttcatttgggataaagctttgaacttgcgtgcgtgccccgcaccccgtggcggactgagtcactgctttgctgttgcggcgtggtgagtaaaactttcccaggggagccggagttgagtgagaaagggatgcaggacacgcaggagctgacacatctctatggatttaagtcgctgtttccacaaatgctactcacatgcccacacgtgtagggcaggactgtcacgcgtccactctgctcagctttccaggccggatctggtcccagccattctacctgacccagactccccgcacccctgccattcccccagctgccgtcctgtgtctcctgatttctgc

SEQ ID NO: 29938 - DNA, 337 bp, Homo sapiens
  chr18:74759077-74759414
  hypo
cgaccacggctgggtgcctgcccaagagaaccgcagacctatgtccacgggaaaccctgaacgccaaggctccggcagtaggattcacgacagccaaagggtggcagccacctgaacatccgtgagctgatgcgtggatgaactgacggtgatgtgcacacacgatagaatatcctcctgtcgtaaggaggaatgcagcactagcgtgcgctactccatgatgaacctcaccagcattgtgtgaagtgaaagaagccagccataaaacaccacgcatttacaggaagaatccaggacacgcaaatccacaggcatggaaagtagattcgcagtggcc

SEQ ID NO: 29939 - DNA, 636 bp, Homo sapiens
  chr18:74763734-74764370
  hypo
cgtgaagaccaggggtaggagcgtgagtgggggtgcactttgctaaacctgcatgtaacagtgggcttaattttccctttttttaacaccttgtttcttcaaattacacaatgttgatgctaaaatgttctttgtagaagcgaggcccagctcctgaaggattcatctgagaaacccagggacatgcccttctctcattggaacaagtgggaaaaaaggcatcttaaaaaaaggttatggtgaagccgtgcggcagcactggaagaggatgaggaggctggagaaggcgtgtgagtgcaagctgccctcccgagactgtgccctctgagccagagtcttcctccgatgtgcccaagtccacccgaccaggaacgggggaaggagcggggcgatccaacagccacacaacagagtcccaagttccaatcacaaattcaggctgtgaggtgaaatcacaaatgtgaactttacttatggaaaccaaatagaagtgctttcaaattggggatccaagacccaacagacataagtgatcagcagcatcccgatcgggggggtaagacaaaggggtccttggatgggggcacctgtgagcagggacccctttgtctgagctccccgggtcccgagctggac

SEQ ID NO: 29940 - DNA, 75 bp, Homo sapiens
  chr18:74806376-74806451
  hypo
cgttgctcataagtgccggttcccggactctgcaggaggcacaccttaacggggacactttactgcgggtgccac

SEQ ID NO: 29941 - DNA, 107 bp, Homo sapiens
  chr18:76123588-76123695
  hypo
cgtgatccacagaaatgattgctacgttccctgcagaacggacggcagtcgctggacagggccccagagcgcctgggtgcggtcagctccgcggactccccccggga

SEQ ID NO: 29942 - DNA, 31 bp, Homo sapiens
  chr18:76123894-76123925
  hypo
ctgtgggcccgagcgccgagggtcccatttc

SEQ ID NO: 29943 - DNA, 115 bp, Homo sapiens
  chr18:76189679-76189794
  hypo
cgtgggacccatgacgcagagaggcaggtccctacccaccgggccgtgggccgctgagcacagagcgtggagccctgcggcggggtcgttcctgggccccgcgtgccatcctggg

SEQ ID NO: 29944 - DNA, 273 bp, Homo sapiens
  chr18:76189872-76190145
  hypo
gctccctgtctgcgggccccttgctttccgcagcagccggcctgtcggtcctcggcgggagcctctcgttccccagccacggggccttcccggggtgcggccgagtcaggcggagaccccctggggtgggtggcgggagcggggccgcagcaacagggcggcgtggagggggagaaacaccttacccagccggcggccccctccagcgtgcagctggaacgggaagctgtctgctcagccgtcagaaggatgcgagaaattacctagctcccc

SEQ ID NO: 29945 - DNA, 487 bp, Homo sapiens
  chr18:76486313-76486800
  hypo
cgagtgatggcgcaaagcaggccggtgaagcctcggcgctgggcccggcctggcactgcgcatccttggccttcgggacccgggctcccgcccccgtgcccagcctcacggagcccgcccaggcctgctgtcccccgagctccaggcccactgcccgccagaaccttctggtcttgcctcgcttcccgcctgcacttttctttcccggcctggcagagacatctataccagtgggaaaggcgagccactccggcagcgctgccaggttgcactccagcacctcacactcgcttctcccgggacttaaatttaaactcctcgagcgtcatgtccccatggctgtctggggccatcattgccacctcgtactcctctcttcactgccacaagaccaagagacagatgcgtcccggggtccttccacagcgttcccaggggaggaggagggcgcctggagccctggggaaggcgagcccgagccagcgca

SEQ ID NO: 29946 - DNA, 154 bp, Homo sapiens
  chr19:13119777-13119931
  hypo
cgctgtagccaggtcctcaccgaggtagatttgcgggggtctcccagtcccagtcccacacactgcctcatccccactcacagtcaacgcccgcaacaccccgccacccgcagtctgtcgcgcagtgacagcctgtcacaagcaccgccgcaca

SEQ ID NO: 29947 - DNA, 229 bp, Homo sapiens
  chr19:13156427-13156656
  hypo
cggtgctcagcagtctgttgccagggaggtaggagagaggggcagcaggcacactgggttgacaactgcactgtgttgaccccatggcgggcatcaggggaccacaggctgtggttgcgcctgtccgttctccctcccttttctcgtaggcttcttcctcctccagtgcaagagctggatccaggattggagaatttgctcttgcccacctctccatgtcctcgttgcc

SEQ ID NO: 29948 - DNA, 73 bp, Homo sapiens
  chr19:13181444-13181517
  hypo
cggctgaggccgccagccgtaagatggctgccaaggtctaaaatggctgccagcagcgcccggagcagcgccc

SEQ ID NO: 29949 - DNA, 420 bp, Homo sapiens
  chr19:13186075-13186495
  hypo
cgacttctctgatgtgggcagcttggaggaccgtggcatcacagattgggaaggggcttgaggaagaggagcaggttgaagctgatggcttgaggggccctagggctgatcttggggttgggcacgcagtgagtgcccagaaatgctgctgtcggccggcaccactccccacccagagggccatctatgcacagttctttagcctggactcttggtcactccctggagcctcagcccatccttggcccatgtgaccctttctttcttccccagcaccaccaagcgccccaagtccatcgatgacagtgagatggagagccctgttgatgacgtgttctatcccgggacaggccgttccccagcagctggcagcagccagtccagcgggtggcccaacgatgtggatgcaggtatgggtgc

SEQ ID NO: 29950 - DNA, 119 bp, Homo sapiens
  chr19:13194593-13194712
  hypo
cgcccggcttctgggaggaggctagagacagcactgtgctacacaagaggctgatgcatagctgcagagagccagagggcccggctccgccactgatccagtgggtagggagtggcagc

SEQ ID NO: 29951 - DNA, 35 bp, Homo sapiens
  chr19:13201116-13201151
  hypo
cgcaacgacaggcgcctcctctgccaaccggtttg

SEQ ID NO: 29952 - DNA, 155 bp, Homo sapiens
  chr19:14522737-14522892
  hypo
cggcactcgggcggccccggtcttcccacccgtgccatcagacactggaccacaccacagccctccacagcaccttcatccttcaggatgtgctctgagataacgagggcacgggcgccaatatgaagcccaaagatgtgcacctggcctgactc

SEQ ID NO: 29953 - DNA, 366 bp, Homo sapiens
  chr19:15302345-15302711
  hypo
cgcctgtccagccattgacacacacgcagctgtggccacccagcgtgttgaagcaggtacccccattgtggcaggcgttgggctgcagctgacactcatccacgtcctccgtgcagaactggcctgtggcacacagatgcagcagtccagccacctggcgcatgtccacccgaggcctgcctccccgctccctctggccgcagtgcccacctgtccactcaggagggcactggcagttataggtgttgacgccatccacgcatgtccccccattgagacatcggtgtcctggacagtcgtccacgttcacttcacaattctgaccctcaaaccctagcagggaagggggcaaggatggtcaccgcc

SEQ ID NO: 29954 - DNA, 367 bp, Homo sapiens
  chr19:1785308-1785675
  hypo
cggtggggtaaatccggggcctagcggggcttgcaccaggacaccagcccctggggtccaggaagggcacctggcaatgcccccaaagcaggggtccccaggggaggaggcctccataggccatgtccaaggccccggggaggtgaggaccttgcccacctccatggtgatggacagcaggcaagacagggccaccacgaccgcaaaggactggtggtcgctgaagctggcgggtcccgccgtgtcgcggctgatccacagtgtcatgaagaagttgaccagagaggtggtcacaccatgggcgatggcttggacgaagacccagtagttgaagagctcgtccttctgccccaccacgtacagctcc

SEQ ID NO: 29955 - DNA, 287 bp, Homo sapiens
  chr19:18123660-18123947
  hypo
cggtatttctgaatttctgtttccagtgttctctgaggcttaatgggaacatttctcttaggaggatccaaacccactcttgggggacatgaggccgcgctgcatgacttgctgaacggcacagggacccctcgaggaacaaggttgcacaccagctttcagccaccatgactgtggggagtggctggaccaagggctgacctccccgactgcatcaaagttggggaaccaagtctcagagtgaggcgggggcctttcggatatcacatgggacagaggaagagccc

SEQ ID NO: 29956 - DNA, 183 bp, Homo sapiens
  chr19:2997586-2997769
  hypo
cgtgcccaagaggaacaatgatcaccggttccccagcccgagagagaagtgcggatgtgatagatacattttatttccaccgaggtcccctgcccatcggcccccacatgcagcaggggaaggtgtgaagccgttggccagagagcagatgggatgtacggttcctaggcagggctgggaggc

SEQ ID NO: 29957 - DNA, 574 bp, Homo sapiens
  chr19:31769887-31770461
  hypo
cgtcttccttcccttccatttccagcaaggagcgtttgcgaggcttggaccagcgcttggggttgttgttatcggtctcatggttgtcgtcgcggtaatgccccgtctcgttcatgtgcaccgtcaactccaccagggtgtcgtaggcagcgctgcagtccttacagcggaacttgctggcccccgtgaagatggagccatagagcttgctgctctgccggtacagctgcacggtgctgaagaggctgggctccgggagcatgcggctctgtgacacctgctgcagcgtcttagccatggcgctctggtgccagtcgaagctcccgctgccacagctgctgctgctgctactgctgctgctgctgctgccgttgttcttctccgaggagggctggtgcaggttgaggttgaggttggaccagtaggagttggagaggaagttgttgtacacggccttcatctgctccaggctatccgacacagtcgtgtcttccagtgggaccgtgacctccttggtctcctcttcgttcttgatggagccgctttcaaagtcagccattcggtcactggtctc

SEQ ID NO: 29958 - DNA, 157 bp, Homo sapiens
  chr19:31770490-31770647
  hypo
ggcaggaaaactcggcggccggggagttctggtagctggggcaggccctggcgagctccttctccgggcacatgtacttggccgagggctctccatctgccgtatgctcctctgggtctaaaccttcgtccaccagggcagcagcctttaactcttc

SEQ ID NO: 29959 - DNA, 476 bp, Homo sapiens
  chr19:34303771-34304247
  hypo
cgagtatgtgctttgccgggaggagcggcggccgcagcccacccccactgctgttcgaatcaagcaggaacccctggactaggccctgcttcagtgcccacctgggcccccccagggacctggaaacagtgctggggagttctgcctgtgtatacttggccgtgggcatgagaccgagggtgaggctggagggtccaaagctggcccagcgagcaccagggtcccaggtgtcatggcaacagaacgtgggatgctggaggcatgcctgcagaaggactgttgatgcgacccaaagatacagcggtgggatctctgctgccagctctcccagcccctcagcttcgcagcctggcgcagcatcctctgaggccccggggcctgttggggcggggttggaagagccgtctgcagctacttcagaggagctgtttatccctctccacgcggggcagactctggcgggtctcctagcgtcc

SEQ ID NO: 29960 - DNA, 450 bp, Homo sapiens
  chr19:35551123-35551573
  hypo
cgtcccctcaagctccccaggatggggccatgtactttcagaccccctagggcagggccaagcctgggctctggggacctgggctccagtcccctgtcgccgccccctgctgacccttgtcccacagactgtggccgcaggaagctgcccgtggaccgcatcgtgggaggccgggacaccagcttgggccggtggccgtggcaagtcagccttcgctatgatggagcacacctctgtgggggatccctgctctccggggactgggtgctgacagccgcccactgcttcccggagtgagtgccccccaatggcgctgatgatggggaggcagaggagcggagagacagtggggaggagggcggattgtgcccaggcaggtggccaccctccacccctttccctggtaggcggaaccgggtcctgtcccgatggcgagtgtttgccggtgcc

SEQ ID NO: 29961 - DNA, 321 bp, Homo sapiens
  chr19:38964045-38964366
  hypo
gcccccctgcctgcgcctgacccaccgcacctggggctcccagaacagcctggtggagatgcttttcctgcggctgagcctcccagtccagttccaccagcacttccgctgcactgcaggggccaccccgctggcacctcctggcctgcagccccccgccgaggacgaggcccgggcggcggaacccgaccctgactacgaaaacctgcgccgctcagctgggggctggagcgaggcagagaacggcaaagaagggactgcgaaggagggcgcccccgggggcaccccgcaggcggggggagaggcgcagcccgccagggc

SEQ ID NO: 29962 - DNA, 257 bp, Homo sapiens
  chr19:39015907-39016164
  hypo
cgcgggttggggctgaggcatgggattggggcttgggctggtgctgagccctgtgtccccacagtccggtggctcggaccaggaacgcaccaagaagaagcgccggggggaccggtactctgtgcagacgtcactgatcgtggccacactgaagaagatgctgcccatcggcctgaatatgtgtgcgcccaccgaccaagacctcatcacgctggccaagacccgttacgccctggtgcctgcccagccccgtcctc

SEQ ID NO: 29963 - DNA, 162 bp, Homo sapiens
  chr19:41643155-41643317
  hypo
cgcagtgctgctggagatccagcgcttcatcagcgtggtgccgcgcaccctcaccctcgacacccacctgcacagccactgtctggccaaaggtgcccactgagtctggagatcctgtgtggggccccgatgcatgagcgtattccgagatcagccagaatc

SEQ ID NO: 29964 - DNA, 782 bp, Homo sapiens
  chr19:45004129-45004911
  binary
cgcgcatgcacgcagaggacagtcgcggaatatacagctgtatcagtaactccatcaaccccggtgacccgaggctaaagcgccacccgcacagataccaggtctccccgctacactcaccaccgcttccagcttcccgcgtagaccctgcgcatgcgcgcatcggacaccaagcgctgccccacgcccctaccaacctgggcgtccgctggcccgcagcccaggctgggcctgtcaccgcctcagtgcctagcacggctctgcggcaggacgaactcgggttaggcaaccccctgccccgattctgcaacacggccgactcgggttaagctagttcggtcccctctcctagtcagcatccgcaaggccgctgggggttaagtctgaagggccgagctgctcggcgacagcaagcgtccgcgcgcgggacaatggctgctcttgtggccgaacccggaagtgcacttgggctcggagagccagaactacaattcccagaagcctccgcggcgcggacggtcagtaggcggggttccggcttctccaaggaagtggggcgggggaccgggccagaagctaagagggcgtcctcgtccggggcccgggggggcgccacacctgtgcatgtgcaggtctagggggagcactaagaccagccgcggcgccgggaggccgaggccagtgcagcgacgcatggggagtcgctctggcgtgacgtcagaatccaatagaaatggcggggaccctttctgggtgccccctgcctgtcagacgctgcgcgc

SEQ ID NO: 29965 - DNA, 373 bp, Homo sapiens
  chr19:45314498-45314871
  hypo
cgcttgtctgtacccccgctggtggaggtgatgcgaggaaagtctgtcattctggactgcacccctacgggaacccacgaccattatatgctggaatggttccttgtgagtgcttggggctggggggcctggagtcagggcacagcagggcagcaaaggttcattctctcatcagtgcctaaggcctgtagagatccaccaagccacactccttgttacagatggggtcactgagtcccactgaggggaagggatctgcaaggtgccccgtgtctaggcacagccaagtctagaatgacattgacctgctctggactgcgggctcttgagagagagaacagagacagacatcaagaaagcagaagccaggcac

SEQ ID NO: 29966 - DNA, 300 bp, Homo sapiens
  chr19:45315421-45315721
  hypo
cgaccgctcgggagctcgcccccgcctagcctcggctgagatgcagggctctgagctccaggtcacaatgcacgacacccggggccgcagtcccccataccagctggactcccaggggcgcctggtgctggctgaggcccaggtgggcgacgagcgagactacgtgtgcgtggtgagggcaggggcggcaggcactgctgaggccactgcgcggctcaacgtgtttggtaagtgtcctcgggcatcccccgaagggaggcaggcagggaggggcgcagggcaggggctcctgacgtgaac

SEQ ID NO: 29967 - DNA, 292 bp, Homo sapiens
  chr19:45322448-45322740
  hypo
cgtaagggaccttcctctccaccctgagccccctctcactcatccaagtatcacaccctcctttccacttcctgggagactggacgtcgttcacctctgcccttgaccccaccccttgaccccaccagccggggcctgatcggagcctccatagcccgcagagccaatccccggacggcagggttgggtgagcagctctctgaccctgaaagtgaccagcgccctgagccgcgatggcatctcctgtgaagcctccaacccccacgggaacaagcgccatgtcttccacttc

SEQ ID NO: 29968 - DNA, 362 bp, Homo sapiens
  chr19:45377472-45377834
  hypo
cgggagtacttaggtccctggagcttggctcctggtgggtgtatctttagggatgaggcctgtgctcccctctcgaccttggtatccctctcacctgaccccacacccctccaggacctcaggcaccttcccgacctccgcagtggcccagggctcccagctggtcatccacgcagtggacagtctgttcaataccaccttcgtctgcacagtcaccaatgccgtgggcatgggccgcgctgagcaggtcatctttgtccgaggtgagtgggtcttgggggccgtgtgtggagacctgggtccgctcccctggagttctgcccttcaggacttggggctgcactgggggaggctgcgccgcc

SEQ ID NO: 29969 - DNA, 130 bp, Homo sapiens
  chr19:4550735-4550865
  hypo
cggaagccccagccctcggccctggggatcaggacctcatccgggcatgtgactcaggatggagggggttctcaccggggtcgaggcacctgatcctccggcaccggcgtccagatggactcgggggact

SEQ ID NO: 29970 - DNA, 510 bp, Homo sapiens
  chr19:46330394-46330904
  hypo
cggctcccctgctgggctgggcaatgccctcaggccccggcacaggactgggctgcacgaggagcctgtgctggccaccacgggtggactaagagcgagagtgggactgcccttcccaggagggcaagcgcacgtgtgtgtgtgtacacactacaggcagactcaggcacggtaaccctggtttctaggcagcttgatgccactgaaaatgaaaataaaacagacagaaatagccaaaaaaccactgaaagaagggaatgggcccagagaaacttgcaagggagtgtggaagacgtgggctggttactcaggatagaggcggcctctgcaagctgcaggctgagggcagccaggaagtggaggaggggatcaccttgtccttctcatgggagctgaggtcgaggaggacatgcaggtactggaactggcgggacgggcgcttgaagatcaggtctcgaagtgtggacatgcccagataggtgcgactctgcagcaaaaggaaagggaccc

SEQ ID NO: 29971 - DNA, 112 bp, Homo sapiens
  chr19:50774482-50774594
  hypo
cgctaatgaatgaaatgggaaagccaataagagtttgatccttcccggcctcacccagggcatggacatctctgaaccacaagccgcggggatccgtgggccagccatcccc

SEQ ID NO: 29972 - DNA, 230 bp, Homo sapiens
  chr19:50784855-50785085
  hypo
cgagtggcggcggcgccaggaggaggaggcaggggcactggaggcaggggaggaggcacggcgccgggcagcccgggaggccgaggccctgacccagcgcctggcagaaaagacagagaccgtggatcggctggagcggggccgccgccggctgcagcaggagctggacgacgccaccatggacctggagcagcagcggcagcttgtgagcaccctggagaagaagcagc

SEQ ID NO: 29973 - DNA, 40 bp, Homo sapiens
  chr19:50789768-50789808
  hypo
cgggcagtggaggaacgtgagcgggccgaggcagagggcc

SEQ ID NO: 29974 - DNA, 143 bp, Homo sapiens
  chr19:53806012-53806155
  hypo
cgacgctgacacatatgtgcgtgttcacgccaggcttcgcacacatcactggccgtgtcatggggggacacgcaagacggaagcctccaggcgtgttcagcagaaacctcgagcccacactgtgcttcagagtctcccatgcc

SEQ ID NO: 29975 - DNA, 922 bp, Homo sapiens
  chr19:5994773-5995695
  hypo
cggtgaaatccaggttcccagagtgaccaggcggcatcttttggaacctcgaggaggcgccggccggggctgctagatgccctgcagggagtggttggggtcactgcgctcccgctttaccaggggctcacccaggctgcgggcgtctgggcccgcctcgctgccacgctgctcatcgcccatgtcatctgcggagggaggggtagggtcagtgtccatcatcaggagggcacgagagggagagaaggaagtgcacgttccgagaactgctccggcacgccaggcagggcaccgaggatacatggcagcctgtggaccccacctcggcctctgctccaggctgacctgtcctccccacctgccgttacccagaggtgcccccagctcgggccaggcgaaagagcctctgccctgtgcctccctttcccagcgccgacgggcctggggcctgctccccacagggctggggcctctggggtcctcccacccgcatgggacagagacggggcccgggggtccctctggcctgcctgtcccactctcctgctgggcgtgggcgcaggagaccaggggctgcctagtctgggcctggtgctgaggtccctgggcagcggctacccagaggccagcggcagtctgagccccagccgagccagtctgcagtgtcacctgctgctcaggcatcacccactgtccggatgacagatcccagggccctcaccccccaaggggctgcccgcatttccacctgttcatcatgagatggggcagacaggccacggccaggagtaccaccctcctgggagggtcgtggtgggaaagccgcagacgcacctacctttgtcgagcagcgtcagcgacagagaggcgagatcgttgaactgaaagagaaacctggagtcaggggcgcctgcagaggggc

SEQ ID NO: 29976 - DNA, 487 bp, Homo sapiens
  chr19:6001747-6002234
  hypo
cgagccccctaccctctagaagtttctctcagagccccccacccgccagaattctctcggaggtctggtgggactaacctgtaaaaggaccatttcagcaagaactgccgggcggccttggggaagctggggctgccggcatgctgcttcaggacctgggtgaccacactgtccagccagctggcccactggtccagggagctctgctgctgcagggtcagcttgaaatcctgctccagccgctgcaccacactctcctcgcactggcacacccacgaggcctgctcctgtgggcagggcagaggccagtgtcagcaatgtggacccccagccacggcagccctccctggacctagccatgctcagggcgggacatcgtgctgtgcttgagccttctcgcccttgaccttgacagctgcaagccaagtcctgtgtctcccgtcacaggggcagaatagagagctgagggggatcgtacccggcttcc

SEQ ID NO: 29977 - DNA, 449 bp, Homo sapiens
  chr19:6004120-6004569
  hypo
cgctctctgggacacagtggtcctcatgctgtcctggactggagcccctcccagccatcgttggggagcccaggccccaccccggacgcaccttggtctggatgacctgttgtgggaagtcactcatggcatttgtcaaccagccttccaagctcttggcaaagttacggatggcctgtgtcaaggtacctgggggatacagaccatgatattaccagggagaaaggcagtgactggaccctggaaatcagcattcagtgtaagagctggcccaagtgcgatgaaaatgaccaccatgaagaacgagccacacaggcgacggggaaccgaggacacttagaaacgggaagaaccaggcatggcccagcgctgctggtcaccacccactgcctatgcgggtctcacaggggcgattctgccccaggggacactgggcaatgtctggggac

SEQ ID NO: 29978 - DNA, 328 bp, Homo sapiens
  chr19:6005196-6005524
  hypo
cgaggcattgccctgaacagttttcaggcagacaggcaaggccaggccaaatgagaaatgcaatacttttgctgtttcccatcttccagcaaagggagcatagagtttactcaacaggacggagagctgcctggtactaacgggcatgcatatttgtggatggcctgaggggcacggtccatgggcccggatgtttgtggatggactgcggggcatggcctgtggtcctgatgctgtgatttatgaagagaggcctctgtgcccagcttccttgacgacccccagggttttggggagcttggcacgggcctggcccgagggctccctc

SEQ ID NO: 29979 - DNA, 462 bp, Homo sapiens
  chr19:6006891-6007353
  hypo
cgcgcccggccacttttgggttttctgtgaaagcgatggtctgaggtggctgaagacgtacatgtaagaaaggacagaggaggcaggaagagaggatggagcagcgccgggcggggccgtgggtcacttactggggaccggcctcagcacgtcggggatgagaatctccaccagcgcctggtagaggatgtggtcgcagctcctcatccacctgaggatggggtcgcactgacacagggagataagcttgtccttgggcaggacggcgccctcggggtcttcgtcactgtggagggaggggggacaggtgagctgtggcctggcccaggtgggctcactcagccacgggagcgagcagagagccgggctgcgggacttttgcccaacagtggggctggggttttgctccccatccctgagcctcgatgggtcccctccctccatgttgctcccggcgcctcc

SEQ ID NO: 29980 - DNA, 385 bp, Homo sapiens
  chr19:6017219-6017604
  hypo
cgacagggcaagacttcgtctctttcaaaaaacgaaacaaaacaaaaagatgggctaaatgagtcccgagccaaggactatgcctcgagaggtgaacatccagttagaagggctgcgagaactgtccacacgaagagctcagtccccacactgggcatggacgcaaaggtggcctgcccaccaactgatgccctcacccaggtgccttaaagactgcggcttaattctggtttccacctctccctctgctatcgtctgtcccctgatccagagaggtctgctatgtgaatacaaaaggcttgcactgatgcctgcgatttgcagaaagacaggaattccacgcacagaagcgaggcccgagtccagatcccatgtcaagagcgtc

SEQ ID NO: 29981 - DNA, 111 bp, Homo sapiens
  chr19:6024069-6024180
  hypo
cgtgagccaccgtgcccagcccattttcccatagacattttaactctcccgtggacttgctgcctgtccaggctctgcacccccatcctgcctgggtcacgcagccctctc

SEQ ID NO: 29982 - DNA, 510 bp, Homo sapiens
  chr19:6024679-6025189
  hypo
cgcctcattttacacatcggccagcacagaagtcaggatggaatcacagtgaggacgggagtgaggacgggatcacggtgaggacgggagtgaggacgggatcacggtgaggacgggagtgaggacgggatcacggtgaggacgggagtgaggacgggatcacggtgaggacgggagtgaggacgggatcacggtgaggacgggagtgaggacgggatcacggtgaggacgggagtcaggacgggatcacggtgaggacgggagtcaggacgggatcacggtgaggacgggagtcaggacgggatcacggtgatgactggggtccactgaaggggacttcttctctgatgtctgaattctcaagagaatgtcagagcccagtttaagtgctagagagcaactactagaaggacattctgacttcgatggcccgtcccagtgttaagatgccgaacacatttccagctatgtgcaaaaccgaatcaagagcgtttggggagaagtgaaagc

SEQ ID NO: 29983 - DNA, 127 bp, Homo sapiens
  chr19:6033089-6033216
  hypo
cgcgcccagcaggaccgattcttagagccactgggatgacaggcatcagccaccacactcagcaggaccgattcttacagagccactgcgcactcttaacttcaacactcttaactaatccacggac

SEQ ID NO: 29984 - DNA, 313 bp, Homo sapiens
  chr19:6044422-6044735
  hypo
cgacggcggggtgatggtcagacttgcacactcacaccgacctgggcagacacacggcaggtacgtgcaggcacacaaacaatgcacatacatacacaagtgtgcacatacactcagcccatgcaccacacatatgcacgaattgtgggcacacacacacgtatgcacacacacatacacggaagcacatgcaccttcacccgcccaggcagctttgcctctgtgggtctgtagtctgcagcaaggtgacactgatcgtccctagtacagaggggactgctggggccctctggatagccatccgcaccactgc

SEQ ID NO: 29985 - DNA, 653 bp, Homo sapiens
  chr19:6045007-6045660
  hypo
cgagtcgagggaggaacaggagtgttttgtgtgtttattgagagctggggctttcggagtcattggctgcagtgctgtgatttcccggcatgaaccctgaatgtcacaggtagcagtgactgccatatatacatcacgaggggtgatgggtgaggacacgccatcccctgtgttgcaggagtggagctaaggatgaagatggtgctaataaggatgccagcgcaagggcattctgattccaggtgagctgggcgccgtgtgcttggagaattcacagggtcctggcaagtcctcagagagggaccacagtgatgaaacctgggacacacatggtggccgtgagtggcactgagacctgtccatggtggctgctgcagaggaaggcagagtccacctaggcctgggagagcctgagagaggggcttggcaggaagacctgagggctgactcctcttggacaatttcaagtgggcacggaaacatatcaattaggccacaactgctggcagggcgacggcgtctgatcctcacctcagatgggcttccaagacgccctccccactgccatatgtgcaagaaataaaagctaaagatgtctgaccatacacactacatcaaataaaccgcttcactgtctgcctttttgtttttgc

SEQ ID NO: 29986 - DNA, 124 bp, Homo sapiens
  chr19:6064123-6064247
  hypo
cgtagcacattgcctgcaaagatgctcaagacgtgttttgcaatgaacaagagaatgagcagcccgcctgctccgggctgctcacctgttctagccaccttcaccatgttggcctccagctccc

SEQ ID NO: 29987 - DNA, 257 bp, Homo sapiens
  chr19:6105459-6105716
  hypo
cgatgaggtcaaagaggtattaggcttggcggggagtggagttaggggtgactttggcttttgctgcagatgagatgggagccatcggagggtttcgagctgaggggtatgaagtagaacttaacatgacgccgcctctcccagggttaacaggccccgtctggctgctgggctgagagactgccgagcaccagtggtggaatcatccgggctagatgctggtggctgggaccagaggggctggcagtggaggtggc

SEQ ID NO: 29988 - DNA, 185 bp, Homo sapiens
  chr19:8606663-8606848
  hypo
cgcacagccactcccctcgagtttgtggcgagatggcagttctgggtaagatggagtggggcccggtcctccctccatccccttggggggttgtagccggaggtccccatgcctgggaccactcactgctcactggtctgcatcagctctatgaggtcggagaagagaacgtctcggttcctctc

SEQ ID NO: 29989 - DNA, 231 bp, Homo sapiens
  chr2:102486147-102486378
  hypo
cggactactcctcatccagtgaggagtcggggacgacggatgaggaggacgacgatgtggagcaggaaggggctgacgagtccacctcaggaccagaggacaccagagcagcgtcagtccccggtctcttttagagcggatgagagtattctctcagagcctgctttccactgggacctagttgttcctagactattccgtgaccccatgagcacttactatgtagttctc

SEQ ID NO: 29990 - DNA, 143 bp, Homo sapiens
  chr2:102683385-102683528
  hypo
cgcatctttgccgacatttgttcttgcccatcttctaaattttagccgttctgataggtgtgcagcactcgcttgttgcgttaatttacattcccctttatcacagtgtattttaattatctgcttaagagtcagtctcaccc

SEQ ID NO: 29991 - DNA, 205 bp, Homo sapiens
  chr2:110011299-110011504
  hypo
cgcgagacgagtctgcaccaacttgcagagtgaggagctgggaaagtgtggctgctcctaatgggtgcacgggagccgccgtcccgcacaggcactggcaggcgagggcatcctgtgaccgtgggcccacaaggatgtgtgtggccggtgagggtccttctgattgggatggcaccggtgccaaattcaggcccagctttatgac

SEQ ID NO: 29992 - DNA, 187 bp, Homo sapiens
  chr2:110015134-110015321
  hypo
cggcgctgtggccagcgtggccccaagtcccactttaagcagctcaggggcggtcagtgcctttcagcggcgtgtggatggcaagaagaacaccaagaaacgccactccttcaccgcgctcagtgtgacgcacagatcctcccaggctgccagccacaggcattccatggaaattagtgctccagtg

SEQ ID NO: 29993 - DNA, 112 bp, Homo sapiens
  chr2:110015364-110015476
  hypo
accttgctcatctgtcgtgcgctgctcccacccaggtaacatcccgcgggccagggcaggcatccctgggttctctggggttctatcctcagctccgtgttcagtgtccccc

SEQ ID NO: 29994 - DNA, 215 bp, Homo sapiens
  chr2:110016725-110016940
  hypo
cgcacatatgcactcccacgcacatgtgcactcatacacatggcacacacatatacctgcacacccacacatgtgcacttacatacaccgccatccacatgcacacctacacatatacacatgcacgcacatatacacatatacacctgtgcacatatgtgcacttatatgcaccccttccacatgcacacacatacacatgtgcacacacatgc

SEQ ID NO: 29995 - DNA, 134 bp, Homo sapiens
  chr2:110017061-110017195
  hypo
cgtcccttccacatacacacccacacatacacccgtgcacacatgtagacatttatacatgcgcacacacacattggtggatacacacctgcacgcatatgtgtgcacacacacaaacgctggctctcatcggc

SEQ ID NO: 29996 - DNA, 452 bp, Homo sapiens
  chr2:110021654-110022106
  hypo
cgcctcaacttcagcgcatgccaggagcaaccgatgacacccctctttccgcaaacctgcttccccttctgtattccatctgttcctcaaggagtcaccactgtccttaggtgccctgagctaacactcttcgtcttcgctaatacccttcgtcttccccaacactgactccctgcccctgagttccctcctgagtcccttggaaggttctggggagccttcagactggcccttggttgcctctccagctcccggcagcactgtccattcccgtgagcctgtgcagatcttctccctgcgcaccacgctgctctggccctggtccatttctccccgaaactgccgtagctaatcccttcccacctgcccatgtcccttttgctgcccctcagcatggcattctacctaccaggcaacacacagacacatacctgtgcagaaggctcctgccc

SEQ ID NO: 29997 - DNA, 73 bp, Homo sapiens
  chr2:110022456-110022529
  hypo
cggctgcacatcgatggctggggagaggacacagctgcggggctctggctgaaggtgtccagggcgtgcagcc

SEQ ID NO: 29998 - DNA, 124 bp, Homo sapiens
  chr2:110028510-110028634
  hypo
cgagcctcctgacaccgagccctgtgggttgctttacgttggactcacgcagggcagtcggtggatgccggcacagatgggatggtgagccttcggccgccgtggtccacgatgcgtgtgctcc

SEQ ID NO: 29999 - DNA, 146 bp, Homo sapiens
  chr2:110048964-110049110
  hypo
cgctctacgcctacaagccccagaagagtgacgagctggagctgcacaagggagagatgtaccgggtcctcgagaagtgtcaggatggctggttcaagggggcgtctctgaggaccggggtctctggggtgttccccggaaactac

SEQ ID NO: 30000 - DNA, 213 bp, Homo sapiens
  chr2:121549381-121549594
  hypo
cgtctgtgactttaatgcggtgtgcacgtgtgtgtgtggcctgcgtgcaggtgtatgcatgtgtgtggctgtgtatatggtttgtcggcgtatgttctgtgtgctgtgtgagtgtgtgagcctgcgtgtgtgtgtgcatccatgtgtgcctatgcgtgtgggtcctgggcacgcatgccgcacgactgagatcacagcagaggtgagaacacc

SEQ ID NO: 30001 - DNA, 325 bp, Homo sapiens
  chr2:121742106-121742431
  hypo
cggaagcatgtgaaaacggtccacggcccagatgcccacgtcaccaagaagcagcgcaatgacgtgcacctccgcacaccgctgctcaaagagaatggggacagtgaggccggcacggagcctggcggcccagagagcaccgaggccagcagcaccagccaggccgtggaggactgcctgcacgtcagagccatcaagaccgagagctccggggtaagcggagctgggcagcccagccacgcaaggcgactccatagccgtgcccagggccaccccttgccacggttgcgggctctgccctaaggcccccctctaggggcacagc

SEQ ID NO: 30002 - DNA, 140 bp, Homo sapiens
  chr2:122010702-122010842
  hypo
cggccatgacactggccgagcacagccatgcccactgggtcagactccgtctcagccattaggaaggtctctggtcacatgccagtgaacacttcttgaccatgccaaaccccagtgctgctcatggtgacgcgctggac

SEQ ID NO: 30003 - DNA, 231 bp, Homo sapiens
  chr2:122011463-122011694
  hypo
cgtgccaacacagtgggcccaaggtgacctcccacccaactcacacagcagcacaacagcaccatcccaaaagccacgcagaaggccaccacccacagtcacatacaggctgacgagcgaggtcacacaggctgaactgacctagggcacaagggcatttctctgcctggccgacatcactgctgggcgtgggtggaagccaggacagcgggctatgagaaggcgcgggtc

SEQ ID NO: 30004 - DNA, 96 bp, Homo sapiens
  chr2:130669922-130670018
  hypo
cggcgcactgacaggccgcactgtcccagcctctacgtttgtggtcaaagagcagcaccttcctgaggcctgaggcctagcgggcacgtgaggttc

SEQ ID NO: 30005 - DNA, 230 bp, Homo sapiens
  chr2:1488408-1488638
  hypo
cgaggccttccagcagtacgtgggtccctatgaaggctatgactccaccgccaaccccactgtgtccaacgtgttctccacagccgccttccgcttcggccatgccacgatccacccgctggtgaggaggctggacgccagcttccaggagcaccccgacctgcccgggctgtggctgcaccaggctttcttcagcccatggacattactccgtggaggtgagtgagtgc

SEQ ID NO: 30006 - DNA, 605 bp, Homo sapiens
  chr2:1863600-1864205
  hypo
cgttggggacagcgcgccggatgagaggggctctgggaaaggggacccgggccgcgctggtgacaggtctgtctccactcctgggcttgttttctggggattctctcgctgcggtttggctgtttggggagcacccaggggctgccacggcagcgtcactgtccatgctgcatgcagtttgtctgtttcccgaccatgcagcctaggactcttcacttatccctctgtgttgatcatgctgccctcgttgccaacactgcgaaccgctgcagggccgaaaggcgccccaagtacatccagcaataggctcctgtccagtgcggcagaacgtacctagcacatcctgacgtcccattcacttaacgggatgtgtccatgggaactgctgccagagcacatgcacgtccagcagcagtggagcggctaagcaagaggctggggccgccggagccagtattggggttggactcggaggacccatgcaaaaaaaaaatacaaaaggtgactggtgcagctgacgcaaggcaacagaaacgccaccccagcctctcgccctcgcgtggaagagtgagtttcatccagggcctgacgcattcaaaccacac

SEQ ID NO: 30007 - DNA, 502 bp, Homo sapiens
  chr2:217528438-217528940
  hypo
cgttggagctcgctagcgatgcagaatttccagctctccagggacctactgcatgggaatctgcattttatcaaggtttcctggcgcatatttgaagttgcgaagctccacccggcagcgcatgggtagctgcaaggggtggctgctcagtggacgccgggttgagggacagaaggaaagttgctggctgcgggctcctccatgctcttctcctctctccccagtgcaagatgtctctgaacgggcagcgtggggagtgctggtgtgtgaaccccaacaccgggaagctgatccagggagcccccaccatccggggggaccccgagtgtcatctcttctacaatgagcagcaggaggctcgcggggtgcacacccagcggatgcagtagaccgcagccagccggtgcctggcgcccctgccccccgcccctctccaaacaccggcagaaaacggagagtgcttgggtggtgggtgctggaggattttccagttctgacacac

SEQ ID NO: 30008 - DNA, 180 bp, Homo sapiens
  chr2:217674486-217674666
  hypo
cggcactgtgcgcatgtaacacatctcaaccaatctgctcaacgaccagcaggcatcgtacgaccccgtgttgcagacgaagaaactgaggcgcaaggaggttcctcggcttgtatgcctgggtgtcatgtatgagccaggccgtctaggtgagtatggcaggcagctccctgtgccccc

SEQ ID NO: 30009 - DNA, 85 bp, Homo sapiens
  chr2:217674965-217675050
  hypo
cgacgctctggtgtgggcagcccgagaggtgatggggtttcagtaaatcatggcggggagttcaggccaccgccggagtccagtg

SEQ ID NO: 30010 - DNA, 181 bp, Homo sapiens
  chr2:217691004-217691185
  hypo
cgtcactccgccttcaaatctcacctccttcctgccatcagctcgcacctgtgctgtgcacctgcctcacaagggctctccttgagcccactctcaccgctctccatctgttcctcactcagtcgtcagggtgagctctttatcctttccttcattcaaaatctcccaatggcttctcgtc

SEQ ID NO: 30011 - DNA, 93 bp, Homo sapiens
  chr2:218678441-218678534
  hypo
cgaagacaccttcatggccagcccgtacgcgcctcggaaggagtgactgtcgcggatgatgaaggcccccggctcctggtccttgaggagcgc

SEQ ID NO: 30012 - DNA, 839 bp, Homo sapiens
  chr2:218682490-218683329
  hypo
cgctggcgacaggcgaagacaccttcccattgatggtggcatagttggggaggctgcctgcccggtctcccactgacatccttcgcttctctggcaaggctggtgttgggctcccttgccggaaggctgcggagtctggtgacggggaggtggcagggctgctcaggccagggtagtaggcaggggagacagggaaggagggcgtggaaggagcctggtagccagaggcactgctctgccgggacagtgtgggtctccgatcctccggggtagaatagccaccataggccacatgccggtccaagcaggggctgccgggaaccacagatccagaccctccgaggtgacggcccaggctggggcttccagggctggctattgcattgctatgaagaccggaggccaggttgccttggtgagccccagggtgccggcccaggctgggactccccggggtggtggccactttgttgtggaggccagaaacctggtagacccctgctgggtgccgacacaggctggggctccccggggtggtcgctgcactgctctgggggctggagacagtgctaccatggaagccagtgcctggtggacccatcatctggtgatggctcaaactgggactgctgggggcagccatgctgggattgatggcccgccagccgaagccaggactagggggagtgttggtgcccactgttctgtggcgcgcctgagggctcccaggcaccgtgtggacgccagccacactgaactgagctcgagcctggctttccggagaggagctgaaatgctgaagtgagtagtcggggctgctgtagctactgcccacagtc

SEQ ID NO: 30013 - DNA, 138 bp, Homo sapiens
  chr2:218686231-218686369
  hypo
cggaattgaatgcggcctgggaattataggtcactgggctccccacaggattcagcgcgcaggacatgtgccctcaatgcaccttgatgaactggtttgcaaggtaccgccatctgggtatgctttctgcctgtccac

SEQ ID NO: 30014 - DNA, 267 bp, Homo sapiens
  chr2:218694781-218695048
  hypo
cgatttgcgctgtccacagaaggactccaaggggaaggccgaggcccaccctgcaaaggaccccaaggctccgaggcatagttgagtccccggctctcaggagcctgagcccctcgcagcccctgtgcccagggctctgtgggccaagtgtcaagcaggagtgtgctggctggtgagaggcagcccccagcccccttctactgatcccccgtggctcagtgtccctggccatgccgacactctgagtgggaggctatgcccagctgc

SEQ ID NO: 30015 - DNA, 57 bp, Homo sapiens
  chr2:218697833-218697890
  hypo
cggtcattcatggaataaccacgaagcagccccagcccacaggtacgcgcatgttta

SEQ ID NO: 30016 - DNA, 178 bp, Homo sapiens
  chr2:218697937-218698115
  hypo
cggacgagaggaccagacagggcaggagctctctcttggttcctcccttgttcacctccagctcctgaattcctcgttcccccagttcctgggcaattgggcccttctgctgaggcagatgagtgggcgacgctaaagccaggcaagtcttttgcttcctgagagaaaaattccacac

SEQ ID NO: 30017 - DNA, 79 bp, Homo sapiens
  chr2:218700747-218700826
  hypo
cgccctccaggattgagagcgatggtaagagccagctccggggagacacactggacaggggagcgaaccccagggctac

SEQ ID NO: 30018 - DNA, 288 bp, Homo sapiens
  chr2:218704299-218704587
  hypo
cgcacactcgcacaccctgcaattctgggagctgtagccctgacacagaccgatacatgtactttggcaaagcactgctgcccaccacccctggatcacgtgacgagtaccctggtgtcaggcttcatgatgtgcctcctctgcaccccccagactggccactgccaccctcacagacccagctcttctttccagtcttccgatttccaaaagactggattcctcaggtccaggtagcagggctgggtgtccgacagcatgcctggggctccagaagcgaggggatcc

SEQ ID NO: 30019 - DNA, 1042 bp, Homo sapiens
  chr2:218712694-218713736
  hypo
cggaggctggctccaggtccagcatcagcatattgagtgtttcgatggactgttcaatctcctgctgggaggctgctcgcgggaactcagggagactggggatgggggtctctgccaatggctgagggctgggcctgctggctacaagactctccaagtgggctctttcctgctggcgtggaggtgggcgaggctgctgctgctgctgctgctgctgctgccacgaattcagtcccctttgcacagcctcccggctgcttccccctcggaccggagctgggggcagctggggttcagcttccgaaaaggattgagagcggaacataccgctggggtcatgggcatagtgggaggtggtcactggctgtggccaggctgggtggggcccctccctctggtagccagctaaaccctcctgtgcagagtaggagggccgcatgggggccgtgtggccagcatgggcaggccccgcccggctggcagactcgtaggggtagcctcctccattgaccataggctccatggggtaggacttgtccagaccgttggtcagtggggacagggcctctgggtagcccccctcactggtgttggtgaccccgtccagagaagagagtgtgcccatgctgcccgcactgtgaccatcctggtttggcaattcatcgtccaggatgtctgtctcccgctcagatgctaacgccccaccattgacatgaacctgggctgggacaacgtggcgtccagaggagggcacagccgagccccctgctgggcgggacctgaggtgctgggtgtggtacatggcgccttgcttctctcgctctaagccaaagccactcagcaggcggtccagctcccgcttctcctggggactcaaggcagcagtggcactggaggccccggggacaggctcgtcggtcttgtcggtcttggtggaggctgtggagttgcccgagtcgctgctcacagaaagcgtgtgttccacgtggttgggggtggccgacagtgtaggacgtgtggcattaacagccccggtgctgcc

SEQ ID NO: 30020 - DNA, 171 bp, Homo sapiens
  chr2:218765473-218765644
  hypo
cgaatgctgaggagtgcaccccactgggctggtgccatccacactgagggcacactcaacagttactgaatcaatggaaacacacttcactttgatacactcgccaacacaagagaaaccccaggaggagaatacgactgccaccacaaaaggagcgatgagagtaatggc

SEQ ID NO: 30021 - DNA, 360 bp, Homo sapiens
  chr2:220427099-220427459
  hypo
cggggagctgggctgggcccacacctgtgacggtgacagtgaaggaggccgactcatcgtcaatttcacacaagtactcgccggagtcctcgagctggacagcgggcagcaccaggcggcggacagtgtcttccttctgcaggagcagcgcggggctctccaccacctcctctccatccttggtccagcgcacctctgcccagggccggcatagctcacaggtcagcaccacacgctccaggcgcacggctgccacatacaccttgccgctgggatacacgatccacgaggagacgtctggaggacagggacagccactgccgggcatgaggggtgtgccctgccgtcctccctgacccc

SEQ ID NO: 30022 - DNA, 123 bp, Homo sapiens
  chr2:220428136-220428259
  hypo
cgtctgagggctgggtggcgggcagcaccaggcggcgatggggcccctcattctccagcaccacgaagtcactctcctccacctcctgcccgtccttgtaccaacgcacaggggcgtcctctc

SEQ ID NO: 30023 - DNA, 160 bp, Homo sapiens
  chr2:236672645-236672805
  hypo
cgtgcgtggctgtgacccgtgcgtggctttggcccgtgcgtggctccggcccgtgtgtggcggttgcccatgtgtggctgtgacatgtggaggcgaacttccacggcagaagtgccatgcttccgtaagctcttccgactggttggtaggcgcttttatc

SEQ ID NO: 30024 - DNA, 181 bp, Homo sapiens
  chr2:236675966-236676147
  hypo
cgttagcgtctgcagccttgaatcgggaggcaggttgggcgcaggcttctcgtgcgcaccagcgagcacccgggccaagcgtggaggctctgcgggctgggggtccggcccacaccatcagcctctgtgcagccgttgctttttccgttgaccaaagccatgaccttacctttatgcagtc

SEQ ID NO: 30025 - DNA, 366 bp, Homo sapiens
  chr2:236685979-236686345
  hypo
cgagactctgtctcaaaaaaaaagacaaaagtgatttcctgagctgctccgagctggagacagaaccagcagacatgggacagaagaagaattacaggtgtgaagcgcccgtgtggggctgattcccacctgcctcctcgttatcagcaggcagccttgcgtctgcctctgggagcagaaaccgttgtttcaccagcaaattacgctggctgtactcgccatgtcctgttgccatagaggacgagtcacagctgtctcacctgcacccctccaatcgccttctcagaatccgacgctggtcctaagtgccttcagctgtcacctgagcacgttcaagcctcctgcccagcaccttcctagagcacc

SEQ ID NO: 30026 - DNA, 137 bp, Homo sapiens
  chr2:236722564-236722701
  hypo
cgggccactcagtggccggactctcctcctaccgcccccgggtgaattccacgtcacccacatcgttctgccattggtggcctgccagagtctgttggtgtgttcttctgccggtgtgcttctctcgacgcccagcc

SEQ ID NO: 30027 - DNA, 317 bp, Homo sapiens
  chr2:236801881-236802198
  hypo
cgcgggtgtgccatgtccatcataaggaagcgccgtgtctgtagcgtgggtgtagcgtgtctgtggcgcaggtgtgccgtgtctgtggcatgggtgtggcttgtctgtggtgtgggtgtgccgtgtccatcataggggtgtgctgtgtctgtggcgtgggtgtagcgtgtctttggtgtgggtgtgccgtgtccatcataaggaagagctgtgtctgtggtgcgggtgcaccatgtccatcataagggtgagccatgtttgtggcgtgggtgtggcatgtccacgagggtgcaccatgtctgtggtgcgggtgtgcc

SEQ ID NO: 30028 - DNA, 348 bp, Homo sapiens
  chr2:236826196-236826544
  hypo
cgctctccgccgtgacagggaccggggtaataaggagagcttgattaacgtggtgcacttgggggagagatgagaggcttcacgtggtcctgttcgggggaggcaatgaggcaccggcggctctgttgctgctcccggagattaatgaggcctaagagtgcattaggaacagtgacaaaggtttgatctaatgggctcagtcatttttcctttgagtgacagacgcacagaagtaattggctgtgcagaatggcagctcattggcggtacttaaggatacattatccccgttgtgtggcccgcagaggctgtttatcaaaactgctcacactgcagacgcggagtcgc

SEQ ID NO: 30029 - DNA, 544 bp, Homo sapiens
  chr2:236839051-236839595
  hypo
cggcctgccggatcgcggtgtctctgctaagactcgctgggtcttttgtcttcacttccactcgatgttgcggttgcggttgggttgcgtctttgtatagggttgttcggtgcgagccatctgtggcatcgggtcccttcacattgctttgtcaggcaccatcaagattggcgtcccccttttattcctcccgaatagtttctgtctggcgcttccgtttgccatgcaggcaggacaggggctgctctcggtggtaaggtgcactatgtgccagcgtgtgggtcccatagactaactcgcgctggtttctgtggtctgcagtccgcggtggtgttcacctgacttgtttattcctagggaatgtcactagtgcatctgggtctcagatggcaagcggcatcagcctggtctccttcaacagccgacccgacggcatgcaccagcgctcctactcagtctccagtgccgaccagtggagtgaggctacggtcattgcaaactcggccatcagcagtggtaagagggggctcagccccacggaccc

SEQ ID NO: 30030 - DNA, 96 bp, Homo sapiens
  chr2:236840424-236840520
  hypo
cgcagacgccaccaagcagaagccttaaaggaagacatctccaaaccaagccgggagacgcggagtcagcgaggtagctccacaccatagcggtgc

SEQ ID NO: 30031 - DNA, 139 bp, Homo sapiens
  chr2:237018173-237018312
  hypo
cgatcagcagccttggaaatgtcctagtcagcggcagcgtcggtgctctggaccggcagccatgggaatgtcctagtcggcagcagtgtcggtgttctagaccggcagccgtgggaacgtcctagtcggcggcagcgtc

SEQ ID NO: 30032 - DNA, 391 bp, Homo sapiens
  chr2:237032663-237033054
  hypo
cggctgccccgacgagcgcttcgtgctcatggccacccctaacctgtccaggagaaacaataaccggaacaacagcagtgggagggtgcccaccatcatctgaggaacagccgtgcccgcctgctcgccgcacctgggacgcggcagcctcgccgcattctcgctcagaagtcgcagcacgtgagtcccgtcgcatcccctccctcttcctggtggccacctccctcccgcccacccactctcaccccaaacaaaatcacaaaacctggacatccctcaaggggcgaagaggcggccgggagactgcagaagtggctccttttcataaactcccctaaaccacacacaggagagagcgacgggcctcggccctttgatgatagcacatggc

SEQ ID NO: 30033 - DNA, 314 bp, Homo sapiens
  chr2:23785024-23785338
  hypo
cgggctctgtttccctgtgagaagccgcctcggcccaccgagatgtcccggcaccatagccgcttcgaaagagattaccgggtgggctgggaccgccgcgaatggagcgtcaacgggacgcatgggaccaccagcatctgcagtgtcacctcgggggccggtggcggcacagccagcagcctcagcgtccggcccggcctcctgccgctgcccgtggtgccctcccggctgcccaccccggctacagctcctgctccctgcaccaccggcagcagcgaggccatcaccagcctcgtggccagctctgcgtctgc

SEQ ID NO: 30034 - DNA, 67 bp, Homo sapiens
  chr2:238280432-238280499
  hypo
cgtgatgggcgtcagcagtttctgctccaggctgggcagctcccggaaggtgctcaccgagaacaca

SEQ ID NO: 30035 - DNA, 235 bp, Homo sapiens
  chr2:238280812-238281047
  hypo
ccaccttggggtcatcgctgaactggatgacagccacccgggtggtgtcaaagcccacgtccaggtagtcaaccagcctctctatgagggtgcgaacgtactggaactcaggcccggcactttgggacccatcgatgagaaagaccacgtccctcttgccaccaacacctgcgaaacaaatgtgagcatggcttcaccttcatcgtcaccaaattcttagcgttcatgagccacc

SEQ ID NO: 30036 - DNA, 339 bp, Homo sapiens
  chr2:238793969-238794308
  hypo
cgccgcctgcccctgcccggaggcctggccctggagcccacccacctccctgaggcctgtcgtgagcatcaggagctcccagtacagcatctggggctgcctcggtgccctcgtgggtttgttcatggcggtgtccgccctggaacttgccacatgcccacgagcactgggacccctctgtgctctccctggtggctgtggtgctgtcatccctgtgtgtgctggtggaatagcgtgggctccacggaaaggccctcaggcgtggacaggacagatggcagtgcccagcacagccaggtctcagaggatccaaaggcgagcattgcccaggccgaggcc

SEQ ID NO: 30037 - DNA, 105 bp, Homo sapiens
  chr2:239888414-239888519
  hypo
cgtggctccccgtccctccggtgaccaggtgggcactggctcctgatggttcgaagccccggtcagcccccgccatccctaaactagtgacttccacttgcgttc

SEQ ID NO: 30038 - DNA, 76 bp, Homo sapiens
  chr2:239888789-239888865
  hypo
cccgtgcctctgtctaggagcgactgtggcttcgggttaagcctctgtctttacctgtagtgggagatgtctgctc

SEQ ID NO: 30039 - DNA, 298 bp, Homo sapiens
  chr2:241689824-241690122
  hypo
cggcctttggcccacacgcacctgagatggcctggacggccacgcggaggaagcccttcacctcgcccttctcgctgacgattgccacacggtgtaccaggggaacggggtacagcaggttgctcaggtacacgaaggccctggggagaagcagaggcggcggtcatgggccacccctccacgcatgttctgaacggcagcggtggcagcatggcctggctcacgacacaacatggagctgcaaagcagagggaagccgccggacaggacagccaaggccaggacagcaagagcgggc

SEQ ID NO: 30040 - DNA, 136 bp, Homo sapiens
  chr2:241697788-241697924
  hypo
cggaaccaggggaagcggtcatagaaggggtctccgccggtcaccacgttgtcacagtcctcgatgacactggagggcacctctgcagcgcggtcgtacatctcccgcatcaggtccagacgctgcctgcagggac

SEQ ID NO: 30041 - DNA, 433 bp, Homo sapiens
  chr2:241724232-241724665
  hypo
cggggggggggacgtccacacctggtgccagtgtaagtgtgaggacactacccgccctgcacaggccagcattgggcctgtccttgtgctgcccccactggcctgaccaccacccctaccctgaccaccagccactgcccttggtggcaccgcctgtgaggccactcactcaccttctccgtggtgatattggtctctgcgtcatggcgcttctgggtgaagatgatgttgaagacggcgtgggagcgactgctggtctcattcatgttggtggccgccacggtcctgaggagcagaaagccacgcacggttacccctcgtcctgtggccgggtgcgagatcgccggtggtgccagccctctgaaccaggtcatcggggggggcagttcccccagaccccaggggccgccctgctgggcctggcactgatggc

SEQ ID NO: 30042 - DNA, 42 bp, Homo sapiens
  chr2:2673043-2673085
  hypo
cgaggagtcagggcccccgaatctctgggaggacgcatccta

SEQ ID NO: 30043 - DNA, 205 bp, Homo sapiens
  chr2:2673114-2673319
  hypo
aggacttaatgacgtcccttcccatgcgcacagtgtcccaggcacgtgcctcagcctcacatgccggggcacagggctgccctgcgaggtgggaggaagacctaggtgaggacccggagccaagggctttcctgaccgtgaaattgcaggtgaggacctggagccgagggccggttctagctgctccaagcgcccgagggccaac

SEQ ID NO: 30044 - DNA, 98 bp, Homo sapiens
  chr2:2854244-2854342
  hypo
cggggaagccttcctcagggtttctgcagaagccctgcccactgccccctgcagagagccatcctgccacagagatgcgccccagatgcgtcctggat

SEQ ID NO: 30045 - DNA, 160 bp, Homo sapiens
  chr2:2854463-2854623
  hypo
acatgaggccgcctgtgtcagccatcagggtacccaccggcgctgctcatccacctgccacccccacctgccacttactcctagcacaagcaggtgccccatgaatcccgcggaatgagttatttcaggatccgcggaacacacgtaaccagaccccccc

SEQ ID NO: 30046 - DNA, 346 bp, Homo sapiens
  chr2:72359340-72359686
  hypo
cgggtgggtcttgggttagactgtggcgctcagcatggcctccgtctccggcaggatctcgttctggttggagtccaggccaaagaacttgacgctgaggccatccacggggtgcaggacggggaccaaggtgatgcgggggaaggtccgtgtggccagctcaaagcggctggtgctagccagctccaccgccagcaccttcaggaacagcttggccaggtgcttgcccaggcaggtccggacaccgccaccgaacgggaggtaatggaagcggccatccttgtcctcgctccgcgcctggctgaagcgatcggggtcgaacacgttcacgtctttgaacacgggc

SEQ ID NO: 30047 - DNA, 348 bp, Homo sapiens
  chr2:9078588-9078936
  hypo
cgtgtttcatgctgccgtgtttcattccaccacgtttcatgccgccacattttatgctgccacgtttcatgccgccacgtttcatgccgccatctcatgccgctgtgtctcaggccacatttcatgccgtgtttcatgccaccgtgtttcatgctgccacgtttcatgccaccgtctcatgccactgtgtctcatgccaccacatttcatgccgtgtctcatgccaccatgtttcatgctgtcacgtttcatgctgccatgtttcatgccaccgttgtctcatgccgccacatttcatgccgtgtttcatgccaccgtgtttcatgctgccatgtttcatgcctccac

SEQ ID NO: 30048 - DNA, 783 bp, Homo sapiens
  chr2:9236530-9237313
  hypo
cggcccgcagagaggcagggttttcccttggtggcacaggcagacacatacccggccccacagtggtctcctccatctggggtcccatcagagccatcgctccctcctggagttccgctcagtggcctgccccagggggcccccgcacagccacagggctgtgggaagggaatggtccaggcaggccggtcaggccggctcccccagatcccttggctccccccaggagctggcttctcactcctcacagacaacaagggcgctatgagatgtcatcagagatgccaccaaacaccacaggcaagggacccgtcactcagcccgggctgctgaacgtgctgaggcggctctgatatgcccagaaagtgcccaagcaggtgacacttgggccaggacaggcacacggagatgacctcccactgcctccccaaggatgaccctgctactctgactgagagggtcttcaggtcaagggcggggagggtggcaacagacaccaaagccgagggctctgagcaggctcagaagccgggtgtggagcgggagggtgggggcgcagtggcaggggctgctgcagggccagctgtgccagcaggggtgggggcaggggctcagcggagccggagtgccaggagctaaagaccacccacgccctcttctcggagggcgagcaggccagggagagcgacttaagccacatgaactttcccattatccctgaaggagcggggttcttgttggtattctacctgcacagctgcgtgagacgcagatatggaaaac

SEQ ID NO: 30049 - DNA, 234 bp, Homo sapiens
  chr2:9245045-9245279
  hypo
cgagactctgtctctaaataaataaataaaggaaaggggtacggagacaagcagcccaaccctatacatttgtccccagggtctctacaaagaggcaagctgggactgaaatctctcccgagtgtggaagacggacgggagcagcagccggacagcacagctcaaggccgagaggctcactgggtgactcgggccgctttggggtggctgtgagaagcgaagggaggctgactc

SEQ ID NO: 30050 - DNA, 436 bp, Homo sapiens
  chr2:97544651-97545087
  hypo
cgccttgctgacccgaggaggcagatggagagatgggagccgaaggttttggctgagcgtctgcacatctcgcctccatcctcattcctgccaactgcacactctcagcagtgaaaacaggacgcaggcctgctccatctggcccgagaacaatttgatcttgaggcacccctggactcttggtacccattcacttatgggatacgtgcttgctgtttagagaaaccgagccatggggagcatcccagggcgtgaggctccagaagggatgcagcctgccctggattcccaactgctgcccgcaggtgcgcccctccactcagagggccctgctgccttgtcctctcggctctctcttcatgtctaggatcaggaggtggcagatgaccagccccgaggacgagtaggggtgggagaggcgggctctagaaatgcc

SEQ ID NO: 30051 - DNA, 200 bp, Homo sapiens
  chr2:97545395-97545595
  hypo
cggctaaggcccacgggtggtctgactccacaggctgaccaggtggccttgcacacggcaggcagagaagacacagtgggggaaaccgaggcgtgcctccaggagagctgccctggggtggggaagacccaacctctctgaagcccagctccctctgcctgccgggtccctgcagcggcctgtggacgcccgagttgccc

SEQ ID NO: 30052 - DNA, 305 bp, Homo sapiens
  chr2:97576055-97576360
  hypo
cgccgtcccaccggggagacggcctcctctgcacagtgaggttggtcatgcagcctcccacactctcttaggctttaacccccttcgacgaccaatatttgattccaaatgaaaaactgttctccttgacaaagacggcaaaagcaaaatacgaattgtgtagtgttgttccgtctgcatcagggctaacgttttactgtcagccccaaaccgcactccttgcttcaaaagtaactacacagaaactccttttatggccttcggcatttcccaacaacactcccgctggtccacgccgtttgtcc

SEQ ID NO: 30053 - DNA, 439 bp, Homo sapiens
  chr2:97587010-97587449
  hypo
cggcaccccatgggctacaggaggacaccgccttccccttgctctcgccacccagcccgcacaggggagtaagtgggcagtcacggagatcagggacattccgatgacctccaggcagtgccatccccacccagggcactctaggggccaccttggtccctagtgatgaagctgtatgaggaccaggctctgggcgtctagtaccttccctggccactcccggatgttctccaggagcaagaggagaagctgctggaggtcaactttgggcagcaggcggagccccacgtccaggctggtgcggcacagcagctcaatcagtcccatgaggttctcatcagtgtaggcccccggctgggcctgggcacacagcgccagaaactggagagagaaaagagggcaggggtggccagggcatgggggaacgggagagtacttc

SEQ ID NO: 30054 - DNA, 249 bp, Homo sapiens
  chr2:97589058-97589307
  hypo
cgtgtccgataacacagtttctgtagcatccggcccacagccagcacagtgcctgccatggtgctgagctcgccggagattctccgtgatgctcctggaatttagctgctgaatgggtctgaactgtaagccgagagtgccctgcatgaggcaggcggcttgactcaccttgtagatgtggcccaggctgatgtccaaggcaatctcttggggagcgtcctgctcctcattctcattcaggccagcctc

SEQ ID NO: 30055 - DNA, 264 bp, Homo sapiens
  chr20:23015064-23015328
  hypo
cggaacccctttctttcccgacctctcgaccacagtcctccccaggcacattttagtggccagggatggagacccgcggataatgactgaaccaggtcacagggtgaaggttctgagatgtccggctcccgtagcttctgccagttcccgagggagctagcacaggcttggccttctttggtggcatctctgcctccacctgtccgtctccattccttgtgcccatagcacctcagctgctcggacacagaagttaaaaggtcc

SEQ ID NO: 30056 - DNA, 71 bp, Homo sapiens
  chr20:23092311-23092382
  hypo
cggggcgaaccaaagatgggagaggagcatcagtgcccccctccccatcaccacattagaatcctgcggga

SEQ ID NO: 30057 - DNA, 118 bp, Homo sapiens
  chr20:23092426-23092544
  hypo
cataaggaccctgagacccagggccactagggtgaggcgacagggcagggcctgatgcacctgtcgaaatccacttctagctcccaccctgcccccagagacatgcgccccatgggcc

SEQ ID NO: 30058 - DNA, 554 bp, Homo sapiens
  chr20:30584500-30585054
  hypo
ttttggcatcttcatcgtggcccactggtgcgtcatgaccttctgggtcatccaaggggagacggacttctgcatgtccaagtgggaggagatcatctacaacatggtcgtgggcatcatctacatcttctgctggttcaacgtcaaggagggccgcagccgccgccgcatgaccctctaccactgcatcgtcctgctggagaacgccgcgctcaccggcttctggtactccagccgcaacttctcaaccgacttctactcgctcatcatggtctgcgtagtggcctccagctttgcgctgggcatattcttcatgtgtgtctactactgtctcctgcaccccaatgggcccatgctgggtccccaggcacctggttgcatcttccgtaaggcctcagagccctgtggcccacccgctgacgccatcacgagtccccccaggtccctgccaaggactacaggtgctgagcgggatggggcctcggcgggagagcgtgcagggacccccaccccacctgtcttccaggtgcggcctggcttgcctcccacaccag

SEQ ID NO: 30059 - DNA, 106 bp, Homo sapiens
  chr20:30585104-30585210
  hypo
cgcaagaagtacccggcctgggatgctcattttattgaccgccggctccggaagaccatcctggcactggagtactcctcacctgccacgccccggttgcagtacc

SEQ ID NO: 30060 - DNA, 538 bp, Homo sapiens
  chr20:36760841-36761379
  hypo
ttggactccgtaaggcagtcacggtatttctcatagaggatgcaaagaggaacgctcttctctgcagaaggggagaaaggagggtgctcatgatgcagaatcacccctcccaactctcttgcaactccaagaggcacagagaggggaaggaatgtgcttggggtcacacagcgggggaatggctgggcggatccctgaactccccactgtggctccagggttcccagcgaggagctggagagtggacactgagcagcgggtagaggacgcacttggactcccacgggccttggttctaatcctgcctttgcctcttctaatgggtgaccccgcgtgagccactccacctcccaggtcctcgatgtttggatctgcgtggcacaggcactcctaaggctgtgggaggatgagctgagcgagtgtcccggaagagcctggtgcgctcgggactcagggtgtgtgagccgcgggcccttcatcctggggaggatcagagccgacatctgcttgctgcaccaggcactgcacttcccacggc

SEQ ID NO: 30061 - DNA, 117 bp, Homo sapiens
  chr20:36764040-36764157
  hypo
cggactctcggggcctggatgagcagcgagggccgggtcctttctacaccaccgaggtgtcagggacacaggaacccccgagcccagggctgacaccactgcctgggacagaaggtg

SEQ ID NO: 30062 - DNA, 124 bp, Homo sapiens
  chr20:36764186-36764310
  hypo
cccacgcctcttagcactcgcactcagggaggagtgagggccccaccgtgtgctggtgctgctgtgccctttccagatacctcctgagcacgcatcctctccctcagtcctcacggctgcgggc

SEQ ID NO: 30063 - DNA, 186 bp, Homo sapiens
  chr20:36765901-36766087
  hypo
cggttgcaccagccacatttcaagcgcttagcagccacgtgcagctggtggcagccatgctggataggcggtgcagactcagcacgtctccatcactgtggaaagtgcaacaggcactttccaaggcgctgggttagagacttttctttgaggccgagagcaaccagaggcacaggagaggttctc

SEQ ID NO: 30064 - DNA, 278 bp, Homo sapiens
  chr20:36766589-36766867
  hypo
cggtgcgggcacagagcaggaggcggcagacgtactcctcagcggtgttgttggtgatgtgggcaaagacgtcaaagtcactgcccatgttcatgctctggcccacacggatccgcatggccatccctgtctcctccttctcggccagtttgttcaggtggttcgcccttgtgaaggcctccctctcctctgaggaccctgtaggggttgagaagagagcctcaatcacagctggaatagatcacaggaagggggctgcaacagggcgagctgtcttc

SEQ ID NO: 30065 - DNA, 187 bp, Homo sapiens
  chr20:36767690-36767877
  hypo
cggggccattgctgtacgtaggctaccaattaaaacacacgcacacacatacacgagcctgccgggctgggaaaactggatgcttatcttcaaggctgcattaaagactctgagggcacataccctctgggtatttgtaggtgtgggtgatatcctcccgctcgtctcggcccacgctcttagtgct

SEQ ID NO: 30066 - DNA, 109 bp, Homo sapiens
  chr20:36767917-36768026
  hypo
tgcacagacccatcgtcctgctggatccagtctaccacgtcggcattgacctccgcaaagacaaagggcgcatcgtacttggtgctcaggtcgccctccttgatggcac

SEQ ID NO: 30067 - DNA, 477 bp, Homo sapiens
  chr20:49223746-49224223
  hypo
cgatgagcaggggacactcggttcagaccccttgtctgtaaaaggggtgcgcttacagaagaacccccatgtggaacatgcacagggaagggtgggaatccaggcgagcgcatgggagcaccgaggcaagtgatgctcagcctggcccgtgatgctcagcctggcctgtgtccagccttgcactcggagtaggtaggtccccatagatccatttgcctcgaagaaacttgcttataattatttgcacaaaggcctggctcgtggcacctgggcctggcctgaccagaaggcctagagctcagaggctctgcaagtgcccacttctctgcccagggtgtctgcagacccgcaggcaccctgggtcctaggcttggatggcactgagctgcccgccaccctgtacacttcaggggcccctgggcgaggggtattctcagccctaccagacaggtgaggaccccgagggtgcaggtggtc

SEQ ID NO: 30068 - DNA, 581 bp, Homo sapiens
  chr20:49224897-49225478
  binary
cgctctccccaggctggacgggactcacttccactgcacctccagctgcagcttgatggtacccaactccgtgatgtccaccacgatgacctgcggccgcgtcgtgaagaagtcggcgatgtcacacgtcactgcacccacagccagcgagcccaggccccgcaactccgtcacctgggggtgggggctggagggtggtgtctgagccgaacacccaggcaccccagccctgcccccgggccccatccccaccttgatgtccaggttctcatgcagcgtggggatgaaggccttctcctcttcgtcccaggtctggctgtcatctgactcgatccgacccttgagcttccaacgctggcggcccagacgcatgagcacctgtgaaccagcccgagaggggccgcgtcagcccaggtgggtgtccccttgctgtccgcccagggccctccctgccaggcagagccccagctgcaaccctggttcccagcagctcccgtcccccaaagacctggcggggagccctgaggattgaccccagagagtggccgtacctcatagtggtctccgggacagaggcgtgc

SEQ ID NO: 30069 - DNA, 305 bp, Homo sapiens
  chr20:49225991-49226296
  binary
cgcctccttggggcccagaacacctcctccagcccccactggcccagctctcgatgtccccactgcccggcccagctcttgctgcccctgctgcccagcccagcttggcccggcccacctcggcgcactcgtgcaggctgcggcccagctcctgcaggctctctcgggctgcgcggctcggggggcaccgggcgaaggcccgctgcatgctggaggcgccgtcgcgcaggcggcactggatgcagtagtcctcgtacagctcatccacctgtggtgggcacacgggctggtggcgctgcccacgc

SEQ ID NO: 30070 - DNA, 159 bp, Homo sapiens
  chr20:49236444-49236603
  hypo
cgcttccccaggaagagacagagaggaggcgaggtagaggaatgcacttcttaaaggcagcacacagcccagccttacttgaggcctcttttcaatgcttcgaagatcttcttcacctgctggggcttcgggtctgcacagaccgaccccttccgcagc

SEQ ID NO: 30071 - DNA, 146 bp, Homo sapiens
  chr20:49240816-49240962
  hypo
cggtcagggctgcagactcgggaaaaggcaggtttctgagaggttagggaccccggcaggtgggcagcaggcagtggggcaggagctcgctcactcccagctcctgcctccagcccccaacaggtgtgcaccgttggcccagcccc

SEQ ID NO: 30072 - DNA, 141 bp, Homo sapiens
  chr20:49247308-49247449
  hypo
cgaaggaggcgctccggcccacgacccccacggcccctgtgtccccaggggacaggaaccgcaacctcaccgacatggtggtcacctgcaaggagaggacaggagagtcagcctggcatcaccatccagcgagtgccgtcc

SEQ ID NO: 30073 - DNA, 433 bp, Homo sapiens
  chr20:59872770-59873203
  hypo
cgcactttcctgccctctcgcgtgtatgatagagacattagcgcgtgtcagcccctttaccggggcttcccattgtcttagcgtgctcctttcatctaatgagcaggcgcccttggctgaacttttcaggaatccgtggggaaccagagtgaatatattatggcgctgtggagcgaatgacaatcgggcagtgctcgcctgtggccgtggaggtatctgcgccaccgcaaaatgcctcacccttcttttgggttttggggtttcaggtcagctctgggggcccgttatcccgtgtcaaggaggcccacgcaggcacccgaggaaggctttggctatcacgaggtggcctttgtgcaggcgggttcagcaactttggcattcattggggcagcctgttactggtgcttggagtaagtgaagagtgcgattgggc

SEQ ID NO: 30074 - DNA, 211 bp, Homo sapiens
  chr20:60094644-60094855
  hypo
cgaccccgaggagggctcatagcactggccaggcagcgctgcctctcgggctgctgcgccagcatcgcagggcgattaccctgtgctgctctctagatgggtgtctattctttcgttgttccttaatcgaatgccactagttcctgggcgcaggacgccagtgtgtcttcacaggcagactgcgtggtggtggtataatccccattaccac

SEQ ID NO: 30075 - DNA, 146 bp, Homo sapiens
  chr20:60173821-60173967
  hypo
cgagggactggctgcggggcaccccacatggcggggtcctccatggaagtgtggtcggagtacccgaggccccttccctactgcaggcactgcccgccaagcttccctggatggctcctccagggctgacactgcgcagcctgggc

SEQ ID NO: 30076 - DNA, 428 bp, Homo sapiens
  chr20:60226081-60226509
  hypo
cgtgcttggccgtgcactggtgtgcttgtgtgagtgagttagcgccgtgcttggccgtgcactggtgtgctcgtgtcagtgagttagcaccgtgcttggccgtgcactggtgtgctcgtgtgagtgagttagcctcgtgcttggtcacgcactggtgtgcttgtgtgagttagcgtcatgcttggccgtgcactggtgtgcttgtgtgagtgagttagcatcgtgcttggccatggcagtgagttctgattgcagggtctcaacgctcagggaaggacgagtgccccttctgtgccattttccaaaactctagggatattgagtcttgctcaggtcacccaaaggcacatgtcccagccccgagtcaagcgtacaggggcctcccgggagcacccttgtgcctgtcgcggcgttcctctccttctgcc

SEQ ID NO: 30077 - DNA, 353 bp, Homo sapiens
  chr20:60238496-60238849
  hypo
ttctgaaggctctgggtcgggggcatttcaggcgagggtcctagaaatgccaatgctggggatgccgccgagtgggtcagaggggccggaggaaggtgaacagggcagggggcagtggggctggattttatcccaagtgagtcgggagctgctgggacggcaggaccgggtgtgtgtgtccaagagaccatcttggctgcccaggggaagcggggactcgaggagagcagggagtgctgtcttcccggcgggagctggcggtactgaggaaggacgtgcagaaccaggcagggctgacagacgcggggtcgggggaagatcaggagctcccggtgtccaggctgcacaatgtg

SEQ ID NO: 30078 - DNA, 331 bp, Homo sapiens
  chr20:60273150-60273481
  hypo
tagccgcacgttgctggacagcacagacctggcacgtgtcgtccaccctcggaggggtccccttgcacgggctccactccggacggtccctgagactctcccgccctcacgcctgctctctaagccaagcacaaagccaagtgcagcccccactgaccattccagcccatgccggcgtctgccccaggccccagatccgtcctgctggtgcgattgagggcacagagtcgagccttcaagtaggtcttctaatatggctccattcatgcagaaacctcccagtggggctgtgccaggcacttggaaagtgggagccgcagccctgccgtcc

SEQ ID NO: 30079 - DNA, 546 bp, Homo sapiens
  chr20:60275663-60276209
  hypo
cgtacggcctcactgtggggccacacatcaccccatacagcctcactgtggggccacacgtcaccccatacggcctccctgtggggccacacatcaccctatacggcctcactgtggggccatgtctgtcttcatgggtgtcttcttcatgtcttcttcatgtctgtcttcatggcccaggcctggggcagagccggggttgccggctcagcgggtgagtgccacatgagtcttgccttcaaagctggagtgcctgatcttgacagcggaccgacatcttcaagggaacggcggctccccccttttttgcagaacactttcaaaggtgtattcgtgttccagggccgccataacagagcgccacagaggggcggtgtaaacagcagaggtgtatgctctcgctgctctggaggatggaagcttaaagccgaggcatcggcaggggtggtttgacgaaagccgtcagagagctcggagggaagactctgttccaggcctctctcctcggcttgcaggtgccatcttcttcccgcatctcttcacatc

SEQ ID NO: 30080 - DNA, 249 bp, Homo sapiens
  chr20:60313847-60314096
  hypo
cgctcctcctctcaccaccttcacggcaatcccgctcctcctctcaccaccttgacgaaggcgtgaaacgtccctgaggctcagcttcctatctgcgagatgggccagttctactcgccagcgctgccttcccgtgcctggcagtgcacccgccgcgtggaggctgcaggggctgggacaggacgtgtgatctgcattggggtcgcagaggcggcttttcagggcattgtaggtgtttgctggtacatc

SEQ ID NO: 30081 - DNA, 178 bp, Homo sapiens
  chr20:60316318-60316496
  hypo
cggtcccccgggcatcacttccccaagccacccacggagctgcctttgagggcgctgtcatcagtttcatccagggtctctccggcagggaacgcctttcacctgcaaagtccttggttcatatggctgacgccaccgctgtttcctgcctggtcattcagacgttggtggcccattc

SEQ ID NO: 30082 - DNA, 350 bp, Homo sapiens
  chr20:60373188-60373538
  hypo
cgccctctcaccctgcgcctctcctgagccagcagccataacccccgccccgcccggccctgccccgggctctgtggcagcacctcctgccaggagcaccctcagctccctgcgggagcacgcagcaacagaggggagggggtgtggtcccgcctcgcacgcatccccgctgtgggcggcccctcgctgcgcctcagcctctccctggccccacgggcctccacactcctcacatacagaatgggctgtgggtcctcagcccgtccggaccctccgctcctttcctgctacctccgtgcgcagcaggccttgtggggtgtggtccagagcgtggccccggggtgcatcgc

SEQ ID NO: 30083 - DNA, 111 bp, Homo sapiens
  chr20:60448951-60449062
  hypo
gagaggtgaggcggggtggggtctgcgtgcaggcgggtgagctcctggtccccgcaggacacccacaggaccctcggggagcctctccagtggcgccgtcggggagtgatc

SEQ ID NO: 30084 - DNA, 597 bp, Homo sapiens
  chr20:61000254-61000851
  hypo
cgattcacctgcgcctccctcatgacctgcgcctccctcatgtgggaccccaggtgtccagcagtgctgacggcaggaccctctgtgcttggacaaggtcaagtctcattgccacaaaggccttgtgcaggaggacgcagccctccccacgctcagggcagaggtccggcttctgacggtgatgacactcatccttggacggctgctcactacggactccaatgggctcacggcatctctgtggctacacccaggggagatgccacctgcctcccacacacaggccagggaatcacaggcccagctgtggccctggcaggactggacattgtccggccgagtgccaaaacccacagtgatgcctgttcttaccctgtcctctgggaggccgggccccctgagctcctctgctgtctgagcaggaggcatccggggcatcactgggctccccgcctctccgagggcactcaaccagagaagccgcctgggcaccagtgctccaaggacgtctgccaggccggctgctctccaccccagccaccgacccccagcaggctctttggggcaggagtgcggagctggacactggtaccctcc

SEQ ID NO: 30085 - DNA, 97 bp, Homo sapiens
  chr20:61749643-61749740
  hypo
cgctgtgtcctgctgcattgctgggcagtgtccactgcacgtcgctcgctgcattgctgggcagtgtccgcggcatgtcgctctctgcattgctggg

SEQ ID NO: 30086 - DNA, 65 bp, Homo sapiens
  chr20:61749920-61749985
  hypo
ggatgctcaggctgcttcccgttggacgcgattgtgagtgacgctgctgtgagcctccaggtacc

SEQ ID NO: 30087 - DNA, 419 bp, Homo sapiens
  chr21:33370937-33371356
  hypo
cgaggattgtgaagaaaccggagccccatcagccagggcccggaagcactggcatcccccacaaggaagaccccctgatgctggacatggtgcgctccttcgagtctgtggatcgcgacgaccacgtagaagtgctgtctccctctcatcactacaggattctgaactccccggtcagcttggctcgcagaaattccagcgagaggacgctgtccccgggtctgccatccggaagcatgtcgcctctccatactcctttgcatccaactctggtctcttttgctcacgaagataagaacagccccccaaaagaggagggcctgtgttgcccacctccggttcccagcaatggccccatgcagcctctggggagccccaattgtgtgaaaagccgaggccggttccctatgatgggcatc

SEQ ID NO: 30088 - DNA, 270 bp, Homo sapiens
  chr21:33781936-33782206
  hypo
cgcaagattccaaaattcttaaagagatcagattaggaccaaaatcttctgatttaacagtgaggggctaagggacaaaacagagggaagccagggagacgtccttcagaccctctcatagcccacgactgcccggtcgcattgtgctgtccatctgccttctaaacatccttccattgtggccgcttctcctcttctttctgggtgtacagcgagcacatcagcccaagcacagccataaacccctgactgcactctctccctcaccac

SEQ ID NO: 30089 - DNA, 749 bp, Homo sapiens
  chr21:40316188-40316937
  hypo
cgcactcggggtcccaattccacaccctctgcaaaggccctcgcagcctgcccgtgtctccgcctcctccccaaggtctcccctcccgcctgctcctccaacagatgggcccctggctttgcactactcctcttttcccttcctcaggactttatttttattttattttatttatttttattccggtaccacctctcagtgagacccactgtcaccccatcagcgccctctccaccctcccctgctttacttctccttatcatccagcatgcatctattcaccaatatattatttatcgcctggcttttctactaggcaaatgattctcaactggcggtgacatcgctcctcacttctcccgggggacagtgggcagtgcccggggtcacttttgattgtcacaattggaggaggcccctgacatctggtgagtggaggccagggatgctgcttaacatccttcaatgcacaggaaggcccagccacaaagcacgatccagcccaaaacgccggcagtgcctcggcagaaatgtcacctcctacaccatcaactctgtgagagcggggatttgtttgtcacgactgcgtcctggtgcccagaccaaagcctgcacatcacggtgctccgtggatgggtttgaaggagcggacctggaccagagcgtgctgtaggccacagtcagtgccggcccacccagaactggccactcagcggttacccatctctatcgctttctttcccagagtc

SEQ ID NO: 30090 - DNA, 168 bp, Homo sapiens
  chr21:40348667-40348835
  hypo
cgtggcaaccccaacctgaaaacaacgtaggcatgccaatggtgcagtgggggttcaagggcgtgattgggaaagtgttatggaagtgtctcagctagactttgatgaacgcatgggattcgtgcaggtagagatggctggaagtgctctccgggtaaaggaaccagc

SEQ ID NO: 30091 - DNA, 338 bp, Homo sapiens
  chr21:40506192-40506530
  hypo
cgtgacagcgcccacctccgctaagggggctccgctttcctgcctagctccttcagtttcttgccgcgaaaatggtctttgtattgcactttgtggctgacagacaccgtccgttacctctcagcattgtttcaatacacacacattaacacacactcgcgcacacacacacgtacacactcgcacacactcccacatgtacacatatacacgcacacccacacatgtacacagtcacacacaaactcactaacacaaacatgtatacattcactaacacacacaaactcacgaacacgtgctaacatgtacacactaatacactcatacatacacac

SEQ ID NO: 30092 - DNA, 238 bp, Homo sapiens
  chr21:42572234-42572472
  hypo
cgtttagtttatgagtctgtccaaatatttcgatcatttaaattcagatgttagtttacctcggtttgtggagaatggactgggctgtagaaacttagaagccaagcgaatgtggactccgctgtcttcattgctgtcttgttactatggatgtcggattaggtgcacccgtgaggtcttggattgtaaccccatgttctgcaggtctcaggacctcttccctgcactgtgctagccc

SEQ ID NO: 30093 - DNA, 151 bp, Homo sapiens
  chr21:42593821-42593972
  hypo
cggcagacagagcagcaaacagcaaaaatccctgtcagagggaggcttcacgctggtggggcggaggcagcaggagctgtcgggaccccgtgaatggcatgattgcgcacggggcccaggcagtggctgagttggttacaagaatgcgctc

SEQ ID NO: 30094 - DNA, 147 bp, Homo sapiens
  chr21:42617817-42617964
  hypo
cggctagagccacgtggggcggggagcgccactgtcactcacgcacctttccctttctctcccggttcaagtataacgcagacaaggccatcgtggacagtggcaccacgctgctgcgcctgccccagaaggtgtttgatgcggtgg

SEQ ID NO: 30095 - DNA, 92 bp, Homo sapiens
  chr21:42617995-42618087
  hypo
tcctcgggacactcacgggtccccgagttgctgagttacagtcacctgctgaggagcagcactgcgtgttctgagcatctctgaactattgc

SEQ ID NO: 30096 - DNA, 211 bp, Homo sapiens
  chr21:42629074-42629285
  hypo
cgacaaacagctttacattcagcccatgatgggggccggcctgaattatgaatgttaccgattcggcatttccccatccacaaatgcgctggtgatcggtgccacggtgatggagggcttctacgtcatcttcgacagagcccagaagagggtgggcttcgcagcgagcccctgtgcaggtgagcgattctggcatcgaacagggatcccc

SEQ ID NO: 30097 - DNA, 114 bp, Homo sapiens
  chr21:42649202-42649316
  hypo
ggcttgtcatggtgtcctggaagactctccagcagccagaagaaccttctgtgctgttttcactagagaagatttgagttgcagcctcttggaaagaacatgacggcacggaac

SEQ ID NO: 30098 - DNA, 824 bp, Homo sapiens
  chr21:43160967-43161791
  hypo
cgtggacccccggtctccgcaggcagccagctaggtcttgcttcgccgcaggagcgtggcggcggggccatggccgccctggaacttgaggctctgcaggttgatgtgggccccatgcctgagcagagtctccaccgtctgtgcgtgccggccctgggcggccaggtgcagcgcgctgagcccctgctcgtcgaacaggtcaatgacatcggcgctgaccaactcctccaccacctccgagtgcccgtgggcggcagccaggtgcagcgccgtctggttcaggggtccccgggccagcacatcggccttctcctcgacaagcagcttgacagtggccaggtgtccgttgcgggcagccaggtgcagagcggtgtagccgtctgaggtcatggcctccttgccagcgccccgatgcaggagcagcctggcagtgctcgtgtgccccgtctccgcggccacgtgcaggggtgtctgtgccagcaggctgcagacgttgacgtcggagcacaggtcgatgaggatgcgggccacgcggtagtgcccgcgctgtgcggccaggtgcaatggcgtcctcccatccagcgtctgggcgttcacactcacccccggctgcttggccagcagcttgacgatgggcaggtggccctgccaggcagcgtagtgcagtggcagccaggcatccttgccctgcaggctcacgtccacgcctcggcgcagcaggatgcgcacgatattctcctgcccgtgctggcaggccacgtgcatgggcgtccggccctcaaagtccacctcgttgaccgaggcgttcttctccaacagcagcc

SEQ ID NO: 30099 - DNA, 283 bp, Homo sapiens
  chr21:43161857-43162140
  hypo
cgttgacactgatcttccgcgccagcaggagctccacgacaccccgcaccctcctctccacggccatgtgcaacggggtggagcccctacggttgctcaggttggggttggcattgttgagcagcagccacttggcgcactcctcttgcccggcctccaccgccaggtgcagcaggctggcaccgctgtccagtgccaggtccacgtcctgcggctgcaggatcttcatcagtttgctggtgtccccggacacgatggcatccacaagcttcttcttctggac

SEQ ID NO: 30100 - DNA, 317 bp, Homo sapiens
  chr21:43162557-43162874
  hypo
cggacgccccaggcctagcagcctgcagagatggtgactagagctggaaggggctgctccagctcttgccccacctcgaagtggcacctcctgacctggggaggttaagtcggaagttttctatgataatcctgaagggaccgagcttctcgtttcaggaggacgttagtccagcactcaggatgaaaagttgtatttaccacaaaaatcctaccgtagtgcctggaatgctgaaaccctgcaacgagactctcctccgccctcatgtgaaacgcgtggggacttggaagtcggcggtgggaaggtgttaagaaaac

SEQ ID NO: 30101 - DNA, 364 bp, Homo sapiens
  chr21:43165727-43166091
  hypo
cggggatgcagtcgggcaggtggacctgagcccccatgggacctacacttctaatggagttgggtgcgggatgggctcagaagagagggagagtggtccgggcggcgggggactctgcaaagaggagtggtttggaaactcctgcctggaagccgaggagacaaaagacccctgtgggaaggactcgttacctcgctcctgggctccggggggcttttcacgtccagatcatgagcagtttctttcacttcgtcatcaggcttttcacacaggtcctcggtttcagaagtaatttcttgtggggaagaaaggggacatgtcactcggatgatgacttctgcgtacacacgcgttccatataaac

SEQ ID NO: 30102 - DNA, 297 bp, Homo sapiens
  chr21:43166652-43166949
  hypo
cggcccacctgttacacgccttgtttctcacccaggcctggtccctcaccctgtcctgtctgtcacctctgtctcctgtgacacccacagaatgtggcggggagaccccggggtgctcaccttggaaggtgggcctaactcgcggatccccctgccagcaccgctgcatgaggcgtatcaggtggctgcaggcgcgcggccgggctctgcacacgggcggcagctcggggcggtggcccttcaccaccttcaccatgatgtgcaggatgttcttctcatctgccaagggaaggatgc

SEQ ID NO: 30103 - DNA, 157 bp, Homo sapiens
  chr21:43168170-43168327
  hypo
cgcctagcttcgggtgtcacatctatcagacactgcctcatttcacaagccttcgggctgtaggccactgtgcgggagaacgtacagaaggcaagaaaggcgacaggcggtcagacaacacagacggacaccggccagcagaggcctggcaggacgc

SEQ ID NO: 30104 - DNA, 516 bp, Homo sapiens
  chr21:43791392-43791908
  hypo
cggccacacccttcgggtgccactcaaaacctccggccatggctcacaccgtccagccaccgctcataccatccagtcaccacttatgctctctggccaccgtgcactccctctgaccaccactcacactctccggccactgctcacacactactgccaccactgagaccctccatccaggtctcacaccctccagccaccactcacttcctccggacaccactcacacactgtggccaccactcagaccctccatccaggtctcacaccctccggccactgctaactccctctgtacagggctcactccctccggccaccactcacaccctctggccaccactcactccctccggccaccgctcactccctccggccactgctcactccctccggccaccgctcacacccactactttgcctggccttgctctacttttgagttctgtgtatgacacgagctgatgctgatctgctgagcaacctgttccgacagaagaatgccaagtccacaac

SEQ ID NO: 30105 - DNA, 562 bp, Homo sapiens
  chr21:44112757-44113319
  hypo
cgaggctggcccgggacacgccactgatgctcttctgacccaggggcttttctctcccgcttccgtccctcttccctcgccggcaggtgacgttactggccttttcttttttggccctgcctcccccttggcttctcccctcttcctctcctccactcggtgcctggtgacatgcggccatcctcagagatgtgcttcggggcccgcacgccttgctcctcgcactcttcctgcaccggagccgcggtgcgaggcctcgggaatgctcaccgtttctctcccgccccccggccgcatgctgcagccattccctcaccacatgtccaggagggagccggcatcctttgctgactttcttgctgtgactatggtgctgcgtggaaaaggggccgtgggaaggctgggcaggtggctgctcagagccccacctgacacggtgacccacggggcctggaaattcactgccccgatttccacacaggtgcctgagctcctgcagagaatgcctgagagcgagacgcatgcccgtcaatttgtgctttcaggcgtcctaagcacacac

SEQ ID NO: 30106 - DNA, 467 bp, Homo sapiens
  chr21:44180227-44180694
  hypo
cgggtgccgtggtgtggcccgctggacgttctcagggtccctgtgtcacctcattggtacctgtggtaaacctggaacactgttgacctctggttgggatgagggtttggcagagaatgttcaaaccagcgcacagccttctgggtggctttgggaggagaggtgggcgggcccaggcacagggtgactcggaccccctgcctcccgcagttctgcgtccacgacaactacagaaacaaccccttccacaacttccggcactgcttctgcgtggcccagatgatgtacagcatggtctggctctgcagtctccaggtgggtcctgcccgctgcacacccagacctctactctcgggggtcagacggaggcccccttccagggagcggcagccccatcccaccaagagagccacaggcgtggggtccccagccgctccgcccctcctagggacgcacccctgcccacc

SEQ ID NO: 30107 - DNA, 401 bp, Homo sapiens
  chr21:44190679-44191080
  hypo
cggcacgagggtgtccaggagctgggactggcccagaggtttccgcacggagcacctgacacctgtttttctccgacgtttcccattgccttaagaacgagggactctgaataaatccgtgtgtctctcccagctcttccccatggttgaggagatcatgctgcagccactttgggaatcccgagatcgctacgaggagctgaagcggatagatgacgccatgaaagaggtaaaacacactgagaagagcctgccttccttgcggcaagcaggcacgctgccctccgcactcccgactccagaagcttggacgtgccaagcagggcaccactgaaggccccgtggacaggcacacgtgtaccttccatcagaaagcctggctcagtaaaattagggaatgc

SEQ ID NO: 30108 - DNA, 321 bp, Homo sapiens
  chr21:44205103-44205424
  hypo
cggccccatgcgcgccacatggctggcttgttctgtctgtcattcccctactccttgttctgtccggggttcctccagccccacacctcagcatgcctgtgatgccaccctcagacagccgcaggccccgccctgtggtggtccccaaaattccaagtccgactccaatggcccgagaccggccaggctggcagtttcatctggttagggatgcgtgggctcctccacattccaccttttgagatgtgctgtaaccttctacctggaccccagacagacagggtcagccgaagccccaggcactcctggactcaggcaccc

SEQ ID NO: 30109 - DNA, 468 bp, Homo sapiens
  chr21:45941802-45942270
  hypo
cggatgtagaggtgcgagtgcaccttggtggaggtgccgttgaaggtgttggccaccaccaggaacgagtagggccccacactgaagaactcccagtcgtaggcgccggaggtggcgatggtctggttggcctcgaagagccgggttgccgggttccacttgtagatgacactgtcgatgttgtggttgtcgcctggaaccaagggactgtgctgggggcagggaggcagattccacagccccatggcagccccgacggaggcagagcccagtccaagtccctccccgaggaccgaagacccacgaggacaaggccaaccgctggggacatcctttcttaccttgagcctcccgccctcagccccttgctgactgcacctctgggccatcacaggtgctattcccatatggaaatgcttggtggcccccaccgcccttgggacaggtgtacatctccatggcctcccc

SEQ ID NO: 30110 - DNA, 161 bp, Homo sapiens
  chr21:46316870-46317031
  hypo
cgtcatggccacctacagatgggacacagggctgtgacatcctgaccagcaggtggtctctgtggatgtccggccccagccctgccctgcgctgacccactgtcccggcagcctgaccagctctgggtgcccactcggagggtcccccagacacctgcccc

SEQ ID NO: 30111 - DNA, 175 bp, Homo sapiens
  chr21:46317252-46317427
  hypo
agcctaagcagcagggcaggggctgtgaggctgcccagctgggcagagccccaggcagggggaagagggggccctggtttcctgcgtgccattttgaagaagatggcggtgatggccctggaatggccagcaggtcggtcactgtccggatgaggataatcgggccctttagggc

SEQ ID NO: 30112 - DNA, 643 bp, Homo sapiens
  chr21:46320233-46320876
  hypo
cgaattcgttgctcctcttgtacaagttgtcctccaggtgacagcggccgtcgttgggggtcaggatggcgcccagcttcccgtcgcccgcgaaatggaagccgtcatcagtggcaaacaccagcagccgcgtgacgttgcgccagccgatttcctcctgagaagaaggcgtggggggcagggttacctgcctcagtttcccagacccggccctctggagcagaggagacgatgcagagctggtggggtggcccggaggctggtgtgggtccccctttcccctgggtctcagggacccagctgtgttcccccagacgccacgcccaggaggagacaacggccctcaaacaccccgtgcacatgtgaggcgcagggagtggaggcacgtgtggaaaggcaaggagagagacacggctgcggtccctgcacttcagagctgggaacaaaccctcaggaaaccatccccaaggggaaaaaccctcgcagacgtgtgggccacacgcagaacgagtgcaacatggaggaaaacgagcctgaggggcccagcaggccttgagtccaccattgacagcccctggcaggcgcatgtgggggccgtgcgtgtcctaggctgtgacctcacactcgtgagcagtgtgtctgc

SEQ ID NO: 30113 - DNA, 218 bp, Homo sapiens
  chr21:46324938-46325156
  hypo
cgtgcggcgtctgcagcgacatggaggaggcagccaagaccatgtccccacgagcaatgtggccatgctgcagtcaaagggcacagacataggcctttggtggctgaccaaggggccccgtcccttcccttccagagtagaggctcagcgaagggccagcaggctgcgggggtagggccaggaccccgcgagaggacagtcccttcccagatcctgcc

SEQ ID NO: 30114 - DNA, 422 bp, Homo sapiens
  chr21:46326574-46326996
  hypo
cgtcgggctgcgagagagtgcagacactgggcaccgatggtaagggctggggcagctccacctggggacagagcggaagggcactgaggagctcagctttccagcagccttggggcttcactggcccacacacccgtccgacccggacacatgccttctgggcagccctgacaccccagagcagggccggactcccagccagagccaataaccagcacagacggtgcctggcaccaccaccgaggccaagcctacctggtcgcaggtaaagcgtcactttttgtggggacagctgcttctggcccccattgtggtcttcctgggtttcagcgaggcttgtggggtccatgatgtcgtcagccgcacagcccctcatgagcagctgtggccgggtgtcgcagcgaatggagtcaggatccccc

SEQ ID NO: 30115 - DNA, 262 bp, Homo sapiens
  chr21:46748053-46748315
  hypo
cgccccggggtcggggtctcacagcaggagcttagctggtgtcggcatctcctggacccgtcctcagctccgagcgcccagtcctgccacctgtgtccaagtctgcactgtgcccacgaggccctcaaggccgcagacagccccacacttctcggacgccgccccagcacggtccttgtgtgaggtggacactccttctggacgccgccccagcacggtccttgtgtgaggtggacactccttctggacgccgccccagtac

SEQ ID NO: 30116 - DNA, 634 bp, Homo sapiens
  chr21:46779388-46780022
  hypo
cgcgtccatccctctgtcctcatgggcaccgggtgaggcctcggggacagggaaactggacgggccccactgctgtcctgggccttcctcccgtgcaggtgataaggaggtgagagcatcgtgacggctggcacaggcctgagagggaggggatgggggctgctctaggtggggtcgggaggccccactggggagattcctccaggagacccagaaagctggaagccgccagcctatgcagagggcgctccctcctcatggatacagtccccagagaacccccccgcaagggccttaaagcgaaggcttgttctgaggttcaccaggacaagcaagtgtggctttgccctcttgccatccacacccctgggacatccaatcaggaccagcgatcgtccactgcctagaccagacccagtcatccccgaattcattatgtgggaactgaggagggggctccaggcagggggatcgtgcaggtggtcttggtgtccaggaggcctcacagtatccactcaccgccgtctccaccccctcaggcacaggtccctgtcctcatcctcatcagtgcggtcccacaactcaggtgcggcccccactccccttcccgccaacccccttccccggccctgcc

SEQ ID NO: 30117 - DNA, 184 bp, Homo sapiens
  chr21:46799934-46800118
  hypo
cgcacccagagtccgtccgtgcacacactcaccttgcacccagagtccatccatgcacacacgctcatctctcacccagcgttggtccgtgcacacacgctcacttcgcacccagcatccgtccgtgcacacacgctcacctcgcacccagtgtccatgcacacacactcacctcgcaaccagc

SEQ ID NO: 30118 - DNA, 348 bp, Homo sapiens
  chr21:46800403-46800751
  binary
cgtccgtccgtgcacacacgctcacctcgcacccagcgtccgtccgtgcacacgctcacctcgcacccagcgtccgtccgtgcacacgctcacctcgtacccagcgtccgtctgtgcacacatgctcccctcgcaccgagcgtctgtccgtgcacacgcttacctcacacccagcatccatctgtgcacacacgctcccctcgcacccagcatccgtgcacacgctcacctcgcacccagcatctgtccatgcacacactcccctcgcacctagcgtccgtccatgcacatactcaccttgcacccagcatccatctgtgcacacaccctcacctcgcacccagcatc

SEQ ID NO: 30119 - DNA, 304 bp, Homo sapiens
  chr21:46800780-46801084
  binary
cactcccctcgcacccagcgtccgtcggtgcacacacgctcacctcccgcacctcccgtggaggcggcatccaggcagggaagcaaggacactctgcgtccattcctctctctaaacaccaaggcccccgcaatccgaggaatatatttgacagaaacaagaaaaaaggatgaaagtggccaagacaagccgatcccttctatctgttttcaggaacatgattttgtggccccaaactccttgaagcccgatgcttccacctccctcccactccactctcccccgacacatccgtccagctccc

SEQ ID NO: 30120 - DNA, 214 bp, Homo sapiens
  chr21:46801338-46801552
  binary
cgctcaccactgccccctcccaagcccagcgtctaggtctggttcaccctcgcgaggtcgcctggcccatgtctggctacctgagctggccactgctgaggcaaagcccacccggctgctgttctggaagtggctctggaaagcccagctcctgtgggtacaggatcgctgagcgccaggcatgggggccacagccaaggcaggatcgctgagc

SEQ ID NO: 30121 - DNA, 571 bp, Homo sapiens
  chr21:46801817-46802388
  hypo
cggagtcctgtccaggccgaaaggtggtgggtgggtgctttaggggccagtggggagcgaggccgaagctatctctgtgcagctgccccctcacgctgctgtggccccagggtttggttcagatgctgagtgtccggtgacttccagacacttcctttccagtctcagggaacccaccccacaaagcgcctgccccaggacctgggtggcgcgtctgtgtcttctcagcatatccggttcttggagcagggagacgacccagatcctgctctctggctcctggcccgctgcccccaagctgtcaccaaggcaggtcatggatgttccgtgtcatggctgcgtgggccgttcgaccacggccacacacgcatagactgaggaagacagagcaaggggctgatcgctgccaagcagtggatgccagtgcaccgtgacaaggagcccagagcctttggtgggcgcctgactgtgtcttcaagttcccgggatctgtgtggacagctgccatcccagtcggccctttcttggttttcttggttttcagagaaggggcgaagaataagggggcagc

SEQ ID NO: 30122 - DNA, 177 bp, Homo sapiens
  chr21:46802668-46802845
  hypo
cgggatgggggtgatcaactggggtcatccgggtgggccccaggtggcattgcaaggttcgcacaagacggagacttgacatggaggaaaccatggaccacggaggcagagagcaccatgaagaggctgtccacgaaggtcagagcgatgtggccgcaagccaaggagtgcacggcc

SEQ ID NO: 30123 - DNA, 141 bp, Homo sapiens
  chr21:46808694-46808835
  hypo
cgcagggcgaggtcgggggaatggactcccctgggtttctccctgccgatcgctgtagtggttgagtcctccactgagcacagccactcctgtaggcttaccccgctgcagctcgctctcggatcctaataaacaagtgag

SEQ ID NO: 30124 - DNA, 339 bp, Homo sapiens
  chr21:46811012-46811351
  hypo
cgtgtccccttcaccggcacctgaaggcagagcaggggagttgggtctggacgagcctcttcactgagaacatccccagaaagctcaacttcatcgtaaaaattcatccacatttgtagtcctggtcttaaggttttttattgactttgcttaccgtaagatacaccacgcatccacaagtgtgtgtgtgatgtgtttgcgtggtttacagaataacataaaaaccatccgaaacacaccactgtccacaagctgagtctgaggccaggctcccaggcaaggaggtggtccctggtggcacgggcagggtgcgtggagacggggacccagaggatgcac

SEQ ID NO: 30125 - DNA, 333 bp, Homo sapiens
  chr21:46811998-46812331
  hypo
cgtgggagaggagctccgggctggctgatacactcgcctcctgacaggagcttgctttgcctccagtttgcagccctcacaaacaaggccgctatgaacatgtggcttcaggtcttgatgcggatgactgaggacctgaatatctggatcacgagacaggtgtgtgtttaactttttagcaagcggcaaaactgtttttcagaagggtcgtcctactgcggaagtgagtggccttccctgagtttccagtcggtgctgggagttccctgagtttccgcactcagggccgggagttctagctgctccacacctttgacgactcttgctacagtc

SEQ ID NO: 30126 - DNA, 82 bp, Homo sapiens
  chr21:46812995-46813077
  hypo
cggcacgaggccgcccgcctgcagcaggcccgcaggggcacggtgggtccccgcccgctcctcatgccttgagcgcgtcatc

SEQ ID NO: 30127 - DNA, 192 bp, Homo sapiens
  chr21:46813106-46813298
  hypo
agacctcaacacggccagcacggtgtgcatggtgtgcacgcctcctgcgccggggccaccagagtgggctctcaccggaggagaaagacagtcggggagagcagcgctgtctgtcacgctttgtcacgctttgccggtgtcatctgagaagtggtgcaggggacaaggggggcgtgacaggactggtcctgc

SEQ ID NO: 30128 - DNA, 265 bp, Homo sapiens
  chr21:46813682-46813947
  hypo
cggctgtggggccgggggctgagcctgggtgtcagccggctgtggggccgggggctgagcctgggtggcagccggctgtggggccgggggctgagcctgggtgtcagccggctgtggggccgggggctgagcctgggtggcagccggctgtggggccgggggctgagcctgggtggcagccggctgtggggccgggggctgagcctgggtcgcagtcggctgtggggtcgggggctgagcaggcactcttaggccgtctacctcc

SEQ ID NO: 30129 - DNA, 391 bp, Homo sapiens
  chr21:46834432-46834823
  hypo
cgtctggcattttaacagacctgggcggcctcctgcagacaaggctcggaccctgcggccgactctgccccaggcctggcccctgctgatggccatgctccgggcatgtggcctgagggcctcacggacagccagcctcccagaccagaaaacagccctgcccgccagtgagagggcagacagatggacactaatgtccccgaacctaagaaacaaaacccaaaaccctcatttatgcttccacttccgatcacacgcatagaaggccgaatactgaccccgagctgaccaccccggcctgtgggacccgtgagtatggcctgtgtgtgggatgaggctcaggatcaggtgcagatgaccctggattatcaggtgggccccacgtcattac

SEQ ID NO: 30130 - DNA, 499 bp, Homo sapiens
  chr21:46835379-46835878
  hypo
cggctgccacgggtggggcaggaggaggggcaggaccatgcgcaggggcggcggagcggggctgtgaatggagccccccttccggaagatggatgcaggtgggaaccagcgtggtgtggagttgagagcgggggtgcggcaggcggccggggcaggccccggacgggaaagtgcaggcggtgccattgatcagaccctggctgggggcctggggttcacgccttgcctggccttcagagaggtgcgagctctacttttggagaatgaggcaaaggcgcagaagcactcccggaaagtgccatccagcccagtgcctggcgctgcagccgggtggagccccaggtggtgctcacgcagccaggcgggcatggtgtgttgggggttttcataaagaaaagctgaccaggcacgtgccaagcaggccctcagccctgagggtacttgccgggggccgggagagtgtgggcccccgcttatccagaacactgcgtgggccctc

SEQ ID NO: 30131 - DNA, 192 bp, Homo sapiens
  chr21:46837296-46837488
  hypo
cgaacgtgcctgcctgctgtgcagggatccctgggttccccggggcttggggccctttcacctgcaggttccctgtcctgcggtctgtggcttgctcagtgtcctcaggtgtcctcttccgactcgagggtctcacgggtgcccccgccctgcctggcccagctgccctctctgtggcatttctaggaccgc

SEQ ID NO: 30132 - DNA, 168 bp, Homo sapiens
  chr21:46838491-46838659
  hypo
cggcggttcccacctgctctgcacagcccgcctcgtgcacctgctgaccccaccgtgtccacagcccgccctccttggctcacatctcttcctggggtctcagggaagcggcacctcctcaggggcctcccagccacctcacgtcacttcctggggtctcagggcagc

SEQ ID NO: 30133 - DNA, 261 bp, Homo sapiens
  chr21:46839249-46839510
  hypo
tgctgtgtgtagtgatgcgcgatgccgtgtgtggtgacacgatgccgtgtgtggtgacacttaatgtcatgtagtgacacgctcgcaggatcgccaaggccaggctggctccaaaggcttgggtctggcttcctggggccactgggtgctctctgaggccgcccatcactgttcgggccctggggtgggagctgggctgcaaagtggcctggactttatgtcctgccaggtacagtgtttccctcagcagatttatcaggc

SEQ ID NO: 30134 - DNA, 139 bp, Homo sapiens
  chr21:46842404-46842543
  hypo
cggggcctttgcgtggctgcctggcctgacgcacctcgcgccgtgccaggacccgggcagggcagcaaaaggcatctgtgagtcgccgtcctgtgcgggtctcagggcacagtgggtggcacgggctctcccagccgtc

SEQ ID NO: 30135 - DNA, 325 bp, Homo sapiens
  chr21:46844304-46844629
  hypo
cgcctggagcgcagctctgctgtgggttagccgtgggtctctgggcgagggttcccgggatacagacacctgccccaaggtgccccacagaggatgacccccagggcagccgtgcctgagcctgcgtggtcacctcccacagtgccaaggcgctcccccaaggcccctgcggcccacctgaccagtggagaactcgcgagcactcggccagtggtgcctccaatttgcagcctccaatccctggtcagaggtgtgacctgaccctggaccagagcgctgggccaggtcctggtggcttctgcccttcagcttggaagctcctgaa

SEQ ID NO: 30136 - DNA, 449 bp, Homo sapiens
  chr21:46844763-46845212
  hypo
aggcactgcctcgcccgcgcctctttctcccagacctgagccaccgctgccaggatccttccccagctggttttccttctctttgatgtgtttccactgagggtccaaaccggtccaggcgcgggttccagaactttcttcagatctctcgcacctgaaaatttcctctgtagccattcgcaggaggtttctcagatgccccgggctcgggggccagtcagtctcatgaggacggggtgggtctgacttgtggcatcgcggcctctccatcggtgctgctgggcctgtgagccaatgggtgggcagcaccacccaccgcctccttcctcacaccagtcttgggctgcgcagagccccagccatgtgtgtgctgagtgcagtgtgaccgcgtccgcccgtctccccggacacgcctgttggagccccggccgtgtgtgtgtgtgtgctgt

SEQ ID NO: 30137 - DNA, 68 bp, Homo sapiens
  chr21:46848505-46848573
  hypo
cgccggagagagggagccctgggccatcacgcagccaccgcccggccccaagaacctgcgagtccact

SEQ ID NO: 30138 - DNA, 670 bp, Homo sapiens
  chr21:46849594-46850264
  hypo
cgggtgacggacaggctctggcagcccctgtcagcatcctctccagggcatgtgaaagccagtgtgtcctcagctgccagtgccccctccccacctcctctgggcccatgtgcacgggacctgggctcccccaaccaagcctgcccgccttggttcagcagaacggctcctgtctctacagcggtgccaggccaggagtgctgtgtctgtgaagcggggtcatggttttggggccctcatctccctcgcgccctctcattggggaccccccgtctccctagcgccctctcgtcctctcctgcatgtgctgtgtctgtgaagcggggtcatggttttggggccccccgtctccctagcgttctctcgccctctccagcatgtgaagtggggtcatggtttgggggcccccatctccctagcgccctctcgttggggaccccccgtctccctagcgccctctcgccctcgcctgcatgtgctgtgtccatgaagtggggtcatggtttgggggccccctatctttctagcaccctctcgccctctcctgtatgtgaagtggggtcatggtttgggggccgccatctttctagcgccctctcgccttctcctgagcgtgtggaactctgtggtggtcagagctaaggttctgaataggtcgaagcacctcccc

SEQ ID NO: 30139 - DNA, 786 bp, Homo sapiens
  chr21:46861383-46862169
  hypo
cgggacgcttgaacccacctcgagggctgccagctcctggcctggaggtgcccccaccgggtcctccagtcctgctgcccggtggctctggccatggttcccgtcccgggctgttcatgttccccctgctcctctccgtgatctgccatctctgcttcaccagccggcgccttctacagaacacggccgtgagcttcccatgttctgccgctggctcttcacgccaacaggtctcctctgagcagggccagcttatggcatggcgccgggtcagctctcacctgtccccctcagacgcccacctctgatatgcaactatttccagcagaaaatgtcccatgtccttaaaggatggagcacgctgctgggaacacggctctctccataaaggagggactccccatgccactcccaaggccacgggaggccgccctcagcacagggtccatggggtctcggggtctccctgccaaagcacaggcctggtgaccccctgggaccctcactccagggagaggactgtgcatcttgtgtgcttctcacagtcactgtgtggggttcagcccaggggaggtcacctcgccctcatccacgcagtcctgcggggaggcccatttgccctgactgcacagtcctgcagctcggctgtgcccttgagtgggtggcgctgccctgttgcccaccgtagctgctgtggggccacagccttgagcctggacactggccatgactggataccaccggtgcacagggtgcacgtgaggaaaccctgcccgttctgtgccc

SEQ ID NO: 30140 - DNA, 107 bp, Homo sapiens
  chr21:46862420-46862527
  hypo
cgtagtctctgtcgccgggtagtagcagggccggaccccttcggatgagcacgcccaggcccaagagtggcagtcctggtgtgggcggtggtgctggtgtgggcggc

SEQ ID NO: 30141 - DNA, 295 bp, Homo sapiens
  chr21:46863364-46863659
  hypo
cggcatcgcagcagagtcccggtggtggagatgctttgccactggccacccagagctaggagcctcggccaagggctccctccttgcactgtggtctctcgggacctaggaggtcccggggtgtggactgtgctgaactgttctccgacaggcggccctttttctcccacgtgggcgaaaagtgaagcctctgggtggtcctgtacctgtctgtcacatcccgggctgcagccgggtccccagggaggcctccgtgaaaacacaaatcaagtgccaatttcctggtgaagagtct

SEQ ID NO: 30142 - DNA, 45 bp, Homo sapiens
  chr21:46863708-46863753
  hypo
agaggaatagctgagctgcagcactaaggagagatgcctgctgca

SEQ ID NO: 30143 - DNA, 55 bp, Homo sapiens
  chr21:46864076-46864131
  hypo
cgctccatggtacctcctgcctcccgaaatcacctctaagttcactttgtgccag

SEQ ID NO: 30144 - DNA, 297 bp, Homo sapiens
  chr21:46870768-46871065
  hypo
cgtggctggcgtggcagtggtgagccctcgatggctgtgcggacaccagaggctgagggaggacacacactccatggtgggacagcacccccgggtccaccaaggccaggtggacgcttaggctccagggccctcgtggctgctccggcggtgccatcacctctggagacagggcccgactctgcaggacggcaccagtgggggacagcaggtcctctggggggtgtgaggttctgagctgttagcctcaggctcctcaggagcgggcaggtcatgataacaagagtggctgcgtgc

SEQ ID NO: 30145 - DNA, 307 bp, Homo sapiens
  chr21:46885721-46886028
  hypo
cgggcgtccgtggagtgcacgtgtctgagggtctctgaggggtttgcccttttcttcggagccacggtggccgtgagggatgcaggacattgggtgtggccctcgaggactggcctgtctggagcccactcccccgtgggtgaacgcggctcttggtggagagcccagtttggggagaagggacggtcttgtcctgggaggtgtcagacaaagccgagcatgggactcacaggagacccccagtcaggccgtgtcagggtgaggctgggagtgagggtcctggaaagtccggcttctgggagagggc

SEQ ID NO: 30146 - DNA, 274 bp, Homo sapiens
  chr21:46886377-46886651
  hypo
cgcacccgggaaggctgagctctcgcacccgggaaggctgagctctcgaaatggggttcaggcatttgctgtttgattccaggacatctgagacagctgggcctgtacctcggggagtggaggctgcgccattctctgcccatccagcatcttagggccgggcatttggaagctggcttctgaagggagcccccaggagcttcgtggagaggagacgggacagctttggaaagggcgttgctgtcactggggtccctggggccgccggtgtagc

SEQ ID NO: 30147 - DNA, 222 bp, Homo sapiens
  chr21:46893658-46893880
  hypo
cgcacccccagggaggctgcccgagaccccttccctctccgagactctcctgccctttgtgggccccccgaaatctggagctcaagcagcaccggggttgccactgccacctcaggaccgctggtgacccctttctctgtctgcatttagggggtgatcgctgagctgaaggtgcgcagggacccccaggtgagccccatgcactgcctggacgaggaaggc

SEQ ID NO: 30148 - DNA, 278 bp, Homo sapiens
  chr21:46894494-46894772
  hypo
cgtgtgtgttggtggggtgtgtggaatcacgtggtacccaaggggagaatcccccagccccaggtgtgaggaacagcagggaattctcactcaggggcccagatcacaacatgccccacgtgaacatggacccacagcctcgctcctgggggcgtgggcaggagacgccgtggacgtggacccacagcctcgctcctgggggcgtgggcaggagacaccgtggctggactgtgggcagtgtgtgaacatccatgttactttcatgctttttctttatt

SEQ ID NO: 30149 - DNA, 258 bp, Homo sapiens
  chr21:46894910-46895168
  hypo
gcctgtcttgccctcaggggtcagtagcggtccctgaggatgtttctcctccgggttttcctgaagtttaaaacatccagccgccttggcgcgtgttcggcccagccgggcgtgcgctggggaaacctgtgcggggagcatctgcggtgcggcctcctccagggcagggctctggccagaagagaggagcgcgttccccctcccgcctccgcatgtctgaccaccggccgaggcaggttcagaagcgtcactgtcctc

SEQ ID NO: 30150 - DNA, 216 bp, Homo sapiens
  chr21:46895491-46895707
  hypo
ggagagcccctcccagcagtggggtgacacatgtgcacacgcaggtgtggctccaagagctccctctatgccacgaagacatattcctggctggggacagggatgctgggctgggcagacgctcggagcctgggcacaggccccgctccggccctgcctggccgccgcgtgtctctggtgagaggatattcctttaaaacgaggtcctgccctgca

SEQ ID NO: 30151 - DNA, 575 bp, Homo sapiens
  chr21:46895736-46896311
  hypo
cttcccttcgccccatccctccgttagctcgtgcgtggccatcagggaatgaacgcgtgtgtgagcctgacgaccaggaggagaaggcggcgcagggagcgcgcggaaggctttccccagctcgggccacctgagaaaacacaggaggggcggggagtggggaggccccagccgcgggactgaggcgcggtgctgtccgtgagagacgggtgcgggaacgtgttccctgcggggaccctctgcagattcacatcagcttcccagcatggcctgtcgggcgccgggaggcctctgtggtgacggcaggcgcggtcctgggtcctggggagccggggagcccacaggcggccacacccctgcggcccacggaaggaagcccctcgcgcacggccctggagcaccctcctgtttcagaggatttttctttatctttcttgcgatcttaagtatttcatttcacaaaccaagcaagtctccaccgggcatctgccggccgaataacaggccacctcccctctcgtcctccagggcgcggccctaaaacccaggctccccgcgccaccccccgtcaccac

SEQ ID NO: 30152 - DNA, 866 bp, Homo sapiens
  chr21:46900291-46901157
  hypo
cgatatgcagcttgcggggcaggggccaggagtaggccaggcggggggccgagctcagggcaacgtgtctctccggctcttttcctcagaccttcattgacatggagggatctggcttcgggggcgatctggaggccctgcgggtgagtggcccttaaactgcagcgctgcccgatgtctgtgcccatgaggaacaggccatggacccccaagattcagctggggtcctgtggggggtggggatgaggcccgttctgggggtggtggtcatccctggtgggtgccacatgggctgtgactatctgtgttcgcccacgtccagggtcctcgaggcttccctggacctcccggaccccccggtgtcccaggcctgcccggcgagccaggccgctttggggtgaacagctccgacgtcccaggacccgccggccttcctggtgtgcctgggcgcgagggtccccccgggtttcctggcctcccggtaagtcctgcctccaccgtcagtgtcgggagccctgtctgctgggagtgaggggtgaacaccccacatgggagcccctgccccgcctcaggcctccccagtccccgcctcctcacctcatctcctctaggagctggcgggcagttgctgactcggggccaccctggggtgtgcggaagcacctgagtggccaccccatggttctaggggtgctgaccagtgggggtgaccgcaagcaaggcctccgacctctctggccctgtgggtccacggactgcacagagagcgtctccatgagcaattcccatgggtgggtgtgggagggccgaggtcagcattgctggagggccaggggagggaggagcctgcttggccaacgcggctc

SEQ ID NO: 30153 - DNA, 251 bp, Homo sapiens
  chr21:46901458-46901709
  hypo
cgatgggcattcaccgtcaccatcggctctgaggcctctctgggtgccgcatggcaagtgctccccagaatccattctgaggggaatttgggcttaaagaacatgcctaatccatattcacgcatgtggccagactgcctctcagagggagcagcggctaccccagccctggtgtgcaagcatcttcccgccgtggtgctgtcggctctgccatctcatcctgccaatgtggccgcgaaactgcgggctac

SEQ ID NO: 30154 - DNA, 1234 bp, Homo sapiens
  chr21:46906455-46907689
  hypo
cgggagccagggctggaggtaacgagggtgccctgtgcacctcccgctgtgcatgtgggcctccccctgtgcatgtgggcccaaccccgaccaagttcgggctccgtggctctctcctcagttgtgtttctgtgtggctgaaatcgtgtcgtaaagttagaagaaaggctgctgtggggcctgcgttgcttggcagaatgttccttaccttttgatttgcagggtttagaaagcatcataagaaaacgtgtctacgctggggttgcagggccagcgggggctgggctgggtcctgacacgctctcctcaccccacgcaggggagcaagggagcccccggtcctgctggtgctcgtggggagagcggcctggcaggagcccccggacctgctggaccaccaggcccccctgggccccctgggcccccaggaccaggactccccgctggatttgtgagtaccgcctacacctgaccccctggagagccgggggctgccgttgccccagccctactacccctggcatctcactcacagagcagcacgtcctgggcggtggccttgctggcactgcctcatcctgggattccatattccgcatggtggggctcgagtctctcgcccgtcgcccgtgccccacggtgctgatggggatcttggcccagccatgccccagcacccgtgccctgaccaagagcgaatgagctgacccgagacgggctgccccgggggggctccacccaggccctgccaccaggtagacagtccccatctgagaacggcggctccccaggccaccgtggccccaaagcatgtcccaccctcctctcgggcagtgccaccccagggaggggtccttccctaagaagggacacaggcccctacgtgtctcgtgtgtctcttccaggatgacatggaaggctccggggggcccttctggtcaacagcccgaagcgctgatgggccacaggtagtgttgtgagctgggcgtggccggctctgaggggtaagggggtgttgcctggggcaggagagtgtccctgagagccaccggccttgcatgggatcggaagccgccctgcagagccgtgaggaccacgtgtggcgggcgctgtgccccgcgggccacccttgttcttcggagatgccccttcattgaactaaagtcacggggtgagggcctggtctgcaaagtgggagacactgtgagtggtcaagacaaaggaacacggggcc

SEQ ID NO: 30155 - DNA, 310 bp, Homo sapiens
  chr21:46910337-46910647
  hypo
cgagatgtgccctcccgggtccctgggtctccatgtgccctcgtgggtccctgggcctccgtgtgccctcccgggtctctgggcctccgtgtgcccactcccgggtctctgggcctccgtgtgccctcctgggtctccgtgtgccctctcaggtccctgggcctccgtgtgccctcccgggtccctgggccttcgtgtgccctcccaggtctctgggcctccgtgtgcccactcccggagcgccaggagttaagtataagtctccgtcagggctcttggtggctgcctccctcccaggccccagccggtc

SEQ ID NO: 30156 - DNA, 616 bp, Homo sapiens
  chr21:46911022-46911638
  hypo
cgggcgcctcctcacccaccgtgggctctgggcaccccctccagggctgggtggactctggggtcctggccagagcggttgagatgaaatgccggacgcgtggcctcctcttccagggagatccagggaaggacggagtcgggcagccgggcctccctggcccccccggacccccgggacctgtggtctacgtgtcggagcaggacgtaaggacgctgcgtgggtgggcacccaatctgtccagaccccccacggggtgcagagatccctccccgagccccccccacacccccacatcccccaggtcaggacaggccctgactgccagtctacactccacctcctcggtgggggctgcagacgccctcggtcagagacgcctggggagcccagctccatgtggtgttggagacaccgaggagaggggagggcctgcacaggggccagtgtttttacgtcaaaggctcccattgggctcactccctgtgtccttgacactgtggccccaaagctgcatgtagtcacccagctgccccgtcagaagaagcagatgcacccttggcccctctggtgaaggttgtgttggttccggaaccttcctcccccactgcggccc

SEQ ID NO: 30157 - DNA, 756 bp, Homo sapiens
  chr21:46912528-46913284
  hypo
aaggctgggtggggtccgggcaggcgcgagggtgcgtgatgaccccagctgacgccgtccctctttccccagggccggccgggtttcgcaggctttcccgtgagtaacctggtgccagagctgcatgctgcccggctggggaggggtctccacctggtagcacagagcagcccggtcgagctggggtgggccttgtcaggcccgagggatagcgacagtcactgcccccaaggaaatgatgggagtgggatgtgggcgagagccgctggcaggccctgtgctgggtgggcacccgtgagggtgaggcagctccttgcacctgcagaggcctgcagtgtccagagtgaggctggggccgggaggtgtcctggtgggggtcacctgcggaggcctgcagtgtccagagtgaggctggggccgcgaggggccctggtcgggctgtcgaggcaggcatattgcggggggcagctgtcgggggagatggagcagccgtcggggatgggggagatgccagccgctcgggcctcacggcctggcctccattccagggacctgcaggacccaagggcaacctgggctctaagggcgaacgaggctccccgggacccaaggtaaggggctcaggtgctgtccctcaaccccctttgtgacccaggggtggctccagcctgcccagatgaccactgttgggagggacctgggaccccccggctgctgctgtgacacgtgaggggtacatccctgctcgggccgtcc

SEQ ID NO: 30158 - DNA, 319 bp, Homo sapiens
  chr21:46913360-46913679
  hypo
ggctttgtggggaaggagctggccctgactctgctggacctcctgccattccagggtgagaagggtgaaccgggcagcatcttcagccccgacggcggtgccctgggccctgcccagaaaggagccaaggtgagggccgggcagcctccttccggcaggcgtgggggctcctggggctgtggagacagcctggggagggtcttcctgagggtctggctcctgatgcacgagcctctcccaagcagggctctaccatccaggcctggccctggtggcccctcctttctcgcacccatgtcggcggttccgccggcccctc

SEQ ID NO: 30159 - DNA, 469 bp, Homo sapiens
  chr21:46914465-46914934
  hypo
cgggcttccgaggacccccggtaagtcggtccctggctttctctgcactgagctcgggcatgacggcccccaaggacacggtcgcccgcggctgctgagcttgtgctgtgcggcccagggctcatctccctagtgcagttttaaagcgtgtggggcaggtgtcggcgtgaggctgcagtgggctcctccgagctgatgggtggcccagggtgctgtgctctgcatggcccctccccttccccaggaccccccaactcgtggtcaagggccagggtctgccccactaagcctggcccccttcctcttgcagggtccatacggacggccggggtacaagggagagattggctttcctggacggccggtgaggacctggggtctccagtgggggcggcagatggggtctggcaggtggggagcagcccaggcccacgggggtgacatgcccagaggggagtggacggccgcc

SEQ ID NO: 30160 - DNA, 395 bp, Homo sapiens
  chr21:46918218-46918613
  hypo
cgccgccacggtcccctctcgccgccagggtcccctctcaccgccagggttccctctcgccaccacggtcccctctcgccgccagggtcccctctcgccgccagggtcccctctcgccgccacggtcccctctcgccgccagggtcccctctcgccgccacggtccccgctcgccgccagggtcccctctcgctgccagggtcctctgcagaggaggccgccatacctgctcttgctggggctgcactctggggtgggaagggaccaggcaggcagaggccgagtctgggccgggacatccttaaggcctgtggaggcaaaggcaggcagaaagcaagcgggaagatggaagatgtgcccatgccagccttggatctctcagcgtcacacacgac

SEQ ID NO: 30161 - DNA, 223 bp, Homo sapiens
  chr21:46918891-46919114
  hypo
cgagggctccgagggctctagagggaacagtgtttgcaggcggaatggctgatgctcttccaaagccaaggaaggctcagagcattcccctcattcgaaggatcaacaattagagtgacgagatttctcaacaaaacgggagaagccagaagaccataaatggtttccaaaatatccaagaaagtcaattgccagtgtagactccgacagccagtggtactcc

SEQ ID NO: 30162 - DNA, 229 bp, Homo sapiens
  chr21:46919143-46919372
  hypo
ggccagccactccagacccgagctgtgtcggcagtggagggtatttcagggggaagacaaggccaagggaaaggagtgcagagatggggagagacaacgctggcaggaaccggcgtcccagcgacagggaggtcagaggctccctcgggaaccagcgtgggctgccccacatggcatcccaggaacagtggggtcagaggctcccgcgggaacccgtgtgggctgcccc

SEQ ID NO: 30163 - DNA, 505 bp, Homo sapiens
  chr21:47413791-47414296
  hypo
cgggtccacggagcttgctggagaagcagggatgcacgcagggacgcctctggggccccaggaggagctgccggcctcctgaatgaagatagccatagccagccacgccgatggccacgcacgtgggccgaggaaacgcttggcgaggccaggaaggggctgtgcggggagggaaggccggaacagcccagtgaccacctggacagcatgctgtggctcccagcgtgcccgggcagccatcctccccaaggatggcccagctccacactcacggctcgtttctcttcagggtgaagctggcccgcagggtgatcagggaagagaaggccccgttggtgtccctggagacccggtaggaagcgctgtggggttggggggcgttggccaatttgggttttgggggtagaagtgctccagcagctcacgcactgggggtctgttcatttccgtttgagggcctctgtgtttccgtagatctcgggggtgtccctgcgtgggagccggc

SEQ ID NO: 30164 - DNA, 44 bp, Homo sapiens
  chr21:47414327-47414371
  hypo
tggtgtggattgttgagagcaggcccagcgcccgggggcctgac

SEQ ID NO: 30165 - DNA, 209 bp, Homo sapiens
  chr21:47414718-47414927
  hypo
cgcaggctgggctgggccgttgcatcctcccggagctcacctgccccacggggacaggaaggcctccacacggtcacgcccggagacagcaagtctgtgctcccgagcttgtctgcttctgtggacaaatcgaccttacggctccatgtgcgcagctgcccacacaccgagcacaaggccagaccctgggcacggcagctgtctcagac

SEQ ID NO: 30166 - DNA, 195 bp, Homo sapiens
  chr21:47484109-47484304
  hypo
cgctgatttcatcggactcgagagaaaggggggccacagcagcgttttcacaatagctaaaaggtggaagcaatccacgtgtccccagtggatgaatggataaagaaaacgtgtctatccatgcaacggagtatcattcagacgtgaaaaaggacgaagtcctgacgcgtgctacaacgtggatgagcccgagac

SEQ ID NO: 30167 - DNA, 116 bp, Homo sapiens
  chr21:47489821-47489937
  hypo
cgatggcactttctgtaggccgcagaggtaggggccgcagagccaagcttgctagcatccatgggacgctgaggccccaaataatagagaccagatggcagcgcttacccccaggg

SEQ ID NO: 30168 - DNA, 172 bp, Homo sapiens
  chr21:47497763-47497935
  hypo
cggtctggatgcccccgtgaagtcgtaaaggcccccaggtggacccaaggaaagcggggaggagagggcttcctcgtggggctccagaaaccaggcactcgggcccctgcctctgcgagacgtgttcactcattttgcggggtccccagtctctgcaaagcacagcaccgac

SEQ ID NO: 30169 - DNA, 152 bp, Homo sapiens
  chr22:24179789-24179941
  hypo
cgtgtcctgaggggagtggccagcctggggcggactagatgtaccgggaggctcacccagcaggtccacgaggatggagttgcccagcagcagcgagaagcccatgagcgcccaaggcaggaacggtgcctggaaagtgagcaggccgaaga

SEQ ID NO: 30170 - DNA, 226 bp, Homo sapiens
  chr22:24179982-24180208
  hypo
accagcatggccatgagggcctggcccaggaagaacaggctgcccaggagtcccagcagctgggccagagtcaaggtgctccggtgcaggcctcagcccaagcccagggcccctctgacttcccaagaccctggaattcttcccctcatctcccctatgtgctattccctcatcaagatgagccagtccaataaaggcgacacactccacgggcttcaggtcccac

SEQ ID NO: 30171 - DNA, 305 bp, Homo sapiens
  chr22:25561932-25562237
  hypo
cgcaggccgtaaccctttccctaaccccagcccttacccggagggacgtggggggctgtggaagggctttgagcagggacctattcagttttggaaagtagaatgagaagcacatacagggcgaaggatgccaggggaggtccctcggaagctgccgccgtgggtgaacagatagctggtcatagctggaaggaatgttgttcgagaaagagactttgaaggactgaggatcgatgcagtatggcagtgaaggagagagaggagggagcagcgctggcctcaggaccctcagtctggcattaggc

SEQ ID NO: 30172 - DNA, 122 bp, Homo sapiens
  chr22:25570292-25570414
  hypo
cggagcccacctcggcaggggaccagtatgactgctccagggaccagcggagcaccagcgtggaccactccagcactgacctggaatccaccgatgggatggaggggccgcctccaccggac

SEQ ID NO: 30173 - DNA, 352 bp, Homo sapiens
  chr22:25602982-25603334
  hypo
cgtccacatctcaaccttggtctcccggcaggtgggttggctatgagttccccggctaccgtgggcgccagtacgtgtttgagcggggcgagtaccgccactggaatgagtgggacgccagccagccgcagctgcagtctgtgcgccgcatccgtgaccagaagtggcacaagcggggccgcttccccagcagctgaaaggcacccagacttcaaggacccagacccaccctggggggctgcaagggcaagaagaggaggctccagggttggggcgagggccgacctgtccacccttccctggaatctgctcaataaagcctggggttggtcccccacccgccacgttcctc

SEQ ID NO: 30174 - DNA, 496 bp, Homo sapiens
  chr22:30939634-30940130
  hypo
cgccgctgagaacactggacctaatgaacagaacatctatattgtggtgggcgtggtgtgcaccttgctggtggccctactgatggaggctctctacctcgtccgaatcagacagaagaaagcccagggctccacttcttctacaaggttgcatgaacccgagaagaatgccagaaaaataacccaggacacaaatgatatcacatatgcggacctgaacctgcccaaggggaagaagcctgctccccgggccgcggagcccaacaaccacacagagtatgccagcattcagaccagcctgcagcctgcgtcggaggacaccctcacctatgctgacctggacatggtgcacctcaaccggacccccaagcagctggcccccaagcccgagctgtccttctcagagtatgccagcatccaggtcccgaggaagtgaatgggaccgtggtttgctctagcacccatctccatgctcttccttgtcccacaaggagcc

SEQ ID NO: 30175 - DNA, 132 bp, Homo sapiens
  chr22:30940932-30941064
  hypo
gtccactccagcgcccggtcgccacccttctttgccccgggaaccccatcccggcacctcccaccccgcatacaccacctaccccatgcaaaaccctatgatggcaggaatcgagacctccaaggacccgtc

SEQ ID NO: 30176 - DNA, 99 bp, Homo sapiens
  chr22:31260817-31260916
  hypo
cgggtccctgctggacatctatgccttaaccctggaggagctcacgggcagtgagggcaaagttagtttccccgaaacaagcaagcaagtggggtggcc

SEQ ID NO: 30177 - DNA, 688 bp, Homo sapiens
  chr22:31266269-31266957
  hypo
cggccaggaacaggaacgggcaccatctcggggactgatgttttttgaatggcgctatccaccctgccctgctcggcctggctgtgcaggcctcttggtaccacgtctgttcgtaatgaccgtaacaactctattttcttccacagatgactctggggacgacgacgaggctaccaccccagccgacaagagcgagctgcaccacaccctgaagaatctttccctgaagttagatgacctcagcacgtgcaatgacctcatcgccaagcacggcgctgcactccagcgctccctgacagagctggacggcctcaagatcccatctgagagtggggagaagctgaaggtggtgaatgagcgggccaccctcttccgcatcacatccaatgctatgatcaacgtgagtacccacccccaccgccctggcacggggctccctggctccagccccggggtccctcggtgggtgaccagggtcagcttgaagggtcagcgttccatttcctgtggttccacggtgtttcccaaagccagcgccccccagctagcttccgagttcttaaatcatctccttcactcggccgtcgttgggcaaggacattcttcctaattgtctggaggaaacgagttggttgtggactctggtgcagtctgcagttatttacttcatgcctcgataaggaaggtc

SEQ ID NO: 30178 - DNA, 389 bp, Homo sapiens
  chr22:32665378-32665767
  hypo
cgatgtgcaggccctggatgagaagctgctcatcatcatcgccctgcagttcctgcacggctactacaagcccatcctgttcgagcccaaccagacctggcccgggcacgtggctgtgtggcaggacacgtgctccatcgtggccatcttgctaacatcacgcagaaggtgcaccccgtcatctgatctctcaccagctaccctttgactgcacccaggctctggccgtacccaagcccataggtggggtggtggtctttgtcgtcagctcgctgttatacctgaaccagagcattcccccgtacggtgtggctctcagcagcctcaccacaggcaccgcagctttcccgctgtgcacccagctgggtgtgtgaatccccctggactgc

SEQ ID NO: 30179 - DNA, 121 bp, Homo sapiens
  chr22:40024720-40024841
  hypo
cgccggcaatggcaggagcagcagacggcctctcccagccgcccagcccctttactgacctggccagtccagggagagtggcccccagtggccaggccacagcctcggctcccctcgcccc

SEQ ID NO: 30180 - DNA, 424 bp, Homo sapiens
  chr22:40045208-40045632
  hypo
cggtcagcacggatgcgcgccctgcaccgtgctgggcccatcatgtgccttaagggagagaatcctcctacagcctgcatggtgggcgttcctgccccaacttctacaacaggggcagacaaagctcagagagctgcagccgcttccccaggcacccctgaccgcctttccaggctgggtcggctggttccaggcagacctgtgggcctgggagccaagcgcactcagggatgtgtcccagggtggattgggcctggtgtgggcaacgactctatgcccctctcatttgcttttcagagctgtgcccgcaacatagccccctggatgcgacgccccacaccctggtgcagcccatccccgccacgctggcttccgatcccgccagctgcccttgctgccagcatgaggacggccggcggccctc

SEQ ID NO: 30181 - DNA, 220 bp, Homo sapiens
  chr22:40045721-40045941
  hypo
ggagcagcgaggacggagcctcctcagaactggggaaggaggaggaggaggaggagcaggcggatggggcggtctggctgtgcggggatgtgtggcgggagacgcgagccaagctgcgcggcatcgtggacagcaagtacttcaaccggggcatcatgatggccatcctggtcaacaccgtcagcatgggcatcgagcaccacgagcaggccagtgcagc

SEQ ID NO: 30182 - DNA, 328 bp, Homo sapiens
  chr22:45074483-45074811
  hypo
cgcgccctgcctgctagttctttaagccgctgctggaaggcatccttctctagaaagtcttcctggctgcctcctgttcaccgcaggccaggcggacccacggccccctcagtgccatctcaccctgggctctgctcatgcctttgggccagcgcttgtcatacagagcttctctgccctgttcccaggtctccccgacagcctggggctgctctgtgtgattcatctctgggtcccagggctcagctgggggctggcacagagtgggaccccagcagcattcgatgaattgagagcacgagtgagcgacagacatcagggcacctgc

SEQ ID NO: 30183 - DNA, 392 bp, Homo sapiens
  chr22:45959040-45959432
  hypo
cgagcccagggacttgctcctgaccgtcaagatggatctctctcgccacggcaccgtcagctcctttgtggccaagcttttcatctttgtgtctgcagagctctgagcactcgcttcgcgtcgcggggtctccctcctgttgctttcctaaccctgccctccggggcgttaataaagtcttagcaagcgtcccacacagtgagcctcgcgtgccttggttttatttggcatggttgggagtctgtgccgcttgttacccgggggtgagctgggcactggccaccgcctggtacccccgagggctgactgaggagcgctccccactagagggtgtgtgctcgggggtccctgttcacagagcccactgtctgtgccgacagggaggccaggcc

SEQ ID NO: 30184 - DNA, 167 bp, Homo sapiens
  chr3:124281735-124281902
  hypo
cgggccacagcagtgagctgaccatccaggtggggcagacggtagagctgctggagcggcccagcgagcggcctggttggtgtctggtccgtaccaccgaacggagcccgcccttggagggtctggtccccagcagcgccctgtgcatctcacactcccgaagcagc

SEQ ID NO: 30185 - DNA, 360 bp, Homo sapiens
  chr3:124515276-124515636
  hypo
cgcactcacagaaaggcccatagatcttgccaaactcgctctcgaagcaggagcactggttgcagctgcagtccccacgcccgctgcacagtggcttgccctctgcctcccggcacaggttctggtacacgctctggttctccccatcctggcactcgcacctggtgcccaggtagccggggctgcactcacacaggccgcagacataggtcccgctcccgttgcacctggcgctgttgggttccagccccacgctgcagccgcacgtgcagttgtaggtgacccccacctccaggctgtcccggaatcccaccggccgcagggcaaacacatgctccgtgtgtctgctgggacagcttc

SEQ ID NO: 30186 - DNA, 271 bp, Homo sapiens
  chr3:13611739-13612010
  hypo
cgcgtgcgtgccggtgtgcaccgtgtctgtgtgtgcacacccagtactgacaggcttcctttctgattcccccagggtcttacaggagaggggaccgtcctgggctggcctggaccatggtgctgctctgggagcctgcaggagcctggcttgctctgggcctggccctggccctgggccccagcgtggccgcagctgcccctcggcaggactgcacgggcgtggagtgcccgccgctggagaactgcattgaggaggcgctggagccggg

SEQ ID NO: 30187 - DNA, 186 bp, Homo sapiens
  chr3:13612341-13612527
  hypo
cctgacgccggtggagagctcatctgctaccagctccccggttgccacgggaacttctcagatgccgaggagggtgaccccgagcgacactacgaagacccctacagctatgaccaggaggtggccgaggtggaagcagcaacagccctggggggtgaggtccaggcgggtgcagtccaggcaggc

SEQ ID NO: 30188 - DNA, 177 bp, Homo sapiens
  chr3:184225995-184226172
  hypo
cgcatcaacacacacagccgcagcagctgcacatagatcaacaggccatccgtgcctcgaacacctacatcaacggccaaggccttggccaccctgcccagctccgtgcaccgctagttgccttggtggatcacagccgctccacgctccacaggaagaatcccaaacccggtgacc

SEQ ID NO: 30189 - DNA, 34 bp, Homo sapiens
  chr3:185363305-185363339
  hypo
gcctgtgggagcctcacttgctgcgctgtgaggc

SEQ ID NO: 30190 - DNA, 477 bp, Homo sapiens
  chr3:185374988-185375465
  hypo
cgctgcctgggactgagagggaacaagggccgtgggatgagaggaggtggtagaagggccacagggccgtcaggagcagcctcaccttgatagaggctccggcgaatctcgccagctgtttgatgtgtgcccccttcttcccgatgatggcgcccacagcctgggttgggatgaagagattcacaatctcctgctctggatactgggagggcgagacaagaaagaagacatcattccaaccaggctttctcctccaggcactcaacaggtaccaagcaccttaccatgaaccccatggtgggaaggccccgccacccaaggaaatggccaaaatggtgcacaggatccttctgcggcctgcggctctgcaggtgtgaagcctgaggaagggacctgagcacaggcagcgctagtgataatcaagggcatcctcctcttgagcttctcaatttgttggattccaaaagctgtctgatc

SEQ ID NO: 30191 - DNA, 245 bp, Homo sapiens
  chr3:185407229-185407474
  hypo
cgcagcgggaaatcaatctgtctggcctgagaagtgcccccaggggcgtggccttgctcccgggaagagtggtccccacgctgggctcgctgagggggcgaaggggagctcacctcttcatccgggatgtaggaaatcttgaaggagtagttctcaaactgatgcccgcttagcttctccatggctctgaaatgcagcaggacaggggagcttcgtcagaaaccaacatcaagaaagaccctccc

SEQ ID NO: 30192 - DNA, 197 bp, Homo sapiens
  chr3:185445861-185446058
  hypo
cgttacgtatacctgaactatgtttgcgattcacacaaaataaagaattgaccaggaccaaccccagcctatgagaggcaaagttactgctgcccgctttaccccaccctagagcgccctctgatccacactctcacactgccttccagctttcccacggcgccagacccttgctgctcctgggccccttccccttg

SEQ ID NO: 30193 - DNA, 157 bp, Homo sapiens
  chr3:54237704-54237861
  hypo
cggccaaactccgtctcatcccgctggtcagtggcctgcctgtgtgctggcatctgtcggtgtgctgttctgccgacgtgcttcctcgatgtcctctcgctgtccggccgcttgtgtcttcttccgctgatgtgcctcttgacgtctggctgcctgc

SEQ ID NO: 30194 - DNA, 990 bp, Homo sapiens
  chr3:66550603-66551593
  binary
cggcactcacaggctccgcgtccaggagggcaggtccccgggcaacgcagccagcccgcgcccaccgcagtccagcgagtccccagcgcaagtgcaggcggccgcgcagggcgcccgcgggccggccgcggcggtcaccggctccagccgaagcaaaagcagccagagaaggagaaggcaaggcgagcggcgcggggccccgagccctccccggaccggccgcgccatcttgtctggagcgcgctgcgaactccgggcgcggggactgtgaggacccgaacggccgcagacgcgggcgggcccgcggggcgctccgctcggctctagactccgcaccggggcatggcccccgccccaagttctctctgcggccgcggctccggcactcagcgtgcccccggtgcccgggccgctccggagcacccggcgggggccgcaaaccccgcgcccatccgggccggccggcccgcccgcgctagctgcgaactccgccgattcgggcaaggtgtacccagcctgcgctcttcgtccgcccggggcacgccgagtgccgctaccgacaccggccgagggcagtgctgccgctgcgcctggaagacaggcgttcagccccgcagcccgagctcggtgccggcaggcatcttcctctgggctcggagcgcaaagccgtagacctcgggctggacggcgcggccggccccgcgctgggaggccccagtgcgcctcgctgtccccacgccgcggccagagagcgcgcgcgcgcgcgcagcctcgggttccgcacggctcctccgcgcagcaagagtcccgccgacctcgcagccgaacaatcagccgcttgctgttcgcctccccgcggcccagccccggccggtcccccaagccccgcccccggccgctcgcccgcacacaccccctaggctccgcgctccgcggccgcctgctggcccacgttggatgctttgcaacagcgccccgccacgcctcccc

SEQ ID NO: 30195 - DNA, 223 bp, Homo sapiens
  chr3:8595841-8596064
  hypo
cgcctcaacctcccaagtaataaacctctttaactcttggtaacaaccagtgagagaggttggggttgtgatacccatttcgcagatgaggaccctggggcgcagtgaggttaccccacgtgctgatgagagcggggcttcggttcaatccccagtccttctgcttcaccggcagagtgaagtctgaagccgtgttggggtggggcctcggcagggtgggtcc

SEQ ID NO: 30196 - DNA, 33 bp, Homo sapiens
  chr4:3467499-3467532
  hypo
ccaccgcgtcctcactgcggaatgcgtgtctgc

SEQ ID NO: 30197 - DNA, 894 bp, Homo sapiens
  chr4:57180972-57181866
  hypo
cctgaaacccgaaggacaaagagaacactccgaggagccaggtatttgcgaggagcagaacccagaggccgagcggcgaagagagcagcagggaaggagcggggatttccagggggccgatcgtcctgggcccgaggaaaagagagaagaaggggacacggagcctctcctgaaacaagaggggccggtggaagccgcgcagcctccggtggagaggaaagaagccgccgcccttgaacaaggccgcaaggtggaggagctgcggtggcaggaggtggacgagagacagaccatgccccggccctacacgttccaggtgtcctccggagggaagcagattctctttcccaaagtcaacctgagccccgtgacgcccgcaaaggacacggggctcaccgctgctccccaggaaccaaaggcccccaaagccagcccagtccagcacgccctaccgtcgtccctgagcgttccccacaccgccattctggtcacgggcgcgcagctctgtggcccggcagtcaacctgagccagatcaaggacaccgcgtgcaagtccctcctgggcttggaggagaagaagcacgcggaagccccagctggggagaaccctccccgaggccccggcgacgcgagggcgggcagcgggaaggctaagccccgccaggagtctcccagcagcgcgtccgcactcgcagaatgggcttccattcggtccagaatcctgaagaacgcagagagtgacccgcgcagcagcgagagggaccagttgaggcccggtgatgagtccactcccaggggccggtgtgattcccgcgggaaccaacggaagactccgccagtcaatgcaaagttctctattatgcctgcctggcagaaattttccgatggtggcac

SEQ ID NO: 30198 - DNA, 298 bp, Homo sapiens
  chr4:57181886-57182184
  hypo
cggaagctgaaagcatacgaaaaagacccatgctgggacccagcgaagagacagccccccagcctcctcctgctggtgttcgcgagctcgggaagggtccggagaagtcggagatgcaccgggagcccgcagacaccaccgagggatgcaaatttgccaaagacctcccgtctttccttgtcccaagccttccttaccctccgcagaaagtggtggcccacacagagttcacgacctcgtcggacagcgagactgcaaacgggatagcaaagccagaccctgtgatgccaggtggaga

SEQ ID NO: 30199 - DNA, 510 bp, Homo sapiens
  chr4:57182262-57182772
  hypo
acagaagaagaagaagaggcacagcagcaccggagacagcgcggatgcagggccgcctgcagcggggagcgctcgtggagagaaagagatggagggtgtggccctcaagcatggtccatccctcccccaagagcggaagcaagccccttccacccggagggactccgctgaaccttccagcagccgctctgttcctgtggcccaccctgggcctccaccggccagcagccagaccccggctccggagcacgacaaggcagcaaacaaaatgccactggcacaaaagccagcactggctcccaagcccaccagtcagaccccaccagcatccccactttccaaactgagcaggccctacttggtagagctgctgtctcgccgagcggggaggccggacccagagccaagtgagccgtccaaggaggaccaggagagcagtgaccgccggccaccctcgcccccaggccccgaggaaaggaagggacagaagagggacgaggaggaagaggc

SEQ ID NO: 30200 - DNA, 496 bp, Homo sapiens
  chr4:6733162-6733658
  hypo
cgccccgtcccacagacagaagcacacacaggcgcctctcctcatgtgcagctggctctgagattcatggaacaagaagagccaactcctaggaggaggccagttcaaattctgcctttttccggctgtgtactcttggagaagttacacacctctctgaaaaattgttgaaagtaaacttactgcacaggacactttctgtgctcagttatgtctgccgagttcagctggcgtgcaggcactgccacaggccccgagaaaagaacggggtgcagagcaggggctgctttcagggacccgccgtgctagtgaaggtggaacggtaaagagggtcccgggtttaagggcgcgggcagtgatgggagcacagacccagtgaggcaggggagggtgagggaggccttctgcagagggggtaccctgcagacagagtcagggagagatcaagagacggggatggccaggagggcacagggctcactggccaggcaacatc

SEQ ID NO: 30201 - DNA, 273 bp, Homo sapiens
  chr4:8070965-8071238
  hypo
cgagccgtccagtggggacgttctgaacaaggcaacacggtgcccaggaggccagcctgagcggccctagaggaccagagaacttgactaagtttgggaaaggctagggcagaatcccgcctgtggatgttcacacgcactgcagcgtgtccaggctcggagggtcccaccacgaagacagtgatgagcacattgcccggggaccaggggacgcaagggaggacacgacaggccagcgtggaagggtaggaccaggggctctgatgcgctgcc

SEQ ID NO: 30202 - DNA, 173 bp, Homo sapiens
  chr4:8615920-8616093
  hypo
ctcacctgcctgctgggcacttggctgacaccccgacgtcccggctgtctctgcgcggctgacaccccggcgtcccggctgtctctgtgcggctgacacccctgacgtcccggctgtctctgtgcggctgacacccctgacgtccccgctgtctctgtgccacaggcatgtcc

SEQ ID NO: 30203 - DNA, 150 bp, Homo sapiens
  chr5:1032302-1032452
  hypo
cgggaggaccagtgtcccctacagggtgagtgcagctcccgcagccctccctccccaaactcacagacttcatcccgtaccaaggcaacgccgaaaaccacccttaaaacaaccccgtgtgcggagcgagggcacttcccaggcttagac

SEQ ID NO: 30204 - DNA, 339 bp, Homo sapiens
  chr5:1033274-1033613
  hypo
cgtgggctggtgagaggagggcacacccggctgtggctggccgggatagggcctccctcccctccgcaggggtcccaagatcgggctctcagctcaggcccgtctggacaggatcatggtgtggtgaggggagagcagcgagggtccccaatggcgggccacatcctccatgtgccctctgccagccccttcgcctcctcttgtccccctagtggcactccccgctgagaaagctgagggccgcgagcacccgggacaactcctcagcgcagatgacggagagagggcagcaaaccgcgagggcccgcgaggaccgggcgggcagcgcctcaacattga

SEQ ID NO: 30205 - DNA, 40 bp, Homo sapiens
  chr5:1033674-1033714
  hypo
aggcatgtgttgccctaaactgggcatctgtggacacggc

SEQ ID NO: 30206 - DNA, 144 bp, Homo sapiens
  chr5:1037852-1037996
  hypo
cgtttctgaggagatgggaacctgagcctgcactcccagggcctcacactctgacctgtgtccgcagggtcccctcctgtgcaagcaaagcaggagccccagggcagggcctcgcacctccaggcccggtcccgctcccaggag

SEQ ID NO: 30207 - DNA, 454 bp, Homo sapiens
  chr5:1038035-1038489
  hypo
ctggtggaacacgtcgtgccagcctcggagcctgctgcccgggccctggacacgcagccccggccgaaggggccggagaagcagttcctcaagtcccccaagggctccgggaagccgcctggggtgccagccagcagcaagtccgggaaagccttcagctactacctgccggccgtcctgccgccccaggcccctcaggacggccaccacctcccgcagcccccaccgccaccctacggccacaagcggtaccgccaaaagggcagggagggccactcgccactcaaggccccacacgctcagcctgccacagtggagcacgaggtggtgcgggacctgccgcccacgccagcaggagagggctacgcggtgccagtgatccagcggcacgagcaccaccaccaccacgagcaccaccaccaccaccaccaccaccacttccacccgtcctagc

SEQ ID NO: 30208 - DNA, 236 bp, Homo sapiens
  chr5:1049758-1049994
  hypo
cggggaaggggcggctctgtctctcacactttcaggaaccacaggcccttcccgtgcagctacaaccctgcaagaggggtccgattccgcacgtcctccccgcgattctctggttttggctgtgaccatcacaggtgtgagttggcatctcacgagttagaacacgctgtccccactcatggcggactctctggtgcctccatccttatataaattaaattataaatcgaatggcc

SEQ ID NO: 30209 - DNA, 263 bp, Homo sapiens
  chr5:1051312-1051575
  hypo
cgccgcctccatgcaaggcacaggccatggcaggggacgcccgggactcagccagacagacctgacaccaggcgccactgctgcctgaggacctcccacgtcgggtccgtgtcctccttccctggagcaccggggtggggatggcacgtgtgagccagctcagaggctgaactgtgtgccgtgctcctggggtggggtggggtggggagggcagtcctggctgtcgtgggctgtcgggggaactcactgttcactctgcgcgc

SEQ ID NO: 30210 - DNA, 1232 bp, Homo sapiens
  chr5:1051905-1053137
  hypo
cgagggtgacacgggcatggacagagtcctccagcttcagtgccttgaggtacagaaacacaaagacagtcaaggaacagagtgactcggaggtgaccggggccctgagcggagccatggccagggctgacgtttcaccttcatcatcagggacagcttcagctccgggtgctcttccaagaatgttctggatggggtagaaatgcaacctaaccactgggtaaatccagccaaggaaaagaacttccagaaaccaaggcaagggctcactggcttcttgtgacctgcgagaagatctggccacgtccaggtcactccggtagcagcgtctgccctcagatgcaaggaaatcgtccagccacgccctgatttgctgagcctgttaaggctgaacaggagagccctaggtgacgggcctagaaacttccgtaggaagccccatgggcagcttgggcggcatcactgggggacaggtgtgtctgccgtctgtttccctgggccaagcccaggcccaggctgcccacgccgtcctccgtgcctgtcccagagtgccgtgatgctgttgggcattaggagtagatggtgatcacctcccggccgccacccctgaccaggaggactctgttcagcccctcggtcaggacttcaagaaactccatgtctgtggtcaacagagttaaggccacagctgatcttacctgagcgtgtgtagctgaaatcgtgataggagtgaggtttatcctctcctggttagctaagatttggtttgagaaacccagagccaaggtgaaaagagaggtggggattagagagaccccccaggcggggaggagcagggcaggggagagaggggccagtgctcgggaaagagagggagcaccgtggccacagggaggacgagcagagacagcgacacagcccacggtgctgaccccacccgacagggaaccccagccacgggactgggtcctcaccagcctacaggggacctgggccacggattccgatcaggacgcatggaggacatgccctcactggccccagttcttggtgccaacctggcagggatgtgccaggcgtcaccctgtctgtgccaatacgcccagatgcactgcggagttctccttccaaagcacaaattcccaaagctgcgaccaattgtggccttaaagccgagagctgggctcctcacctcccaccgttgtcggcgcagggtggggctgagccccagc

SEQ ID NO: 30211 - DNA, 1614 bp, Homo sapiens
  chr5:1053406-1055020
  hypo
cgagaagccaccagggggtgcccgcacgctcagcaggcacactgcaagaaaggatacagttctcgtctccctgccggtttttgggaggacctggcatgttgagcaggaccagctgcgcatcctgggacttgttgaggacgacgccattgagcttcacagccgtgtgcatccgcctgacgttggactggtccctgcaggggaggtgggcacggtcagcgggcggcgggtgcaccccacgctccggacacgaggctgagctgagccctgatgagctgcattcacacgtgttggaaagggctgtgtgagtcaggatcaggcggattctctgaccctgaaggatgcagaagtggcggctccgagcgaaaggcgctgactgcagccagggcgggcgttcagcagcgggatgctttggcctccagggacctagaactcagcccactaaggctgccaagcttctaagggctacagtcacacaacacaaaccgcaagcgctttcctaactacatctacatctgcaaagcaggcagaacagtggaagccgtctgggtggcccatgtgcctgacgccttcaaggctgacacgcttctcttgacatctacatcatcgcccctaaaccccacgtcagacactgccaaacacagacccgtcaggctgggcacacatggcctcctctccgagggtcctgatacaactgggtccaaggggccggaagctcaggaaggaaaggcccagagtcccccacaccggcctgtgcagccgttgctgctgaagctcccaggcctgacaaggacagggtatgccgaggactcagctggaggcacaggccctcagtggccactactgggtcccctcctacggcccaccctgcccctgtctggccaagggctaaaggacaagcacttccaccgtgtggccgtccagcccccgccttccgtcctcacaacgcagctctgctccacgaccctccctgtctgctctctgaagctgctgtggccggtccatgtctcaaagcgtccctggcggcctgggcccggccacagccccacaggaggctccccaaccaagtaggtttggggacactgcagaatcatgctgtgaggtgctcaggcccttgcgggacagagcttatctccctcctctaccccacggtcccctcctaggcaggcccctaaactgcagcagaactggcgttccaggaggccacctggggaaacgctgggcggaggggagcacttgcgtttctgtgttggaaaaacccggcccgtgtgtggacttgaaagtcggagcgggtctcaggccagctgcagccgtgcggtcgtgactgtggccccctgggggaggtcaccagcgccctggacgcagaggggcggcggcggacagacagaggccgcccatgcagggtcatggagaggccccacggacgctatccaggctcacgccctttgatccgcttgacgcttaagccacataaacgtgatcataaccaccaatttccaggaggaacacagggagagaccttctatcttctctccagcctggtctaattacagatggggtctctgtccacagcacagtcaaggggctttcgtgccaggaacttggaactttgaattc

SEQ ID NO: 30212 - DNA, 123 bp, Homo sapiens
  chr5:1055426-1055549
  hypo
cgtacgtggacgtgcacacaggcaggtacacgtccaccggcaggtgcgctgacaggtacatgcgagcacgcacacaaacagacatccgttaagtgtgctcccggggacgtcacagtaagccac

SEQ ID NO: 30213 - DNA, 418 bp, Homo sapiens
  chr5:1055588-1056006
  hypo
cgacctccagatcttcggagggcttctcccagcccaaccccgagaaactgctgggccaagagagtcaatgccatcccagacgcacgccacacatgaatacaaagcccacgcgttgtccattctggcccaccttctcctgaccctacaggcctgtggggacctgcccccgccccgaccaaggggaggcaagccccggcgctgggaggaggcacaggtgccactgagggtccccgagtgtgtgtgcctgtgcatgtgtgtgtcaaaccctactcctgggtctacgtcgttcttcggctttaattaacacgctattctgaaggcactttcagatttacagaacggagcaggaagtacagggattccctgcacgcctcgcacatagctgcacagtttcttgagtctgattaattcaggtttc

SEQ ID NO: 30214 - DNA, 1823 bp, Homo sapiens
  chr5:1056108-1057931
  hypo
cggttactggcgggggcaggcaggggacagagacggcatcgaggactcccagggagcaccctgggggtccgtccagggtacaccctcccacctgccccggagctcagacgcaggtagctcctgccgagggtccgaccacacagagaactgatctgcacccctctccgcctggaggctggacagctttaacatggaaggcattccaggtgggaacgcgactcagctagcgcctgacccagaaggacgtggatggactcactgacgggccctgcgaggcgcacgcctcccctccactccggagcggctcggacacctcccaggtctcagttcctgggcctcacttaggaagaggcttcaggcgtgtgctggagccaccgtgaacagaggggagcgaaggcaacaggaaactgacgtgggagccgcagcagctctgggtgagctctggctgtacgcggacgcacacaagccaccgtgcacggggcaggcacaggcctagaacacgcgcacagacacacgcaggccacacacacacaggcatgcagggcaaccgggcccggaaggcgacctggttgtagcgagtggacttacaggtttccccattctctatgcaggagaaaaaaacaagagtgtgttactgacttcaggagagagcaccaggctgttccagatcgcatggctgcccaggaggacgccgcctcatcccaccccacagggcccaggagcccccagcccttcctgagaacctggctttagggtctggctctgaccccgggtgagaggtgtctcttgcgctctcatctggaactcagaggctgcgtctgcagaaccaaacccacacccgcaaggaccctgtacagccctggtgttcgcagcccaaggccacaggtgggagccttggcgtagggcaggccctaaggcccgacagcagcctgaactacccacagggtgaaggccaggaattctgtgcccagcggcacaagcctcctcgcctccatggaacagacccatctgcctgctgcagtgaggcttgcctgagtaaagcaggcctggccgcagggctgacttcagggctggcccaggtaccaggaggactgctcgtcacccagctgtggggttaacatcaggacccaccctaggtcctacaaggacccctcagcgcttggcactagaaggacccctcagcgcttggcactagaaggacccctcagcacttggcacccaggtcttacaaggactcccggccttggcactagaaggatccctcagcgcccggccacagggctgaactcagggcccggccttggcaccaaaaggacccctcagtgcccactcaggcggctccctgttctctaacgggcccactggcctgcagggttgccccgaagctcttcagtggtcagggaagggactctgtcctcactgccgggccagcactgccaggatctgttccccccaggccacacgcacggacactcacggcttcatgctgaagaggtctttgaaaccagataggctggtgtctctgctcctgtacttctcagcgatcagcttctccctggtccaggtcatctgcaccttgtctggcgtaggcggcgcttgggtcctggctgccgccgcggtgtgggacgcggtgttcctgtcgtggatcagctgggcctggcgggcccgggacttggtgagaccagccggtctcaaaactcctctgggcgagagcgacccgggatgccaggccggaggtgagggcagctcacagaacctgaagggccctgtgtgcctgacccgggacccagcctggcgtcccacactggtcctgcgccgccccc

SEQ ID NO: 30215 - DNA, 328 bp, Homo sapiens
  chr5:1058847-1059175
  hypo
cgcccggcccagcctaaatttcccatggccttgaacgtgaaaccagagcccaagggctgcccgctctcggcagagccagcgccgcccacctggcccgagggccaccgtgtaagtcactagagggtgtccacccagcgtctgcacagcagctcatccaaacccttctgcagagcggtgacacctccaacccccacctggcccaggaggggcccttcgagctcgagcttgctgttcccgctcccggtccctcctcggtcagcatttgctgactctccacactgaacttcccatgaagccatgggtggattcttgttcctagctggacccg

SEQ ID NO: 30216 - DNA, 99 bp, Homo sapiens
  chr5:1059425-1059524
  hypo
gctgcttagtgattccggctgtcagcacatatggccccacacgcagacccgtgtactgcaggttcctgctgaggccaaggccccagggcaggcaaatcc

SEQ ID NO: 30217 - DNA, 317 bp, Homo sapiens
  chr5:1059556-1059873
  hypo
agaaaaccaacacctgcacctggtctgcagacacacgtgtgtgataccagcctggtgggacccacgaagaccccatgaggccgtgacctcacagagctgagcatcccgctaccaggtgacccccgtgctgtcctccagtgcgaagtgaccacaaagacacctgcccttggggtctcacagtggccatggggcccaggccagtataactcaggtggatacacccagacgtcctcagcagcctacagttacccacggagccaaagccgctgcagccaggcggccagcttccacgcacggaggctgcacaggtctgtgtc

SEQ ID NO: 30218 - DNA, 97 bp, Homo sapiens
  chr5:1060676-1060773
  hypo
cgcgtcccgggccccacaggccccctctggctctcaggccccccgcccagtggccaggaaggtgtgagcgcacgatgggcagtcacgccgcacacac

SEQ ID NO: 30219 - DNA, 342 bp, Homo sapiens
  chr5:1060864-1061206
  hypo
cggctcagggcgaggcactgccccatggggctgcatgatccacgctcacaggtgtcattgtctatgctcaggggggcttggcaccatgggaaacccacccagaacacatggagaagccacagcacaacctcagcgcccgccatgcaggaccctgggtctcacccattgcacccaccgtgcgggacccctgcgcctcacccggaacatccacagtgtgggactgctgcgtctcacccactgcacctgccgtgcaggatccctgagtctcacccgccgcacccgccgtgcgggatccctgagtctcacccgccgcacccgccgcacctgccgcatccgccatgc

SEQ ID NO: 30220 - DNA, 207 bp, Homo sapiens
  chr5:1061585-1061792
  binary
cgccgcacccgccgtgcgggatccctgagtctcacccgccgcacccgccgcacctgccgcatccgccatgcgggacccctgcgtctcacccaccgcacccgccgtgcgggatccctgtgtctcacccgccgcacccggctcatgggagttgggagcagctgtgcctgttaagcaccagtatttaaaacagcacaccagatcaggtgc

SEQ ID NO: 30221 - DNA, 811 bp, Homo sapiens
  chr5:1062902-1063713
  hypo
cgtgacagtctctatccagctttatgtcttcccagcacccacctccaggagtccaggcccctgaggacctgcaaaaccatgcgctggggtcacgggagccggaagaaaccaggactttgcgggttctgacttcaagaccagtgttgtcggcgtgatccaagtggggtcagaacccacaaagtcccgggaccgccagcaggaccggaggggaaggcacagccgtggatccgggtgggctggtagcgagcaggcatggttccatccagcacaaggggcccaccagatccccaggatccagagctccatgcttgggggccgggggcaagcgctccaatgccaggcctccgcccatcaaccccgtcctctccaggcgtgaaggacgggacgagtctctgtccaggccctgcctatagctgaccgagggcctgtctgtcccacgtgacagctgcagcctggcctcactgaccagtgcccctctccccgggtcccgactgctgatgtgtggtttccagccgtgggaaggtgagcccatctggggagagcacccaaaacgggaggtgctcagaggtgcacccaccatggcaacaccactgaggtgtgaggtcctggacggggtcccgggccgaggaggacacgggaccatggaggacacggagatgctgatgccggctctagggcaacacccacacccgtgttacacgaggtgtccacaagcaacacacggggctctgtgctttctgtgatgtcctggcgattccaaaaccaagcctccttgaccaccccgcaaggcctggcagcccccgccacaatc

SEQ ID NO: 30222 - DNA, 860 bp, Homo sapiens
  chr5:1064412-1065272
  binary
cggaaggggcctccccggggactcacagccagtgcaggggcgggcacggcgaggcgaggggggtccccacaaagcccccaccctcactccgtcagctcctccaaggaccagccagagactcacagcagagttcagctgctggtcatgtgtccagggaatcccccagcccctgcggggctctgggagaaggggagggagtgcctggacactttcagatggccgctcccagggccagggccttcgacagcctcagagcacacaccctcgggtcggtggcctcaaggcccatcgggacctgacagcgcacaggcctggggacgttgaggggacagcgaggagacagaggggacggcgaggagacagtgaagggatagcgaggagacggtgaagggacagtgaggggacggtgaggggacagcgaggagacggtgaagggacagcgaggggacggcgaggagacggtgaagggacagcaaggggacggtgaggggacagcgaggagacggcgaggggacagtgagggaacggcgaggggacggcgaagcgacggcgaggagacggcgaggggacagcgaggggacggcgaggagatggtgaggggaccgcgaggggacggcgaggagatggtgaggggacagtgaggggacggcgaagagatggtgaggggacggttaggggacagcgaggggatggcaaagggatgcagaggagactgaggggacacgggacagtgaggggacagcgaggggaggcagagggggacagtgaggggacagcaaggggacactgaggagacacacaggggacagtgaggggacggcgaggggatgcagaggggacaccaaggggacagtggggac

SEQ ID NO: 30223 - DNA, 890 bp, Homo sapiens
  chr5:1065329-1066219
  hypo
cgaggggacactgagaggacacagaggggacggtgaggggatgccgaagggccgccagccatgcctacccacaaagttcttccaggagaaggggttgtcctcctgcttccaggatgcgggccaggccatgagcaccgtgttgtgcttcaggccgcccaggccggccgactggatcaggtgggacatgccatcccgcaggctggacgagaccaccagctggcagaagcccttggtcttctctgtgctcattagggaccgtatgttctgcgggagacaggacaggttggtgctacagcaggaatggggtgcacagacccacgcccaccacccacggtggccagggcacccgcaccacctcccctgtggacccagcaggagggaaggcccgaaggctcaacggtgtgctgcggtgctcccggccgctgtgtgtgtatgtgtgtatgtgcgtgctcacacactggggagagagacacagagcaggtgtgactgatgccacgtgcaggggatgtggagggctgctctggggacacaacgccaggcagttctctgaggcgatccacaacatcccagacccacccccagttcactcggacgctctgggccaggttcatccacctggtgcatcagaaacacccgaaaatgggccaaattagcagctcttcaaagggaggccgtggggtccaggatgcagcaccctaacagcaacggcggggggcgggggtgggggactgccgtgtggtctcctcccggggttggagggggtcactgctgtgtgcagtctcttcccaggggtgtctgatgaggctgcaccacggaacggcttgactccatggggtttgcacgtgcgtggccgaggacctgccacgcactaaagccatgcatgtgtggac

SEQ ID NO: 30224 - DNA, 1417 bp, Homo sapiens
  chr5:1068627-1070044
  hypo
cgatggaggagaatacggctccccagggcagtgcagccccaaaggcagccaagggaaggcggggcctgcggctggctccagccctcgcaaccaatgcagctaagtcacagccaaaggctcgctgagagcagcgggggcagggtgcgctcgtcctcccgtccgcaagagcgggctcctgtctgaggctgccccagaccccccagccgaagggctgtcggacggagaggatctgcctgtgagctccgttaacgtgagagtataagtgagcgcagctcttcccatggccgtgaagactgtggcagagcgtggcagggggtcccgtcatcccccagtcactgcaatccctgccctgtccctcgtgcgcacagacgcgccctcacacacctccagggaggccaggcagtgccaggattcttagaatccacgccagcagggcagttccaactccgggattcctcctaagagcattccagcatgggataaggaacacggaaagggacatatggggaccaggaccgtgaacatccccccgaaaaccacgatacctaaatccacgggttcacagtcaatagcagctaacgcctgaacccgtggtgagccatgacgccgccgtcagggaaagggaaggcccagagcatctcctgtcttccctgggaaggcgaacctgtgcaacagcctgagaaggtggccatccacgtggccaacgtggcgggagcggcgggggccattttttacctccatgggatcctggccctaggccacaccacctgaggctgctaccatccacgtgcccacagccctcttgagcagggttcccacccctaggctgaccggcccagacctggacgggcctcagtgcggctgtggttgtgcagagaaacggaccggggaggcggtggggggcggctgcagatgcctggacacacccacaaggtcccagtgggggcctggcagcagggagctggctcccaacccacagcaaggacagagggggcacccgcatgggagggacctcggacacacaccactgcaacaggcacgtggtataggccccacagactcccacacacatgagggggaaggaggaggctcgaggcgcccacggcagccagccctgcctgggaatgaggtgcccttggcatgaaaatcacgcaggtgggcactcaaaagctccctgctttagcaagaaatacagaagtaactccaggtgacgtgacgtgacgtgacgtgatgggaccccacaggctttcatcgtgtcatcattccgtttctggatagtgtgaagcttcccataagaagtttgaaaatcagagaaatgaagacacaaagtctcagaccccgatgtcctggggcagccgactgcagcagcagggctcagagctggcaccagcatgctacacgcccggggcactcaccc

SEQ ID NO: 30225 - DNA, 806 bp, Homo sapiens
  chr5:1074389-1075195
  hypo
cagaggcttcccaaagatggcctttgcttcagcaggagccaccctctcccaccccaagcccagggctgtgctggcagaggggccggctccccacacccccaccctgcagcagggacacccccggcccccagctgcgccatccgctctgcaccaggcagtgttcacaccccagaccttgcctgagcggctgaaggtgagaggcccctgagactcaaaggtccccactcaaaggccgacctcagaaacagctcttctgtgcgtctgaggaccacggggcatgggcggtgctcacctccagttcttggtgtgggggggaccgtgctccacgcgcagcagggcgtagcgggcggcgttcagggataggccacggatgccatcgccccactccttctcggccctgtgggaaaggaagtcggggtttgtccagccgcgtacctggaggctcctctcccacctgggaaaggggacttctgggggcaggtgagttggggcaaacaggacccccaggaaaagtccctggatgaggagggaggcctccatgcccacccttgccctgaagggagcccgtcctaggagccaccgggtcagagggtgctgtggctgtggagggaacgaggtctacgtccagcatgcgtgaggtgccttcctcacaggacgggggacaggaggcccatgacagggaagtggctggaccccgggcacgaggcgggtgcaggtggagggagggtgggtgctggggcacggggaaggacgcctgtggctgccgagtgagtacagacacaacctggggacacctcgcgagacac

SEQ ID NO: 30226 - DNA, 4905 bp, Homo sapiens
  chr5:1075478-1080383
  hypo
cgcttacccgcggtactcgatgtacttgtagatgcagccagcgatgagcatggcggacagcgcgtagtaccaggagcagatgaacatcagcgccaggcacaggctcatacccagaaaggacagggtcctgggggcggggcaagtggctcggggcggcccaacgccatgcagcccccacacctcagccaccaccacacggacactgcccctccctcagtaaaactctctgttaacactaggaaaacagtcactgacgcctgacgaccatggctgtactcaaccacctctgaggggtgacgtggctccctgggcccctgtgggagctgtcactccaaaacccagtacatagctccagctcccagcgtgcacacagcacctcggctgtgcatgcaacaaggggctgaagcgtccacccagcgcctgattcctggggaggggagttaagaagacccacagccctgatgggctacgccccaagcctgggaaggctgggctgaccacgggaggtacaaggcacatgcagacacctgggcatcctcgtaaccagaggccttcctcaggtgcagtctcatcagctgcgcaggggcttactccgcaaaggaacagtcaaggacgcgctggggtcttcaggcccagagcagctggccttgtagaggcacccagtgtcccagcctgtggggctcctgacgcctgtgctgagcggcctcaccagtggcagaggcacccagtgtcccagcctgtggggctcctcacgcccgtgctgagtggcctcaccagtggtagaacttgaagcgtggacgccagttgggggtacgtagcagggtctgcacggcgcaggccaggttcacgaacaggtagcacatgaggaagaacctgcagggacggccggccactgatacgggcccactgggcccccctgagcccccagtcactgccacctgggagaccacccttgtcactgtccctcccacctgcgccttgtctccccatgtctgtctctgcacgtgagctgactcagactgattccgaatcaggccccctcaggttccagccatcctgtgaccacctggtccatcaagagatgggccatcgtcccttccccagcagccgtctgtccagccacactgtccctggctgaccccagcgggcggctgcctggaggcctgtgtacttgtcttccccggcgcaactcccttcccggcaggatcctgactgcccacagctggccatgcctgtctactgcttgtcctgagcaggacctcccatccacactgccccacgctccaggcccatacacccatccccaggtccccgtcctgtgggggctcacatggagaggatcggggccacgctgtccagagaggcgatgaggatgccagtctcgcagatgaggactgtcagcagcagcgcccacgtgggctccccgttggccttcccgtggccaaacacctgcagggagaagggcaggaagatggggcagatgacaccacccttttaggagagaagctgcaggctggtcaggtctagcccagatgaatcttaaagacacagaccagcagaaacgcctttcacagtaggtccccgggacatcacgcggctggcctgggaagaagccctgacaaagggctgcagcccaggaggcttcagagctgtgcctacgcccggcttgcctgcaacctgtgtggccccagcctgcccccccgcctcagtttccccgaccacacaacacaggaccagcgtctccagggcactcgcggttccccagaccctgtggtgacctttctcatcaggccaccctcacctcccagaagctgaggcccacggggcctgtgtgcctgtccccttcctggacaccatgccctaggcccggctgggactgaagatgcaaccacacaaaggccctgcgggtcggcaccctgccgagggaccagcgacgggcaaggatggctctgccatccacgaccttcccacagctgcccctgggcccaggtagcaggaggagccacaatcggcagctctgggcacagcacacggacaggacccatgcgggcgtccgtgcaatcctcagagcagccacacacactggctgcaggtggctggtgacgccacctcccacgggctgaagagctcagccacacagagaaagatgtggcaggcaggcagagggcttctgaccagacaacagaccaggcacctctggacacgtggctgtgggccctcacagccgctcctgacacacccggggccgagctcggagggacctgcaggcaggagggctagaattgcctctgcccaccacccacctcccaccactcccatgctctgtgcagtggccaggggcagaatgaccaccatggggtccaagccgcgggcatgcgtcccacacacggcactgtgaggatcccgcaggggaggagagcccccgaccctgaccttccagggtccccccgacgagggtgcgggactcacctgcaggaaggggacgatgccgtcacgggcaatggcctgcagtaggcgcggtgcccccgtgaggctctgcaggccggcaccgcaggtggagaagaaggagccgatgacgatgacccagggggagggccaggccagcatgccgatgaccaggttcccctgcagggcctccccgaacctgcaggcaggcgggcaggcgggcgggcggctttcagaagtgagcctgagtcagacaaaatgtcttctcccacccagagcgaggggcccagtgcagtgggggcgactccttggaaagctgaggcccggcctccagtccccgttggctgaaacctccaccaggctctgcccagcatggccagaatgctctggagggtcttcagcgggggagggggtcctgctcacctcagggtcgctcttgggagcagggaagacccagcctggcatcagcttcagtcagggaccacccaggacccccggggccttggggctgccagacacgcacaccccatgaggatgcagggtcagtgatgacctgcctgggaccccactacttctccacttgccagcagggctgagggatctcccagggccaagcctcacccgtccacacccctgtggcctccccaggaagggcctgcgcccccagccgcatcagggcttggagttggctctgaacggttccccaggccctaggctccagcggaagagacgacacatcagaccaagggatcccaaccctgggaccaggacgccttcagctctgcacgcggacatgaagtcctagggcgatgtaatttcaaagccgaattcatcctcaggaaaacccttgaagactacaggctttgcacgaaaactgcaggtggaaacgtacttatctcgtaagaccacgccttcaatgcaggccccaaacagcacaatgcaggagagatccacagccctcgtcaaggaaaggcaggtccgtgggtgcagggtcctcaggtacggggggtggggtggggtggggtggggtgggtggggagatgcactggccagcgggccgcaggatccaggtgggcggggaccgttctgcatcccatcccatcccgggcacgtcctgtcccccgtgtcctcagcgcaccctcctggggctctgtccagcgccacagaacggggccctggggtggtggacacacacctggcctggtgcttgaccgccagggattggcaggggaccatgctgaggggacaatgctcggctggaaagaggcagccttgggattgagaagccagaggccccgcgggcccagcctgccggcggcacaccccacacaccgctgcgcatcactgtccacacgcggcagggtgactgcttctgttttctctacgatcgcatcacacagtggtgaagaagccagggtcctgacagcagcccttgccccgtctcccagggaggatgacgtggtgagagcacagcctaacctgggaagtcacatgctggtggccgagggtatgatgctgagccggggagggcatgggggcctccccccaggcagaggctggaaccctcgcctgcacccctccaaggatacagatgaaagacgtcgtcactatggccaggatggtccccgtggggatggacttctgtgcatccttgaggtccccggaccggtttgaacccgccatgatacctgtgaacatggaaaatgctgcaaagacccatctgaggagtcagtgccatgtgatggcagcccctgcccagaaagctggaaaggcggtctctggggagaccccgagcgtgagctgcagccgaggctgcagtccaagctccgccagcccacgctgcaatactgcggctgaggggatgcgggcccaggcacgcggatgagcacccacgtctactgctcccctggatccgaggacgagaaccgaccccgtcactgacccccacgccccccacacccagggcttctctggagcctgtgttaatcccatggccaagggtcagcccagagacggtgctgagcaatggctcacaggcccccaggacctaaggactttgggaatgagatcctagaacgactcagcccagccagccaggccagcagacgctgcgacccctcccgctgtggcaccaccttgctctagggagccacggccggggatgtttccacacaatcggctcctacaaagctctgggaagccgggtcggtgggggccacttcacgcctggctcggtcccatccaaggcgcagcctgaagcacccattgctcggggtggcctgggaggcagcagagcccacaatccagtgccgcggagacacccggagccacgcagaggctctgcccccacgccctccacccgcggctcagagacacccggagccacgcagaggctctacccccacgccctccacccgcggcgcggagacaccaggagccacgcagaggctctgcccccac

SEQ ID NO: 30227 - DNA, 69 bp, Homo sapiens
  chr5:1081429-1081498
  hypo
cgggcgtggtaccgtgtgcctggggtcccggctgcccccctctacaaaaaatacagatattagccgggc

SEQ ID NO: 30228 - DNA, 304 bp, Homo sapiens
  chr5:1081824-1082128
  hypo
cgcccccgcgtgcgcgtacgtactccacaggttctctgccgggcaaggaagatcccatgggtttctggcaccttctgtgcagtgcccccgccatggggccgcccactccccggcaggtgccactggtggccggaggggaagggtcacagcttgtgcgccgcaagcaggctccaattcaaacacgctttcgagatggtacctctgggaaagctgcctgtctgcgtctacggagggaaggtcagcactaaagagaagcctcatgtggggaacaacatactcctggaaagcctgggcttcccgtctc

SEQ ID NO: 30229 - DNA, 708 bp, Homo sapiens
  chr5:1083641-1084349
  hypo
cggaggctgtctccctgccacaccgtgtttggcttctatggctctgccaggggtgtgtacagggacccccaggctcatcagcagcagctgggaaggggctcggccaggcaggaggaattggggccctgagagtgactctaaggcgagagcagccaccagggccagcgcctgctgcccccgccaccccccagctccagctgcagccctgtgagcctcacccaggaagacaccactggccgcgcccgggatgccctggatttcggtgacgttgttctggatgaagtactcgtcacaggcggcgctgggctgggagccgttgcagaagaggccccagagcgcggaggtggctgagttgttgtggatgccgtaggccttgacgcaggcatcgaagctgcgccgtgacagcgtgcggttccccaggaggcagaccctgggcgggacagggaggcacggcacgtgtgctgccaccgaagtggcttttactgccccacccagctcccccaacgggcacccatggtgtcgcccgcgagtggctcctggcaccctgcacctcccaagacaggaaggccacagatcacgccagggaccgggcccaggccaggctgcagcaggaatgcaagggccagggatcacactggggaccggggactggggaccagggaccggggaccaggccaggctgcagcaggaacgctgtactgtacagcc

SEQ ID NO: 30230 - DNA, 545 bp, Homo sapiens
  chr5:1084386-1084931
  hypo
cgtgctaaatgaagcgttctagacgtaaacaattcacacgttttccaccgcgcggtgccgagtagtgaggtggaacccagcaacctccccccgcgccagcacagccacgctgcagccgctccctccccgaggccctcggcggcgtcctggccgggtcagctgtcacaatctcagtgtctgagttcaagccaccctcgtgccacgtgccaacggccaagagcacaggagtgccgcccccgacgtataagccaggcctgtacgtggaaaacagtctacacagggccgtagcgtcaagcatcggcagggggtctcaggacgggtccccgagggggagggcagctgtgcttccctaaaacgggcttgtggggttgcagctgttctgcctccctctgttttgaggcctctatgaggctgttccttcaggggctccctccacgcagagacggcaaaaccgcgggagcctcaaggggcttggctgctggccctttctggacctgctccctgcgggctctggtggccactcccatgttccaggaccctgggcc

SEQ ID NO: 30231 - DNA, 1665 bp, Homo sapiens
  chr5:1085196-1086861
  hypo
cgagcccacgggggttcccgccacggtcacacccagcccaccccttgcggggagctcggcgtcaaggatgatggacgagaggcgggcagagcccatgggacctggccccagccccacacccacccacggctcagaggccccgagactcacgggatgtccggggggtcgaaggcagacttgatgacgccggcatagatggccaggatggacagcacgacgcaggccaggaagaccagcgccagcttgttgacatacttgacgcccacgaagaccaccagggccatgagcacgagcgtgcacgtgccgtacacacgcatgttgtgcagcatggcggccgcctcgccacctgcagcctccgcctggaagatggccgcacccggggagatgtacgtctgtgggaacaaggccggtcgggaggccgtccccggacacaactccccagtgcccgtccctcccgcaagcccccagcgccacacaggggcctcctcccaacaggtgccggggccatcgggacgcatccgtgctggacggagcccgcgggggtcagcgcacaggcaagggacggagcccgcgggggtcagcgcacaggcgagggacggagcccgcgggggtcagcgcacaggcgagggacggagcccgcgggggtcagcgcacaggccatggacagccaggggcctgaacgtttcccaggaaccacccgggagccttagagtaaagcaacttcaggacccggggcatccgcatgtccgcactcaaaagaaacaccttctgctaagaggaatgtgactgctgcccagagagctcggcccaccccggctggacgtcctggacacacacagggtctgaccacgccggcggggggcaacctctgttctgcccagattcaagggaagggacggagacgtgagacagtgctgctcagctccctcaagaccaggacaggactggggtgcagcaggcatggagggcatggcacccacccccaccaaaggggatcctgggagtgcggcagccacggcacccggggcaggtggaaagatggagggacatggccaggggactcgggttgggacgggtgtgggtgcgaccccactgaaaggtttcagaaccttcttggccatgtggctctcttcaggaacccaggaggccaggaaccaggtctggcagcagagggaggggcagaaagactggggacaggggctcaggtgagcgtctctgaagccctgcagggacagcgggtttcagaacctcagcaggaaggacagcacccgtcggccagagaagggcggttcccgtccccacgaggaccaaggaactcaggccacagctctcagctgtgctcaggtgatgtgggacatgctttgagcatgcctgttttgagaaggtgatgacatcacctggttgtacattgctgggctctgggaccctcggccaagtgcccagatcaggcagagaagaggctgggatcctggcaaaaggttcttctaagccgagttccagccctgctcctaaaacagctccgactgcaggactgcacctacgcggggctcagatctacagtccagatgtctacccagctcatgccaggcacgcctcacggagggcagcaatggtgctcaagggggacacaggtcgctgctgagtggacgctgcccagtggcttcc

SEQ ID NO: 30232 - DNA, 2187 bp, Homo sapiens
  chr5:1087088-1089275
  hypo
cgacagcgcctccaaactcgggtcccagcgagcgcgatatcatgtagtaggacccgccagctgcggagacaaaggcggcagccgcgggtcaggggcgcacttggactcggacccgaggtgcggtctgcgctgccattcacgggcaaaggagggcctgtctctgcgaaggcagcgtgtagaccctcgtccacccgcaaagcagcacatggagacgcttccacggtgaactctcccctcccgaggctcggcacacgttccacaccaagagcacgcgctctcatggacatgaggaccaggtgagatcagggataaggctctctggggagcaggaggccccagcaggtcccagaaaaagtcccgcgtacatcagtggcagccccagcccccacttccactaagttttgcttatgaaaaaggcaaaagagaaactaggatgttcaggagtcgtctcgtgtactgtgaaccacgcacgctatcactggcgggaaagccgggcgcaaccccagggctgcctggagaacacagctctccctgctctgagcagtgcgtgtggcatgtggaaggggtcctaatggacgcggccatcgtgaagcagagactggtcccttggctgcggagggagacccctggtgaaggccctcgtgctctcctgaggccggggaagtccgctgagcaccaagcgatgcccccgtggggatggggaccagctgcgtgaggacctggtgctgagcaagcccagccgttaacacgcgcagcacacatgcactcagaagcagacgtggcagcgtctccgttcactagttatttcgtatcgtaattcgtttattactaattaacagtatcatctcagtttactagttattacgtattgtaattaacttattactaattaatatcatctcggttcactagttatttagttattatgtattgtaattaacttattactaattaacaaggtcagggcagtgttttgtcttcaccttccctcgtgagatacaggttccaagaactcagcctatggcacacgctgggctacaggagccactggaatcgcccgtgcctccccctccccagcccgctgcctggtgggcactgcctaccctggcaagagacggtcaccacgcagcaaaatggggaagaaaaccaaacagccgtgacctcacggctcaaacgccagaggagccagtggagaacacgcagaaggcccggctgagacccccaggcagcccccggcccggcctcgccaagcggcctcctcgcggttgccgtgcggcaaaacacagactcctctaacaggactcagggccgcggctggcgggcaccccttacctgggaccacaccgttggtagcgatcgcactcatggaaatggcggtcagcattgtctgcaaaaagacaggcagccatctgaggagagttttccaacagcctgccggcatcgcaacactcccaagtcagggtctatgacccggctcccgccgaatgccagcccccaactccagggctctccatctcaatggagtggctaggaaacaggacctggaggctcccgggcaccaggcatgcgtgtcctggttcccaccccttcccctatgacagcgacccctgaaagtgcccaaggtccttccaaactggaggtgatgtcatcaaaacacagggtgtcccttcccttggaagcctcagcccccgggtgccgccccatgacacccaccactggctgagatgcctgtccgcagacacgggtaaatgaggtgccagcacgccagtcaacacgccagcactaaccccggacagtgtggcatctcatccccgcagctgcccggctctcgtggaggagacggcgctgaacgacgtctacacgggcgtctggggagggccctactgtccggctgccaccgcccgaaggcacaaccacagcggccaggggagacggcatctggggagagccctactgtccagctgccaccgcccgaaggcacagccacacctggccgggggagactcacacatgtgcagcacatggccacgatgaggaaggactccaggacaccagccacccccacgatccacgtcaggcgcaggaagaggatgacgcccaggatgttctgcaggcacggcaggtagacgccgatgaaggtgcccatgcgcggagcctgcgacagagcatagcgtgtcccaggggctc

SEQ ID NO: 30233 - DNA, 212 bp, Homo sapiens
  chr5:1090437-1090649
  hypo
cggagcgtgggaagccctggatctgagagcctgggggattcacttggttccctgagccctaggtgggaagcaacaggggagcgacttgcttctgacgggggccctggagaggagagggtgacggggctgggggccgctgctgggccctccaaatctgggtatgctttgttcttggtgcaaacgagagaagcggtggcggatggtggagaacc

SEQ ID NO: 30234 - DNA, 247 bp, Homo sapiens
  chr5:1091634-1091881
  hypo
cggacagacagggaaggcctgtggctcctgagttttggtgccagagtaccagcctgagcccatgaggcctcaaggtagtgcccagcatgcgtgaaaccccagaaaggtgctgagtgctgagcccggcaatacccagttccacagcgtccacgtgcggaaaggtactgagtgctgagcccggcacaccaccacccaattccgcggcgtccacgtgcggcacggcaatacccagttccgcagcgtccac

SEQ ID NO: 30235 - DNA, 134 bp, Homo sapiens
  chr5:1094049-1094183
  hypo
ccaggaaggagcccagaaggcaccagccgaggagcacgtcccagctcaagtgcgggactgggcccccgccacagccttcaggacagggaggccccagttccttccacgtggtgtccagtcctgtgggaggcccc

SEQ ID NO: 30236 - DNA, 625 bp, Homo sapiens
  chr5:1094563-1095188
  hypo
cgctagtcccaggacacatgctagccccaatgcgcaagctatccccagaacacaagctatccctaggacacaagctatccccagaacacacgctagctccagggcatacgctatcccccacacacatcatcattgaagacaaagcccctgaaagcctcggcaagtgagctgttcagcccagggcaagggtacctccctctggcgttgaaaatctctcattcagccaaatgtgggcaaaattctcactcttaaaagtcggggtggcacctcctagccttgctgcttaatccgccatttcggagggacacagaggacttcccactgttccctgttgaggacgccgcccacaggctctctaggtaaatgagcccctcctgagtctttcaggaaggctgggccggcgacccctccatggggctgagcccaggcttcgaaccagggggtaatcctagcagctgcccgagagcatgagcaagggaattggtggggaggaggacttgaggctccctggcaggttgaggcccgatggcccatgtgacggtgttagaagatagggtcggtaggaggtgggggcggtaggaggcggggggccggtaggaggcggggccggtaggaggtggggccc

SEQ ID NO: 30237 - DNA, 390 bp, Homo sapiens
  chr5:1095619-1096009
  hypo
cgaccaagccgggacccttcctaggggtgctcggcccatccttgcccagtccaccctagccctgcacagaatggtgtgggaccctgagggtgcagaagaaacggtcaaggcaggatgcgaggtggccggaggagggcaggccaagacctcatcactgcaccaaacaaccccagctgggagggtgggcattctctatgggacatttcagatgtgccagagcccactggcggccaccctggctggctgacaggcaccagccgcaggagtggtgggttccagccgtgccagcaaagagggcatcgccgtctgggggcaggcgggcagcacgtgctcccagtagggtgcctggggcggaaagcacagccttcagggtgtgcaggtccttggtgc

SEQ ID NO: 30238 - DNA, 239 bp, Homo sapiens
  chr5:1114657-1114896
  hypo
cgttgtgtgactttcagtgctctcttcctacccacctccatccctctgtccttttctgtacccggcacctgttgtaggaagtggccctcggacacgtggaggtacccgaggcctgggttggagctgcatctttcggtgcaggcctctgcgtctcctggaagtgggcacctggagccaggggactgctgggatccgggtccagtcccctggcaaggccgggggctcgcagagggagccac

SEQ ID NO: 30239 - DNA, 635 bp, Homo sapiens
  chr5:1115157-1115792
  hypo
cgctgatgaaacacattggtgggtctcagtcgatcaccattagtgccctttccaagcatcggtgtccagctttgcccagggggcctcttcaaatgcaatctcgcatccttatgatgtgagcctggtcatctgcgatggcctcttggccgtgtgcagggcacagccaggggaaccctgggatttagtgcgaaagtgtagccgatggtggttacattctgtgtgtagattctcgaaacagtccctgctgcctgccaccctggggtggagtttctaatggattaggacggacacccaatgccagcttccaagccaggaggccgctcgtgcccacggcttggaatcagggctgtggcctgggagggctctcaccagacgcaggctgcctccaggtatctgtgtgcctctgcccacggagcttctccccaggtccgcgggtccccccagtccacttctgctttcctgttagggtggggggctcatctcctggtgcgccatctgcatccttctgggctgggaacctgctgtcgggtatcaggcagggcgcacctccagggctgaaggatgcaggtggggctggcaggcagagtgtccgtggagagctccgtgtccagggaaggggacacctggaggaggcc

SEQ ID NO: 30240 - DNA, 601 bp, Homo sapiens
  chr5:1116675-1117276
  hypo
cggacactgagtcttcgctcaagttccctctggaagattccgtggatgagtccgacacactcttcccctcactcaggaggctccaggatttttagaccacgtgtgtggctttccttctctcaaagtgtaactcacataatgttactcagaatctcacacggacgcccgtgagttgcagacacagggaaggttcgcatctcctctgaagtccaagctgcccagaagcccacccaccccccgccagctctcgttcctgctccacaggtgacttctttcccgtgaagcttgggcaaatgtttgctgtcggctcagggggaaaggccatgccagggtccagatgggctcaaaacctcccaacctggcagacacgcagcccttcagaaatggaagcagagcccaggacacgatgtggccaatcctctctcagacgtcataaagagctgggtttggaagacgaggccaaccctcatggatgccgcccccgaccccagcaacaccatgagatcagggatttgctggctctgtctcagagccgcggagggtcctgctcaaaccccagagccgtggggatgggctggggggctggtggggagcgtactgc

SEQ ID NO: 30241 - DNA, 191 bp, Homo sapiens
  chr5:1120359-1120550
  hypo
cgctctcaagggcaggggagcaagcccgggtgcagctgggtgggcacctgccgtccacagggcccccccaccggcagtgtccggatcacacgaagacggcttacagaccagcaaggaaacgctgaacccggaggacaagagggcaaagacttgaactaacatggaggagcacgtggagatgccacctcgcc

SEQ ID NO: 30242 - DNA, 103 bp, Homo sapiens
  chr5:1120577-1120680
  hypo
cggggacaccacggtgtgctggccagatgctcacagccgctgtacctccccacacaactggaggtccgtggaatgcacggccactgtggaaaactccagacac

SEQ ID NO: 30243 - DNA, 178 bp, Homo sapiens
  chr5:1122647-1122825
  hypo
cgacggacgaaccgcattcccacagctgtgcgtccaccttcaccaccggtctccagagtcctcccaaactgaaggcctctccccagcctggcacctgccattctgcgttcggtctctacagatctgggaactccagggacctcccaggagaggatcagacagggccccgcggcatgac

SEQ ID NO: 30244 - DNA, 923 bp, Homo sapiens
  chr5:1143146-1144069
  hypo
cgggcaccacagagcttacggctccatctgtgacacgggccttccttccctgagggccccaacacagcctcctgggcaacatgcccctccatccgcagggtcagaagccgcagctcaaggatcacctgcggaaggtggcatttcccaagaccggagcttcccgacatcccgccacctcccgcagcgctggtgccagtcctgtcggataaggggcaagtgtaagaccggcctcatcagctccagcaattgtaacaaagcgccatgggcgggggcttcaacactagaaattgttccctcgcagcctgggggctggaagtcccagaccaaggggctgctgggcggtttctcccaaggcctattcatggcccgcagacggtggcttctcctgtgtcctcccacggccgctcctctgcacacacgcatccctggtgtcgctttctcttcttacaaggacacgtcctattgggtcagggccttcctcacaacctcatttaaccttaagtccctccctcaaggtcctagctccagatacagtcccgttggggctgggcctcagctgcgaatctgggggcacgactcagtcggcagctgtctgtgtcctgcatgcgcctccactgaccttcccagggttctccctgtgtcctggtgctgcttcttcacccagagcgctgccacccactgctgagcttcagacatgtgacctgcccagtcccctctgcaagccctgcaccttcctcagtaccaaccagcaaacccgtggctgcaccggggccagcagacactctcgggcagagtgctgggcaccctggcctcctgggcaccctggcgcttggcaccctggcctcctgggcaccctggcgctgggaaacctggcctcctgggcaccctggcgctgggaaacctggcctcctgggcaccctggc

SEQ ID NO: 30245 - DNA, 689 bp, Homo sapiens
  chr5:141248116-141248805
  hypo
cggagggggcctctcacctggatgaccgagtggcctatggggctattctcagatagttcggcctcataggagggccgctcaaacttgggggcgttgtcattggtgtcaagcacggtgacacgcagcagggcactgctggcgcgtggggggctgccgccatcctgcaccttgatggtgaggtcataggagtcccagcgctcacggtccaggttgcccatcacaatgagctgtggttgcttctcctcctggtcctctgccacctgcagcccaaatagctcctgggcctcaggcccagcctgcagctcataggatgccacaccgttgggaccagcatcacggtctgaagccagcgggatggggaagagtgagccgatgttggtgttctcagggatggccagagtgatgactggtgaggcgaagttgggtgtgttgtcattgatgtcttgtacttctatctggccctctagcagccgggggctgccattctgcacgaggtctgtgatagatacctcaaactccaggatgcagggatcaccagggagctggttctggcattcacggagcccctcacggtcgatggaggtctcggtggtgaaaatgtcacctgtcttgccatccacgcgaaggtacggggcacccacctctagcttgtacaggtgccccacatctggaaaaccatagtcggctgc

SEQ ID NO: 30246 - DNA, 100 bp, Homo sapiens
  chr5:148821027-148821127
  hypo
cggaaggtcttagagcaggggtcgctgaccaagtcgtctcatgtagaagtgggatctcggtccctgcggcccacccgcttcctgagccatcgttgaggac

SEQ ID NO: 30247 - DNA, 413 bp, Homo sapiens
  chr5:149323779-149324192
  hypo
cgttagcaatcttcttagagtgtgcgacatggcccacgatgcccatgtccaaagggaagacgatctcttggtcgggcatcaccaggcagtcctcgaggacagcatccttgtggacattgaaaagcctggtggccagctctgcgatgccattgcgggtccggtacatgaacaggctcatgcggtctgcctgcaggaggaagcacagcttcttcatgacattgaagatgcatttctctgtctgtaaattctcctgaaagtcccgcaggagatcaaagatgatttcgctctcctccatgctgctcggggagtggtagttgctgaagtccacggcagcctccttggccccaaggaggtcggagatgagcttggcccggtagtggaggttgtagtactgtttggcaaagccaatattc

SEQ ID NO: 30248 - DNA, 435 bp, Homo sapiens
  chr5:159691947-159692382
  hypo
cgaaaagagagagagaaatgttactataatgaactcccttgaatgttattacccagtgccaacagtcatcagcatttacactgcctttaaaaaagcccgaaaacttaaaacaaaaaggtaaccagcacagaacaaggttctgtagaaattcagcattctctcattcctgttgcccaggcttgagcgcggcccacccccaactagacagaccgtgttctgcactgtgccccacgaatgcccccaaaagtccttcatgcgtgggaagatgcctactgatggacccattcagggctacctgctgccctttcaggtgcttaacccaggctcagagattaggccaaagtttcctggctaaagagaaacaggttttaaagccacagctggctacttttcttccctaaagaaatgcaatgccggccaggtgtggtggctcac

SEQ ID NO: 30249 - DNA, 270 bp, Homo sapiens
  chr5:16794700-16794970
  hypo
cgcggagggactcctgggccatgggaaagtccgactggctgtgagccccgttacctgatgaggatgcactggttgtcgtggcgcttccacaggcagcggtagcactcgttggcgatggcgaagatgtgcgggggcagctcgcccaggtggcgccggctgtactgctccatggtggcaggctcgtacagcccggcgatgggctggtaggggttcacggaggccaggatggagccgatgtaggtctgcaagcacagagtgagacagggatgc

SEQ ID NO: 30250 - DNA, 196 bp, Homo sapiens
  chr5:168112681-168112877
  hypo
cgggacacacctgcagggagatgttggcctggggtcggaccttggcggaggccagttccacgtaggagtctttgcccacgaagttgacagtgatgagcttctcgcatctggggccggcgaagcctggtgggcagcggcaggtgggctcctgctgcaccacgatgcactgggccccgttctggcactcgtactggtc

SEQ ID NO: 30251 - DNA, 214 bp, Homo sapiens
  chr5:168189525-168189739
  hypo
cgccgaggttggacttacaggtcggtgacatattcagggaggtggcttgggatgcggaccagcttctggttggagcagtccacaatcgtgccctcacagcgacacttctcggggcacacgaggtccatgaagcactcgctgctgaacctgctgcggtaatcctcggagcctgggaggggccaaagaggggacgtcagcgtcacccgagttccac

SEQ ID NO: 30252 - DNA, 129 bp, Homo sapiens
  chr5:168195266-168195395
  hypo
aaggtcaggaagcagcgtcagagagaggacaggagcgctcagaggaagcagcgtggagaagcggaagccggagcaggcccccactgagcgtgattagtatcaggagtggggttccactggaacacttcc

SEQ ID NO: 30253 - DNA, 144 bp, Homo sapiens
  chr5:168284824-168284968
  hypo
cgctccacggaaaaccaccgagcttaaaagccctcaacggtgtgcctatcaggtagagattcacgtaggagttcttaggcgggacaagactggctctccagcttctggatgcatacggggttagacacaaggtgtcgggccacc

SEQ ID NO: 30254 - DNA, 277 bp, Homo sapiens
  chr5:1702104-1702381
  hypo
cgtctggggccgggtgagtcctgacgcacctaaaccagcccacagcccctcagcgactcccgggcacggctcacactcactcagaatggaaggatgtggctgcttaggggcctggctgccacgctgagagctttctggtcaagccacgctagcattgagctctgaactcaagcctggagcccgatggggagctcgaacccattgtgccgatgcgtcattgaaagttacacgcgtgcccaggactggacaacaggttgaagcgatgtccgatttcttc

SEQ ID NO: 30255 - DNA, 465 bp, Homo sapiens
  chr5:171766390-171766855
  hypo
cgggctggagggatgtgtttggctggcatcatcggcaaaatcacgcccggaggcttgggagtggggccccggagctgctccgtcctctgccgctcccgctcccgctccagcagctccccctccgacttgatgatggattctttccgcggagggaggctgggcttctcctccatgtcggggtctgagatctcctcgtagcctgctgacgcagacatgtctgaagatgccttcctcaggacatccttactgcccttccagtctttagaccatggcaaccccgagtccatgacaccatgcggtgcgtcaggcaggggccgggaggggcccgtggcttcgctgcccgtgttgttctccagcgctgctgcttcccccagccggagctgggtcacctcgtggggcaggggagccagaaagttgggtctcgacgcgttgctcgtcttcttgtacttgtcaatgaaggtggcc

SEQ ID NO: 30256 - DNA, 224 bp, Homo sapiens
  chr5:172724564-172724788
  hypo
cggcttctccgctgcccactcccgcctggtcattccgtgcaggggcatctcctgactgctcttcgcaacaaaccttgcaattttctgtcttgaatctgtttcctgtgaagcccatcgaagaccactgccttctcgggcaggcctccactgccagctccagctgcctccccaccgtgagtcccctggcctggggacagatacaggctcattcccgagtagcctcc

SEQ ID NO: 30257 - DNA, 501 bp, Homo sapiens
  chr5:172744598-172745099
  hypo
cgaggataacgcgggcgcgctcccttgagtacgtgtaagtgcagaattcaccaggcacccctgagaccccacggccccaggggtctccatctcacctgtccgttccgcgaacacacacctcgatgaagtccacagtccccacagaatcctgcgtgtgacatcccccctctctaatggtaaatgttttggaatgtccatagataagaaaatggacggcgtggaggaaagatttcgtggccaggcctttcatttcacctccggatatcagaatactcagactgttcgtcttcccactcgctgcttccggaaggtccctgagccccaaggcccccgactctgcctcgggcatgggcgtttgggtggctcttgctacctcgctcacccttggcacctcggccagtctccctactgctgggctctgggaggtgatgtcctgcttccccgtggtgggccctggagagcttggttctgtccacctggggctggcgctcggggggcgcc

SEQ ID NO: 30258 - DNA, 117 bp, Homo sapiens
  chr5:177802468-177802585
  hypo
cggaaccctgcaatgactttctgtctcacacagagtcgatggtctcacctcacgatggcccaaaaggccctgcgtggtcccgccctgcccctccgacagcctcgttcctgctttccc

SEQ ID NO: 30259 - DNA, 88 bp, Homo sapiens
  chr5:177882646-177882734
  hypo
cgccatcgcttctgtgtgtttcctctctgccacgcggacggaccgcacctcaaggccgagagctggcacctatcccctgcccacccat

SEQ ID NO: 30260 - DNA, 57 bp, Homo sapiens
  chr5:177882763-177882820
  hypo
ggaggaccagccctctacagtggccctatgtctgacactggctccctcagctcgccc

SEQ ID NO: 30261 - DNA, 421 bp, Homo sapiens
  chr5:177892711-177893132
  hypo
cgcggggtggcggtcacgtcctcacgagatggggaggcagagtgatcgtgctacacacggtaaagaagtagactgtcctggggattcaacagcagtgagtcctctgagggactggcgtgcaggggcagggagatgtggggtggtcagtaccaaccagcggtggtgtggactcgccgcttgcctggcttcctgcctgctccggatggcgagtctaactcagcgcacacttcaggacacaaaacacagtagagcctcggggtgagtgcacctcaaggccatcgtgtccacatcaccctggtccctcagtctcccctctgcgccacctctttcctgaatcccatcctggtgaacgacccccatgaatctcatcttgggagacacacatcggcctccaagccgtgggcctcagaggcattgcaac

SEQ ID NO: 30262 - DNA, 102 bp, Homo sapiens
  chr5:178652545-178652647
  hypo
cggctggacgtcgagaggagcgcatgaggggaggaacacacaggcggctggacgtcgagaggaacgcaccaacgagcaccagcacgctgcaggccaccgacc

SEQ ID NO: 30263 - DNA, 280 bp, Homo sapiens
  chr5:180036597-180036877
  hypo
cgctcactgaccaggcccgggacccccgaacctgccaccgaggaggagccgtccttccactggggtttctgcgctgctgaggaggggaggcctcgtgtgggggtgacgagggcataggacagaaagcagctgtgagtcgtggcatcgcaggagggcccaaatgtgcccaaggctcaccctggacttgcactttcaaaggacagtcgttgggttctgccatttgccttacgaattcctgacgctgcctcccctgaggcggccccagccctgagccgagagc

SEQ ID NO: 30264 - DNA, 366 bp, Homo sapiens
  chr5:180055788-180056154
  hypo
cggggaggacgctgcccgtcttcccctatggtctgttttgcccctggacttggaagggtatcggcggggtcggtggggagccagggctgttaccactggaactcgggcggggggtacgctgccagcttcacgggcagcttcaccagctcgtctcctgccgtggcctccaggatgggtcctttgagccactcgacgctgatgaagggattttctgccggacaggagaagtcactgtaaatccaggactgacccgtcgtggactgaccagggactccccccacggcccctgcagccccggcagccggacatccgcagactggggctggccatgccgcccggtgcaggagctgggcagctcctctgctc

SEQ ID NO: 30265 - DNA, 335 bp, Homo sapiens
  chr5:1910394-1910729
  hypo
cggctgctcatgtgccgacatgccatgtcacccaggtggggatccggtcattaccacggagtggtcttgggcctctgtggaggggccctgcacctgcccaggccggcgtctgactccacatcgcgtgctctgtgggaagagcccagtggagccctgtacctgcccaggccggtgtctgactccagatcgcatgctctgtgggaagagcccagccagccacgcacaggctcctgccttgaaatatctgcgccttccgaaggagaggagaggatccaccactgggggggtcagagcccagcgttgtctctgcacgtcttctgtatacgctggaaggc

SEQ ID NO: 30266 - DNA, 161 bp, Homo sapiens
  chr5:1922827-1922988
  hypo
cgctgctgctcagggacccctcctcccattctggaaaccatcggcaaaacctcagcagaccacggggccattactgtgggctccggtttccagccactgcacttccagacttttctcttcggagccagtgggaatttagcaaatgactggatggggtctgg

SEQ ID NO: 30267 - DNA, 48 bp, Homo sapiens
  chr5:1923074-1923122
  hypo
cctgccagggcggccatgcctgctgctagagcctctgagaaaacagcc

SEQ ID NO: 30268 - DNA, 298 bp, Homo sapiens
  chr5:2261313-2261611
  hypo
cctccagtgaggactcccaggggaccgagttttccacctgcgttctagatgttctccgtgaaagcatcacgtggtgtcccggtgaggggcctggctgagtgggcatcggcttgagcgcctggagcttgctggagaagagactcatgggcaccaccgggcccaccatgcagacttcagggaaagagagcagccggaatgcgttttaaatcctgcctgagagcgtggatgctacaggactcctggcgtggggaacccggcatctgtgtatgtgcccgtgggcatgtggtcagcgaggcaa

SEQ ID NO: 30269 - DNA, 386 bp, Homo sapiens
  chr5:569858-570244
  hypo
cgcttactcgaagaagatttaaaacacacaaggaaccgtgaaaccaaaccagaaaagccctgctgaccgagccgccccttctagaggccgaacaggcatggaaaccctgagccgacacaggcacttacccagcagagaggacagggccaccaggatccacatggccacaaagaagggggtgtgcacgggtagccaccgcaggctgaccactggaaacccgctgctgttccgggcaacggggggctctggccctgggccccggccaacgagtgtgcagggatgggctgtgcccaccagcaaggccagcaacgtgaaggcacagagtccagacccctggggctgcatgctgggggcacgtgccgccgacaaggcgctgtgtatccgcc

SEQ ID NO: 30270 - DNA, 106 bp, Homo sapiens
  chr5:7825260-7825366
  hypo
cgctgctgtgtgccacgacaacgctgctgtgcgccacgacaacgctgctgtgcgccacgacaacgctgctgtgcgccacgacaacgctgctgtgtgacatgacaac

SEQ ID NO: 30271 - DNA, 383 bp, Homo sapiens
  chr5:9122712-9123095
  hypo
cgagaatctgagtttaatacacagcagcacaactggcgtgttctgagcggcacacctggaacagttggcgatctccatgccagggccctcgcactgccagccaccacactgcggggccgggctgtcgcaggagcgggttcgacagaggcaggatcccacggcgctgccatctgtgtgcgtgcaaggcgtccacggagaccacacaccaaagtgcccatccacggtgagattcctggtctaggaagcaaaaccaagcagaggtgtcagaaaaggttaaagctgaacacataatggagtaaaaattaaaaatccctcataagacaatcaaaactcctctagaatttgttgttgttgttgctgcagttagaaaaagggccaggcgc

SEQ ID NO: 30272 - DNA, 487 bp, Homo sapiens
  chr5:962533-963020
  hypo
cgggaatgagggggcagaccacccccaccgagcccagatgccagggaaggagcctggccagaaagatccagaaggactcagtgtctggcggccctcgctgctccccattctttgaggccgttgttcccagatgggatgtcggatgcgtctctggcccgggcccctggtgaaatgtgatggaggggtgtggatggagcgtggtggacacagcaagagcctggccaggcatccctggggcaggacagcatcagccggggagcggggtctagccccagccgcctggcacagagtggcgcccaattctagagcttgaatgaaagagggaattcaggaagacgcttacaccagccaggccccggggcactcaggacggtagcatcacggggtgccaaagtctgcaaaggtgacagaggacgtggggcctcggcagggctgcctccacttccccaagcacacggaagacaggcagggtggacgggggtgaccc

SEQ ID NO: 30273 - DNA, 451 bp, Homo sapiens
  chr6:10319622-10320073
  hypo
cgtggggatagagggacgtgggggttttccgtggggatggagggatgtgggcaggttttcggtggggatggcgggacgtgggcagttttccgtggggatggcgggacgtgggcagttttccgtggggatggcgggacgtgggcggttttccatggagatgacgggacgtgggcggttttccttggggatggcgggacgtgggcggttttccgtggagatgacgggacgtgggcggttttccgtagggatggtgggacgtgggtgagttttccgtggggatggagggacgtggagtgttttccatggggatggaggaacgtgggcggttttccgtggggatggagggatgtggcgggttttccgtggggatggagggacgtgggcggttttccgtggggatggagggacgtgggcggggtttcgaggcattcagaaggtgttaagagaagac

SEQ ID NO: 30274 - DNA, 101 bp, Homo sapiens
  chr6:154727653-154727754
  hypo
cggatgtagtccgcaccccggaccagatgccgctcggtcgtgggtctggagaaccggtatgggggagaggagctctcttcaatgatcggaggaatccgctc

SEQ ID NO: 30275 - DNA, 146 bp, Homo sapiens
  chr6:154826922-154827068
  hypo
cgcgcctggccaactacacaattgttgagagcctacccactcgaggctgatcaacagccaaggctaggacagttctgctgggacaaccagtcccacgtcttcctcgtcgaaggcactccccagtggcctttttaaagcagaaaaac

SEQ ID NO: 30276 - DNA, 447 bp, Homo sapiens
  chr6:160679377-160679824
  hypo
cggtgacgatggacgagccaggcgtctcgtacacccagccgtcccggcaggggcccagtggcaggcggctcctgttggtgtccaggctggccagggggtccacgcagtcgaaggtgctctggttccagtccacctcgtagcgcctacactgtcttggggaggcttcgcccgcaggtcctgggcccggcaccgtgtagttcagttcctctgcaggactccagccgcagcgcagactcagctcggccactccggggctccggcagcggtggtcaggggtgaagcccaggaagacgatgcccacgtagatgggcgcgaaggtagccgagagcagagccaagaggaaaaacatttgcttctggaaaaagtgaaactcccctccatgctccaggacatcgtccacggtggtgggcatgatcctgcaggcaggagggcccgaggctgcccgac

SEQ ID NO: 30277 - DNA, 155 bp, Homo sapiens
  chr6:161585085-161585240
  hypo
aggtgggatgggcgtgctgttgacttgctttcccgccatcagcgctcccgcccttatgctcagagttgtaaagtgatcatggattcggaagcctttgggagcaaaaccctaaacggtgctgagattaaattcccgctccgtgaatgtctcttccc

SEQ ID NO: 30278 - DNA, 112 bp, Homo sapiens
  chr6:161725123-161725235
  hypo
cgctggcgaaatgggcttggtctcttcctgctccgcacactttgacatcagctcgttgtggctccctgtctctgctctcccgggtggccagtgacgctgtgcggggtgcagc

SEQ ID NO: 30279 - DNA, 722 bp, Homo sapiens
  chr6:168062973-168063695
  hypo
cgcagtcacgatcactggagcacgttcagggcctgcaggtggtgatgggccgcgcagtcgggaccctggagctcttcaacgtgcttcatggcactgcttctcgacctgagattcaaggctccagaggccccactggccactccgcttccgggacccctcacacctcccagccgggacttggggaggcacttgcgagaggctgcgtttgccgttgcgctctctggagctggagaaccactgggcgactctgcgtgactcctgcacccactgtcaggaccccggaagccaaccggtttggagaaaagggcccactcctcaccgcgctctctgcccgcggcctggcgcagggcctcacggggctgagatcctgatcaccaggaggagccacacctggcggagcccctcctttaccgagcccatctcaggtggctggtgaggatgcgtgaaggggtaaaccgaggcaccaggagggcctcccaagcactggctgggcactttcccattcttgtttagtcctcaggccacccgccagtgaggcgcaccccaggccatcccctgatgagcctcagaggtagccagggagatgcccccgcccgtttcacccgcgctgtcactgctcgctgccccgtgagccagcctgggttctgggtggcaccagcggcagtggctctgcctttgggagcctggggacagtgctggctgcatggagcgcgggcctctgc

SEQ ID NO: 30280 - DNA, 233 bp, Homo sapiens
  chr6:168137821-168138054
  hypo
cgacccagcccagcacacccagttctgctgcccgcatagccagaggactagcggactttgtgtgatgtggctgcttcgtgacccccattcagagaggctgacggagtgcgaggggcatggcccacgggcccaccgtggggttgcagggccagggcgccgcctggcctgggctgagtaacgatgagctgctgggacagtgggggctgcagcagagacccagggtggctcggagc

SEQ ID NO: 30281 - DNA, 513 bp, Homo sapiens
  chr6:168529700-168530213
  hypo
cgtctcccgcttggcgcccccaggcagtcagacttcccacacctgaaggaaactaggtggaagcgacttggcctctccggccccgcctaggcctcggaggtcaggtggcctcacctcccctgcgggcaccggccagctgctaaggcctgtccacgaggagagcggggtgtgggacacagacttcgcctctcagtgggaagcgtgttccgactctgccacgtgcctcttactttagaaaagtgaatccatcattgttccagttaccttgggctgcactctaaccgccaccaagtgccacggcttcaacacggttcattaattgccagcgtgtgtgtggctggtctggccacagcggccggttttcgctcgaggtccttcatgtggttgccgtcagatggtcagatggcggccggggccggggctggggtcgctggacacttgacccagctggaggcctacggggaggccttggttggagtgtctgaggcctcagctgggcccctgcctccgcgc

SEQ ID NO: 30282 - DNA, 365 bp, Homo sapiens
  chr6:168672446-168672811
  hypo
cgttcccgctgaaatctgcctgggcggccacacgcttcctgtgcaggctgcagggacccagaggacggtgtcttgccgagggatcctccctccctccaggtacctcgccccgggacagcagaagtgagagacaatccgagcatatccatgtaatgtggaaatgctgtactatcacccatctaaacaaagctcggaactgtctgcgccccaggacggggtcccagctggcccaggagaaatcgcactcacaggcccagcagagcccaacgccagcgctcagaatcccacagtgtctagacacgcacagcagcaacacggaagcggcacagggacagccccagcggtggcgacccagctccacaggc

SEQ ID NO: 30283 - DNA, 611 bp, Homo sapiens
  chr6:168709592-168710203
  hypo
cggcgtgcagggggctggggtacgggtacacctccctgccgccctgggacaccaggtcctgccgatacttggggtccggcacgtgcagcgggatatccaccccctggcagaggagcccgaggagctcggcgtccgcgctggctttctggagccccgtgtccgccggcagggctctgtcaagatcacctgggagcgagaaaaatgaacaaacacgtaactacggagacgatttagtgcactgttgatttcatttcatgcgtggcagctgggatggaaacgctgctcattcactgcttcgaggaactcctgggtcccatgggagacggcgactcacagtcactgaggtccgcgtgtagacacagggcgcggggcagacgggaatgcgtttaagacactgggcgcggggcagacgggaatgcgtttagacacagggtgcagggcctcatttgcatttagacacaggcgtggggcccgtctgcatctagacaccgcacagggccgtttgcgtgtagacacagggtgcggggccgtttgcgtgtagacacagggtgcggggccctatttgcgcctgcagcgcggccccctcagcctgttctgatcctgcccgttgc

SEQ ID NO: 30284 - DNA, 227 bp, Homo sapiens
  chr6:170339178-170339405
  hypo
cggggcctcccagcccttcacgcagcgctgacggggcctctgcccaccggccaccctggtctcaagacggagcccacgtctcctgcttgggctggatgagtgacccttccctgcggccatgaacagggagctttaaacgtgttgaggttggaccctgcccagcccggctgaaccccactctgtaggaggcgcaggcatcagacgccggggacgtcatggtggaggag

SEQ ID NO: 30285 - DNA, 229 bp, Homo sapiens
  chr6:170339543-170339772
  hypo
gaccaccctgagcctggtgacgtcacgggtggaggagaccgccccgagccctgtgacttcacggtggaggagaccaccctgagcccggtgacgtcacgggtggaggagaccgccccgagccctgtgacttcacggtggaggagtccaccccgagcctggtgacatcatggtggaggagaccgcccctgagcccgggtgcccctgatcccaggcactggatgggatcccc

SEQ ID NO: 30286 - DNA, 1440 bp, Homo sapiens
  chr6:18263786-18265226
  binary
cgtcaaatgatgaaatgttaacgaacgtttagagcggacgagaagtcggctgcactccaatacatctctaccacgctaacaaatactttaaaaaccggaatacacaaagtcaattctacgccatcgctcaaaacaaaagcagataaattgtgcacacattctcgctgaaaatcactccgacttcacgcctctaaacaccaaaagagcaagaaaactgtttcctgggtgaaaaatacaaaaaaacttcggtctgaaaaattcatcagttgggatgcgactccccccacctttttcctcctcctcctcctcctcgtcgtcctcgtcctcttcctcctcgctctcctctctgggaccgggcatttcgggttctttctcggacgcgggctgggtgggggttccctccccctccgcagcaggggccgaggcggacatgctgtgaacctgcatgcgggaagaaagccggacgtctcggtcctcctactcccgcaggcaggaccgggcggccaccctgaatgatgctacccttcccgcgggacacctgccctgaaagttgcctcctcccatagccgggaccgcagcgctcagtccccaggggcggcttccctcccgctccgccgccgccgtccagggattcccgaggcgggaaaccgcgcccgctgccccgcgtgcgcgcgcgcccgcccggcctgcgctgttcccggcccggcccgagctgccggccctccacgtcccctcccccgccccaggccgccgtccaaatggccgcgtccctcccccgtcggccgcggcaggggcgaccgggcctccggcgtcccgaagcagcccttaccgcggatttcggccgccgcgggcctggcacgcgagggcacgaggaggttctgggaggcggcggcggccgacgccgaggagaaggcgcgcgggccgctgtctggcgtgacgctcgcgccgcgcgctcggctccccagaatcaacaagattttcaaaatggcggttcgggaaggagagcgggaatgcggcgaccaatcagggccgcgagctgggagttggcgggcgcggggcgggggaggcggggcggccgggtgcctccgcgggaagctcgggcgggcgggaccgcgaggggtcgcctcggccgcgggcggagggatgcgcgcgcggggctctccccggctgcgcctggagtgtggtcggcgctcgggccccggagtgcgggcgggctgtgtcccgcggggcgggcgggagcgggaggcgaggcggcctggcagcgcggaacggaaggacgctagggggcctgcgtgtttattgtttccacggtcgcttcctggaaaagatgatgagcagtcccgggccgcggaggggcgcggcgggcgcggtaaagaagtttagagatctccgaagtcgctatcgacagtgttactctgaggcggaggagaattaatcagc

SEQ ID NO: 30287 - DNA, 199 bp, Homo sapiens
  chr6:3579868-3580067
  hypo
cgggccgcactgggcttctgtgattgggcggatcacgccggcctcatgttccttctcttgtccctctctacccctcatgaaattgtgctccttcagagcatacaggccgtcaggatgcggggtagggtcaagacttatcagactgagcgatgaacaccttggcttctccatcagaccccgtgagaaccacaatggacac

SEQ ID NO: 30288 - DNA, 504 bp, Homo sapiens
  chr6:3618094-3618598
  hypo
cgacatctgtctctccgagacctccaaccccagcctggagccgccgtgcctatttctggaatctgagagacctcaaattccaaaggcaccgtgagagtctcaggactcagcctttccacccttgccggggtgactcgtggagggaatcgagcctaagtcttacggcacgttgtgcagtttgggccggggcggaggaccagggcccagctgaggctggccttagtgactcagccttgatcctgccacggtgacaagggtgggagggttcccgcaggggtccagctcgtgtctgtgagaagcaccttcccttcagggtcgcacgtggaccgtggctgctaccacgctaccgttgccttcagtgctcttttgcaggagtgcagacgggcagttcagcgcgggccccagtgccgggggtggggggcagggagctcccgcagggctttgctgagaaggggcataaccatgacccactggtgatgtctgtgaggtggaggcagtggttgc

SEQ ID NO: 30289 - DNA, 349 bp, Homo sapiens
  chr6:3646980-3647329
  hypo
cgggtccaccagaattctgtgctcataagggcatcccgagcgccatgtgcgaagtgggtggccggggccggggacgtgcgtatcgctcaggtgctgctgtactgtcccaccaggcttacaaaaatctcagagacgcggttaggaagatttcaagacagcaacgacagagccttaaaccgagcacagggctcttccgggtgtggggtctcttgtgactgcgcaggtcatccatccaagaagccggccttgaattacagagaacaactgaaagaccgaagagaagccagttccgctctcaacagccacagggcggatgatgccttcccccagaaattcaccaacagtgcac

SEQ ID NO: 30290 - DNA, 307 bp, Homo sapiens
  chr6:3724319-3724626
  hypo
cgcctgcctcgtgctgggccctggggacagctgagagaggagtggtcacgagctcacagcctgaccgcagcagagatgacacacggacgcacaggaggctgcgagggaacaggaggctggagaagagccggcgaggcccgtggaggtcacggggggagacaccttctagcggggaagcctgcatgtgggtacgtgtttcattcgcgctctggcagatgagaagcatccgaacatgggggacttacatggggtgtggagaactagggaagaatacaaaccccaaacataaggggacgtaaaagcccgc

SEQ ID NO: 30291 - DNA, 416 bp, Homo sapiens
  chr6:3725763-3726179
  hypo
cggggcagcctgctgagactctgctgtgggggccctgctgtgggcccggcggcactgggctcacaggctcgggccagacaatcagcctcgggtgccagggaggacagccacgcagggaggtgaagcctccagttccacaaagggtgtctgtgctcttggtcgctgtcaaccccccacccgacagccggtgccgtgtagaaacagatcgtccctgtgagacactggagctggaccatcgactccactgcactgcccgagattgaggagccagagaaaggcccggcaagcccaagtcggaactccctccagatgctcccgagccccatggcggcaggcgtttctttgttaggcttttctggggtcatggagattttctcggccctctctgtgagccaggcatcccggagcaggtggcc

SEQ ID NO: 30292 - DNA, 802 bp, Homo sapiens
  chr6:39158588-39159390
  hypo
cgtcccggtcatctcgggacaccctagggtgaggggggaagaggccatcaaaggtggggtggggagccggccctgcctcatgtgcccttggggctgttagccttgttgtactcattcatcagctgttcgtaaggcacagagagctcagactcagtgctggtgaaggtggactcggaggaggaggggaactcgcccatgttcaggggcgccttggcttcagccccctgctgggggctctcctcccctgccaagttgtcctctagcgaggacttggaggtctcctcgtctgagaggccagcctccgtgttcacgaaggtgatgctggcgtcctggaagatgagtgggtggtagtcctgggcgtcccatggctcgcattcctcgctgatgcggtccagctggttcatgaacacctcgggggcaggggagctgtcttcaggggcccgtgccacagcctcctcatctggggaccttgatacgtggcctttgctcctcagtgtctgtgacacctcttccaaggtgggcacccggttcttggagtagactaccaggggcaccagggaagggggcagtgctgggagcccaccgccttgaggccccagccctgggcccgggcccgtctccccacccccgcttgtcttcatggccttcttcccgatctgcttgatgaggtcgttgtaggtctcttccttcttggaaagaaagctgaagatgttgacgtccttggaggctgtgctccccttcacctgcagggccttccgggagtgtggggagctctcaaaggactccttccgtcgccgccgcc

SEQ ID NO: 30293 - DNA, 707 bp, Homo sapiens
  chr6:40399988-40400695
  hypo
cggctcgcacacaaactcctcctcacgcacatgccagaagtagcgacccttgaggccccctggggagccacaggtttccaggtcatcgtcccgctcgagcctccgcagccagagaagctcacaattgcagtgaagtgggttacccccaaaactaaaggacaagggtggggcaaagggtgtggctgtcaaagccgaagcctgggagcgggcaaagatgggatcagggggcagcttctgcagccgattggaggtgagatccaggcgggccagtttctgcaggtctgcaaaggtgccctcggcgatgtgatccagcaggttgtggtccaggctcagctggtggaggttgaccatgcgtcgcacggagtcccacggcaggccatggaggttgttgtaggagaggtccagatcctccaatgtcagcaggaagtcctcaaaagcctcatctgcgatgccgcccagctggttgttgttcacgataaggtgctgcaggttgaccaggccccggagggtgtcctccccaaggcttggcagccgattgctgtcaagatgcagggagcggaggctctcgaggtccagaaaggaaaagggctggatgtggctgatggtgttcctggacagggtcaggtccaccagccccgtcatgttggcaaagtcctggcggctgatgtggatgatgaagttgccgcccaggcgcagctccactgtcc

SEQ ID NO: 30294 - DNA, 204 bp, Homo sapiens
  chr6:44120364-44120568
  hypo
cgcctggatgatgtgcgtcttcacggtggtcatgacctacagtatcacctgccccatcatcgtgcccttcggtaggcaccgccgcgccgggacctgggccctgctcggggggacccaggacttcaccctctccactctaggaatgcaggccaccccgagtggacagggcccggctgggagaccggcccctcggggctcccgccc

SEQ ID NO: 30295 - DNA, 115 bp, Homo sapiens
  chr6:53139871-53139986
  hypo
cgtctctaatacttacagtggccgcaggggacccagttcatcacaaaccaccagatgttcagcatcgaggcatggtggtagacgtgcaggaccgtgatctggtggttgttcttgc

SEQ ID NO: 30296 - DNA, 348 bp, Homo sapiens
  chr6:7882630-7882978
  hypo
cgtgttaacatgaggaactaaagacatgtttcaccccgtgagaaacagaaggatcccctgaacagtaactgatttgacaagtatcgacacataaagttatggcatcagcattctcttactcaggcacggtcagaagtaacgctgctttcatcacggctaacctctcacactgagagaagtattcacagcaacagaagctccagcagcggccgtgaaggtatcttccagaggtgtgggtttttgcatttcaatctgctccatgctacggaccaacacagtattgagtcaactgtgaccttaagatcagaggaacgtcaatactgccacaaggccacctttccagaactc

SEQ ID NO: 30297 - DNA, 327 bp, Homo sapiens
  chr6:7887548-7887875
  hypo
cgcagccccaggctcatggttggaactgccactggacactgccacctacacagccgaaagccttgaagatcaacaccttgaaaaccaagctcatccctttcctcgagctctggccccgcccctgtgctgggtaccatcctccaccagatatgcgggaatcagactcgcctcggaccctccctccctctccgcgctgcacagcggctggactccttatgctggctttctcctcctcgccatcgcacagtcacggctgcagcatgagggaacgcatcatctttaaaggcctaatagagcagcttcccacctccagcacacgtgcatgcc

SEQ ID NO: 30298 - DNA, 861 bp, Homo sapiens
  chr6:7888481-7889342
  hypo
cgctgcggatgccctcttggctacaggtcttctaggggcctttacaacgggtaaaggaaaatgcccggagcaaggtcaggaatagaatcagggccccggggccagcagtcgagatttcatagcagaaacatgcccagcagagtcattctttaaaatgaatgaagcggaaaggaaggattctctagagatttttgacaccaaatattgtcttgggatttgtctcacatccatttcatgttttcaaaaggaaagcttttgtttgcattcgcccctgaaagcatgtgaaagtcgatgaaaaatacgtgttgaaaacgcaactggagccaaccatcagatgactgtgtccccaaactgtcattttgtccaaagcatttgaggaggcctctgagggtggggaggtggggggccgggggccacgggccacttatggggatcccgactccagcaggcacccaccttgtcagcctcgggctcagctgccagcaccggggcctctgagggcgtgacggtctccgtcgctccagtctctgtgcgctgcagctgcgactccacgtactccctcagtgactccaaatcccgctttcccttgtactgatccacctggccaagacacgggcacgcggctgagtgagtccactgaggtgttctgaatcacttaagccttcctgcaacccctgcttgcccgggtcagagctcccagatgtcttagcggtggtgcaaagtctgcatgttcatatttagacgggaatgtagagaggataactgaatgcctcggctttggtgagagaactgtacaggcccctcttccctccacggggttacacatcacagaagtctggggcagaggcctgccagcaagcc

SEQ ID NO: 30299 - DNA, 188 bp, Homo sapiens
  chr6:7890532-7890720
  hypo
cgggggtaaaaatactatttcaacacctaagacccgtcagagagcagctaaggtgcggaactgaagtacaagaggcctcagcccaaggtcgggagaggacaagcatttttaagggtccagtgtaacccagccacatgtgccagggatgaagggcttcagcgtggtcacctgggcttgtgtctgctcac

SEQ ID NO: 30300 - DNA, 242 bp, Homo sapiens
  chr6:7893721-7893963
  hypo
cgacacagctgtgtggcagtgacccacttagggaggcgctggctaggcctgccggagtcggtctgtcctgccggagtcggtccgtaacaggtgatttgggaaacacaccctgctcagagcccaagacaatcccagctgaaaatgcattcccgtagcggaaagcatgctagagttctgccgtcagggcgctggtatggatgaaataacttttagcaaaagtgggaaaaggctgaaggcctcac

SEQ ID NO: 30301 - DNA, 181 bp, Homo sapiens
  chr6:7898587-7898768
  hypo
cgagttgagagagtctttgcaggtgagggatggaagcactgaatcagcagccaagtttctgattaggtcatcagagaagatggggcagagcggaagagccgcacagacacactggaaactggcaacagtaagcggcaaagctccaaaaggaccaccacagaccaccttcaaatcagtgggc

SEQ ID NO: 30302 - DNA, 217 bp, Homo sapiens
  chr7:100405032-100405249
  hypo
cgggaaaggccaaagtcagacactttgcagacgaggttgctgttgactaggatgttgcgagcagccaggtctcggtggacgtagctcatctcggcaaggtaccgcatgcccgaggcgatgccccgcagcatgcccacgagctggatgactgtgaactgtccgtcgtttagctggagagcagatagggtgggggcttggtgaggacagcccacccacc

SEQ ID NO: 30303 - DNA, 380 bp, Homo sapiens
  chr7:100421158-100421538
  hypo
cgcgcgggccagaggcctcgcaactacatcggctgccctccaggccacgggcctgctggctggaatcccaccttggctgtggctgagccctgggggcacccaggtaccttgatgtaggggttctccatccaggctggcgtgagggccgtggccgtgtccgcatcgctctcatagtagaagacggtgaaggtctccttgcaggagcgcccagcccgaggcagggacaggcactcgagcatggtgaagcgcagcgtggcgtacacgtggacggcgccccgccgtgggacccaacctgtgcgaagccagtgggcctggcccggggcacgctgcacgtcacacacttcgtaggtgcgcacgctgtgctgttcctcatccaggcc

SEQ ID NO: 30304 - DNA, 281 bp, Homo sapiens
  chr7:1328613-1328894
  hypo
cagacacagctcccgtcattcaatatggcaaagtgtggtggtgctggctccgcagaccccactgtggaggcgaaaggtaagaagtcagggttcgaggttggggttccgtgaacacagccccgagaccgggtgtctaccccaccgagaggaggggtctcgtcggggggcctcgctgagcctccgtgtcccacccggagccagggtgggcaccctcccgtccccgcagccccggaagatctggcaggtggcatgacacccacccgggggccctggtcaccggc

SEQ ID NO: 30305 - DNA, 102 bp, Homo sapiens
  chr7:1460672-1460774
  hypo
cgtaacacgcatcccatgggcgtcccgtgccaggaattgagggggccacaccctactcaacgcgggggacagtctccgggctccgtggctcacggatggtgg

SEQ ID NO: 30306 - DNA, 576 bp, Homo sapiens
  chr7:1473784-1474360
  hypo
cgacgtctcctctgaggctcccaccagcccatctgtgccaggaagctatgaaagggcccaccttcgagggccaggccctgagagggtcggctcctgcccgaggccacagagcacgtccgtcctgcaggcaagagctgggaggcaggcgagaccccaggcaggtgcggggccgcccaggggcaccgaggcaaacacggaggcacgtaggagtccggggccatgtggtcggtttctttattgagaccacagacggtagcgcaggtccctgctgtccacatgccccttgtagggacaggaggcccttcccgagtccaagtccgaatgccgggtccgggccgagcccacggccccgagtacaagtccgggttccgggtccgggccaagcccatggccccgagtccaagtccggatgccaggtccgggccgagcccacggccctactggctactactgggaggggctgcttttgctttttggtgaccagatcttggacaagcggaacttggacttcttcctctggaggcctaggggacaggtggacagtgaggccgtgctcaacgccgcagccgcacagcc

SEQ ID NO: 30307 - DNA, 267 bp, Homo sapiens
  chr7:1475105-1475372
  hypo
cgaccacaccggtgacctgggacaggagggcctgggccgaccacacaggtgatgtgggacaggagggcctgggccgaccacaccagtgacctgggacagaagggcctcggccgacccatgccaaggccccgtcacgctcccagagggtctcatagaggtggacttcaggtgccgacccagaatgccatgtgctggacccctcatgagacgagacaggaaagctgtcggggacagtcacacagtccgtgcaggagccaggagacgcac

SEQ ID NO: 30308 - DNA, 882 bp, Homo sapiens
  chr7:1476273-1477155
  hypo
cgcctggtcagaaagttctacggggctggctgaccctgagggccgggagcatggaccaggcgacctggcctggctgggaggggcccccggcacctgcccctcaccggagccggtcctcgtccagcgagtccacgatgtcactgcggtcgttcacggtgctcacgtactgctccagcagctcctgctcccgccgccgctcctgcagtgacttcagagcctctgtggggatggctcgtcagcaggagccccccccaccactgccatgcccctcacaggacacaatgtccccaccacccaagcgccaggctcctcttttggaggaagaaggtggggtcttggggggatccggagcagaatgaatgagtgaataagtgaatgaaggaaggaacggccacgtcagagcccgtgtgctgggatccttccccatcatctcgcagaaacaccactcgctgcagagatatggacactgaggctcagggcgtcgctgtccctgcagcacagcaaggaaagggcagaggcagacggcctgggcctgtgccctcagccagggcaccctgcatcacgagacaaatgcctatggctcgccctgactgctgctacactaaatgccttgtgcgaattgattcgtttaatcctcacaacagctgcgtgaggtgggtgctacaagcatcctcactttgcagaggatgaaacccaagcacagcaaggttaagtaccttggctgaggacacacagccaggaggtgggagatttgaaactcaaacgtgggctcgcctggctccagggaaggtctcaccaccaggacagtcaggtggcctcacagagccggcccccagacatcctgggctccgcggcatccctggctggggccccttggctggc

SEQ ID NO: 30309 - DNA, 883 bp, Homo sapiens
  chr7:1477156-1478039
  hypo
cgcgggggacgcaccgggcttggccatgagccggcgcagctcgccctcgatgtccagctgctgctcctccagacgctgggccttggacctgccgcacagacacgcgtctgaggcctgactctgccgccctgtcccccgcctggcccgcccagcccgcaacgaggtcctggacctgccacacagacacgagtctgaggcctgactcgccgcccgtcccccgcctggcccacccagaccgcaacgaggtcctggacctgccgcacagacatgcatctgaggcctgactctgcgctcctgtcccccgcctggcctgcccagcccgcaacgaggtcctggccttcgaggaggggcccacggctgggctctcacttgtacatcagctctgactcctgtctcagcagaagctgcttctcgtgaatgagccagaaccagtccaccatgaggctatcctcagcgtcatctggggagaggagccagctggggcaggggggcccgccagagttcatggcccccagccccaggactgagggtgtctgtgggagtcgggctggcccagggccaggccgaggcgctcacctccctcggccgcccgcagtcgcttctccagctccacgccgcggagctccagggcgtccagccgcctctcgatgtcctgcagctgcctctgtatctcctccggggagaggtagtcggggtgcagctgggaacggaggggcggtgaggatgccggagggctgggcccctgcccggctccccaccactactcaccctgactggggaggtcaccgtctcgccaggcagagcagggacattggccggggacaagggtctccctggagaaggagcagggtgagcctctgggacctgggccaccaggcccaac

SEQ ID NO: 30310 - DNA, 524 bp, Homo sapiens
  chr7:1479741-1480265
  hypo
cggaacccgaaccaccagccccagggcctggcccacctggaggggctcccaggccatatgcagaccagccggagggagcaggtggccttctgagcaaatgccacctcccagcccactgactacacctgctgggaccctcctgcaaacacacgtgtccatcgctacctgccgtggtgcgaagcagattccaggcgtgagctccgggccccacgggacccacacatggggagactccaccccagctgcaggcatggtgcgtgaacccacacgggtgctgccatgcccaggtgagacacgcaacgctgcccccaaaccagggacagcggcccccatgtccctcaggcaggggtgacctggcctctgctactcacagggaggtgcgtctatccctggataggcgtgtcaatcggtcgattacatactcactgcatttattaagcacctatggtgtaccaggccctgggccagccccacccatccctaacctctcagctgggcttctcctgtccacgggcttcagattc

SEQ ID NO: 30311 - DNA, 370 bp, Homo sapiens
  chr7:150889157-150889527
  hypo
cgaggaattagagcctcggaggacatagaccacctgctcgcgtccacagagccaaagccaggacccaggccactgggctgcttgtccagcagcccttccagaagaccgggctgtgggggtgagggctcgcagcagcaatggggtatggggcgggaggtgggcaggctttggtaggcgcagccgtccccacatccccaggcctcaccatagcgggatgcgtagtcaggccggggcatgaagaggatccgctcgtagacccggcacagaccccgcatctcggccagctgtggccgggaggttgtcccaatcagcatcacacggtctccgggagtcagcagccgcaaggccttggtgaggtccttctttatcc

SEQ ID NO: 30312 - DNA, 128 bp, Homo sapiens
  chr7:154541944-154542072
  hypo
cgtagatgaacaccctcgctctccagaagacaagaagcgggagtcgcagcctattgaagtgtagacatgatgtctacacagccaccctgtgtcctgcaagagcccaggctcagagcgtgtgcaccgtg

SEQ ID NO: 30313 - DNA, 135 bp, Homo sapiens
  chr7:154542290-154542425
  hypo
agagctgaagggtggcgggggtcggcttcctcctctctgcctcttcccttccgccacgcttcctacccacaccagccagtctccagtaacagatatagaatgccttcatttggaacacggagagacaagcgtgcc

SEQ ID NO: 30314 - DNA, 711 bp, Homo sapiens
  chr7:155623753-155624464
  hypo
ggcaccaagggagagtgagttctgaccgggttgtcggggggtcagggactctgccctcagccactttggctgctggttctgccgagccactgcccgaacagcaccccggatgcacccgaggaggtgaggctctgcggaccgggtgccctgtgagtgacaggggagaggcccctgaggtttgcacagtgcctgtcacttctcaaagcacctccttcgttctggcaatttagtgagggaggctgggcagccggggctgtccattttatagaggaggacaccaagcctcagggagggagagggaagccggtggagccgggcagaagcctgtggagctgggtagaggccggcgggtttcccagcagcggtcttctgcatcttctggctgagtcctccgctgtcaggagaccccggcctgggccaggaggtccgattctgggatgcgaacgtggtggggctgttgccatagataccgatgtggtcaccagcctgaaacccttgagccacggagagatcagacggtggtccccactcctcagcctggagcctggcagagacgctcaaggaagagggtgggctgaccgcgcacgcctctcctttcttcatatcctgcgcggctcgggcgctgtgcaggaggcctgtgctcagcgaggagagagacagagagtgcagtgggaggagcgcggggtcggggggctctgcttcccacggtgc

SEQ ID NO: 30315 - DNA, 593 bp, Homo sapiens
  chr7:155679115-155679708
  hypo
cgtgtgcagacgtggagagggcgtggggtgagggacgcccacccctgtgggtgagaaaatgggcaagcatgcgcagacgtggagagggtgtgggggagcagaatgtggttttacgggtgcgatcacagggaggacagactggaatggaaggcttagcccggaggtggtcctgttcacctgagcgagagggcgtctgctggctcctttccctgacaaggccaactcggagggcaagctgggagcctggggtggggctggcggggtgaaggggctcagagggacgcctgcgttcttcatgatcttcccatccaagacttgctgcacgtcggcttcttccaggctccacatcacgggcagacccatgcagctccgctgagggcgtgcgcctggtatgggtgccctgccgccacgtacagctgagggaggccgtgggagcctccctggactcatctctgcctctgtttcttccccgtgagacatgggagctgagacctgccgactggctgtgctcctgcagggattggaaagggcttaacccagattggcagagagcgctgagtgtgactccagcaccccgggcgtcctgattttgc

SEQ ID NO: 30316 - DNA, 270 bp, Homo sapiens
  chr7:155913340-155913610
  hypo
cggggagggagatacagagatggcgaggcgcttcttcacgtgtcccacctgctctgatctgctccccgggagatacagagatggcgaggcgcttcttcacgtgtcccacctgctctgatctgctccccgggagatgcagagatggcgaggcgcttcttcacgtgtcccacttgcactgttctgctccccggctgctcactctccccctgatgtgacgcgttgtcagacatgaccaaatgccacggttacttgggagacaacagcagaaac

SEQ ID NO: 30317 - DNA, 288 bp, Homo sapiens
  chr7:155916075-155916363
  hypo
cgccatctccctccgcctcccaggagtggtactgtggaaactgacggcctcaggagccatggcaaccaacctccgggtcacatccatccagatgtctcccacagggaaacgggtgtcacacggagcaccaggagagcatcaggtccctgtccgccgagctcacacgcagctgttgcgtggagaggggtccgcgtgttgcccgccgagctcacacgcagccgttgcgtggagaggggtccgcgtgttgtcctccgagctcacacgcagccgttgctcgtcagcgctgcc

SEQ ID NO: 30318 - DNA, 315 bp, Homo sapiens
  chr7:157410957-157411272
  hypo
cggtgagcacgcggaaaggacgcggtgggagcggcaggtgcagagggaggacttgaaggttccatccctaacagaggacagcgtggccgagtactcatgcttccaaccctgcacagaggatagtgcatgcccagcatgcagactcgcttccatcgcgacacagaggacagcatggagcccagctcgagtgccgtccccccaccatgacagcgcagcatgggccttccaagccacagagccacagggaagccagtcctcctggaccgtgtgtggctgttttggagccagttgtgtcctgtgaagagcgcagcggcc

SEQ ID NO: 30319 - DNA, 37 bp, Homo sapiens
  chr7:157464624-157464661
  hypo
cgctgtaccccaagaaggggacgggtggggcagcagc

SEQ ID NO: 30320 - DNA, 232 bp, Homo sapiens
  chr7:157507378-157507610
  hypo
cgatgcccagtccgacgtgcttctcctgagccgattttgggtttcccgttttctaaagccagctccccagggaacggcgcccagtccgacatgcttctgaaaggattctaggtctcccgctttctgaagccaactccctggggaacggcactgagcttgaggcgcttctcctgagcagattctaggtctcccgctttctgaggccatttccccagggaatggctccaagccc

SEQ ID NO: 30321 - DNA, 115 bp, Homo sapiens
  chr7:157511495-157511610
  hypo
cactcttggtttctcagctgccgcaatcggtccttccagtgtccgacctctggggccctcagacccccaaacccaccttgtcgctgtggcctctccgcctcctgcaggtggcagc

SEQ ID NO: 30322 - DNA, 408 bp, Homo sapiens
  chr7:157513007-157513415
  hypo
cggctgccgcaatcggtcattccaatgtccgacctctggggccctcagacccccaaacccaccttgtcactctggcttctccgcctcctgcagctcctgctctgtgtttgggaacgcgtgcggcccacaggacaaagccttgttgcacacccgggtcaagggcaaatcccagctgcacagccgggtgatccagcggccgaccctgcttccctgcgtaggaggcctgagccaaggacactgcggccccggctgcaccgatgcatgggtgtgcacgcggggaccgagggagtcacgtgaatcatgtggcttccacgagctacctcttcccacaccaggagcaggtgccctcgtctccatcaagcgctttctggggagaaactccttcaaggataacggcaaatggtgagc

SEQ ID NO: 30323 - DNA, 250 bp, Homo sapiens
  chr7:157589680-157589930
  hypo
cgagttccgactcgccgctcagacgaactcacggctcagctgggagaatcacacgggaggggcccatgaacgggcactggggccacagccggggattcaactgcaccgaaatcccagccctcaacacggcccacggctgtgtcatcccggatttatcactataaagcaaaaccaaaaacggacctcaggtttctctgcaatatgtaggatccgtgaaacctccaacgtgaaatgagaagtaggtagcctc

SEQ ID NO: 30324 - DNA, 229 bp, Homo sapiens
  chr7:157607768-157607997
  hypo
cgcgggaggcagtggagacgtggaagcaggctccggctgctgggcctgcatgaccggtttccctgcagaagattctgcgcccttcagcctcaccgtcctcacctggcctgggtgctgctgtgggcaggcgctgggcacgctgggaagagcagggccagccgtttgcaggacgggaggctgaggctgtgtgcacctcctgagggctgggccacaggtgggctcaggcctg

SEQ ID NO: 30325 - DNA, 203 bp, Homo sapiens
  chr7:157642963-157643166
  hypo
cgacatggggtgcctcaggctcgcgtaagggatcccaggtctccgaatttccgacgtgggtgcctcaggctcgcgtaagggatcccaggtctccgaatttccatttccgacgtggggtgcctcaggctcgtgtaagggatcccaggtatccgaatttccgacgtggggtgcctcacgctcgcataagggatcccaggtctccc

SEQ ID NO: 30326 - DNA, 273 bp, Homo sapiens
  chr7:157738113-157738386
  hypo
cgtctgacaaatcaatgtatctttccccgtggatgtttctccaacccattcactcttctcccgctcagtgacctggcccctgaacctgccgttcccaactcagacaaagccgtctccaactcggacaatggcgcctccaactcgaacaatgccacctccaacttggacaatgtcgcctccacctcagacaatggcgcctccagcttggacgatgccgcctccaagtcagacgatgccgcctccagcttggacgatgccgcctccagcttggac

SEQ ID NO: 30327 - DNA, 145 bp, Homo sapiens
  chr7:157744287-157744432
  hypo
cgggtgaaaagggaaacgccttactaaacgatgttcccgtgatcagaatcacgggctaacgtccctccgcttccgcagtcttcaggcctcaggcactgccagtgacattagctgctgtgcgtccctcctgccggactgcaacacc

SEQ ID NO: 30328 - DNA, 39 bp, Homo sapiens
  chr7:157934555-157934594
  hypo
cggacagagtcctttaaagtcaatctgtacacgaaatgt

SEQ ID NO: 30329 - DNA, 92 bp, Homo sapiens
  chr7:157934659-157934751
  hypo
gggtggccgagtgccccgctctggccgacgttgaggcctctgaattgttcggcagacagtggcggcttctttaccttcgggttgaagtgtcc

SEQ ID NO: 30330 - DNA, 264 bp, Homo sapiens
  chr7:158072920-158073184
  hypo
cgggcccaatcggaaagcaggtcctctccggcctgaagctgcgaagagaggcagcagccatgagaaggtggctaaccccgtcgggggccatggctgcctaggggaggccggcagagcctgcctgggggtcggtaaggacgctggctttggtctgacaccggcagggagggacagcgacgagggcaggagccgcggctctacctgggaacgcaggatcatctctactctgacggctcagcctctgcacacaaaccatccttctgc

SEQ ID NO: 30331 - DNA, 154 bp, Homo sapiens
  chr7:168483-168637
  hypo
cgtctcctggagggtccgtgtccctggtggatccgtgtccctagtagatccgtctcctggagggtccgtgtccctggcggatccgtctctgaccgcgcgtgctcttcaccatggaaggaggtgctggtagccaagccgccctccccaagtgggc

SEQ ID NO: 30332 - DNA, 255 bp, Homo sapiens
  chr7:170034-170289
  hypo
cggtccgcctggatcctgcacacccagcccggtggctcctgcccactcagcggggccctgacgccctacatctcctctgtgagcaaaagctctcttgttgttagagagacttgcggaagccacacacccatagaccgttacttctacacattctttttatttcacacagatctgcatcccttgaagtactcacggggacgtattccgcatggtttccatcttagtgcacatagaacacggttttaacttacaatc

SEQ ID NO: 30333 - DNA, 273 bp, Homo sapiens
  chr7:173194-173467
  hypo
cggaggacaggacccgccccgcgctgccagtgccgaagcttgggttctctgaggactgcgagggggtctcagcactgtgtccacagatggggcagggacctccgcagggaaccttctctcggctgggccagcccaccccaggggctgtagacgagggagttaatgaacacgggatgggttgagccgcctggtttgcccacagaggggcgaggaagggagtggggagtctgctgtgagcggagagaggacagcctgaggcctcaggaacgctgg

SEQ ID NO: 30334 - DNA, 163 bp, Homo sapiens
  chr7:173496-173659
  hypo
cgtctgtcgggaaggggcacggccacaggatttaggggcagtttggacacactggtccggtgagcttgatttcagattccgggatctggtttcggagtggagttgtggactctccaggacccatcgctgaggagcaggaggttctccaggggccatggggccc

SEQ ID NO: 30335 - DNA, 736 bp, Homo sapiens
  chr7:286020-286756
  hypo
cgtgccggggcccccagccagtgcaggagaggcctttgagcagcttacctgagaagggcccatggggagctgggacctccggcctccgtcgcaagggcctgcgctgctctgagggcccgtcggcagctgggtcagggccacggggagctgggacccccggcctccgtcgcacgtgcctgcgctgctctgagggcccgtcggcagctgggtgcccagggtcccgaaggctcagggtggccctgaggaggctggagctccaccgcatttttcatatgaggaacccagcacgtcccgcctgcctccggcccctggaggctttctcagtgacaaaccgtttctgtttctgtcttgttttctcagacaaacgagggagcaggagacaccccctgactttttttatttctctgactacgagaggcacaatgcggagattgctgccttccacctggacaggtgagcccttccttcctccctccatccgcgctcccgtgcgctcagacccaccggtgagtgaggccgtcctgcactggacacagcaggacgtcatcgtcaccttcgtcaccatcaggcagcgccggtgcctgctctccccccaccccgagtgctgccctgagcagggtcctgtatgtcatcgtcacctttgtcaccatcaggcagcgccggtgcctgctctccccccaccccgagtgctgccctgagcagggccctctgtgtcatcgtagcccacacaacacgc

SEQ ID NO: 30336 - DNA, 551 bp, Homo sapiens
  chr7:287728-288279
  hypo
cgagccgtctgacaggtggagggggagggtgctccacgcagaggcgtggtcgggccttgggtcccgggtcggccctggcagacggcccacgtccctccacacctggtcacctcgcctcacaggacaatcaccacgtcctccgtcagcaagaaaagctctcgccctgcattctccatttaattaagcgagtgggagcctgtggtgtggttcagaaggagttccattaaaagtggctcctttaatttaattttgttttaaatttagccctggaatgagggcaggctttagctatgcaggcagttggtgctgtgtgcccatcagtgaggcatcgccagccccagtccctcaggggcctctcccacccccatcaccgtggggccaggcagagccaccggacctagggctgggtttattcggaggcagggacacagaggcccgctgagccgcacagagcacagaccctcccctgccccgttcttatttggaggcagggacacagaggcccgctgagccgcacagagcacagaccattccccgcccgtttcttgcca

SEQ ID NO: 30337 - DNA, 468 bp, Homo sapiens
  chr7:288328-288796
  hypo
catgaccaaggagatccgggacgtcacacgggacaagaagctctggaggaccttcttcatctctccaggtagcctggcacgggggcccgcattcatctctccaggtagcctggcacgggggcccgcattcatctctccaggtagcctggcacggggagcccacattcatctcgccaggtagcctggcacgggggcccacattcacctctccaggtagcctggcacggggggccgcattcatctcttcaggtagcctggcacggggagcccacattcatctcgccaggtagcctggcacgggggcccacattcacctctccaggtagcctggcacgggggcccgcattcatctctccaggtagcctggcatggggagcccacattcacctccccaggtagcctggcacggggagaccacattcatctcgccaggtagcctggcacaggggcccgcattcatctctccac

SEQ ID NO: 30338 - DNA, 217 bp, Homo sapiens
  chr7:290557-290774
  hypo
cgcctccccaccctgggagtccagggcttcctaagcacgcctgagctccggccgctgtcagcccttgggtcgaccctgaccgcactgtccagccaccgcctcctgccccaccgtccacaggactgaccgcactgcagcccgccatgcacaccctggtgcccacggaggctgggctccgctccagtgatgcctggatgcccgactgcttcttatccac

SEQ ID NO: 30339 - DNA, 175 bp, Homo sapiens
  chr7:30972844-30973019
  hypo
cgggctccacgcttgctcagcttcactatcagggacacacagagggacgggggtctggggacctttctcagaggctccggcatcccagcgaccagcgttaggtggggccactgtgacggtccacttgtaaaaggggtaggcctgaactcacccgaggggacctgctgcccctgcc

SEQ ID NO: 30340 - DNA, 345 bp, Homo sapiens
  chr7:378637-378982
  hypo
cggtaccccgctctcttgcaagggtgtctgcctgtgccaattttcacagcagcgggtgggttccgtgggcctccacaggtgcctggctggacagcaacgttggtgatggctccctcatagcgacccgctctgagagaactgctagcccctttcacagatggggagactgaggctgcaaagatgagcggatttcccagagcatcagagccgggggtgggagagctggatcgctcactctcctccataccttcccaggtctagggcaggcaggactccgtgcaggacccccaagagccccgctctgtgcgacgaggatggcagcgtccagggcacgtcctggctgcc

SEQ ID NO: 30341 - DNA, 234 bp, Homo sapiens
  chr7:380956-381190
  hypo
cgaagaccctgtttccaaaggtcacattcgagggtttgggtgggcacgaattttgaggggataccgtccgatccggtgcagggactttccagccgcaggctctagggaaggctctgtgctaaaatgcatccccggttcacactgcagggcaggagtgtgcgggcggaaggagccatgctgttgaggggcctgggtaactgtataacctgagggtctccatgttttccggcctgc

SEQ ID NO: 30342 - DNA, 367 bp, Homo sapiens
  chr7:4153573-4153940
  hypo
cggagttggcctcacagggcaggcccatcccttacaacccgtgagggtggcagttctgagatgtcagctcatcgcgactcctcgttccttcctagcccctgccggattctcagtacaacgggaaccccgagtccgtgggctacaggattaagtactggcgctcagacctccagtcctcagcagtggcccaagtcgtcagtgaccggctggagagagaattcaccatcgaggagctggaggagtggatggaatacgagctgcagatgcaggccttcaacgccgtcggggctgggccgtggagcgaggtggtgcggggccggacgcgggagtcaggtgaggggaaggcgattcccatcctggagacacc

SEQ ID NO: 30343 - DNA, 304 bp, Homo sapiens
  chr7:4349444-4349748
  hypo
cgccctcacttttgacgccaattgcgagttcagaggccctcgagaccacccttaggttcgacgatttgctggaaagactcggaactcgctggaagctgtgatagtcccagctatggtttatcacagggaaaagacaccgattaaaatcagcatgcaggggcagagcccacgagggttccacacactgagcgtctgctgtcctctcctgtggagctgcggacagcgttacccctctgacaatgtgcgatcatacgcacaaaacacggtcagccaggaaggttcctccacaccagggcttccctgc

SEQ ID NO: 30344 - DNA, 365 bp, Homo sapiens
  chr7:455747-456112
  hypo
cgacgccgtggctagccaaggagctgccgagccgccgggagctcagagggcctggcgccttcctgaaactcctcatgctggtgttggggacacagaggtgggtcccacagggtgggtctgctctcgaggggcaccaagcaggggagagaagacagagcagagatcagtgagggaactgcacgccgatcccgggccagaccccgactttcacaaggagacacacgtcggggacgccagggaggcaggaaaacgttcccagacactcagcggggcccgcaggctgcccaggagcagagactccagacgttcatgccacagaggcagagagggagaggaggcactggggccccgaggctgagaggggc

SEQ ID NO: 30345 - DNA, 183 bp, Homo sapiens
  chr7:462339-462522
  hypo
cgcgcagcctgcggggcaggggaagctcccacgaggggctgcgtgcctgacactcccctcaccctccactcaactaagctcgggcttgggggaaggaataggagagcttggagctttgtgaacggaggcagcttcttgccacctgcccagaggggaaagcctgccggcctccggggccgcatc

SEQ ID NO: 30346 - DNA, 561 bp, Homo sapiens
  chr7:462752-463313
  hypo
cggagacccccgagactcccccaacacgcccagcatcggatggaacccgggtgttggttccaggggtccccgccctatgcaccgcaccccctgctcaggccggcttatcttcgagggaataagaaagcatcgtgtccaccccaagacccccgcaggcccagtgtccccagagggccgggcgccccaggcctagtgaggaaggggcacccactgaggctgctgggagctttcagggtgaggggtgtggcaccggggacggaacgcccaggccaggtttcaggctgggattaagggtcctccagaccctccttgaattttaggagaagcacgaaggggtgggggcgtctctctcttctcttaggagatctggaggagacttcgggcactgcactgtggcctccacgacaagccgaggaacaaggccgtccacccctgagaaggccacgcagaccactcaccgagggtcctgggggctatggacagaatgtttgtgccccaaactcctgctctgaaatcctcactcctaaggtgttggtgtttggagcggggccttggggaagc

SEQ ID NO: 30347 - DNA, 205 bp, Homo sapiens
  chr7:4855734-4855939
  hypo
cgctcagggagcaggaggccaaaaagggcagagccgcctccaggagctggcgagggaggcgccagcagccgtcatgtccaggaatgtgagcccccgacccctcaaccctgcacgaggccctcacccctgtcgaggagctggttgagaagcagtgtcccggagaagaagaagaggtaggcgagcatctgcgaggccacctcggggt

SEQ ID NO: 30348 - DNA, 468 bp, Homo sapiens
  chr7:4856090-4856558
  hypo
cagggactggcgggggcaagaggagaacagcaaccagcatttccaggagcgctggcggccgaacggggggcctgacccagcgagctccccacccacgcactgcttgcagggacccggcctcggtagcttcctgctggacaggccatggctttgcaaatgtccagtgtgggatgtggggacacaggagctgcctcctggggctgctgggagcagaggtggggtgcagggggctcagggggatctgctgtcggaggcacagatgaactcagaaggcgcacagaggtggcgcctggggggatgggctccaacaaaggggctccaacaaaatgacgggagagtcaccactcccccagaaagtggctcaccgcacccccgatgcaccccaagctggccagggccacagggggaccggcggcagcacctctggcacccgtgggtccagggtgacaacagggccatgtcccttgc

SEQ ID NO: 30349 - DNA, 112 bp, Homo sapiens
  chr7:4857860-4857972
  hypo
cggcgcctggtgagccaggccaacactcaccccagcgcgggcctcccaggagcacaggcccccagctgcccctctgccgggcagactgcaccggaggccggcccactcatgg

SEQ ID NO: 30350 - DNA, 258 bp, Homo sapiens
  chr7:4913172-4913430
  hypo
cgtgcgctggacctcactgggcctgccctgcaggggcagatgtgatcctgccatcccgccgtccttttgaaactacaccacccacttcagtaggatttgtttcactgcagccccccaccttcccccaaagcgacacggtgacacatgccccacactgagggccactctcaggacaaacagacaccacagcagccccatcggtgcccagggaggcgcaggacaggcgggctgctggaaggcgcagagctcaccatcacc

SEQ ID NO: 30351 - DNA, 527 bp, Homo sapiens
  chr7:4917102-4917629
  hypo
cgggctccgactgcctcctgcagagcgagcccgccccacgcatgtcccctgcaccactccttctccgcctacctcggctggccttctcagcgctcagacccacggctcttcctgaacctgtggcccccctcacctgccgtgatggtgtccacctccttggctgccagctcctccacgtccgacctcttcctcagctcaaacctccgggataaaccttctcggggtttccataattcctggatcaagaggggcttctcactgtccccaaacacccgaaagcaccgggcctgccaccgctgcccagcatcgccggcttggcccaccacgtcacacagcacgtactggccggcctgcctggggtccagggcgtaccgctccagcgcctccttcaccagctcacgggcgctggaggtgccggtggccaggacgctcttgtagtgggttcctgtgcagacactgtccccaaacaccttcaggacaccaggggccgacagctgggtggagagctcggcggggtcatcgctggc

SEQ ID NO: 30352 - DNA, 590 bp, Homo sapiens
  chr7:50660402-50660992
  hypo
cgctggatcttccatgccctccccaatttggccgatgcagagggaggcgaccctgctgggttcacagcagcaaatcgtcgtttaagtccaacaaactagtcaatcttggtcggctggcaccgaacaaacccatctcgctctgggtccccaggtgcagaatcgatgtgtgttcttcaccaacgcacagaccgcttcttcactccagtgttcacttcctccagtcttcagccgagaggacatctgcggtcataaggccactcggatgcagtggtgcttgagtttgcaaggcaggactcctttgttcagctggtaaaagtcaaccagctggatcaggtcagagaatttggtgttcccgtcatctaggctgaagaacgtctgcccgtcgtcctcgcactggagagacacaagaacacttgccaggttagaggctgccacctcagggaacagaacggggcccacggccagcagcagctacatctgcccatgatttgattccagagggacacacagggcaaggtaggctagaaaacaccaggggcgggaaagacgggagcagaggatgtgtgctgggggctgccatgtccctgagc

SEQ ID NO: 30353 - DNA, 178 bp, Homo sapiens
  chr7:50687526-50687704
  hypo
cgcacgcacatcatggaatagttcttgtcaaccgaattacacgtgaaggcagggaagaaaacacactccatcctccagcacccgctgtggacacgtacacacacacacatgcacgtacgcacacgcctccttcacagcatcttacatagcagcactgtcccccagaaagggaaaagtc

SEQ ID NO: 30354 - DNA, 177 bp, Homo sapiens
  chr7:50715837-50716014
  hypo
cgcagagaggggagacggagcaccaaggcccagtgactgaagagccagcaacgatggctgagaaggaaagtccagcaaagagggtggaaacccagacggagctgtggaaaggagagcagcgagcgacaggagccctcatgctgctgcaggcccggcaagcggaagacagagaacccc

SEQ ID NO: 30355 - DNA, 88 bp, Homo sapiens
  chr7:50823307-50823395
  hypo
cgcgaggagagtgtgcgcagcccggctctgctgcagcccaggtcctcccatccctacccgactcagcccggtgttcccaggcagagcc

SEQ ID NO: 30356 - DNA, 332 bp, Homo sapiens
  chr7:51092672-51093004
  hypo
cgccggctctctctcaacccactcccatgtgaccgcctcgcagctcctgcccacaggcaagcgtgtccctggatctacgctgcacctccaaccctctggccccattgaaatgcgcacacacagtcgccatcacctttctcagtctcgcagcccctgtgccggagcggatggcgtccatcaaggcttgccttgcgtctgcggtgttgctgagggtgcccgtgctgaacctggaggccgtccttggtgcagagagagcctgggagggtggagggggtggtgggggaatggctggtggggacagaagaccaaggtcttctagcagaggactttcc

SEQ ID NO: 30357 - DNA, 367 bp, Homo sapiens
  chr7:531216-531583
  hypo
cgcttttcatctgagtaccctcagggagtggggttggactccagctgtgccaggccagggtgggagtccagggggcaggccaactcccgcttgctgcagtcacctttgaggccccgctgggtcccggctcccaccccagggagaacgggagcagcctcaaatgctgacggcgaagacccagggcccccagaagtgcgagggcctccttcagtgcccgctcggggccagggactctgccaagtgacctggtgtgcccagaaaggactcagcccccagcgctgggcagggcaaggtggcctgggaagtccttcagggagggcaggcagggacgcttcaagagcctggggtctagaggtctcatggtgcc

SEQ ID NO: 30358 - DNA, 265 bp, Homo sapiens
  chr7:540536-540801
  hypo
cgcagcttgggccaccctccccaccggacacctgcaggtgtgggatccgtctcccccgcaggcatctggcccgggagcagggcaacgaatccttcaacagcagcccagatgctcacagcagtaagcgttgcgctcaagggggccacctaacaccccaaaagcaaggctctgaagacctgttctccaacaccgatgccgacgaaggcagccactcacccgtgtcctcttcccgataatccggattcaggcttgtggtcgcgcaggc

SEQ ID NO: 30359 - DNA, 57 bp, Homo sapiens
  chr7:64345105-64345162
  hypo
cggattcttgcacacagactctttcgggaatggagtccaaagagaagttcccagcgc

SEQ ID NO: 30360 - DNA, 241 bp, Homo sapiens
  chr7:64345211-64345452
  hypo
gagacggcccgaggatgccctatggtagttacttttaggcttccacagtgattgtcgcaggcagcattttccctagactaggccggctctgccttcccattttcctctgctcaggcaggctgacagccctgacagccctgacagcctggccccagcacctgcctcgcggattcgcatgcgccagtcgcgggacacctgtcgcgagcggtgagccttggctcgcgtgtcagtgtatgccacc

SEQ ID NO: 30361 - DNA, 190 bp, Homo sapiens
  chr7:84219-84409
  hypo
cgctgtgcgtctcttccaccacacgcactggggcatgaggccaagggcatcgtctgcagagcgagagggaaactggggtggcagggcttgcgggcgcaggacagcgccaaggggctttcgtctcccagcattaggacgaccttgtcctctgcccctgtctgggggccgctgggtccctcctcacaggagc

SEQ ID NO: 30362 - DNA, 378 bp, Homo sapiens
  chr8:142349773-142350151
  hypo
cgcccagccctcacccagccccgagtcctgtgtggaaggcgattcctcccactttaccggggaggacacagaggctgagcgtggtcacggccggagccccagcgcagcatctgagctgcaggctggccgccccccaccccgctgcacccccatattccactcacagaccttcttcctgctgaacacagctgggccctgacgcctctgtgccttggccacaaggcaccttctgctcactcagctgtccctccagtccccgtagggctgcagacccaggcccacccagtcacaggcctggcagcgagggggaacaaaagggtcaaggggccgcccagggctgggaagggccttgctccacctcgctctcctccattcccc

SEQ ID NO: 30363 - DNA, 165 bp, Homo sapiens
  chr8:142590914-142591079
  hypo
cgggagcgcccctcggctgacaacactgtgatgggactgagatggggcggaacctcgagagtcaggagtcagggtccccagggcagagctgttgcgactaacagcgaaaagaccgaaggaccctccacccaaagccccgcggaggagccagagacacagagccgc

SEQ ID NO: 30364 - DNA, 77 bp, Homo sapiens
  chr8:142630171-142630248
  hypo
cgagggtggtgggcgccccggagcgctggtggggattgggcaaagacgtcaacaccagggctgtggaaggaggcgag

SEQ ID NO: 30365 - DNA, 337 bp, Homo sapiens
  chr8:142630288-142630625
  hypo
tggtggggattgggcaaagacgtcaacaccagggctgtggaaggaggcgagggccttcaggtgccgagggtggtgggcgccccggagcgctggtggggattgggcaaagacgtcaacaccagggctgtggaaggaggcgaggggccttcaggtgccgagggtggtgggcgccccggagcgctggtggggattgggcaaagacgtcaacaccagggctgtggaaggaggcgaggggccttcaggtgccgagggtggtgcgcacccagggatgctggtggggattgggcaaagacgtcaactccagggctgtggaaggaggcgagggccttcaggtgcc

SEQ ID NO: 30366 - DNA, 182 bp, Homo sapiens
  chr8:142880985-142881167
  hypo
cggccacccctccttgcctggccatcctccttgccatgtcacccctcaacgccaacccgtgcatgtgggggtgcatgaccagctgacatgggagtgtgggtcagccccagggccaagggggaagtgggtgagccaagatcccggagcatgacaagggccctggcagctgattggcaggggag

SEQ ID NO: 30367 - DNA, 122 bp, Homo sapiens
  chr8:142881196-142881318
  hypo
tcactgcggctggagggtctgggtgggaaggtgggtacagggagcaggcatgtcggactatgaatgcggagtgggaaacacagaacgactcgttgtggggagactagggatggacggggtcc

SEQ ID NO: 30368 - DNA, 121 bp, Homo sapiens
  chr8:143054871-143054992
  hypo
gccctcacggtgcctgcgctcacgggtgcctgcgctcacggtgcctgggctcacggtgcctgcgctcacgggtgcctgcgctcacggtgcctgcgctcacgggtgcctgcgctcacggtgc

SEQ ID NO: 30369 - DNA, 241 bp, Homo sapiens
  chr8:143234575-143234816
  hypo
cgaggcatgcagaacccagccctggggcatggcgggacccgtgtctcaggagaaaccaggcgaaggcgaagggccggtggcaccagagcaagggctgagcagctgccgggctgtgagaaggcggatacgaatcccagcagggcaagcgggcgtctccttggccctcgctccaagaggcgcacaagaaatgaagccgctggcagcagaaggtgcaggaaagtggacagaccggagccttgtc

SEQ ID NO: 30370 - DNA, 311 bp, Homo sapiens
  chr8:143614687-143614998
  hypo
cgctgctggcgctgacctggatgtcggctgtgctcgccgtcaccgaccgccgctccgccctcttccagatcctcttcgctgtcttcgactcgctggagggcttcgtcatcgtcatggtgcactgtatcctccgtagagaggtgggtgaggcagcctctgtcgggccgggctcctgcggggtcctggggctgccgagtggcctcctccttccccgaggacctcggcagggagattgtgggtaggcgcagcatccatgaccctgacacatctgcaggcctcggtggtccacagagcggggcctgcaggtgagc

SEQ ID NO: 30371 - DNA, 242 bp, Homo sapiens
  chr8:143660391-143660633
  hypo
cgtcagagagagcctcaaaccgtcagcgttggccaccgccttgcactgcgcccatgcttggagccccgagccccaggccaggccctgcccgcccgctcagccctgctcgccatgctcccgcccttgctgctggggcggccggcagggagcccacctgaggcgcagagggaggccattgccgggcgctgccaccatgaggagtcccgagtcctggggagacaggtcctgtgcagggaacagag

SEQ ID NO: 30372 - DNA, 260 bp, Homo sapiens
  chr8:143662794-143663054
  hypo
cgtctgcccgtccacccgcaaacagcagaagctttgctagggagactgatcagccccagccgtgggtgaccgccccgtctgcccgtccgtgagtgaccgccccgtctgcccgtccgtgggtgaccgccccgtctgcccgtccgtgggtgaccgccccgtctgcccatccaccccaaaacagaaattgcttgctaggctcctagacgtcatccgaccaaggagaagggaccaggcggcaggcaggggagcgcctcgaccgc

SEQ ID NO: 30373 - DNA, 132 bp, Homo sapiens
  chr8:1471350-1471482
  hypo
cgggcccatggtcctgccaggggcccacagcatgaagatgtagctccctcacacacacgttgaatttggatttgcttgtctggcttctgctggggcgcaggatgtggggatggaaggaccaagacacacgac

SEQ ID NO: 30374 - DNA, 49 bp, Homo sapiens
  chr8:1471664-1471713
  hypo
agctgtgccttagacgggggggaaggactccctgccccaggccggcacc

SEQ ID NO: 30375 - DNA, 93 bp, Homo sapiens
  chr8:1783965-1784058
  hypo
cggcctgacgcacacggcatgaaacggtccttcagcctcggtgtctctgggctccctctctgactgaatgcatcatctttttgtttaaaacca

SEQ ID NO: 30376 - DNA, 494 bp, Homo sapiens
  chr8:1797609-1798103
  hypo
cgtggggcggccacatggacacagacagcaaatgctgaggggggcgtggggcagccacgtggacacagggcaaatgctgaggagggcgtggggcggccacgtgggcatggacagcaaatgctgaggagggcgtggggccagctgcgtggacacagacggcaaatgctgaggagggcgtggggcagtcgtgtggacacagacggcaaatgctgaggagggcgtggggtggccacgtgggcatggatggcaaatgctgaggagggcatggggtggccacgtggtcacagacagcaaatgctgaggagggcgtggggcggccacgtggacatagagggcaaatgctgaggagggcgtgggccggctgcgtggacacagggcaaatgctgaggagggcttgggcggccacgtggacacagacagcaaatgctgaggagggcgtggggcgaccatgtggacacagagggcaaatgctgaggagggcgtgggccggctgc

SEQ ID NO: 30377 - DNA, 329 bp, Homo sapiens
  chr8:1885046-1885375
  hypo
cgggctaatgccgtcttcagccaggaaagggctctccggctggcccctggagacgtgggtttggttaggaatgcgaggtccacactggggcaaggtgcagatgggacctgggtcctgagcctcctggaggccgacgctctgccgtggatcatgaatagcattcccgcgtgagtctttttttgacacagcctccccgacgtccttcgagacctggtctgctagacaggaacagaaaatagctggacagggaggttggggtacatgttagatgatttttggcagtattgttcctgttacttttcatatccatctgacacttcttatttcac

SEQ ID NO: 30378 - DNA, 69 bp, Homo sapiens
  chr8:41643317-41643386
  hypo
cgtccattgctcctcggtgctttccagaccctttaaacaccctggcggagccttgctcggcccttctgg

SEQ ID NO: 30379 - DNA, 207 bp, Homo sapiens
  chr8:49241546-49241753
  hypo
cggccgggtgcagattaccagttcctgggccccacccagccgggaaagcctgaggtccttgctcagtgactggactcacgggcttctccggtggtggagggcctggcccgggcgtaaatgtctgaggggcttactggacggcctgggagtgcagccactcagccccctcgggacaccgaggctggggattcgcagccctgcagggac

SEQ ID NO: 30380 - DNA, 69 bp, Homo sapiens
  chr8:49334914-49334983
  hypo
cggagtctgctctgagacccagggaccgtgcgttctgcagggaagctggcgcatgcccttaggttctgc

SEQ ID NO: 30381 - DNA, 201 bp, Homo sapiens
  chr8:49339738-49339939
  hypo
cgtgcctctgtgcgggtggcacctgccctatttgtgctcttcgttgtttgctactgggatcagtggcttacgacgaacagcccatggccctggggcctcctgcactgccgtctcctgggagaaaggccgctctcacagccagccatgtgcacatcatcccattggtacccacagatggcactggccccttccttcaaaccc

SEQ ID NO: 30382 - DNA, 32 bp, Homo sapiens
  chr8:49382262-49382294
  hypo
cgggaaaagtagacgtcaatcaggtggaaaag

SEQ ID NO: 30383 - DNA, 439 bp, Homo sapiens
  chr8:49382383-49382822
  hypo
ggacagtgctgggcacggcggctgtgggcagtgtgggccgacagaatccccaggccaggtcaggtgtcccggccatccatggagaacaaggagtcattacagaggctcggtggcacacggtgaaaatgaggttcttctgggaaattttaggctgcaggatgtgagtggcccacagcagggaaggtctggcaggcagcgagagcttccggactggaccccaagaaggaggtcaggctgggaacacagactcggaggttcccatccacagatggtaccgaggctactgtgtcgggtcagatcttccaggagaccggaggagggacgtggctgcgggaagcaagcccagagccgccagcccgggaccagcgggaggccagggagcaaggccacagcagaggcagccaggaccccaaatatcagaggctcaaatgaagttgac

SEQ ID NO: 30384 - DNA, 97 bp, Homo sapiens
  chr8:49390203-49390300
  hypo
cggacactcactacagcccggtgcctgcggagtattccgaacgcgagatccaaggaaaccacgaaggctcctctgcgggctcccttgcccctctgcg

SEQ ID NO: 30385 - DNA, 52 bp, Homo sapiens
  chr8:49390625-49390677
  hypo
gccctggagaccaggccaagggaagccttggagtgaacctggtcgcaggtgc

SEQ ID NO: 30386 - DNA, 211 bp, Homo sapiens
  chr8:49808471-49808682
  hypo
cgaagcactatatgagactataaatggaattaatttttgtgaaaacaagaaaaggagtccccgaattaattactgctgtaagattgagcttgagaatttgtcttacaaaatcttttaataatgtattattctactcacaaaacagatattggttttgtgcctagtatgttccctgaggtgtacagggaacctcaaggagctcccagactat

SEQ ID NO: 30387 - DNA, 206 bp, Homo sapiens
  chr8:56364032-56364238
  hypo
cgagtctgcctggaactggcctggagaaggtgcgttctgggccttaaagagtccgactacacctatgccgtacaggcccccagaatgcagcagtactgccttggaccgccggatgcgccagcagacaacggtgaagcggttctggcggtagcagtaggacacgcgctgcagggcgttgtcctggacactctggggcacgatcagca

SEQ ID NO: 30388 - DNA, 159 bp, Homo sapiens
  chr8:56364333-56364492
  hypo
cccaggccaaggcactgatagtcgcggcagcaagccctttccaccaggaggctgctcatggtcatgccgtccgagggcttcaaggctgaggacggggtcagtgtgctgggctccagctcttccgacactgagatctcctcctcctggtcctcagagggc

SEQ ID NO: 30389 - DNA, 166 bp, Homo sapiens
  chr8:8651879-8652045
  hypo
cgatccccccaaatctcccgcttccaatccactgtcaaccacccatgaatgggaccttccccggagcctggcccggcctccacatgagtttgtttttgtccatgtgttcatggatgtaaactgtgggtgcttaaggcggtgaaggtgggggaacactgggcagctc

SEQ ID NO: 30390 - DNA, 110 bp, Homo sapiens
  chr8:8680452-8680562
  hypo
cgacaggctggtggcgggaagggagggtaacagagccaggcatgggatcccgcacagaggacacagacagaagaccgggaaggagagacagagggacacaggacagtctc

SEQ ID NO: 30391 - DNA, 59 bp, Homo sapiens
  chr8:8680894-8680953
  hypo
cggggccccgcgctccgatcctggtgctgcgctaactccctgcaagttcccgaaacacc

SEQ ID NO: 30392 - DNA, 62 bp, Homo sapiens
  chr8:8681197-8681259
  hypo
cgtcttcagtctttgacacaggtaatgaacccacaggtcaccgagaagagcatcacctgcga

SEQ ID NO: 30393 - DNA, 377 bp, Homo sapiens
  chr8:972329-972706
  hypo
cggtcccgtgccgaggtagacactctaaacaccacccaccctccctgggagtggacagtcccgtgccaaggtagacgctccaaacagcacccaccctccctgggagtggacggtcccgtgccaaggtagacactccagccgccatccatcctccctgggattggacggtcccatgccgaggtagacactccagccgccacccatcctccctgggagtggacggtcacgtgccgaggtagacactccagccgccacccatcctccctgggagtggacactcccgtgcttaggtagatgctccaaacagcacccaccctccctgggagtggacggtcccgtgccgaggtagacgctccaaacagcacccaccctccctg

SEQ ID NO: 30394 - DNA, 107 bp, Homo sapiens
  chr9:100299592-100299699
  hypo
cgtgcgtgcctgtgtgtgcgggtatatgtacgtgtgtgtgcatgtgtgttgcctctgtgtgcacatctgaacaagcccacaaggttctaggcaggatggcttctcac

SEQ ID NO: 30395 - DNA, 181 bp, Homo sapiens
  chr9:109689799-109689980
  hypo
cggacggtcaaaggggtactcattcattatcagaagaagcaccgagacttcaaggccaatgcagatgtgatccggcagcatacggccaccattcgaagcctctgcgaccgaaatcagaagaagcctgccagctgcgtgcttgtctccccctctaatctggagcgggacaaaacgaaactcc

SEQ ID NO: 30396 - DNA, 250 bp, Homo sapiens
  chr9:109690731-109690981
  hypo
cgtctacaaatgcaggcattgcccatacatcaacacccgcatccacggcgtactgacccactaccagaagcgacacccgtccatcaaggtgaccgctgaggactttgtgcacgacgtagagcagtctgctgacatatcccagaatgacgtggaggagacgagcaggatcttcaagcaagggtatggcgcctaccggtgcaaactgtgtccgtacacacacggcactttggagaaactaaaaatccactac

SEQ ID NO: 30397 - DNA, 179 bp, Homo sapiens
  chr9:112040343-112040522
  hypo
cgagggatgcgaaggacagtcatgaggtcagagggtaggacactggtcggcccaacctcaaaggaagcggaattggactcagaggtggaaagaggaaaagttgttctgcccttctcccgggtccggtggacggagtgagagtctctggctgagaaatgagaaggaacccgggagggttc

SEQ ID NO: 30398 - DNA, 149 bp, Homo sapiens
  chr9:116708859-116709008
  hypo
cggccctgacccagcgtgtaattaccagtgcgaggtagggggcaagctgcgatgttaatcagcatcaccgctgaagagtgagtgtctgtgtgcgtcttttgcctcctctctgagaggggctgtgaaagtacccctcgcaggatgtagac

SEQ ID NO: 30399 - DNA, 127 bp, Homo sapiens
  chr9:116728180-116728307
  hypo
cgttggagaaggccttcgggctgtgtggtctggtggccactcatgagatgccgacttgcagcttgggattcggggaaggccttgaggcagaagacccatggtccaccccaggctggctctgcgactc

SEQ ID NO: 30400 - DNA, 121 bp, Homo sapiens
  chr9:116749805-116749926
  hypo
cgtttgtaaagcaggagcggggaagagcctggacaagatcccaagccttcttgcctaggaacgaagggaacagcactggatatcgcgtacatcaaagcacgaaacccttaccgcccaaagc

SEQ ID NO: 30401 - DNA, 280 bp, Homo sapiens
  chr9:116750660-116750940
  hypo
cgaggcctcgctgagtgccgagcaaggaacgatgacggaggtgaaggtgaagacagagctgcccgatgactacatccaggaggtgatctggcagggcgaggccaaggaggagaagaaggcggtcagcaaggatgggaccagcgacgtgcctgccgagatctgcgtggtgatcggcggcgtccgcaaccagcagacccttggtgagtgcccagcgtctgtggtcagggtggagaccagggtgggaacatggagtcagagtcctggggaaaagcggcctggc

SEQ ID NO: 30402 - DNA, 134 bp, Homo sapiens
  chr9:116761540-116761674
  hypo
cgaggggcaggcggggccctgggttttaggctgagctaggggcaggcggggccctgggttttaggctgagcgaggggcaggtggggccctgggctttaggctgagcgaggcgcaggcggggccctgggttttac

SEQ ID NO: 30403 - DNA, 244 bp, Homo sapiens
  chr9:116770596-116770840
  hypo
cggctgccgcctcctgcccgggcgcagtgtttagtgtggaaggggcccctgagaaccgggcaggtaagtccttggtgtctgcttgtcacctcccctgtccccggctgggctcctgagacctgggggaccagggtgctaagggccgtgtgttctcccacagaccccttcgaccaaggtgtcgtggccacggacgaggtgaaggaggagcccccggagccattccagaaaatcgggccaagtatgc

SEQ ID NO: 30404 - DNA, 299 bp, Homo sapiens
  chr9:116790949-116791248
  hypo
cgagaggccactcactctgccggctgggagggccctcggggactgagagcgtgaccctctcaggtactgcccccgggtgggagccaccggatgatccagacacgggctctgagtgttcacatccagaggtctccccatctccacgcttcgtggcagcgaagacccagacgaaccagtcggggaaaaaagctccggcctccgtggtccgatgtgccaccctcttacaccgcacccctccagccacccaaacccagacgttccgcactccaaattcgggatctccggcgagcaaggcaacc

SEQ ID NO: 30405 - DNA, 113 bp, Homo sapiens
  chr9:116796590-116796703
  hypo
cgccgggctggaaccgaggtctccagatgtgccctgtgctcccagccaagccatgctgcacccccatgcgtcccctgcccccagagctaatattcacaatcgggaacgatagc

SEQ ID NO: 30406 - DNA, 1421 bp, Homo sapiens
  chr9:116810967-116812388
  hypo
cgaaaaggagcggcagaacatcgcagagcggctgttgagggtcatgtgtgccgacctgggtgcactgagcgtggtcagcgggaaggagttcctgaagttggcccagaccttagtagacagtggtgcccgctatggggccttctcggtcactgaaatcctgggcaacttcaacacgctggcgctgaagcacctgccacgcatgtacaaccaggtgaaggtgaaagtgacctgtgccttgggcagcaatgcctgcctaggcatcggtgtcacctgccactcccagagtgttggccctgactcctgctacatcctcacagcctaccaggccgagggcaaccacatcaagagctatgtgcttggtgtgaagggtgcggacattcgcgacagcggtgaccttgtgcaccactgggtgcagaacgtgctgtcggagttcgtgatgtcggagatcaggacagtgtacgtgacggattgccgggtgagcacgtccgccttctccaaggccggcatgtgccttcgctgctcagcctgtgccttgaactcggtggtgcagagcgtgctgagcaagcggacactgcaggcccgcagcatgcacgaggtcatcgagctgctcaacgtgtgcgaggacctggcgggctccacgggcctggccaaggagaccttcgggtcgctggaggagacgtctccaccaccctgctggaactcggtgacggactcactgttgctggtgcatgagcgctatgagcagatctgcgagttctacagccgggccaagaagatgaacctcatccagagcctcaacaagcacctgctcagcaacctggcggccatcctgacgccggtgaagcaggcagtcatcgagctgagcaacgagagccagcccaccctgcagctggtgctgcccacctacgtcaggctggagaagctgttcacggccaaggccaacgacgcaggcactgtcagcaagctctgccacctcttcctggaggcgctcaaggagaacttcaaggtgcacccggcccacaaggtggccatgatcctggacccgcagcagaagctgcggcctgtgccaccctaccagcacgaggagatcatcggcaaggtctgtgagctcatcaacgaggtgaaggagtcctgggccgaggaggccgacttcgagcccgctgccaagaagccccgctctgctgccgtcgagaaccccgcagctcaggaagatgatcggctaggcaaaaatgaagtgtacgattacctgcaggagcccctcttccaggctacccctgatctcttccagtactggtcgtgcgttacccaaaagcacacaaaactcgccaagctcgccttctggctcctggcggttccggccgtgggcgccagaagcgggtgtgtaaatatgtgtgaacaagcgcttctaatcaaacggaggc

SEQ ID NO: 30407 - DNA, 390 bp, Homo sapiens
  chr9:116813618-116814008
  hypo
cgttggggaggattcacgggttccacagctgcggggtttggtggccgtaggggaagcagtggtttgggagttctgaatgtaagcgccagagctgccctcctggtccgctgtgcgtggtacccagtgtgcatcacactactcaccccctcccggaccctggcagtccacagcgactccgaagtcagcccatagtcacatccaccacacctcagacctgccacagcctctcctcacttcccaggaccctgaggcttccaggagctctgctgcccacagccctcggggtcctcactcacacctccgacttccaggacggcagtgagcatggtgccttgtggccccaacagttgatgttccgagggtgggatggtgtttggccatgttcgactc

SEQ ID NO: 30408 - DNA, 216 bp, Homo sapiens
  chr9:116857267-116857483
  hypo
cgcctgtccctcagcttgtgcctgcctatactcaccttgggggcctgtggtcgggtggtgacccgctgagctcggcttgcatatcgcagggtgctgagagtctcaggaaggcactgggctgagggggacacgcaggccacctggggagtgcactccccctgagcgctcctctctgagggccccttcctcaagacccaaccttccctgccaggcccc

SEQ ID NO: 30409 - DNA, 404 bp, Homo sapiens
  chr9:116971577-116971981
  hypo
cgggcacctaccagcatccctgggggtgggcagggcttggtgccgtgctagcatctaacccagccgcgagcttccttctgcaggtcctggagccctggcgtggggcgggcctcctgccggcgagcgcctgcgcccttccctggcgtgagggtatgtgcctttggactacatcgtggaagccagcaccatgcagtccatgggcatatacacttgcctcaaggcctatgtcatcgaggagccaccggagctgccactgccaccagggaggaagaggaggagccgggatgtgggatggcagtggtgggtgggctgcggcaggttgggccagccacacctcactgcttgaccgctctgaccccctttcttctctttcctagggctacattgggctcccagggctcttc

SEQ ID NO: 30410 - DNA, 124 bp, Homo sapiens
  chr9:117045899-117046023
  hypo
cggagcggggctggagcctgcagggagactgctgtgtccccgctgtgagagccacactccataccaacgagggtctcctcctcttgtagggtgctccgggacgcatgggggcccaaggagaacc

SEQ ID NO: 30411 - DNA, 250 bp, Homo sapiens
  chr9:124289769-124290019
  hypo
cgcagcggcagctgcccaatccgtggctgtggacccaggcatttctgtactctcgggggcctgggaagacacccccttcccccgcaggcttggaagttcctgctcccgttgcctggcctctccttgatcttggagtgaggttggggctgagcccaggcgctgtcacagcccggccgggtgtgggtacacttggtgcagtgctgacacacaagccgcctgccacctcagccccttccagactttgaacacc

SEQ ID NO: 30412 - DNA, 380 bp, Homo sapiens
  chr9:129455261-129455641
  hypo
cgggagggaaggagatcttatcctgggccactggggagccacggcaggtgtcaacagaggggacaggctcccatcgggcagcaggttgccgaaggggacaaggctgaggcctgggctgcccccgccccttcatcacaggccgggttgtgtcccccacagtgaagagcgaggatgaagatggggacatgaagccggccaaggggcagggcagtcagagcaagggcagcggggatgacgggaaggacccgcggaggcccaagcgaccccggaccatcctcaccacgcagcagcgaagagccttcaaggcctccttcgaggtctcgtcgaagccttgccgaaaggtgaggggcggccggggggcggggctcaggctgatgccc

SEQ ID NO: 30413 - DNA, 275 bp, Homo sapiens
  chr9:129458627-129458902
  hypo
cgactgcttcctcggctcctcagacgtgggctccctgcaggcccgcgtggggaaccccatcgaccggctctactccatgcagagttcctacttcgcctcctgagagccagccaggcgcacggacgcttgggcaggggcctgggggggactgccagcctctgcggccagcctggccacccccgccctgctctccgcacagactacagacagccatacggtgccctcccctcggccagctgggcctgaccactgtgcccgttgggtacagccagacc

SEQ ID NO: 30414 - DNA, 233 bp, Homo sapiens
  chr9:130907031-130907264
  hypo
cggaacctattaccctgccccctgggctgggcacgctcctggactgtcctgggctctcgggagaaccagctttcaggagagccagaccggtcctctcacccagccacctctgatggtgccagcggaggcccagccaaggacctggagagcagggagcacgggagcatgtggggtaacgcaggggtggccgcagtggagatgcccctttcctggggtgctgggggctgcagtcc

SEQ ID NO: 30415 - DNA, 294 bp, Homo sapiens
  chr9:132501760-132502054
  hypo
cgcgcagcaggctgccaggaaaccaggactcagggcccaccacaatctggaaggaacatcaagtccccaggtatagccacggcggctcttggcccatggtctggtggccaaggaggcatcagctgctggtcacaggtggcgggccgcttcccagaggatctgcagagccatggaggcgcaggggagctgggccagggtgtaggtcacggagcggatgggtgcccgcagcttccccaggtaggccacggtgtgtgccacacggcccacgaggaagaccaggaagtgcatccaggc

SEQ ID NO: 30416 - DNA, 113 bp, Homo sapiens
  chr9:133300407-133300520
  hypo
cgatgacccaggtggcccggggtctggatcccgatggcctcctgctcctcgacgtggtggtcaatggcgttgtccccgagagcctggctgacgcagatcttcaagtgcaggtc

SEQ ID NO: 30417 - DNA, 64 bp, Homo sapiens
  chr9:133799052-133799116
  hypo
cggaatgcccgggttcaggtacacagcctcacggtccccggtgcctgccctgccgcccgcccag

SEQ ID NO: 30418 - DNA, 399 bp, Homo sapiens
  chr9:133799196-133799595
  hypo
aaagacagagtagacgccatcgtcctgctgtccgcttaggaggacgtccagacagtctcggggccgggagcctgagggaggcaaggctgtcagggtggctgcggccccagcacgttcctgcccagccccctggccaaactgtctgtccatcgataatgcatgtggggtcccatggggttgagagagcactggccttggagtccgaccttggctctgccactccctgctgtggctgggtgagagaatcaccctctctgggacttactctcctcatctggagaatggaccgagagggcttcagcgcaggccacatggaagtagggtcgggccctggagtctcatggctggggaaccctcaccccaacttccccgctccccagagctgggacccgaggcacc

SEQ ID NO: 30419 - DNA, 33 bp, Homo sapiens
  chr9:135865230-135865263
  hypo
cagttctgcggcaagcgtttccaccagaagtcc

SEQ ID NO: 30420 - DNA, 381 bp, Homo sapiens
  chr9:136372653-136373034
  hypo
cgggtctcccagcagcgcccgcactgggcagcctttctgacccagcgcctcactcccccaatcccccgcgatggctcagttctgggtctgcctcccccatcagtctgtgcaccatcggaaggcagagcccaggtctgctggacttgtgtgactccttggggttgggaaagctgtgcggcacatggagacactcaggaaggggcgacgtttaaactgggccctgggaccgagccccctgtttcctgctgtttcaggtcaagcgttggggcggcacagcaagaccagggcagagctggtgatatgacacagggcacgattcacccgagatggttggaggggaagggtcacccgtcagtactttcacacgcaaggccacgccac

SEQ ID NO: 30421 - DNA, 321 bp, Homo sapiens
  chr9:136380597-136380918
  hypo
cgctgggcttggtacctcaaagaagaagcgtagcatcagggccagcgccccgaagcagaggccggggcctatctgctgggtgtagacgctcttgtctgggtacaggcccttcttctccttcatcttctgtagctgtgaggacaggaggccacagcaaagcttttaggtcacagcactggggaacgcccctccccaaaccagcccgagagctggccctgcacaggctcaccccagccctctcccggcaggagaggaggctcaggagcctcctgccgcacccagcctcagatggcttctgctggacagggcccttcacggtgc

SEQ ID NO: 30422 - DNA, 115 bp, Homo sapiens
  chr9:136384021-136384136
  hypo
ctgtgccgatggggcccgagtacaccccgtagccccatcggtcatggtagatccgcacagcaatggtcaggacgccgaacatcacaaatgttgacctcttgggttcgtcgaagtc

SEQ ID NO: 30423 - DNA, 574 bp, Homo sapiens
  chr9:136385211-136385785
  hypo
cgggactggtttgaggctgggtgtgcggacactggggagccggtccttgtccgcaaggcttgtctgcaggggttgaccactcacccatcagcgagacccacatgctcagggctgtcccgtagacactgaaatactccaggatgtcgtgacgcatgaagcacagcacagacaagccgggtccattgcaggcatggtggagctgccagaaaacccacaggtggtcacagcacaaagaggccagagctggtccccgagccacggcccccagagtgccaggtcacttgctggctgtgagaagtcactttggcgagtcacttaatgactgtgtgcctcagtctccccgtctgaaaaatgggggtactgccgagcactcccgcagagggtcctgtggggattaagtggcacatgccagcgaggtgtttaggggctggggtgtgccaagggttcactcaatgtcacctcagcagaattcgctcatctgcactggcaggactgggcggagactgagtggtcactcaggtgaagcccgcttaggtggggcggtctccgggagggaccctacacggctctcccc

SEQ ID NO: 30424 - DNA, 146 bp, Homo sapiens
  chr9:136393635-136393781
  hypo
cggcagcagccctcctctgcccagcagatggcaggccccagtgggctccagcgggctggtcctgggccacgctggggagcagggccgccctgcactccccttccctcacccccacagccgcaggagcgcccctgctttatagaggc

SEQ ID NO: 30425 - DNA, 313 bp, Homo sapiens
  chr9:136397028-136397341
  hypo
cgacagctcgggccacgtccttaaactcccgagcctgctgtggccactttgctgtgaggacaggccctgctcccactgcggcagcctaacatcctccccagggaacctccaaagtggtcagccacggcccaccagcccctctgcctcaagcctgcttctctatccccgccgtgttttccctggaaccccaccctcccgggcatcccccacacatattcctgctgtcctatttctaagctcctcagatatctggaaaacactggcggagaaaatccccttcttttttttctctctctttttttctttttgagac

SEQ ID NO: 30426 - DNA, 643 bp, Homo sapiens
  chr9:136402186-136402829
  hypo
cggccagggtaggctgtgtcctgcagaacgcagttgggccctgagctgctccggggaaagtgaggacagttagatgcggccccaggagcttgccaagcccccaggccatcctggaccttaaggtcaaggaggacccgtggcccacggttccttgggagttccccccagcgccacccaggagatctgaacccaagctgccgagtgaccctgcaagggggcccagccagggggctgtgtcttctggtcccgctgacggtgataccctcgggcatggggtgggggcaggctggtcctcctgggcacttgagccctctaccatctgggggtccctctcacccaggacaacagcccaacatccaatagcctggaggggggcaccgacgccacggccttctggtggggggagtggaccaagtggacggcgtgttcccgcagttgcgggggtggggtgacatcccaggagcggcactgcctgcagcagaggtgcgaggttgggcacgtggccctgaggggatggcatgagggcagggtagcgggcaggagagggcggttggctcttcagcctggtggcttctccccctgggagggctctcgggttgggggcagcacaggctgagtccccccatcagcctctgctggacgc

SEQ ID NO: 30427 - DNA, 188 bp, Homo sapiens
  chr9:136508536-136508724
  hypo
cgagcccatcgtcaccaagggcaatgaggcccttgtccaccacatggaagtcttccagtgcgcccccgagatggacagcgtcccccacttcagcgggccctgcgactccaagatgaaacccgaccgcctcaactactgccgccacgtgctggccgcctgggccctgggtgccaaggtgcgtgccctgc

SEQ ID NO: 30428 - DNA, 51 bp, Homo sapiens
  chr9:137623301-137623352
  hypo
cgtttgcgaggcaaccctgcgccttcctctccctctgcagccagctccgcc

SEQ ID NO: 30429 - DNA, 153 bp, Homo sapiens
  chr9:137623543-137623696
  hypo
tggggggctggtggggcatcatgggggctcctgcccaagagcctcctcaggggtgggcctctacgggcagctcaagtgttacaccctattcccaaaactttatttttaaagagacctcggtgcctcgaatttgctctgaataacgtgtgtatc

SEQ ID NO: 30430 - DNA, 473 bp, Homo sapiens
  chr9:137642188-137642661
  hypo
cgatcctcagcccacagccgtgcccctcccttctccgggtgggggtttctgaaacattcctgccacggggtctcacagcttctgtgcgtgtccagtgcatttcccgggtgggccgcttctccgacgccctcattctcgctgcagcccagccctggcctggttgcactctgacttgtctctcttggccccttgtcttcagggcccccctggacgcccaggccttcctggggccgatggcctgcccggtcctccaggaaccatgctcatgctgcccgtgagtacccttatcagtcggaggtggggaggcagctggggcaggtgggatccaaaccagaccctctgaggctgcgctgtcactggagaggcctgtgggccccgtctcagtctgtggtcttgcctgggtgccacgtcactgctcccagagtgacccttgtcttacacttgcagttccggtttggaggtggcggcgatgc

SEQ ID NO: 30431 - DNA, 305 bp, Homo sapiens
  chr9:137645508-137645813
  hypo
cggctcctggaaagtcatcgttcttccccccggttctgttcgaggcagacaggtcgcgctttgtgtgctgagcaccgtggccgaagccctgtcccctccccctgcccctcccctgccacccccagcccttcctgtgttctcgagtccccacctcgagcagacattaacacacaccatgtctccctagggtccccctgggagcggaggtttgaagggcgagccgggagacgtggggcctcaggtatgtgggatccttgccttcgctgtctggtgggcgcctcccgttctccggcggcagcgacggc

SEQ ID NO: 30432 - DNA, 163 bp, Homo sapiens
  chr9:137646079-137646242
  hypo
cggactcgccactgaccctttgtctcttacccctggcagggtcctcgaggtgtgcaaggcccgcctggtccggccgggaagcccggaagacgggtgagtggtgcgagtgtgtgtggtttagtgacagcagcttgggcgctggaggagcccaaatctggggtgc

SEQ ID NO: 30433 - DNA, 191 bp, Homo sapiens
  chr9:137648346-137648537
  hypo
cgtgatccccctttgacagtctgggatgacgtggtccggaaagaccagccccgtgtgttccatccgttggtgtgaggcacagaacagccccgcccgggctcctggatctgggtcctcgcagcagcccggccactcgggctgtgaccttgggggtgggcgcggctctggtggaacgctcaacttggtttaac

SEQ ID NO: 30434 - DNA, 1004 bp, Homo sapiens
  chr9:138011461-138012465
  hypo
cgggcacggggcaggtggtctacaacggttctatctacttcaacaagttccagagccacatcatcatcaggtttgacctgaagacagagaccatcctcaagacccgcagcctggactatgccggttacaacaacatgtaccactacgcctggggtggccactcggacatcgacctcatggtggacgagagcgggctgtgggccgtgtacgccaccaaccagaacgctggcaacatcgtggtcagtaggctggaccccgtgtccctgcagaccctgcagacctggaacacgagctaccccaagcgcagcgccggggaggccttcatcatctgcggcacgctgtacgtcaccaacggctactcagggggtaccaaggtccactatgcataccagaccaatgcctccacctatgaatacatcgacatcccattccagaacaaatactcccacatctccatgctggactacaaccccaaggaccgggccctgtatgcctggaacaacggccaccagatcctctacaacgtgaccctcttccacgtcatccgctccgacgagttgtagctccctcctcctggaagccaagggcccacgtcctcaccacaaagggactcctgtgaaactgctgccaaaaagataccaataacactaacaataccgatcttgaaaaatcatcagcagtgcggattctgacatcgagggatggcattacctccgtgtttctccctttcgagccggcgggccacagacgtcggaagaaactcccgtatttgcagctggaactgcagcccacggcgccccggttttcctccccgccctgtccctctctggtcaaacaacatactaaagaggcgaggcaatgactgttggccagttctcaccggggaaaaacccactgttaggatggcatgaacatttccttagatcgtggtcagctccgaggaatgtggcgtccaggctctttgagagccatgggctgcacccggccgtaggctagtgtaactc

SEQ ID NO: 30435 - DNA, 335 bp, Homo sapiens
  chr9:138143914-138144249
  hypo
cggctgttcacatacccacagcccaggtgcacacacgtgcacacacggaaaatagctcatgcatggacacgcaaatgcgcacccagaacaacacacttcacacgcgttcctagacaccctcacatgcctgcgcacctgcccatgtgcccgtgacatgcatgtgcccgtcttacacacgcacacatacacatttgaacacgcacgctttcacacgtgcagtcacacacctgcctacgcacacctatgtgcccgtgacacagatgcacacgtacgcaacataggcacacgctcacctacgcctccacatggccaaccctggcctcagctccttcacc

SEQ ID NO: 30436 - DNA, 172 bp, Homo sapiens
  chr9:138247974-138248146
  hypo
cgggatggacgctcagacccttgcaaggcagcactgacgggagccacggcggagcaatggcctcgatagtgaccgggcactgacgggagccacggcggagcaacggcctcgatagtgacctggcactgacgggagccacggcggagcaacggcctcgatagtgaccgggcac

SEQ ID NO: 30437 - DNA, 79 bp, Homo sapiens
  chr9:138265272-138265351
  hypo
ttagagtctgacctgagtccatttgtactggcagcttccacaacacccactgagacccacgccaacgcgccccgcccac

SEQ ID NO: 30438 - DNA, 323 bp, Homo sapiens
  chr9:138662685-138663008
  hypo
ccggtgcctctgcccaggtatggcgtgtgcctcatcgggctgaagcgggaggacaacaagagcatcctgctgaacccggggccccggcacatcctggccgcctctgacacctgcttctacatcaacatcaccaaggaggagaactcggccttcatcttcaagcaggaggagaagcggaagaagagggccttctcggggcaggggctgcacgagggtccggcccgcctgcccgtgcacagcatcatcgcctccatgggtgagccgggacaggcgcgcgggactccctgggcctgctcctttggcgggagaccaggcgggacacc

SEQ ID NO: 30439 - DNA, 134 bp, Homo sapiens
  chr9:138663353-138663487
  hypo
cggttggcagctcaaccggaggctcctggtggtcccatcagcccggagggtctgcttcacgtgtgtccctcaaacagtcgggagtcctgacgtccactggggccaggagttggcggaatgaggtcgcagtggcc

SEQ ID NO: 30440 - DNA, 142 bp, Homo sapiens
  chr9:138670510-138670652
  hypo
cgggccctcggtcccgccaccagcctggacagcctgctgcagtgtggcatcatctatgcggacaacctggtggtggtggacaaggagagcaccatgagcgccgaggaggactacatggcggacgccaagaccatcgtcaacg

SEQ ID NO: 30441 - DNA, 33 bp, Homo sapiens
  chr9:138670778-138670811
  hypo
acagccacgaccacgggccctcgccctgagacc

SEQ ID NO: 30442 - DNA, 180 bp, Homo sapiens
  chr9:138873235-138873415
  hypo
cgcaggttgtcgcaggacacgtgttcgtgtccaggtgcgctgggaagggtcctggcggtgctcctctcagcgcaggtcccgaggagctacaggcatgacgctgccttcagaactcccccgagcctgctccttcccagccttggctcgtgaggctcctccgaggaccacgggccttccacg

SEQ ID NO: 30443 - DNA, 538 bp, Homo sapiens
  chr9:138877542-138878080
  hypo
cgctctgctcacgtgttggttgggactcgggtgaacacgaggcagcggaggcaatcagaaaggacgcgctgagggctgcgcttacccccatctctctttccctggggtaggccccttcctcctgctcctcctgaatgctggcacctgcgcagccctctgccatgactccagagccaacccatgctcacaacctccacgtgctgcccccagctggcctgggcactcggcctccccctctcctaggtccagagaacgggtctgaaagcctgtgggggccaacagcagcggcctgttccccaacctgcacctccagcccaggctgtcctcctcatcctgcgttcccgggcctggtgtggagctggacacgtcccgaatgtccctgtgtccctgcgcaggcatcaggtctgaaatgccatcggtgcttcaggctctcgtgtccgcgtggccggcaggatgcttcttctgaagtggaccgagagccgttcactcgtgccaaggggtgtttgagaacggagccaagtgcagggcctgcaggggc

SEQ ID NO: 30444 - DNA, 485 bp, Homo sapiens
  chr9:139028149-139028634
  hypo
cggggttatttatgaattcatctatttcctgggacaagccattctgcatttggttaccatggtagctttaaacccggtatcttattaattctgcatgttatgaaataaatatagatcagacaattgcagtgatggttctatctttttattatgcatttggttcttggtgccggggatgggatgctcccaacacaccaccgtcaacacacatccatcagcctcgggggcctgggcgggctgcaggggcgcactcctgcgcctgagaatggagtggggctgaggaggggacacgaggctgtctcagggaaagggtgaagcttgaagaccccccagggcaccggcagctcctgaaggaattcctacagcccggcagggatggacgcaccggggaaggaggccggtgtcctggggtgcttcggctggaattgcagggccagtgggttggaatggctcccacctgcggactgggacctcgtggcgctgcc

SEQ ID NO: 30445 - DNA, 93 bp, Homo sapiens
  chr9:139079359-139079452
  hypo
cgcaggatgcgctgagaacgatggccccttcgctgcagcgtgagaaactcaacgtcacccaaccaggacagggagggaggaagaccgggggcc

SEQ ID NO: 30446 - DNA, 653 bp, Homo sapiens
  chr9:139586531-139587184
  hypo
cgggggcaggggggcctgggctgcagtcggctcctccttcacccttcccccaaatacctccagagcacctatttccccagtttccccaccggcagtggtgtccaggggcttggctcttgcagggtggccctggctctggccctgcgccctgcccatgatgtggtcggaagggcctttggcagcaccggtccaagccttagcaaacccaactgggggctcagagccgccccccaatttcgggagcgacttcacctttccacaggatcatcctcttggcaagatgaggctgaggccgggggttcggggctcagcatcgaaagccggggcctgggtgccacaggccgtgacctcttccaccaaatgagagaaacggcaagacctccaggaagggccgtcggagcccagacgaggctgcagcttcctttggtgaagcgtccgagggccggctctggcgcctacaggggcttccgacgctgggtccttctcaggctgagcgccgcactcccacggccacccgggtggtgcacacagtttccagggtgtccaggcagcccccagtggacctggtgtccacgtcctcctctgaaccatgccaggcctgggccgtgggcatccgtgctgccgtgtggggcaggggcctgtgtcctggggcc

SEQ ID NO: 30447 - DNA, 781 bp, Homo sapiens
  chr9:140937919-140938700
  hypo
cgcatcgaggcccctcagcgcggcagaggggtccacagccacgggtgctgggctcggtgttgttgccaacgttggtgcagcaagaggtgaggaagggtccgttagcgtctctgcggcagatggtggtcctggctgtcgtgcgccacggtcatgtacgtgaagcactgttcttagctgcttgcccatccctggtgggcctgtgaggacctgacgcaagtgccgggggcatgggagctgggagggagccacgcaacgtgggcttcatgtgcactacaccccttactcgggggccctgtgtccttgtaggtggtaacgtggacctggaaagccaagcagaggggaagaaggaggtggaagcggatgacgtgatgaggagcggcccccggcctatcgtcccatacagctccatgttctgtttaagccccaccaacctgtgagtctccttgcctgctggtgtgtgtggccgcccactcacccatgcatcatgacccgtgggatctcagtagccagcgtgcactgattctgcgcacttatgtagagaaacggctctaaatcccatggcagaccccagaggcacgtgcccgtgtgacctcattctgcagaagaggacacgggcacaggaggcagcctcagcggagctggggtgagctccaggcctgggctcctcacctcctctgtggtgtgcgtgtgtctctgcacacagggacgccgtctgccctgtgtcgcaaacacacttccatccatctgccttcccatcacacctggcacctgtgttgcctgc

SEQ ID NO: 30448 - DNA, 259 bp, Homo sapiens
  chr9:140970069-140970328
  hypo
cggcacatgtgtagctacggagagggcgtctatactgggaatgcacactggcctctcccgggtgggagttctctggtgtggggcagtcgcccatctcacgtggggtccttgtacggctcgcacgccctctctggctcggtccacctggcgcggctcctgcagacccagcagggtccgtgccattgctcttctccattgcaggtgtttgggaatattgccctggatgatgacaccagcatcaaccgccacaacaacttcc

SEQ ID NO: 30449 - DNA, 200 bp, Homo sapiens
  chr9:2876419-2876619
  hypo
cgggcatggtgctgccgtgggcgctcgggccttgggcgtctggctctgtctctgactccagacctcaaacagggaccgccttctctgtgctttctccgtgtctcctgtgcgccctggcctctgcgtcacagcccgcggctgggccgaatccttccagagtcccacaatgctattataacagccgggaatcatttgaaaac

SEQ ID NO: 30450 - DNA, 715 bp, Homo sapiens
  chr9:2933129-2933844
  hypo
cgctgccatgacgccggctgcagtggggtacaggagtaggtcgcgggtcctcaggtacagactctgaggtgtgcagcccctggagcctgcacctaggagcgcccccggaacctgctgccctgagaactcacccctgggagccccgggaatagggctgggcccagccaccccctggagggagagtagggaggtgaggcacagaaaatgggcagagagggtccccaagacagaactgggcccagggcggtgccgcgcttgcacgcggagcatgggggccgggcccgagacatggaactggggccccgcttcaggggcccagggcaagaagtgggagcggcacccacttcgaggacctgcccagtggcatgaccactgcgcccaacccgccgatggcgccaagttcctgcgcctcaggaagaggctccgtatggggccgcctgaggccgtatccccaggacctgccccacattaaggtgaccgctaagccagacaatcctgatggtgaggccccgtgcctgccatctgctcctggagacgccccccaaccccaggcatggccgtcagccggcgaggcggtactgaggcagggggcgcgtcctggtcattggagagtttcagcccagtgggtgaaccagacacactgttcaagggggcagcggttagtaagcaggacgagggggagccccaggccgcagggagaactcgtgacaacgtc

SEQ ID NO: 30451 - DNA, 98 bp, Homo sapiens
  chr9:2933873-2933971
  hypo
agtgaggacatgaagcccccgcctcaggctgcaaggaggcgccaccagggctgcaagctccacggagctggtgggacctggagacaggcgagaacccc

SEQ ID NO: 30452 - DNA, 224 bp, Homo sapiens
  chr9:37928524-37928748
  hypo
cgctgctaaataccctacgacgcacagcacagcccccacaacaaagaataatgtagcccagcttcccacagtgcctaggctaaagccacaccactcgctagacggccagtgcctcaaattctgcatccacaacatgggaataaccagagtccacccttgctgctgtggtgaggggcagatgagaacctccacatgaagtgtgaacgtctgacgaatcccggctc

SEQ ID NO: 30453 - DNA, 360 bp, Homo sapiens
  chr9:37950454-37950814
  hypo
cggtaaaactgcagggaaagaataaagatcctcactgcccatgagtggacacactcaaaatacattcctgtttacatgatggtctctgcgcggtagtggagggggtgagactcagccaggagaggcagaggcacggggcggtactgtggttggagtgtgctttgtccacagagacatggatgctgctccgaatggtggctctgctgcctgctggccaggcaagccactgaccaggcggcttctattaagcgaggatcatgccaacctctcttgggttgtgggaatgtaacaagtggccccgcaggaagggccaatgtagagcctgatgtggggcgagtcttaaccgacggcagctgcagc

SEQ ID NO: 30454 - DNA, 233 bp, Homo sapiens
  chr9:76089552-76089785
  hypo
cgcatcagcgactgctgcatacctctcgtacagggtccaccctccggccacatcccctgtggaccagcacctccgcaggaagcgctctagggcagggttgcccacagactggatcttgctgcggtcgagacggacctgggcttccgggcgcccatcggagcctgcggtgggagtgatggtaccgagtccctcgccagcctctggtaagactctcaggatcacaatccgggccc

SEQ ID NO: 30455 - DNA, 110 bp, Homo sapiens
  chr9:80475592-80475702
  hypo
cgcccgcagctcactggtccatggcgcgggatgttcgggaccccttccataacacactgaacagtccccacaggactggaaggcagagcatttatttccctggctcttcc

SEQ ID NO: 30456 - DNA, 152 bp, Homo sapiens
  chr9:92227900-92228052
  hypo
cggggccttggacgtgctggtccagctgcgtgaactgcatgttttcttgaacggcgactctgcttgcaggtggaatgcatggagtgcacgggcgtctgcctagagaggagatgtgggggctgggcatggaggtagccgaggagtcagcctgc

SEQ ID NO: 30457 - DNA, 205 bp, Homo sapiens
  AEKP01149809.1_1-6354:1345-1550
  hypo
cgtcccgggtacaacaccgtcctgcgtacagagccgtcccggatacagagccgtcctgggtacagagccttcacgggtacagaactgtcctggacacagagccgtcccaggtacagagccgtcccgggtacagagccgtcccgggtacaacaccatcctgcgtacagagccgtcctggatacagagccatcccggatacagagcc

SEQ ID NO: 30458 - DNA, 372 bp, Homo sapiens
  chr1:1024267-1024639
  hypo
cgctcagtcctaccagggtggagctgcgctctcccagcactgggggcagcctctgtctcccggcatctcctggcacagggctcgggcgacttcagcgaggctctgtctgagagtctctgccccggaggccgaagaacggagtccacggcagggagccaaacaccagcgcagcactgtccccagaagtgcccgctgcctccccgagcggagacgtgacctggcttggggccgcacgcagggggaagcgtatccaacaccgcaggcccggcccctccccacgcgcgccagacggtccccaccctgcgcctgtgcatggggccacctcggcccttggacttcacgacccgctggcctggcccctccatgggcacc

SEQ ID NO: 30459 - DNA, 229 bp, Homo sapiens
  chr1:110170726-110170955
  hypo
cgtcctgcatgaaccagaagcatctgctgcgcttcatcaagcgggcaatgaagcggcacctggaggagatcgtgcacgtggagcagggccgtgaacagacgctgcgggaggtctttgagagcatgaatctcacggcctacgacctgagtgtggacacgctggatgtgcatgcggtctgtgccagtggcgtgggctgtgggactgagtcagtcaggggaccaggagtcac

SEQ ID NO: 30460 - DNA, 140 bp, Homo sapiens
  chr1:110527029-110527169
  hyper
cgagccccggacatttcctaggaatcgctgtaggatgtgtcgtgtggggctctggtctttgctcccaaacacccctttcatgcgcctctgaggccttgccaggaaccccgcagcccaaagaccctccgttccgcagcatc

SEQ ID NO: 30461 - DNA, 365 bp, Homo sapiens
  chr1:110753530-110753895
  binary
cgccgccgccgcctcgtgttgaccgcaagcagcccgggcccacggagctccggctgccgtgagagtgtcggcctggccccggcagccgctcggaggacttgttgctgctgcgctgccgccgctgcggggaagccggctattccggggcttggtgcggtcttggagccggagggtggcccgtgtgagcgcgagcgccccggaccttcgcggtgcgcgtggactgtgcgcttcctcgtctttggtcggggtgaaggcgggggcgtgtccccggcccagagcgtttgtgtgtcccgtcgtagcgggggaccgcgtgtgtgcttgcttctacttccccgggtcctccctctctgcgcctccctctctcc

SEQ ID NO: 30462 - DNA, 47 bp, Homo sapiens
  chr1:110753957-110754004
  binary
cgtcctagggggataggcaggggcaagcccaagccgcagagggggcc

SEQ ID NO: 30463 - DNA, 243 bp, Homo sapiens
  chr1:110771992-110772235
  hypo
cgggctgcctaggcgagggaggcccttccctcaggaagcctctgcccagattcagtggtgactcccactggcggcacctggtgtcccttctgcgccccgagctgcagcatcgctctccacgctgcttcctctgcttctgcgacagttcttcttccctctccctctccctcaaactcccagccctgcctctgagtcacctgccattcccacccagcctctgcgctctgtattcctgccagaacc

SEQ ID NO: 30464 - DNA, 162 bp, Homo sapiens
  chr1:11131899-11132061
  hypo
cattagactgccttctccaaccaccaacgagacagctacagcacctccagcactccccaccaatctctctgcacagcacctgctgccatctgccaggatagatactgattgcccaccatccctcagcagaagggaagccccacaggggcttcattcatcgcc

SEQ ID NO: 30465 - DNA, 612 bp, Homo sapiens
  chr1:115212647-115213259
  hyper
cgggtatcactcgggtccgctccgtcccgcccccgcaggccctgccgaaggccccgtcccggctgcagccccaccccctagccccgccctccctggcaaggctcagttcttattggctcctattcccacccctcacgctatgcccgcctccgacaccgccccggccggcggtgaggggaaccaccacgcctcaagtccgctgtatggccagaaccttgccaggacctcggtcactgcagttccagcaggcgggcgaccagtgtcaccgtcgtccggccaagccctcgagccagagctccatcgccttcgcctgccgtcgcatcggccccacggagacggccctatgcttcatgtgaaggtttactcttcacaactactcaacaagataaagcctggcttaatcagggaatccaagcactgtttcctaggctgacctcagtgagcaaacaattgcactacggtgccaacttgaaacgtcaagagaagcaaataactctcgcggcacctcaggcttggaatctcagaacgggggtgccttgatactcccagtgcgtgaggtcagcccccacgccctgttgagacacacatgcctaagcgctccgcctgcaacac

SEQ ID NO: 30466 - DNA, 103 bp, Homo sapiens
  chr1:11596382-11596485
  hypo
cgcccgaacgcagcgccagtggcgtacgctggaggccgtgcggcacgtgggcgtggccatcgtctccagtgccctcaccacggtcatcgccacagtgcccctc

SEQ ID NO: 30467 - DNA, 367 bp, Homo sapiens
  chr1:11596583-11596950
  hypo
gctgggcatcatggcgcccagctctttcactcggacccggacttccttcctcaaggccctgggtgccgtgctgctggcaggggccctggggctgggtgcctgcctcgtgctcctgcagagcggctataagattcccctgcccgcaggggcctccctatagcccgggacgggctctggacacttgcacctttggtcccatgggtgggggacaggagctgcttcccagctcgacttcagctagctgtgtccccaggcctgggcccagggcgccctgcgggccagcgtggaggctgacacccacacagatggtgtggaccatgctgccttgtggagctgggagttggagacagccgccaccccacaggcc

SEQ ID NO: 30468 - DNA, 559 bp, Homo sapiens
  chr1:1160631-1161190
  hypo
cgaggtcttgagaccccggctggtgcgtttgccggaggcatccccgagagtagggtgccctggccccttgcctctatgctccgctcaggggcagccgcggccacgttatgaggtggcaagcaggccctcgtcaggcaggtgtggcctctgggacctgggccaggcaagcttcgagggtgcacacaccgcaggcacggctcagaagcactgggcagagatcctcatggaagaaggccaggctgccgctcacacgcgcccctccctcagcagccgcagcagcccagaggtggacgggcctgggaggcaccctcagctccacagtccccaaaacacaccggctggggacggggccacccgggtggccatgtggcaggtggggcacctggtgggtctcacgtggacacgtgcatcctcgaatgctccggtcacgctccacacgcgccacagacacaggccacacgctccacacgccacagacacgggccacacactccacatgccacagacacgggccacacactccacacgctctacacactccacagacacagacacacac

SEQ ID NO: 30469 - DNA, 369 bp, Homo sapiens
  chr1:1354536-1354905
  hypo
cgcctggggcaggtccccctcaggcatctgggccacctcggcccactgcgtccgcagagtggggctggcccctcggctcagcagaagccccacggtaggcccatgccctcgctctgcagccaggtgtaggggggtctttcggagccagccggtagcatccacctgggcacccctgtccagcaggcagccggcaacctccacgtggccttcccgagaggcgtgatgcaggggtgtgaggcccagggtgtcccgcgcatccacctcggccccctgggtgaccagcaactggacggcaagcaggtgtcctcgggcggcagccctgtgcagcgcagagcggccatgcctgtccctgatgcctgggtctgcccc

SEQ ID NO: 30470 - DNA, 296 bp, Homo sapiens
  chr1:15194468-15194764
  hypo
cgcatatgcaggcattggatacacaggcatcacaaacgtgggcatcacacaggcatggcatcgcatagcatggcatcacatacgcacagcattgcatacacaggcatcacatacgcacggtatcacatacacaggcattgcatacacgggcatcacatagcacggcatcacatacgcagccatcgcataggcgggcatcgcataggcaggcatcaaatagcacgcatcacatacgcaggcatcgcatacgcaggcattgcaaacacatggcatcacatacgcacagccagggctgc

SEQ ID NO: 30471 - DNA, 245 bp, Homo sapiens
  chr1:154474305-154474550
  binary
cgcaatttgccgccgccgcccccgggcttggcccgctccgacacggtcttcaggttcagggggaactccttgaaccacttggccgccatgagggggccccggccggctcggcccaggagcgtcggggccgtggagcaggcgagcgaggaagcccagcccagacacgcagaggcgccaggggtcggggaccactgcattccccgtgactggggcgctggaggccgcggcgaggccccgcgacggct

SEQ ID NO: 30472 - DNA, 97 bp, Homo sapiens
  chr1:156215233-156215330
  hyper
cgatgcctccagtgctgttcgagagcagtgaggtgtgtcctctcctgtgcctccgccttccccgtccccactggaggggcctgggaacccaccggga

SEQ ID NO: 30473 - DNA, 147 bp, Homo sapiens; identical to SEQ ID NO: 28153
  chr1:156646447-156646594
  hyper

SEQ ID NO: 30474 - DNA, 403 bp, Homo sapiens; identical to SEQ ID NO: 28154
  chr1:156646856-156647259
  hyper

SEQ ID NO: 30475 - DNA, 181 bp, Homo sapiens
  chr1:163392854-163393035
  hypo
cgccagtggtattgtggtattgccggcccccacctcccgcacagcggtgcttcacggaattcctgaggcgtactgggagcaccggcacagccgccgccatttcccggcaggggcacatgggagcgacagcgaggcgtcagggccggaagtgtccctgtctttgccctcgttggctactgcg

SEQ ID NO: 30476 - DNA, 35 bp, Homo sapiens
  chr1:163393064-163393099
  hypo
aggcctttggtggctgcgcacgttggggaggggac

SEQ ID NO: 30477 - DNA, 132 bp, Homo sapiens
  chr1:164604732-164604864
  hypo
cgacaggcgtttgtcggacaaaatcaacactaatcaacatttattcgtctcttgcccttgggtctgaggcgcgcgcgggctgcgccattctcccgctcgtctcgccacgcttttcaccctccatccagcctc

SEQ ID NO: 30478 - DNA, 517 bp, Homo sapiens; identical to SEQ ID NO: 29590
  chr1:16464269-16464786
  hypo

SEQ ID NO: 30479 - DNA, 205 bp, Homo sapiens
  chr1:167430238-167430443
  hypo
cgcgctgtgagcattcgcctatgacgtactttgcgtggatcaaaggccccacaaagcctgccgtgcctgcagctgccacgctggggacatgctggggacgtgggcgatcgtgggctgagaggcagactgctgggctgccgcctcccatggcagctttctcccatgggagggagttcaccttgcggcttccaaactcagccgggcc

SEQ ID NO: 30480 - DNA, 263 bp, Homo sapiens
  chr1:168311912-168312175
  hyper
cgtcctggtgatggggtgggacggcaggcgccagcctccgtttttctgcccgtgggtatgtgtggttgacctccttaaatcagagccaagcgcgtgacccagaactctgcacaatcacccacgcccacggcaaagcagatgaggctctagagcttgcaagtctttatctagggaactgcgtcatcctcctcggtcggacaccaggtggcagcaaagctccaactcatcagtcaccccaccctccgtccaggccgtcttctgac

SEQ ID NO: 30481 - DNA, 432 bp, Homo sapiens
  chr1:1713574-1714006
  binary
cgaggaaagggagctggggggtgggggtaggggacagggcgaggccagagagtagtgggaggggccgaggcggcctttcccgggagcgctcggttcccggccggcccttctattggccccagtcactcaggctcccaggtccggctcgggggggagcggggggccgcgccaggccgctgaagtgtccccgtttcgcgtgggcagagcgcgcctccccacgcatcctgctgagggccagcctctgctaggtgcgtgacacggaggggacagaacggaaaccttgtcctgctcaagtgtggacgtgcgtgccacgtgctagagtaaaattgaggtggggaacctccatccctgggacatggagcacaggggcgaccccgcgccgcttggtcaaaggaggtccgaggccctgcaggaacagcccacagccggagc

SEQ ID NO: 30482 - DNA, 232 bp, Homo sapiens
  chr1:1714067-1714299
  binary
cggagccaggtgacccggacacaggaagcgcgccaggggcccccacaccgcggagctgctggcgacaaagggcgctgctcctgcataggccaggctaatgcaatctacaaactagatttctgtgcctacagtttgaaaatgattgcagttcactcagccagtgtggaattatcctcctctttccacactgccttagtcagtgccgctgtccaagtgcacgttgttggcgccc

SEQ ID NO: 30483 - DNA, 193 bp, Homo sapiens
  chr1:17292904-17293097
  hypo
cggcgcagtgtggatgggcggctgagcggggtccaggcggagctggcgctgcaggaggagagtgtgcggcgcagtgagcgggagcgccgggccacgctggaccaggtggccacactggagaggagcctgcaggccaccgagagcgagctccgggccagccaggtgggcaggagctgagggccagcggggcgac

SEQ ID NO: 30484 - DNA, 44 bp, Homo sapiens
  chr1:17294741-17294785
  hypo
cgacaagcggcgcctgaaggaggttctggacgcctccgagagcc

SEQ ID NO: 30485 - DNA, 301 bp, Homo sapiens
  chr1:175048508-175048809
  binary
ggagacctgcagctgccactgcgaagagggcagggagggccccgcctgcgagcggctggcctgccccggggcgtgcagcggccacgggcgttgcgtggacgggcgctgcctgtgccatgagccctacgtgggtgccgactgcggctacccggcctgccctgagaactgcagcggacacggcgagtgcgtgcgcggcgtgtgccagtgccacgaagacttcatgtcggaggactgcagcgagaagcgctgtcccggcgactgcagcggccacggcttctgtgacacgggcgagtgctactgc

SEQ ID NO: 30486 - DNA, 121 bp, Homo sapiens
  chr1:185014263-185014384
  hyper
cgaactcatgagaaagaagtctgagcccaaaccccagaagccggccaggaaggtgtaaagggtgggccgaagccagggcagaagaacccaagcagaaggttgagcacgaggtggctgcgcc

SEQ ID NO: 30487 - DNA, 140 bp, Homo sapiens
  chr1:1910184-1910324
  hypo
cgcgtcctgctgagctgttaggtttgtggatttgtcactgcagcgatgggatacgggtgcagtcagggaagcctcagagcaggccgggacacagcaccagcgccctgccgtgggtcccatgtggccaagcggggtgcaca

SEQ ID NO: 30488 - DNA, 49 bp, Homo sapiens
  chr1:1910367-1910416
  hypo
tgtgacgaggctgcacagaacacgtgtgtcgtgctgagctgggcgtggg

SEQ ID NO: 30489 - DNA, 388 bp, Homo sapiens
  chr1:193149436-193149824
  hypo
cggtggcgatacctgcctgccttttcttttgctgcgttggcacaggcattgtgcttattttgttgtaaatggttccagtattttatcagttcactaggctggaactgatgagaggtaattaggtggctgtatttacagctcgaataagagactcgccagtgattgaacacaaactcattgggagggggtacaggatcaattctcaacttggcaagacagatccctacatatacatcttccaagtgcaaacggcggatacctaaagaaactttaaaaatcttttctgccagatctccagaaaaaacataaccagttccagaacagaagacaggataacgctcacttgggtagaggtctggtggcatgtaccacttgctatctttgtttc

SEQ ID NO: 30490 - DNA, 149 bp, Homo sapiens
  chr1:195732539-195732688
  hypo
catgccctgccgcagcagctggcgtgcctggctgtgtgcagtggccagaccccacgatcacttgctcacaaaccccttgccactctgtacctggctctgtgcctggcttgcctttggcagccgtgggatccagggtggtagcgtgagcc

SEQ ID NO: 30491 - DNA, 135 bp, Homo sapiens
  chr1:200971336-200971471
  hypo
cgcggttgttgatggcatcgatggcctcctgcatggctttcacccgcagccgcagggccccattctccttctgtagcatggcattctctcggaacagatcactatagccctcagcgccatcctctcctatcactc

SEQ ID NO: 30492 - DNA, 252 bp, Homo sapiens
  chr1:202936089-202936341
  hyper
cgtcccaggggtggcgatcccgagctccagcgcggaggcatgccaagggcagaggggtaacctggcggagtcccgagcccggatgtgcgggatcgggaccccagcatccacggtgggcccagagccctgcggggcggggtcggcagcgacagcccctggtccggagctgagtggccagaaccagatggggaggggtcccccagtggaggatactgaatgagggtcttaccgtctggatccccatgacggagc

SEQ ID NO: 30493 - DNA, 58 bp, Homo sapiens
  chr1:203242491-203242549
  hyper
cgtctgacttactctgggtgtgtgtggacgggcgtgcatgtgaccgcgtctgtgcacc

SEQ ID NO: 30494 - DNA, 156 bp, Homo sapiens
  chr1:204197190-204197346
  hypo
cgaggcccagcccctctcaccagacagcatgcggcccctgcgggaggcctcggtcgccagggcgcaggagatttcaatccgcttctcctgctcctgcagctggctctctgagtcctggggcacgtccacagagtccccctcgccgatgggcaccac

SEQ ID NO: 30495 - DNA, 383 bp, Homo sapiens; identical to SEQ ID NO: 29606
  chr1:204226544-204226927
  hypo

SEQ ID NO: 30496 - DNA, 280 bp, Homo sapiens
  chr1:204530924-204531204
  hypo
cgtgatgaagatgaacatggttcctgttctcctgtctagggaaactggttaagcatgtaaatattagcatagtgaatgttttgttgtgagactacatgctgctatgagaaatacagaagggggacgtaatgtagccaagagcttctgaacaacctccgggaagagatgagctgagattaaaggaaggttaggagttaggagaggaagggaaaagtgccgtagttaggaggaaacatgccaaggtcttgaggtgagaaaacagtggcatctgggaagaact

SEQ ID NO: 30497 - DNA, 72 bp, Homo sapiens
  chr1:2103120-2103192
  hypo
cgaggacctgccggactgtcttccgcagcagcggcgctgttctgcactcctaccacaacgtgccatggctcc

SEQ ID NO: 30498 - DNA, 33 bp, Homo sapiens
  chr1:224528889-224528922
  hyper
ctttgggatgcagagcacaggggacccaccgcc

SEQ ID NO: 30499 - DNA, 46 bp, Homo sapiens
  chr1:228083620-228083666
  hypo
gaggggctctgggtgagtgctggccctgtaggtccctcggcctgtc

SEQ ID NO: 30500 - DNA, 200 bp, Homo sapiens
  chr1:228473703-228473903
  hypo
cgtctgtcctggggagcactgctggccaagcctgcccaggacggtggggcccctgagcagtctgtgcctttgcaggccggagagtgcacatcatcgaggacctggaggatgtggatgtgcaggagggctcctcggccaccttccgttgccggatctccccggccaactacgagcctgtgcactggttcctggacaagaca

SEQ ID NO: 30501 - DNA, 110 bp, Homo sapiens
  chr1:228473932-228474042
  hypo
cgatgcccagcccgggggctaccacgtgctgaccctgcggcagctggcgctcaaggactcgggcaccatctactttgaggcgggtgaccagcgggcctcggccgccctgc

SEQ ID NO: 30502 - DNA, 118 bp, Homo sapiens
  chr1:228646027-228646145
  binary
cgtcaatgacatcttcgagcgcatcgccagcgaggcctcccgcctggcacactacaacaagcgctccaccatcacgtcccgcgaagtgcagacggccgttcgcctgctgctgcccggc

SEQ ID NO: 30503 - DNA, 89 bp, Homo sapiens
  chr1:230821556-230821645
  hypo
cggcgggtccttgctgggacctcggattgcagtgctgccctttctctggggacagcgtgagtaacagacactcaggtaaaccagtcatc

SEQ ID NO: 30504 - DNA, 282 bp, Homo sapiens
  chr1:233749801-233750083
  binary
cgggcggcgggcgggagccaggcccgggcgggggcgggggcggcggggccagaagaggcggcgggccgcgctccggccggtctgcggcgttggccttggcggcggcggtggagaagatgctgcagtccctggccggcagctcgtgcgtgcgcctggtggagcggcaccgctcggcctggtgcttcggcttcctggtgctgggctacttgctctacctggtcttcggcgcagtggtcttctcctcggtggagctgccctatgaggacctgctgcgccaggagc

SEQ ID NO: 30505 - DNA, 181 bp, Homo sapiens; identical to SEQ ID NO: 28201
  chr1:233750511-233750692
  hyper

SEQ ID NO: 30506 - DNA, 104 bp, Homo sapiens
  chr1:234868862-234868966
  hypo
cgagggttccgacagtgggctccgccgaccatcactgccgcaagggatgctggtcacctgcctcagcaacacccctggtgtgcagttcaccggggagccccatc

SEQ ID NO: 30507 - DNA, 499 bp, Homo sapiens; identical to SEQ ID NO: 29622
  chr1:236156658-236157157
  hypo

SEQ ID NO: 30508 - DNA, 71 bp, Homo sapiens
  chr1:236187380-236187451
  hypo
cgcccgtctcctcggaagccgatggagcactcgcaggtgaactgtgtcctgggaccagggcgacaggccgc

SEQ ID NO: 30509 - DNA, 145 bp, Homo sapiens; identical to SEQ ID NO: 29623
  chr1:236274591-236274736
  hypo

SEQ ID NO: 30510 - DNA, 385 bp, Homo sapiens
  chr1:24126326-24126711
  binary
cgtggacttggccaggtgcgcacctccaccctgaacaaactctgcgggtagtacggggaggaagccccagacactgaggcctttcattcccagcgaccgggcccgctgccgccttcctccacgctgcctctatccccttctgggctcacgcagctccaacccacttgaccaagagccctctgcgtgccaggctccgtaccaggcacttttgcatgattttcctgaattcccccagcatctcggtgagacaggtgttatcactggcactttacagatacagatactagggccagagaggtgaaacagttgcccttcggtcccacagctggcgacagcgggctggaatctggatcgccaggctcgcagcccggccctctccccaggc

SEQ ID NO: 30511 - DNA, 307 bp, Homo sapiens
  chr1:243652455-243652762
  hypo
cgcggcgcaggtgggagtccttgggcgggcgtctacaggtggatcttttatgcacctcaacaggccggctttctcacggatcacatcggttagcagtaagctgggagggaggtcccgaagactgtgctgggcacagtgcaggacccagagaagcggagccatgggcccgtcctggtgagggagttaaagtccgtgcaggtgaacagaccccggcccgcgaatcaacgaaccacaccgagtgccaagttgcgccgtgcaggctgcggagggtgcgagagcagggagaagcgggaggacggccgtgggc

SEQ ID NO: 30512 - DNA, 365 bp, Homo sapiens
  chr1:245530148-245530513
  hypo
cggctgtgattcacgacaaactccaggtccccaacaccatccggaaggcatggaacgaccgggacaaccgctgtgacatttgcgccactcacctgaaccagttgaagcaggaggccatccagatggtgctgacgttggagcaggcagccggcagtgagcactacgacgcctcgccctgctccccgccaccgctctccaacatccccaccctggtggggtcccggcacgtgggtgggctccagcagcccagagactgggcctttgtgcccgccccctgtgccacctccaactacacaggcttcgccaacaagcacggcagcaaacccagcagccttggggtcagcaatggggcggaaaagaagagc

SEQ ID NO: 30513 - DNA, 587 bp, Homo sapiens
  chr1:245848539-245849126
  hypo
cgggcgcgcgggcatggcaccccgagtggcccacgtgcgggaggccaacgggggtggctgtcagtagcctgtgtcgtcaggggccttcaccacttgccgcgcacagctgggctcccggggaaactgccacggaaaggccaccacattaactgccgtctcactcacagtacacatccagctcgtccggcggggagagctcctgcgaagaaggccgcatgcgcaggcccacccagctgagacccttccacaccagggccacggtggaccctgacttccccatcgctcacctgtccagcgaccccgactactcctccagcagcgagcagtcctgcgacaccgtcatctacatcgggcccaacggcacggccctctctgacaaggagctcaccgacaacgagggccccccagactttgtccctatcgtgccagccctgcagaagacccggggcgacagccggcccgcagaggcaggagaggctgcagccggcaagtcagaaagggactgcctgaagtgcaacacgtttgccgagctgcaggagaggctggactgcatcgacggcagcgaggagcccagcagctttcctttc

SEQ ID NO: 30514 - DNA, 202 bp, Homo sapiens
  chr1:245855725-245855927
  hypo
cgggattgagcttggtccgggagggtgcttacatcgggacaggcagagagggcgcagggcatcgaggctgaggcagggatgggactgcaaactcccagcggcaagagcctggcctgtgggcgacacagcgagattaactcaaggagggaccgtcccagcaagcagagcaagacgctagcaaacgcaagccacagtcacaccc

SEQ ID NO: 30515 - DNA, 531 bp, Homo sapiens
  chr1:245925703-245926234
  hypo
cgcacattaggaaatttcctgcacgttgtttttctgtcaggactttcacacagtaggcccttgataaggatttgctgtaccttgctgattcgactggctgacaagtacccccagaccagaaaaggaaagttctccctgaggctgcaacagacggtgcggtgttcttcccccgcctgggtaaacatgccagacatgataaaaagaacagaatagctgagtgccctcagggaatcctagtgttactcccgttggccacacgctgactttatttagagatcaagtaaaggcgctatggctagcattcggcgaaaatgagcactgtggaatctggcttttaagaatcccttcggcatttgtcatttctcttaggtccatgtgggcggctgccagtgttttgggatcagccggcccctggacacgccctgagcaaccctgacgcccgatccttccaccgtcactcttctgcacacaagggcatggcggcccagagggtcctgttaaagtgtcaagcgcttcctatgatacccgcac

SEQ ID NO: 30516 - DNA, 358 bp, Homo sapiens
  chr1:24712899-24713257
  hypo
cggcagctggagctggccagcggcagcttgtgaggacaactgttaaaaattccaaaatgttgctgctggtggcttgaagttggccacggtggcagtatttatgtcacaaaaacgggcagatgctacatctcagcacttttcttcgaggagggtaaatggtggttgaccagcacaccaccgccttcgtgcaacgcccaagtaggtctctgggagggaaatgtcaagcgttctcctgtgacttctagaggtgggcggatgccaccctcagagaggcctttcgcctgtgcaaaaacagttcctgcgactgacattctgtgacttggatgaatttagcctctcagagcaaatcccagagaac

SEQ ID NO: 30517 - DNA, 225 bp, Homo sapiens
  chr1:247542074-247542299
  hypo
cgctagcatcacgtgcggccaacctggccacgagctgctctccccgccctccccgcacacgtgtcccttcagggagggagaggaaggtcatgacctggctgcgctgctcgccccacacacgtgtcccttcacggagggaggaggaaggtcgtgcgatgcaggtgttgctccttgcgtcattccctgagctccctttgtgtgtcaagcaatctgggcactgggtac

SEQ ID NO: 30518 - DNA, 47 bp, Homo sapiens
  chr1:248328627-248328674
  hypo
cggctccagtcctcagggggctccagtcctcaggagggcgctccagc

SEQ ID NO: 30519 - DNA, 38 bp, Homo sapiens
  chr1:2520987-2521025
  hypo
ccgccggcagcaacgagccattaaaactgcagttcctg

SEQ ID NO: 30520 - DNA, 39 bp, Homo sapiens
  chr1:2521063-2521102
  hypo
ccacagcccccgccttgctcactgttgggccctcagggc

SEQ ID NO: 30521 - DNA, 164 bp, Homo sapiens
  chr1:25854484-25854648
  hypo
cgcccactagagtttttgtgttgtcacttcttgtggactggtctgtctccccggccttggaaccctttgagggcagggcgaagccgggctacctctgctcctctctgcagccccaggccctggcgggcaggcagcatcaggtgtccagcccgtgcgctcttgcc

SEQ ID NO: 30522 - DNA, 807 bp, Homo sapiens
  chr1:26662538-26663345
  binary
cgcctctgccccagcgcccccagccctccgcccctccacgttctcacctgccgccgtggacccggcaggactgaggtcggaaggaggcgggcagagcggcctggtcatcttcgaaagagaagtggtcgcccagaaagtcggggcgggagaaaagctgaatctggaggcagagaggggagatgaggggaaggaggacgatggagtggggccgagaacagcggggaggggaaaggtccgaaatgaggggagagacgtgagcccagcggctccctgcggagtccctgccttacctttgagacgaagtgcagatcgtgctccccgacctgaaggtagggaccgaatcgagaattagggagggtgccggcccctagccttgtcttctctaggtttcagtaccgtccaccccgcggccgcgccctcggccccgcccccttctaaggccccgccccaagcgcccaggcaggtcctccagcccgctacctctgcgtgggggcggggcgcacccgaactccaggtcccgccaccggggaggccccgccccccgcggccggcacgcacctgtaggaccggctgcagcgaggcgagggtgctgttgccagcgccccagtcctcgcagttacgatacacgcccttctccagcacgtactgttccccggagaagcccacctcctggtaggccacccacctgcaggaagggcggggcgcgagtcagctgggacggagcctgcacctctcctggaaccgcccccggctcgcccgggcccgccccgctcccggagcccgggtcacttacacgccgctgagcac

SEQ ID NO: 30523 - DNA, 308 bp, Homo sapiens
  chr1:27332673-27332981
  binary
gcagtgtcaccaggcaggcgtaacggcgggctgcatctgccccaccgaagtgggcctccaggtagcgctctagggtgcgccgctgctccaccaggtctggaaagtcgatgaagaagcgggagcacatgtagcgctgcagggcgcgcacatcggtgctgggccggggccggaagccccgcaccaggaggtggcagtacttgaggaggccaccacctcggatctcctcgggactgcgcgtggcgatgacacggtgccgcaggtgctccagggcctcggtgaagtccccgtacaggctttcgcctgtgacc

SEQ ID NO: 30524 - DNA, 698 bp, Homo sapiens
  chr1:27901989-27902687
  binary
cgccgcggaggcgccccctagggtcgggcgccaggcgcccctgcccgagctgcgcgcttagctcgctcccccggccggccgcgctctccagctgcaggaaattccagaagctctccatcatccccgcgcagcgcgcagcccgggctgccaaggctccccgaaggagagccacatgccggccggccgcgcggcccgccctcggcccccacccggtccaacccggccgggtagccacgtctggccgggcgggggccaagccggccgccccttcccgcgccccgggcccggcggaatgcgtggcagccccgaccgggggctattttgagcgggaggggagcggcccggcctcggtgttttcggctttttcctggcccccggcccgccaggccgggccctctgctgcccgctgaatgggagggggggcggggtcacgtggcggggggaggggagggccgtcgcgatccgggtcgggctcgggctctgccccggcccggggactggaggcgcccggcagcggtccggacctgcgctctcggacgcggctgagtggcggggttattaatagcgtgcctggctcgggcagtggctccagggcgcccgctacctgcacgcccctcctgcagagagcactggcggcccggcgctccctccgcagcggcggactgaggcctaactggatagcgccaccgtgaaccggc

SEQ ID NO: 30525 - DNA, 450 bp, Homo sapiens; identical to SEQ ID NO: 29628
  chr1:2850546-2850996
  hypo

SEQ ID NO: 30526 - DNA, 32 bp, Homo sapiens; identical to SEQ ID NO: 29629
  chr1:2851025-2851057
  hypo

SEQ ID NO: 30527 - DNA, 120 bp, Homo sapiens; identical to SEQ ID NO: 29643
  chr1:3111118-3111238
  hypo

SEQ ID NO: 30528 - DNA, 326 bp, Homo sapiens; identical to SEQ ID NO: 29644
  chr1:3111463-3111789
  hypo

SEQ ID NO: 30529 - DNA, 473 bp, Homo sapiens; identical to SEQ ID NO: 29649
  chr1:3195292-3195765
  hypo

SEQ ID NO: 30530 - DNA, 65 bp, Homo sapiens
  chr1:3213764-3213829
  hypo
acattaccagcatttctgtccatttcgggtgagacccgaagcagcgagaccctatccaggtcaac

SEQ ID NO: 30531 - DNA, 192 bp, Homo sapiens
  chr1:32827549-32827741
  hyper
gtcgctcacctcccggcggttgagaccggtcccaggctagaagcagctgccggagccctggccgcgggagaacgctccggtccaggcggagccgggcaggtctctgtggcgtgcccgggcccgggcgtcgaggagggcagcattgtgacccgggccgcggcgcgctgacctcacagagcacgttcctcccac

SEQ ID NO: 30532 - DNA, 103 bp, Homo sapiens
  chr1:33772741-33772844
  binary
cgactcggccagcgcctcgggcccaaaagtgccgctgaagtgctggtccacgtccatgcagaacatgaagtgcgcctcgcggcccggcagcccgcccagcgcc

SEQ ID NO: 30533 - DNA, 49 bp, Homo sapiens
  chr1:33772856-33772905
  binary
cgcatgcgcgccatcgacacgtcttgccagcgccgctcgcgcgccacgc

SEQ ID NO: 30534 - DNA, 87 bp, Homo sapiens
  chr1:33772986-33773073
  binary
cgctctggcccgccatgaagtgctgctccgccgtctccaggaagcgctccaggtacttctccaggtatctaagggcgcggcgccacc

SEQ ID NO: 30535 - DNA, 415 bp, Homo sapiens
  chr1:3552676-3553091
  hypo
cgcacttaatttccttatatagaaattgacaaaatctcaacagctctatcctggaaatgcatgaaatccctgtagagctgctgctggggctgcaccgccacagatgccagcgtcagtgcctggccagcccccaagggcggcttggtctccccgcgcctgcactcgtgtgcacactctccccctcacctttccttgcctggccagcccccgagggcggcttggtctccccgcgcctgcactcgtgtgcacactctccccctcacctttccttgcctggccagcccccgaaggtggcttggtctccccgcacctgcactcatgtgcacactctccccctcacctttccttgcctggccaggctcactcctttagacccagctcagacaagtcccttccagagcactgcctggatccc

SEQ ID NO: 30536 - DNA, 209 bp, Homo sapiens
  chr1:36916114-36916323
  hyper
ggaggtgccctgaagacgggagctaattggtctgggtggtggaccgtcccggggggattggtccgagccagaggccggcgcggcgttgggcgcggctggggagctgtgcttctgagagtaggtttccctcgaaagggcgagggccgggccagggctgggggtggtctcgacacagccagcccggcgcttgggaccccggccgctggcgc

SEQ ID NO: 30537 - DNA, 424 bp, Homo sapiens
  chr1:38512641-38513065
  binary
cgtcgctcccggggtcccgcgcgccggccgtgctgattggccgctggggcttcattcacggcccccctaccgtccgcgtacacactcacgccccgggggcgcggccgccacgtggggagtggcgcgggggtggccctgggaccgcaccccctctcgtcctggctgtgtgggccccgctttcccccagcgctggagactccgagcccggccggtcccacattccacgcgagctgaattcccgcccgcatcccgcccgggcagcagggattgccggctccgggaggcgctcgggctccgagaagcggctcagccccgcgcccctccctcctcagtaccgctgccggcggaccaggattcccgcgggtcctggcggctgcgagcgcgaggcggcgcggattcgcggctcggttccggcgcgactgct

SEQ ID NO: 30538 - DNA, 91 bp, Homo sapiens
  chr1:38513154-38513245
  hyper
ttcctctagtcccagcgtcacaactccgccgacctcctctgccctgagagcgcgtccggtgcgggcggagtcggacggactctggcttcac

SEQ ID NO: 30539 - DNA, 482 bp, Homo sapiens
  chr1:39874756-39875238
  binary
cgagctagcgagctagcgggtcgcgctgcgcgggggaggaggactcgccccccgcccgaccctagcggagccttttgttcccagccagaagtttgcatgccgggaccgtgacagctgcgggcggggaggacggcggggccgcggggccagcggcgtggtggagaatagaggcggctgcttgtcatgcagcccacggcgtggcggctgcgggccggggactggcggcggcgggcgaggcggcgcccacagcactcgggactcagctgccggagggacaaactaacttcctgagcgcgggacctgaggctggcgcggccgggagccacctgcagcctgcggtgaggcgaccctggccctcggggcgcgcggcatggcgcggggaagcgggccgtgctgagcgagcccctccgacagacccgcggccgctgctgctgcccgcccgcccgcctgcctttccgaaggcctggcgcggggctccgctc

SEQ ID NO: 30540 - DNA, 100 bp, Homo sapiens
  chr1:41485949-41486049
  hypo
cgggctgccagctccttgaggattaggtgctcctccagggccgtctgcaggcgccaggggagggaggccagggtgtccctgtggacagtcacctgcacca

SEQ ID NO: 30541 - DNA, 91 bp, Homo sapiens
  chr1:41486164-41486255
  hypo
ggggttcagatggcccacatagagagtgtgcgccgagggagcctcctcgaggtcagagtactccgtcagggactgctctgcgggtagctcc

SEQ ID NO: 30542 - DNA, 46 bp, Homo sapiens
  chr1:45097397-45097443
  hyper
cggggccgggcgatggggcggaaggagccccgcagcgggaggggtc

SEQ ID NO: 30543 - DNA, 87 bp, Homo sapiens; identical to SEQ ID NO: 256
  chr1:45097717-45097804
  hyper

SEQ ID NO: 30544 - DNA, 114 bp, Homo sapiens
  chr1:45098213-45098327
  hyper
cgctctcagtttccccgtctgtctaatggaggtatggcgcccagctcttgcccaaacctctctaaaggccctgaagaaccctgggggggcaataagtgccggagaatgaggaac

SEQ ID NO: 30545 - DNA, 174 bp, Homo sapiens
  chr1:45268631-45268805
  hypo
cgctgctctgcgggagccctccctttgagacggctgacctgaaggagacgtaccgctgcatcaagcaggttcactacacgctgcctgccagcctctcactgcctgcccggcagctcctggccgccatccttcgggcctcaccccgagaccgcccctctattgaccagatcctgc

SEQ ID NO: 30546 - DNA, 157 bp, Homo sapiens
  chr1:51442806-51442963
  hyper
cctggctgccctaagcaaccttcatcaaaaggctacgggggaaagtccctgtctcggtctctggagactgttctgcttttatatggcagtcccatgaaaacagctccacgcaggaacctagtgagaggcaggaaacaaatttcccacctgagacccc

SEQ ID NO: 30547 - DNA, 153 bp, Homo sapiens
  chr1:53238160-53238313
  hypo
cgattacaccgatctgtgaaggagtaaggcccttcttggccagtttgtaaatctgctccttcacgtcgtcagatgtcaacttcaaccaagtggggaagctgcgtcgatagggtaaagccgactgggacaggcccttctcaggagcacgcatac

SEQ ID NO: 30548 - DNA, 291 bp, Homo sapiens
  chr1:53387231-53387522
  hyper
cggacccgccagggcgcgcacttggatctctgagcccccggccgccccgtcggaagcgcagccgcgggcccgaaggggcctccaggggcgcaggaggcacagaacgcgcagcatcggggcgcaggctgggagtgaaggtgcttctccggccctgcaccgtctcggctcccgctgagagctcgcagttccggcgtcgggcgaagccttcgccaattgctccacctatgggccaagcgtctgttgcctccttccgcacctcccggggacagggagacttgagcggaggaggtc

SEQ ID NO: 30549 - DNA, 207 bp, Homo sapiens
  chr1:55352463-55352670
  binary
cgcccccgcaccgcagctcccgtcgccacctcgcgtcccgctatccccgcgcacgccgcctccggccctgagtcccggccgcacccggcgccgctcacctgcttctggatgtcccgcacgcgctgctcgtgcaggcgcggagcgctgctgagcttgaacaccacccaggcgcgcacgtagtagtagatatcgaagataagcgagagc

SEQ ID NO: 30550 - DNA, 164 bp, Homo sapiens
  chr1:55620065-55620229
  hypo
cgagcttcccggcctattcgtccaatcaggctcaaaagcttctgtcttactctatcactctcagtctcccagctctgtagaacggaaaagacacaggaattgcttcacgatcaaactggcaaaatatgcaaaaattttaaacttgagctaaaaacattaacaac

SEQ ID NO: 30551 - DNA, 344 bp, Homo sapiens
  chr1:5772056-5772400
  binary
cgcactgtcccccaccggggaaggcaccgtcacagctcccgcacagccggtcaccgcaccgtcccccgccggggaaggcaccgtgtcacagctcccgcacagccggtcaccgcaccatcccccgccggggaagggactgtcacagctcctgcacagccggtcaccgcactgtcccccgccggggaaggcaccgtcacagctcccgcacagccggtcaccgcactgtcctccgccaggaaaggcaccatcacagctcctgcacagctggtcaccgcactgtcctccgccggggaaggcaccgtgtcacagctcccgcacagccggtccccgcactgtcctccacc

SEQ ID NO: 30552 - DNA, 707 bp, Homo sapiens
  chr1:5918390-5919097
  hypo
cggcatcgccgccccccacgaggactgggctccatgctgacggagggccgggatcagggccggagaactcacgggacatggcacctgtccactccagcccaccagctcctcccctggcccactcgaccccctgccctggcacagccctgcaggcccctcgccagcctcccctgccccgctgcccctttgcagggcccctgccactccattctctctcagctgcctcctacgcagagaggcccgatctccaaactaaagtccctcttcacaccatccccctgctcccctcagaccctcagcgccgcccgacagaccgtgacgggtccccatgtgatcatctgggcccccaagaaagccaggtactgggcgggcagcatccatctcccccggccagggggacctctgtctacactcgggttgaattgagggcgtgaggagcacgtggcaaatagagcttcgctggctgatggcgtctctcttgccaaaggccaggccgctttctcctcgtgggcttgagggatgcccctgtgtcctccagcccacaggctagcctggtcccgtccagaagggcacacgctgcctgctcctcgagcctgggcggcacctcctgcatctgatgctgtggttccctcctgtgccgtgggggtgacaacgcagacgtgagagcccggtaggctggggtggtggccacgttaccaaagcacctc

SEQ ID NO: 30553 - DNA, 142 bp, Homo sapiens
  chr1:5950824-5950966
  hypo
cgggatagcgcccgctccttccaagcagacagacgctggaagcgtgactcgtcccatgagggacgcagcacccactgtgcctgtccttccagagagccgctaccttcatctggacggcagcagatccgatgagcagcaggga

SEQ ID NO: 30554 - DNA, 64 bp, Homo sapiens
  chr1:59612305-59612369
  hyper
cggagaaacttcagagcggcaggtgccttcgtttcccgttacctgctgagtctagtcccttcca

SEQ ID NO: 30555 - DNA, 57 bp, Homo sapiens
  chr1:6131658-6131715
  hypo
cgtgggaatcgatgtcacgacaagcaaggcgcctgctgcgtagggcacctgccgctt

SEQ ID NO: 30556 - DNA, 95 bp, Homo sapiens
  chr1:62207675-62207770
  hyper
cgttttagaatattttattttgcgtcagcgaatagagaaaacaaaggagggatgagagaacaggaaaggaaaggggcaaaaagacaaagtgttaa

SEQ ID NO: 30557 - DNA, 421 bp, Homo sapiens
  chr1:62207842-62208263
  binary
cctccaaccacaccggtctgtccggatctccctccccgtcagtggcggctgtccccaccacgcgcggtctgatccgccaccccgcccccacagcccacttttcccaggcccttggccatcccgcgcccggtaggaattcacctgcacgtaaacagccagggcaaccgtcctccctccttggagcccgcctcccgcggccccgggctccctcccccgccccctgcgccaccccggtgccccgccccgggcggggagagtcggggcgaggggagggcctgccaggtgaggcgcggtcaccctgggcctctcacttccgcccaggtgaggcagggccgacaccgagcccgcccgacccgggctcccacctgctcctccagcgcaccaggtaaagcgtgaggtcccggctgtgcagtgcgcgctc

SEQ ID NO: 30558 - DNA, 203 bp, Homo sapiens
  chr1:62208291-62208494
  binary
cggccgggggcagctccctcggggcttcccgggcctgcctgccctgcccccgcgctctccccgcccgcccgcctggagtgggtgggagccggaggtggagggcgccgccgggcgctcagaggggccgcggcgaggatggggcgcccgcggcgtgcgtccgcgctgacccgggaggcggggcgggggcgccgtcctcctgcgtc

SEQ ID NO: 30559 - DNA, 127 bp, Homo sapiens
  chr1:6347184-6347311
  hypo
cggcacaagtgcacggggaccaggtgcagtcactccgcagtccagggcaggcctcaaaggtggctgtagccgcatgtaatcaatgagggtcaagcttcatcactcacactcgaggccctgacggggc

SEQ ID NO: 30560 - DNA, 105 bp, Homo sapiens
  chr1:6738127-6738232
  hypo
cgtctcccatcaaccccctgctccgcttgctcccgccccacacctgggttaaaaattactggttcggtccatccctcttccgttttacttgacaggttagggaac

SEQ ID NO: 30561 - DNA, 787 bp, Homo sapiens
  chr1:7724016-7724803
  hypo
cgacggtggccggaagattccagaaaccaccatgaactttgaccccgactgtttccttaataacccaaagcagggccagacgtacgggggtggaggcctgaaagccgagatggtcagctccaacatccggcactcgccacccggggagcggagcttcagctttaccaccgtcctcaccaaggagatcaagaccgaggacacctccttcgagcagcagatggccaaagaagcgtactcctcctccgcggcggctgtggcagccagctccctcaccctgaccgccggctccagcctcctgccgtcgggcggcggcctgagtcccagcaccaccctggagcagatggacttcagcgccatcgactccaacaaggactacacgtccagcttcagccagacgggccacagcccccacatccaccagaccccctccccgagcttcttcctgcaggacgccagcaaacccctccccgtcgagcagaacacccacagcagcctgagtgactctgggggcaccttcgtgatgcccacggtgaaaacggaggcctcgtcccaaaccagctcctgcagcggtcacgtggagacgcggatcgagtccacttcctccctccacctcatgcagttccaggccaacttccaggccatgacggcagaaggggaggtcaccatggagacctcgcaggcggcggaagggagcgaggtcctgctcaagtctggggagctgcaggcttgcagctctgagcactacctgcagccggagaccaacggggtaatccgaagcgccggcggc

SEQ ID NO: 30562 - DNA, 108 bp, Homo sapiens
  chr1:7843510-7843618
  binary
cgggcggtgaaaaccgtgggaacccagaaagacggccaaagcacgatgaggaccgctgccggcagcccgccccaccctgggctcctccccacacccgctcgggcagcc

SEQ ID NO: 30563 - DNA, 179 bp, Homo sapiens
  chr1:7844224-7844403
  binary
cgggcgcaccggctcgcgccccgccccagggccaatggaggcctgcggagtcggccccgacgaccaatcgcacggcccgggggcgggaccggtcacgcggcggcagggggcgcggcgccggctgctgaccggcacgcggcgagcctcgagactgcgcgagggcggccccgggggcgagc

SEQ ID NO: 30564 - DNA, 65 bp, Homo sapiens
  chr1:86621199-86621264
  hyper
cgcgcaacccctggtccgagcccttttcccagggaaggcatgggagcaggtacagcgcccaaagg

SEQ ID NO: 30565 - DNA, 523 bp, Homo sapiens
  chr1:896874-897397
  hypo
cgtgcgcacaaagtggtgctggcctcctgcagcccctacttccacgccatgttcacaagcaagtacccgcctgggcggcgctgggggctccgtgggtccctcgggtcagctcgtgtaacccgctgtccccgcagatgagatgagcgagagccgccagacccacgtgacgctgcacgacatcgaccctcaggccttggaccagctggtgcagtttgcctacacggctgagattgtggtgggcgagggcaatgtgcaggtgagggctccctcacccggatcccggtgtcccccgaccctgtgcctccctcacctgcctctcggtgccccgtagactctgctcccagccgccagtctcctgcagctgaatggcgtccgagacgcttgctgcaagtttctactgagtcagctcgacccctccaactgcctgggtatccggggctttgccgatgcgcactcctgcagcgacctgctcaaggccgcccacaggtacgtgctgcagcacttcgtggacgtggccaagacc

SEQ ID NO: 30566 - DNA, 248 bp, Homo sapiens
  chr1:897754-898002
  hypo
cgacagcctgaacgtgccttcagaggaggaggtctaccgagccgtcctgagctgggtgaaacacgacgtggacgcccgcaggcagcatgtcccacgggtgaggcgcggccgcggggggctcccacagcatccaggagggcatgcaggtggctgagggcctggtgcaccctgaccttccccgagttcagggactccgtgggggtggtgcccccacctgtctgaagaagaatccatcacacaggtggtac

SEQ ID NO: 30567 - DNA, 202 bp, Homo sapiens
  chr1:92001241-92001443
  hypo
cgaggcgggcgccgcgccggcagctagggggaagtcggccaacaattgggccacctcctcctcttcctcctgcttggacgacggtcttccgcctggactgtggagcctcgccgaccgttcgtcctcacagccaccccatgggcaaccagcgcggtgcaggctcattgtgtctgcgacaggcagaagccgagcgggtcccaac

SEQ ID NO: 30568 - DNA, 119 bp, Homo sapiens
  chr1:94374262-94374381
  hyper
cggagcgacgtcctggccctctgtgacctccgtgccaggaagagggacccaggatgtttgagagttttgctaccagccttaagcaccgagagaggtgtcactcagtgcgcagctgcacc

SEQ ID NO: 30569 - DNA, 125 bp, Homo sapiens
  chr1:9747572-9747697
  hyper
cggatgtctgctgcaccgctcccctccctcaggcgggggacggcaggaaggagggagagatgggagggcgtgggggcggggccgggggcggtctccagcccccggcccgggctccgccctctccc

SEQ ID NO: 30570 - DNA, 122 bp, Homo sapiens
  chr1:9749342-9749464
  hyper
cgaaccccaagggccccgcctggcagcgtcctgggcctccgggcgagaacagcgggggtcggggaggatttgcagcgtccactcctctctccgccgcccgtgtgagctcgggcgcttctccc

SEQ ID NO: 30571 - DNA, 334 bp, Homo sapiens
  chr10:102132983-102133317
  hyper
cgggtgagtgtttaactttcagcccagcttaagatctccgaagacacccatcgcctcgtcctgcccagtcccctccgctaaagggccggcctgcccgggcctggctggcagctgacatgaatggagaggaagcgcctccctctccacccactctcgccggggttactgccggtcacagacccgggccttcaagagctatttacacctacaacagcccaccagcgcctgaccacgccggagccaatcagcggcccccaagcttgtctgattctgtctgctccaatcaggaggcgcggtccttccagcctcttgctcctgtgaatcacaggtcggc

SEQ ID NO: 30572 - DNA, 569 bp, Homo sapiens
  chr10:102822304-102822873
  binary
cgaacgcgctgatgccccgagtgctcgcagggcttcccgctaaccatgctgccgccgccgcggcccgcagctgccttggcgctgcctgtgctcctgctactgctggtggtgctgacgccgcccccgaccggcgcaaggccatccccaggcccagattacctgcggcgcggctggatgcggctgctagcggagggcgagggctgcgctccctgccggccagaagagtgcgccgcgccgcggggctgcctggcgggcagggtgcgcgacgcgtgcggctgctgctgggaatgcgccaacctcgagggccagctctgcgacctggaccccagtgctcacttctacgggcactgcggcgagcagcttgagtgccggctggacacaggcggcgacctgagccgcggagaggtgccggaacctctgtgtgcctgtcgttcgcagagtccgctctgcgggtccgacggtcacacctactcccagatctgccgcctgcaggaggcggcccgcgctcggcccgatgccaacctcactgtggcacacccggggccctgcgaatcgggtacgcatggccc

SEQ ID NO: 30573 - DNA, 737 bp, Homo sapiens
  chr10:111767130-111767867
  binary
cggggggcgtgcggaggttgaacctttgcagtggcctcctacagccccagcagccagcgtgggcggccgaggctgactcaaagcggcggctcagcctcgggagtaggagtagggggctcgctcatttagggcgggagacatttccgaggcgcccctcctccccttcgcggtcgggtttctatcggggtcgtttccccctctggccctccggggacgccgcggattcgagctgcacagtcagaagaggacgttgaaaaggcgccaggcagccgccccgaaccaggccctcccggctgccgggcctgcaggcccccaccgctgcggcttcacggacttagagcttgagggcgcggagggggctgcgggggcgggaccaggactcccgaggggcgctcggggcggggccagagagagctcggggctgccagaggcgaggtcttgaggaggcggggccgggaggcttcggagcccaagaggcggggccagaggcgtagggggctgcgaggggcggaccttgggggcgtgaccggggggggcgcttggggacctaggggcggggcgttagggggcgggaccaagggacgctcgaggggcgctcggctagtcccgccagagcgcgagccgccagcccgtaacggtcgccagtgtgaggggcgggagggaaagaagaggggtttaaattagattttttaaaacacagagcaagcgccagaggcgtcggcatcccaggtgtcgcc

SEQ ID NO: 30574 - DNA, 148 bp, Homo sapiens
  chr10:11204060-11204208
  hypo
cggcagtgccaggagagtggtcggtgggacaggaccacccataccacccatttcagcagtgccaggagagaggttggtgggaccggaccacctattgaggcagcgccaggagagtggtcgatgggacaggaccacccattttggcagc

SEQ ID NO: 30575 - DNA, 441 bp, Homo sapiens
  chr10:11846800-11847241
  hypo
cggtgcgcaccttcccgaaagggtggcgtgtggtcaggggtctgtgcggagacctcctggctctccccacacgcggtaggtattcatgcagccgcgtcacgcggaggccccactccgtgcggccaacacagggtcttccagcccctccttccctggctatgtgacttgtagcctcattctgggaaccttccccagctacgtgacttataccttgattctgggaaccacagagttcagaccttggtgctgaaatgggagacgtcccccctgccccccgcaacaccccaccccgttcctcacccaccaccctcgacactgggcttttctcagaatccagaaagcccagggtaccctctgcacgcgatcacctgccctcagtggccgcagcaagctgaagtgtcccttcccccttttcctgcccgacgcctgcagaaccaggac

SEQ ID NO: 30576 - DNA, 69 bp, Homo sapiens
  chr10:119494306-119494375
  hyper
cgactctccccgggtcccccaccccagccaagagggaacctgccaatcaggctgcgccaccaccaggct

SEQ ID NO: 30577 - DNA, 275 bp, Homo sapiens; identical to SEQ ID NO: 28263
  chr10:124133662-124133937
  hyper

SEQ ID NO: 30578 - DNA, 276 bp, Homo sapiens; identical to SEQ ID NO: 28264
  chr10:124134313-124134589
  binary

SEQ ID NO: 30579 - DNA, 271 bp, Homo sapiens
  chr10:125617057-125617328
  hypo
cgatggaaggcggcgtggagatggaaggcggcgtggagatggaaggcggcgtggagatggaaggcggcgtggagatggaaggcggcgtggagatggaaggcggcgtggagatggaaggcggcgtggagatggaaggcggcgtggagctgctgagttgaaggctagggcaaaacggagaagaacctgagcaatgcaccagcacaggccccactgacgccgaggaacaggaggcacagggcaccacgcacgggactccgcagcttccacgctc

SEQ ID NO: 30580 - DNA, 58 bp, Homo sapiens
  chr10:126198892-126198950
  hypo
cgcactttggtatgcggagcccacaagctggcctggacaggcatcactgctccaggca

SEQ ID NO: 30581 - DNA, 972 bp, Homo sapiens
  chr10:126715052-126716024
  hypo
cgccaggggcagaataggtggctgccgtctccaggaggtgctgagatggtgcgctggagggacggcgagccgggtctccagctcggggggatgctgtctgcagaggagccgcagcgcccagagaagccaagtcaccatggagcagttcgcttcggtggctgaagctgctggaccgcgcccggggcagcgggcccccccggtcctgcctccgcagctgcatttcggtcctgcagctattggccaggcggctcagaacacgggcctggcccaggttgggtgcgacagacttgatatccgcgtcctccagggtagccaggacggccggggagtcaaagccctgctgcagtagggctcccagcgtggcctctgccagcccctccgcccgcagaaaggccaggaactcagggagcacggtcctcttgccaccaggaccctggaaggtggacaggtcagcttcgtaagtctcgtaagccatcttggatgggatgctttcccgggcaggcccgtagccacgattcagggcccctggggccacccctgtgctgccttcgggggcagcagctgaactggggtccacaaccaggcacgtcggggccacctgtctggcaggggcagggtcaatgggtctttcgctgatgtcgctgaagacctggctgagggggtaggcaggcacctccgccccatacctggtgtcgggctgctcccgtccataccgcccgggagatgcagccctgctctgtgtctgccgcccctgagggatcattttacctccaggatcccggtacaggtgaccggcgtcctgcagggcaggtgaccggccttgcattggatcccatgacgttctgctgccaagcactccgtagctggggaccggccggctgactcctgggtcccgatagaggggaggctctttgggtaccctagcagctccagacggatcactgtagtactcccgtggcagcagggggctgc

SEQ ID NO: 30582 - DNA, 218 bp, Homo sapiens
  chr10:127817236-127817454
  hypo
cgcctgtgcgagtgtgtggtgtgtgtgtgggaatgtgtgcaagtgggcgcctgtgcgagtgtgtggtgcgtgtgtgggaatgtgtgcaagtgggcgcctgcccatgtgagtgtgtggtgcgcgtgtcggaatgtgtgcaagtggacgcctgcgcatgtgagtgtgtggtgcgtgtgggaatgtgtgcaagtgggcgcctgtgcgagtgtgtggtgcgc

SEQ ID NO: 30583 - DNA, 48 bp, Homo sapiens
  chr10:128994482-128994530
  hyper
ggccggcccccgcgccgcagctcgcgtcgctcgcgtccctccggcccc

SEQ ID NO: 30584 - DNA, 142 bp, Homo sapiens
  chr10:128994545-128994687
  hyper
cggggaggcagcggctgggccagctccggggacgcccgcgcgctcgcttgctcgcgacgcggcggagccagccacagccacccggcttcgcgctcctccgatgtcctcatttactgcaattgtcttcggcgagatctcagag

SEQ ID NO: 30585 - DNA, 105 bp, Homo sapiens
  chr10:129228001-129228106
  hypo
cgaggtgtgcagggccccagggatgagcccgtgagcacctgccacgttcggcattggcccccgtgccctcaccggcccacagcgccacgttcggcattggccccc

SEQ ID NO: 30586 - DNA, 176 bp, Homo sapiens
  chr10:129241072-129241248
  hypo
cgcacggatgttgccccgtgtgtccttgctggctatctgcatgtcttgcaataatactcagccacttttgcatctatattcaggtcacctgcgatgtgctgtccagcccaggctgtgtgaggacagcagtgccagcccctcgtgtgggggaggtctgctgtaaccacatgctgggc

SEQ ID NO: 30587 - DNA, 166 bp, Homo sapiens
  chr10:129242401-129242567
  hypo
cggccccagagaccgaagagccaggtgatgaacgtcattggaagcgaaaggcgcttctcggtgtccccctcgtcaccgtcctcccagcaaacaccccctccagttacaccaagggccaagctcagcttcagcatgcagtcgagtaagtggaacgctccccacatac

SEQ ID NO: 30588 - DNA, 175 bp, Homo sapiens
  chr10:130300191-130300366
  hypo
cgagctgagaggatgggcgtgtcctggaaatcatcacacggacattctccgcgtggatagcgctctttgtccaatcattactgggacgttctccgcgtggatagcgctttctgtccaataatcactcggacgttctccacatggatagcgctttctgtccaatcatcactcggac

SEQ ID NO: 30589 - DNA, 161 bp, Homo sapiens
  chr10:131566947-131567108
  hypo
cgggtgtgcgagccgcgagtgctttccaacagagggcaccagagccgtgcggtgtgctgtggagaccccagcaccacttcccctgctggaggatggatttgaaggagggtggctgggcggcaccccgatggctccctgtgctccctgagaccctacaggcc

SEQ ID NO: 30590 - DNA, 351 bp, Homo sapiens
  chr10:131638488-131638839
  hypo
cggccccgcaccaccctcaccttgcagtccattcccgttggcgctggtgcaggaaggaggaggagaggcttggggccggaccacgggcgcgaaggcgctcttctgtttcactgcggagatgacattggcaggtgagaatgagaaaatgccgtgtgtgctgctacagtttgaagggagggtgaccgaagaggctgccatggtggggctggacggcactactgcaacaaagcaaacacggtcagcacgcgcggccgcggcacagcgccacggcgagagggcaccaaaggcctcgcctcggacgggggggcaggggcacgaaaacaaaacatgacatgcgtctggctcggccac

SEQ ID NO: 30591 - DNA, 136 bp, Homo sapiens
  chr10:131987142-131987278
  hypo
cgagtggctcagccagggttcattaccaggctccggatcctgcttctcccggatcacagcaagcgctgtgcttaggcctggggtgggggacggattctccctgaaggcaggtctgacgcgggcgggagcacccacc

SEQ ID NO: 30592 - DNA, 238 bp, Homo sapiens
  chr10:133834585-133834823
  hypo
cggggtcggctgctcatgaggatgagacggcaaagactggaaggagggagattccctctatgggagtcttccatgattacgcatgaggaggtgcgagaggcgttgctgggaagcttgttccgggtgctcctccaggtgcgcacgcgcagtacccgtccacgcttgttcatacgtcgcctgtctcactagcgtcttcaacgccagggtcggtgtgaggacaggtaagctcacagtgcgc

SEQ ID NO: 30593 - DNA, 429 bp, Homo sapiens
  chr10:134049521-134049950
  hypo
cgcgtcggtccctgatgaggccggacccgggtgcttgtggggggtcacagtgttcctcctctataccatgtgagttgcatcttctaaaaactagaaaaagagaagagttgaggcaatgcttccgtggccccaaagcccacacatgggcctcagtcaggagcacagaaaggacccctggccccttccccaggtggcagagcctgcgcacggcctggtcagcgaagggacgtggtcaatgctgggacctgggctctgggcccacgcggaggcccgactgccccggaaatggccaacaatgtccccgcggtcctggatgccacaacctgtcatgaggttcgcagaagggggtgacccgatggggtggccaggggctcccggtccagatgaggaagctgaggctgggtggcaggtggcagccccaccgtgcac

SEQ ID NO: 30594 - DNA, 167 bp, Homo sapiens
  chr10:134298551-134298718
  hypo
cgattcacgtcgctgagctagcgtgtcactgccgagagacaggctcgcctgtgaagcggaggaggacattagtgtagaaacgcacagccttggacaggctcgcctgtgaaacggaggaggacttcagcgtagaaatgcacagccttggacaggctcgcctgtgaaac

SEQ ID NO: 30595 - DNA, 253 bp, Homo sapiens
  chr10:134562467-134562720
  hypo
cgccccagggactggtttgagcctgttaacaccacaaagcaggcgtgtgacctcagccatccctcccacgtcagcttcacccagatgagcctgttgagacggttcccggtcaagccgcctgcagcccttgcccgttgtcacagtcgaacagctctcgagggagttcagggacgggagagagcgagcgggaggaggccggccatgtgcccccgcaggcaccctctttgctgttctcagtgctgctgtgccttcc

SEQ ID NO: 30596 - DNA, 324 bp, Homo sapiens
  chr10:134562783-134563107
  hypo
ggtgtcctcacggttgcagccacgctttgttggggagcagccagcctcaggcccttcgcacgtgtgagggtcggctgttgcgggagtggcccctgaccccaggtgcggaaatctgggtgtgacaccagctgctgtctggaaccagccatcctatcccactgactcggggtgtcgggtgacgctgccatgggcaggtgggcccccctgggacttatctccgttgctgtctttctgcagacgctctgcacaaaagccaccatgcagacggtccgggccgccgacaccaatgaagtggtgaagctcatatttcgtgagtcggacaac

SEQ ID NO: 30597 - DNA, 195 bp, Homo sapiens
  chr10:134639765-134639960
  hypo
cggagccaggcaggagccggagccgcagagacccaccacagagccaggcaggagtcggagccacggagccaggcaggaactggagccacagagaccagccacggagccaggcaggagccagagccacagagaccagccatggagccaggcaggagccagagccacagagaccagccacggagccaggcaggagcc

SEQ ID NO: 30598 - DNA, 387 bp, Homo sapiens
  chr10:134830248-134830635
  hypo
cgctgggcgagcaggccagggctgcccgtctccacctttgtgctggaccatttacaatcaaagcgcagcatcgagatacccaggaaagagccaggaacaggccaggaagctgctgccccaccactgaccccaccgctctccttccctccttccttcccgctgggctgggcacaggtggagctcaccgtcgtcccccttcatcccttggcccctccaaggctcaaggactggaggccgactgggcagcagacatgtcaccatcaccatgctccccgtcaccacgctccctgtcgccatggtcactgtcaccatgctccctgtcgccatgctccccctcgccacgctccctctcgccacgctccccgtcgccacggtccccgtcgccac

SEQ ID NO: 30599 - DNA, 79 bp, Homo sapiens
  chr10:134830671-134830750
  hypo
cgtcgccacggtccccgtcgccacgctccccgtcgccacgctccccgtcgccacgctccccatcgccacagtccctgtc

SEQ ID NO: 30600 - DNA, 123 bp, Homo sapiens
  chr10:135075001-135075124
  hyper
cgcgccagcctggcaccacggggacgctcccagggggtgcccagagggaacgtgcgcatcgggcggggtactgcggcgcgtgtgggccgtgagccccgccctgtagtcggacactggagtccc

SEQ ID NO: 30601 - DNA, 70 bp, Homo sapiens
  chr10:135125649-135125719
  hypo
cgtctgccttaatagcatcacctgtgccgtctgcgtttctagcgtcacctgtgccgtctgcgtttctagc

SEQ ID NO: 30602 - DNA, 184 bp, Homo sapiens
  chr10:15255054-15255238
  hypo
cgagggggcatccgcagtccgtctggtcgtctcctcctgcaggctgggcagctggccaccacttctccgactcgacccctccaacaagcatcgcagggcactgtcctcgggggtacagaccgtggtcccacattcgctaccactctgttccacgtcatccaggtacacgagctgcgtgtaggcc

SEQ ID NO: 30603 - DNA, 52 bp, Homo sapiens
  chr10:1558541-1558593
  hypo
cggctttccctgctccctttcccgaggtgcagctggattcagagcttcccac

SEQ ID NO: 30604 - DNA, 46 bp, Homo sapiens
  chr10:1558836-1558882
  hypo
taagggctagaaagaaaacattttcctcgagctgcatgcgaatatc

SEQ ID NO: 30605 - DNA, 127 bp, Homo sapiens
  chr10:21915244-21915371
  hypo
cgtgagaaccagtgcaaggcattttgaaaatgactagaaatctcgcacgcgtgccaccccccaagtctatgattcttatgtttacatggcaaagaagctgaaggggaagcaggtacgtgtgcagaac

SEQ ID NO: 30606 - DNA, 92 bp, Homo sapiens
  chr10:22047245-22047337
  hypo
cgactaacaatctagctacagggaaagaagcctcaagagacactgtgttaggatcacaccctggggctctctgcagcgcctcatggccagat

SEQ ID NO: 30607 - DNA, 83 bp, Homo sapiens
  chr10:22833864-22833947
  hypo
cgcacactcctccccagtgacacggggcctcgctgcacattcattttgttggagtatttgagcgacttctctctttcccaagc

SEQ ID NO: 30608 - DNA, 70 bp, Homo sapiens
  chr10:22834010-22834080
  hypo
agagggctcgggaaagtattcggcacttgttggacaagtgaatgggatgcttgttacttcttccctatcc

SEQ ID NO: 30609 - DNA, 59 bp, Homo sapiens
  chr10:29666997-29667056
  hypo
cggtaaacatacgcgtgtggtgtccttttcatataatgacttctaggaaacgcagtttc

SEQ ID NO: 30610 - DNA, 445 bp, Homo sapiens
  chr10:3151595-3152040
  hypo
cggacaccccagcttgcgtcgtgtcactgaacgggaaccacgccgtgcgcctgccgctgatggagtgcgtgcagatggtgagtgggcagcccatggccaagggcagggcggagacggctgggacagaagctgcttgtcaggccagcctgggcaccttgggtgtctcgtcggtgcacgatgcattacacggcctttctgagaaggaggtgagctgcccgtggggagggagaaggcttatgttctctcccacacctgcagagcctgcgccgtcttcgctctttggttttctaagttaccatccatctgtgtggcacatagtcgtaacctcccctgagtgggggtctagagcatcgggatcctcaacagtcgaggatccaggtggccccagtgcaccaggtgctgcagaaggacagagtgcagggaggcagccgagagagagagatcc

SEQ ID NO: 30611 - DNA, 162 bp, Homo sapiens
  chr10:3160827-3160989
  hypo
cggcatgagtgaaaaggcagacgtttaccgctccttaattaaaaccacagactggggaaggcggccgggtggggaccggcgtggcgtcctgcggaccgcgtggagtttggggtgtctgacatcgttctccacgtggctattttcagcgttctcccggggaag

SEQ ID NO: 30612 - DNA, 125 bp, Homo sapiens
  chr10:3161171-3161296
  hypo
ccagacccagcggccactggagaattgtagaacagcaggatagcaggtggtaagacgtggcctacgagtggcccagttccagtaaagcaacttaaccgagaagcaaaagcttgactccttaaccc

SEQ ID NO: 30613 - DNA, 227 bp, Homo sapiens
  chr10:3194438-3194665
  hypo
cgtgctccccgccctgatggccatcagtgaagcggcttcacagtgctacaccgagccaagcaagtatacaaatgcatgattccacgactcccggggagggctgtgcccagttcccactttaactcagtccccgcagacagcactcctggtgtctgctgggctgacctcccccatgttccatttccaccttctgaagttccccgagagcgtgccacgcacttagacac

SEQ ID NO: 30614 - DNA, 227 bp, Homo sapiens
  chr10:3330188-3330415
  hypo
gtatttgcacacatgtgtgttcaatctgtggatacggtacctacgtgcacttctgtacctggtttcttcctttttctacacatacattatttatctgttttttaaaattcaacttttattgctccttgtcctgccggtggccctggcaacatgccacgccggactccagcttagtttccttgttgccttgcagccaaacttacgcagtgtgcagacggagctgctca

SEQ ID NO: 30615 - DNA, 92 bp, Homo sapiens
  chr10:35503808-35503900
  hypo
cgttgcacatctcgcacacccttgcgcgtgggatccacagcgctcccacacccgtgcgcgtgggatccggagctccccgcacacccgtgcgc

SEQ ID NO: 30616 - DNA, 190 bp, Homo sapiens
  chr10:396943-397133
  hypo
cgcgcggcgggcctggcaaggctgtcgggaccggacgctgtgattcagagattggggacagagtgcacagcgagcccgagatggctgtcggggaccagacactgcgattcagagtgaaggcgcagggagagaggcccagaggggcttgcgggtagccgagttagtgcaaccaaaaggacgccgcacggac

SEQ ID NO: 30617 - DNA, 133 bp, Homo sapiens; identical to SEQ ID NO: 28300
  chr10:43725410-43725543
  hyper

SEQ ID NO: 30618 - DNA, 56 bp, Homo sapiens
  chr10:43818322-43818378
  hyper
cggtttaccgtcaccatggcaacagcgcgtcctgggctggggcggggccagactgc

SEQ ID NO: 30619 - DNA, 130 bp, Homo sapiens
  chr10:43818407-43818537
  hyper
gccagtgattggccatctgggcgcggggcgggctgagtcagttggagggggcggggctgaggctccggtgaacgccgtaggcccgggctgggccgagggagatgatggatgccgcttcttgccactcccc

SEQ ID NO: 30620 - DNA, 701 bp, Homo sapiens
  chr10:43892074-43892775
  hyper
cgcaaggtgggaggcccgggcgcgcggtaaacgtgttttggcgggaagcagcgccgaggccccgagacaaggtgacggcgacgttcccgcggcctgctcacggcactccagcagcctcggaccgcccggcccggcaggaaggtcggccccagggcctgcgcgggctcgggcgggagcttccgggcggggggcggagcgagcggcgcagcggggagagtgggggcagggacgggagggttcccggagggaagggcgcctcgcgggagggggaggggaggggaggggaggggagggggcccctggcgggcttccggggccctgagggcgagagcgagggcgacggcaaggtggggtgggggctgctccccggcccgccaagctagcgctgcctaggcgggagctcggggacccgcgggccgagcgcggctgaagggagggaagggaagaggcgctcgtaggtctgcgtccgtctccgagcgaccggggcggcggaaagggacctggggggggcggccgggactggagtggcggggccggggcgcccgcgcggcggctcaccacgccagggactggcccgtcggccccgaggaggcgcggggtccggagtccgggaagcggaggcctcgtgatccaagaccggcagccggacgtgggtcacggggtgcagaggaggaagtgccattgccgggcccgccaagatg

SEQ ID NO: 30621 - DNA, 171 bp, Homo sapiens
  chr10:43892970-43893141
  hyper
ggaagagaagccagcaagttagacacagcccctctctgggaggccgcctctaaaatggaactagcggacgtaccttggtttgtacatttgaccatggacacacgtaaagattttgaaaaaaaatctttgaaaaaaaatttttttaacgcaattcctaaacttttaactaac

SEQ ID NO: 30622 - DNA, 47 bp, Homo sapiens
  chr10:518263-518310
  hypo
cgcgtgctgcaggtccacgcccactgcacttctgcctcgcccagtgg

SEQ ID NO: 30623 - DNA, 131 bp, Homo sapiens
  chr10:518339-518470
  hypo
ggcagatggacgtattgtatcaccccaccccgtgcttacctgaccgatagcgctcatctcgtgaccctgaagaccgtcggcggtggtagcgagaggcggaggaaggagtgacaggagcccggcgttcttgc

SEQ ID NO: 30624 - DNA, 474 bp, Homo sapiens
  chr10:5529540-5530014
  hypo
cgacggcattcggacctctcccttacctcccaggcagcgcgggctccccaaaagacactgacgctcccacttccaaaccgtcactcatgcagtttcctcaccaagaacgccccacccctgttgaaatctgcccccgcctcagtgccacttcctggaagtctgtccccttctctgagcacctcctcgaatgggaatccactgacgagggacctgacccactgtctttgcatggccatttatgttacatctcctgggcccagaggccggcgcagcgtctccctccaagtccctgcagactcacagtaaggagaagcacccaaggaaacacttgtagaatagtgagtgagtgaatgaaagtcaccaacacctcctccatgaagccacgaccacaaggctcccggtgcaggaaaatactgttcatcaaaagcactgagatttgtttttgtttgttttgtttttgtttttgtttgagac

SEQ ID NO: 30625 - DNA, 66 bp, Homo sapiens
  chr10:61469827-61469893
  hyper
cggtgcgcacacacgcgcgtccccaggcgccgctgtgcccccgccgcccaccacgtgccctggcca

SEQ ID NO: 30626 - DNA, 146 bp, Homo sapiens
  chr10:6161993-6162139
  hypo
cgcctccacctccttgcttcttactgcctcttccactcagcccacacttgcagaatgaggactgcgtcgactacaaattagacctctgcttccaccaggcctccttgatagttcagctaagagccgtgcggtgagtctcctgacgt

SEQ ID NO: 30627 - DNA, 146 bp, Homo sapiens
  chr10:6246024-6246170
  hyper
cgggcgcacgcaccccccggtgctcggaattggctggcagtaccctgccccgccccgccggtcgccgcccccgccaccagcgatcgcttgggagagggttacctcgagctccacctcagctgcggagcgccgccgcggaaaagggc

SEQ ID NO: 30628 - DNA, 270 bp, Homo sapiens
  chr10:630309-630579
  hypo
cggagcccacgacctgacacccactcacgcgcatcacctctcaatctcggggcccacaacctgacccccactcacgcgcatcacctctcaatctcggggcccgcaacctggcccccactcacgcgcatcacctctcagataatctcggggcccgcgacctggcccccactcacgggcaccacctctctagtctcggggcccgcgacctgacccccactcacgcgcatcacctctcaatctcggggcccgcgacctgacccccactcacgc

SEQ ID NO: 30629 - DNA, 195 bp, Homo sapiens
  chr10:63656701-63656896
  hyper
cgagttccctgtgtctctcttggctccggctccaagttcatgagaaatctgtccccatacccatccttctgaagcttccagcctttaccacctggacctgggctggagtcccacccccaccacagctcttgagacaggcgacgaatagacccaaatttgagatgtagctcaacctttgaccactagaggtctcct

SEQ ID NO: 30630 - DNA, 31 bp, Homo sapiens
  chr10:64565470-64565501
  hyper
cgggactgccactattaccgggtgctggagc

SEQ ID NO: 30631 - DNA, 643 bp, Homo sapiens
  chr10:71892158-71892801
  binary
cgtgttccctcttccccggttcgcccttcccggcctaagcccatcttccttaggaaaacttagcagggatttaggggccaaaccaggagggtggagttttctttgccctcggccaggagcacatctccctgttgcgttttttgggggagacagagaggggcgggcctgagtcgagtatccctctcctcgcagcgccacaactgcgcgcaccgacctccccacgccagacgcggcgtgagccaggcctctaatccgctcgcccctcttccgggtcccggtcccgcccggggcgcccggggtctcgagagcccgcctggcggcgcgatctcacctgtcggccgcgcccgcgcgctctcgctccggctcccgctcccgctcccgctcccgcttggtcgtcttcccgagttactgacccgaggcgctcccgggcggggcgtgactcagcactcgtgctggtccccgaccccgcggcaacgccccggccaggccccggaaacggtcctggcacgctggggctggtctccgaacggcccgccggactaaccttgaccctgagcgaacggccttgaactttgaaacaaatgctcccatggccagatgtcgcctctccggctcctgccagcacccgcgccccagtcctgcc

SEQ ID NO: 30632 - DNA, 156 bp, Homo sapiens
  chr10:72288415-72288571
  hypo
cgctgtcataaagtaacccagataagatgccttcctcaggacgaagctcatctcttacatgcaagtccacgaggacatccaggctgggatggctgctccgtgatcatccaggccccttctccctcattgctccaacatcatcaacatgtggcttcc

SEQ ID NO: 30633 - DNA, 884 bp, Homo sapiens; identical to SEQ ID NO: 28313
  chr10:735245-736129
  hyper

SEQ ID NO: 30634 - DNA, 402 bp, Homo sapiens
  chr10:73767536-73767938
  hypo
cgccgctgcggccccctcaacgtgacgctggccgcagaggcctgccgccgcaaggagcacatggccctcaaggcggtgcgcatccggcagctggagttcctgcagccgctggccgaggacccccgcctggacctgcgcgtcatccagctggtgcgcgacccccgggccgtgctggcctcgcgcatggtggccttcgccggcaagtataagacctggaagaagtggctggacgacgagggccaggacggcctgagggaagaggaggtgcagcggctgcggggcaactgcgagagcatccgcctgtccgcggagctggggctgcggcagcccgcctggctgcggggccgctacatgctggtgcgctacgaggacgtggcacgcgggccgctgcagaaggcccgc

SEQ ID NO: 30635 - DNA, 250 bp, Homo sapiens
  chr10:74057413-74057663
  hyper
cgccgctcccctccctccttcccgctcccccgggcaggaaggctcgcgtgcgcgaggccacagcgcaagcgggtgcagagcaggattcgaacagggttccatgcaactccgtgcccagggtcctaccaccgcctgagctcagcggtcttcagccagcggggcccttccacccccttccttaatagttttcctcctccgcctcctgcacggcctccgcctccgcctgaccgtcctcggaaacctcccagcc

SEQ ID NO: 30636 - DNA, 295 bp, Homo sapiens
  chr10:74057707-74058002
  hyper
cgccccccagctccgcacctccccagccccgcccgaggcgcgcccagcgagcgtgaccccgacccagggccacggctgcgcccgtaggatcgcgggcgcgcgggtctccatgagggactgggagagatgcgtcacccgctaatccctcaactgggtcgcacccggtctgccttggttggtcccttctgatggcggaggcgggacctcgacttggtggccaatgaggagcctcgtgggggtgctctcggctgccatggcaacggaggggccgcccgcttccccgcggggcgaggcc

SEQ ID NO: 30637 - DNA, 85 bp, Homo sapiens
  chr10:7608166-7608251
  hypo
cccagctccccaccaccacactctggttgcaggggagcaccagtctgtccccaccatccaagatgactctgctcggtgtgatctc

SEQ ID NO: 30638 - DNA, 253 bp, Homo sapiens; identical to SEQ ID NO: 29700
  chr10:80921761-80922014
  hypo

SEQ ID NO: 30639 - DNA, 240 bp, Homo sapiens
  chr10:81032458-81032698
  hypo
cgaggtgagggagtctggtcacaaggatgcagtttggagaggtgaggggagctcagtgggttcactttagacgagttgggtggtgcgtgcttttacgttttacgctgagacatttgaggagtgcttggaagtctggattaaggctcagcattggcagttcgagtctgggatgattccctgctgctgtcccagccccagctgtggtcaccatgaggtgagctggaaggccccaaggtcctc

SEQ ID NO: 30640 - DNA, 82 bp, Homo sapiens
  chr10:81060524-81060606
  hypo
cgaggaccggcagatgaacaccaactggcccgcctcggtgcaggtcagcgtgaacgccacgcccctcaccattgagcgcggc

SEQ ID NO: 30641 - DNA, 447 bp, Homo sapiens; identical to SEQ ID NO: 29704
  chr10:81063491-81063938
  hypo

SEQ ID NO: 30642 - DNA, 142 bp, Homo sapiens
  chr10:851108-851250
  hypo
cggctggaggtcgagggcgcgtggggggcctggagggtgcaggggacgccgagggcgcggggcccaacctccggccagccgcctggattctggtctctgctctgagcgaggtgcgtgggtgcctccctgcttttgagcgggg

SEQ ID NO: 30643 - DNA, 175 bp, Homo sapiens
  chr10:851504-851679
  hypo
cgaggaatggacccggaagcgtcccctgcccagggggtgctgcaggtacccaggggaagagcattcacgggtgccaggcccaaggggctcacgccagaagtagaccaattagacgactacaaacggtgctcagtgctgcagaagcagccggggacaggcggctgtcggagagggc

SEQ ID NO: 30644 - DNA, 740 bp, Homo sapiens
  chr10:88702294-88703034
  hypo
cgctggtgctgctccaagctgcgctgagtggcgaagagtgcgttgtggaggccgtgaagggaggcgttgagggaggcggccccggccccggcctcggcctcgcagcaccgcccgacattcttgacgtcgttgctcaggctctggagctcccgcgccagcccggccagggcggtggtggcggcctcctcgcggcccgcgtcgtggctgggctccaggtgctctgccggccgcgggggctccgaggcctgctccagggccgtcactcgggcggccagctcgtcccagccgagcgcctgctcctgcagcccgctagcggcgtcctgcagggccacgcggatctgctcgtagctcaggggcagcggtcccggcgtctgctcagacatctcctccagcacctcctccccgaagagcgcggccagcaccgcctcgtgccgcagcgcgtcctccagcagggcggcgaaggcgctgtgcagctggcgcacctcgtggcgggcctcggccgcggccgccttcagcgcgcccacctcgtcatccagcgcctgcacttggctccggagccgcgacgtggccgcccgcgcccgctcgccctccgctttgtgcgcgtccacggccagcgacacggcgtccacggcgttctgcagggcctgcagggaggagccgtccagctgccgccgctcgtccaggctcacctgggtctcctccagggcacgcgtggcgtccctctggccctcccggatgac

SEQ ID NO: 30645 - DNA, 141 bp, Homo sapiens
  chr10:93567138-93567279
  hypo
cgaggtaaagcttctcggcagcgcggctgaactcctcccaggtctggtactgcggcatcgtggcctagagtggaaaagtaaagagaagcaaggcctcagaacccggcccaacaaactacctacgtccgggagtcgccaacc

SEQ ID NO: 30646 - DNA, 185 bp, Homo sapiens
  chr10:93572713-93572898
  hypo
cgtgtggacaatttgttttcatctaggttttgggcggaaagacgtagttgaatatttgcttcagaatggtgcaaatgtccaagcacgtgatgatgggggccttattcctcttcataatgcatgctcttttggtcatgctgaagtagtcaatctccttttgcgacatggtgcagaccccaatgctc

SEQ ID NO: 30647 - DNA, 186 bp, Homo sapiens
  chr11:1015850-1016036
  hypo
cgtgtggtaggcgacaaggtgggaccagggtgcctggtggtaaggttggtgactggagaggtggggatacccgtcacccccgaggtgagtgacacaaagcctgatgtgggaactcgggtggtgagagaagtggaccgcgaggtggtggactgagaggagaaggcaggggcggtgtgggtgctggcc

SEQ ID NO: 30648 - DNA, 238 bp, Homo sapiens
  chr11:112370546-112370784
  hypo
cgtgcaggaagggtctcccaggtggccggagaacccacaggcgtgtacggacaaggtgccctgggtgccctggctgacccctggtcagcccggccaggggtagagaccttcccggaaggcgaagatcgcataggtaactgggaaagtgtgttttttgaggtgggggaaccccatgcagccaggtcagggctgcagggtaggccgcctgccccacaatcagagcactgcctcgttaccc

SEQ ID NO: 30649 - DNA, 114 bp, Homo sapiens
  chr11:113746570-113746684
  hyper
cgttcctgagtcttctccgctctctgccctcaaaacctcatttgtaggactgacctccggctccaccctccccacgggcgagttaaaactgttcccccgccgtgggaaactgcc

SEQ ID NO: 30650 - DNA, 317 bp, Homo sapiens
  chr11:116691767-116692084
  hypo
cgtcccccgcatgggggcccagtttctgcctgagctgttccatctgctgcaccagggctttgttgaagttttccccgtagggctccacccggcgtcggaactcctccacctgctggtccaggtgcccacccagctctgccagtgacttctgcagcccctcggtgttgcccctcaggttgccacgcacgtcctcggccaagggcgccagcctctgccgcagctcctcggcactggccgagatcctggccttgagctcctcggcgttcttcttcatctggaaggtcaggccctcaagctggtggttgagcttctcctgc

SEQ ID NO: 30651 - DNA, 75 bp, Homo sapiens
  chr11:117746539-117746614
  hyper
ccagccaccacttgtaagagccagaagccagcgctgggagctccaggctgcacacccaactctccacggaagccc

SEQ ID NO: 30652 - DNA, 139 bp, Homo sapiens
  chr11:12073866-12074005
  hypo
cgtaatcacaagggttcttagaagagggaggcaggagagtcagagaaggaggtgcgaggatggacacggggttctaagtgatgtgattcctggcttcttccaagatggaggaagaggccacgacccaaggaaagcaagc

SEQ ID NO: 30653 - DNA, 125 bp, Homo sapiens; identical to SEQ ID NO: 28344
  chr11:12131738-12131863
  hyper

SEQ ID NO: 30654 - DNA, 288 bp, Homo sapiens; identical to SEQ ID NO: 28345
  chr11:12132212-12132500
  binary

SEQ ID NO: 30655 - DNA, 40 bp, Homo sapiens
  chr11:1228791-1228831
  hypo
cgcagctcaggaagccaccggtagctccactgagaccagc

SEQ ID NO: 30656 - DNA, 140 bp, Homo sapiens
  chr11:1228883-1229023
  hypo
tgggtctccacagcagcgccggccgagctggtttgcagactctgcctctggagaatcgtgggcggtggctcctgtttgcctacgtgtgtgctgcatggacagagctgcaaggccccgggcgaacatgcaggcagacggac

SEQ ID NO: 30657 - DNA, 191 bp, Homo sapiens
  chr11:124616924-124617115
  hyper
cgccgagcgcctgggaggctcggtaggaggagtcttccacggccccgccccgcccctgtcggtcccgccctcccccccgccgggctcctggggctgtggccgaaaggtttctgatctccgtgtgtgcatgtgactgtgctgggttggaatgtgaacaataaagaggaatgtccaagtgttcagagggtgcc

SEQ ID NO: 30658 - DNA, 130 bp, Homo sapiens
  chr11:130079199-130079329
  hypo
cgcggattacccgtttgtcagccccgggcatctgggctgttccagagttttctagtccaatgacccgtggggagcgtctcgaatgacgctgccctcgaagcagcccggctctcagccccgtcctgccctc

SEQ ID NO: 30659 - DNA, 430 bp, Homo sapiens
  chr11:130079388-130079818
  hypo
cacctgcgagaacctcctgccgcagcagatcacgccgcgcatgatgtgcgtgggcttcctcagcggcggcgtggactcctgccaggtggcccccggggcaggagggcggcaggtgggccccgggagaggcgggactggggactcacggcagggcttgtctccgcccagggtgattccgggggacccctgtccagcgtggaggcggatgggcggatcttccaggccggtgtggtgagctggggagacggctgcgctcagaggaacaagccaggcgtgtacacaaggctccctctgtttcgggactggatcaaagagaacactggggtataggggccggggccacccaaatgtgtacacctgcggggccacccatcgtccaccccagtgtgcacgcctgcaggctggagactggaccgctgactgcaccagc

SEQ ID NO: 30660 - DNA, 90 bp, Homo sapiens
  chr11:1301047-1301137
  hypo
cgcagcatggtaagtcccggccgccggtgggcaggggagcatcagccctgctcaggctgaaggcatgtggccctgggctccagacgtctc

SEQ ID NO: 30661 - DNA, 67 bp, Homo sapiens
  chr11:130785392-130785459
  hypo
cgctcatccttctccgaagctcctggaccaaccctttcatggctgcctccatttcttcctcaaaggc

SEQ ID NO: 30662 - DNA, 149 bp, Homo sapiens
  chr11:134088886-134089035
  hypo
cgcttagaacaaaacctcatacacactctaccaaacatgttcaaactccactgctgaacctcacgtaaagctacccgtgacctacccttactctaccttaccatcccgttccaccacactttttctgtatgcctcttgacacttcctgc

SEQ ID NO: 30663 - DNA, 196 bp, Homo sapiens
  chr11:134230275-134230471
  hyper
cgtgtctccggcatggggaggaccagcagtgatccccacggcttccacgcggtggcgccgtctccccacggctgcttccaaggcctgctccgggctccgcagggctgtggctgtgttgggagactcctggtgctggagcacgttttagcgcttggcggcctcccggtttcaggccttgcaaggaagcccgggagcc

SEQ ID NO: 30664 - DNA, 175 bp, Homo sapiens
  chr11:134317588-134317763
  hypo
cgtgcgagctgacgcagcttactttgggccaggtgcactggatgcgccctcgctccctccgtggggccctggctggtgtcggagccctagcgcagccatctcacaggtagaaacgcccgcgcggggcgctcactgcctcggactcggcccttccgctgcgaggccctgctgtctc

SEQ ID NO: 30665 - DNA, 157 bp, Homo sapiens
  chr11:134852683-134852840
  hypo
cgtaacattagatccacggacctcaccttgggtgagatgagacatacgtacccctattttaaaaataaaataaaatccatcggtgattctgccgcacagtcaaaattgaaaagcactggagcatcacttggacaactggtcagatcggaggatgtgc

SEQ ID NO: 30666 - DNA, 102 bp, Homo sapiens
  chr11:1477651-1477753
  hypo
cgtgttccagaagccggtcaagttccaggttgatatcacctacacggagggtggggaggcgcagaaggagaacggcatctactccgtcaccttcaccctgct

SEQ ID NO: 30667 - DNA, 66 bp, Homo sapiens
  chr11:1478347-1478413
  hypo
cctgagcagggccctccatgcccacccacaggtctcggccctggacaggccaagcatgccccgggc

SEQ ID NO: 30668 - DNA, 126 bp, Homo sapiens
  chr11:17497697-17497823
  hyper
aaagcataggggttagctgggcctccatcccagactccaaagcacaggcttccctcttccctaggcccagctgcggctgacagggaggctgccttgcgggaggggtgacccggctccctaagctgc

SEQ ID NO: 30669 - DNA, 35 bp, Homo sapiens
  chr11:1975930-1975965
  hypo
cgcgcaggaatgaagggcgcacgacatgagaggca

SEQ ID NO: 30670 - DNA, 917 bp, Homo sapiens
  chr11:19798519-19799436
  hyper
cgaccatctttcccccttcgcgcccaccggcggcagtggcgaagggcccactgaagcgccgggtgccacgcggggcggcccgcgggccagctagggggcggggaactcaccagccgccgacccccccccccaccccgccctcggccgccgcggccccagcggcctccgcgctgcgaggagcgggcgcttggacacagggcgagttgtttgatttggcggaggcggggaggccggcggggagcgagcgagggaggcacgagagctgggcagcgcgggcgccggtctccagggtagggtccccgcgcgcagcagcggccccggggcgggggcgaggcgaccgcgggcgccggggatgcctggaggggccgcggccgagaggagacccgggactggacggccagacctgccgggcgcgcgggcaggtgcttcggctttttttttttttcccctcctcctttttcctctgccccttccttcctcgccctgaagtaagatgagcgtgatgctgtggcgctgggaacagaataacaccaccatgaagctggtaagggtggattgcagaccgcaccccctgggcgctgctctactttttaaccccccaccccgccccccatcccctttaggaactggcccgggtggtggaaagcccctgaaatgcattccgcacttggtatttcccttattgttttgaagctagatctcaggggaggtgtgtgtgtttaaaccaggaaagtcgatgtgtgtatgtctctggttgtgagtcattgaaggggggtgggactgggctgcattatctctccgtcccttccacctacgaattcctggagctctcttggattgcacacgctgggattgtctcctacgagcatgtctgcgccctcacagcctgtcccgggacagcgtggtccgcgtccccc

SEQ ID NO: 30671 - DNA, 408 bp, Homo sapiens; identical to SEQ ID NO: 29757
  chr11:2436014-2436422
  hypo

SEQ ID NO: 30672 - DNA, 136 bp, Homo sapiens; identical to SEQ ID NO: 29758
  chr11:2436611-2436747
  hypo

SEQ ID NO: 30673 - DNA, 285 bp, Homo sapiens
  chr11:3110995-3111280
  hypo
cccacctcccgccctagctctaccaggtctctcgcactctctgacccggagtctggatggacaccctgagtgtggcccacctgtgcagctcctgctgggcctctcggatggagaggatggcctcgtgcagggcctgcagccgccgcgcctccttcctgcaccgagggcatgggctctcaccgcctgggacggccccgagtgagacaaaggaggggaggggaggagtgaggatgagctggaggtccagtggggctggcacgtgggtcacagggtcatatccagctc

SEQ ID NO: 30674 - DNA, 171 bp, Homo sapiens
  chr11:31808842-31809013
  hypo
cgtgcccaagtgcacacatacagaccctccgctcccacgtcactccttttctcccattcccacctcttgcacctggcgtgcgacatccgggtctccaaagtctctgctgtctacacaacagaaccgtgggccggaactggctgcctgaccgtggtggaaattacagccagc

SEQ ID NO: 30675 - DNA, 76 bp, Homo sapiens
  chr11:32449104-32449180
  hyper
cgcgccttcgaggtagtctggccggtgtggccattggatgggtttgaggtctcagaaccgagtgggagtggactcc

SEQ ID NO: 30676 - DNA, 215 bp, Homo sapiens
  chr11:32455062-32455277
  hyper
cgcattccaaaaacatcccggtccctaggccctcgagtaattttgctccaggaaaagcatccgccattgtattagtaaagcgtttactaaattaccgaatcaaaccgaactggcttaggttctcaatagcgtggaaatccactgaaaataaatgaagagggcaaactacaggggctccgcaggttcgggtccgcgccgcccaggcgaaagagagg

SEQ ID NO: 30677 - DNA, 808 bp, Homo sapiens
  chr11:376596-377404
  hypo
cgggccctgagctgggccgccagggccgcccgccctttgccgctcttcttgggccgagctccgcccccgcgccctgcagtggagcagccgcccccaaaggtgtacgtgaccagggtgcggccgggacagcgggcatccccccgggccccagcgccgcgtgcgccctggccgcccttccctggcgtcttcctgcaccccaggcctctgcccagagtgcagctgcgggcgcccccacgcccaccccggccccacggccgcaggaccggcggcccccaggccacacagccgaggcccccagcccgggcgcaggccacccaagggggccgggagggccaggcgcgcacgctgggacctgcggcgcccacagtggactcaaacttgtcctccgaagcgcggcccgtgacctccttcctgagcttgtcccaggtgtccgggccgcagctgcccggggagggcgaagaggaggaggaaggggaggacgatggggccccgggcgacgaggccgcgtcggaggacagcgaggaggccgcgggcccggcgctcggacgctggcgtgaggacgccatcgactggcagcgcacgttcagcgtgggcgccgtggacttcgagctgctgcgctcggactggaacgacctgcgatgcaacgtttcggggaacctgcagctgccggaggcggaggccgtggacgtgaccgctcagtacatggagcggctgaacgcgcgccacggcgggtatgggggcggccgaacgcgcgccagggcggttttggaggcggggacagccggggagaggaggtcctggccttggc

SEQ ID NO: 30678 - DNA, 175 bp, Homo sapiens
  chr11:380592-380767
  hypo
cgcaccagcacacccagggccatgccaggggccccaggaacctcctccagtatcccgcgtttatgcaccgcgctccagggtcatgacccagtaccaccggacgactcccggaagcccccgtggtgatgggacccggcacctgacccctcccgaggtctcctagcggcgctttgcc

SEQ ID NO: 30679 - DNA, 211 bp, Homo sapiens
  chr11:43543814-43544025
  hypo
cgtgtggatagacagtggcaacgacaacgtggacatcaaggctgccgcgagctcggaattgttgtgtgcaacatcccgtccggagccctggaagagacagccgactccaccgtctgcgacatcctcaatctgtaccggaggaacacgtgggtgtgccaggcactgcgggaagggacgtgggttcagagcatggagcaaatcctcgaggtgg

SEQ ID NO: 30680 - DNA, 98 bp, Homo sapiens
  chr11:43544070-43544168
  hypo
gagctttggtcgcacgaggcaggcagttgcatttcaagccaaggcctttggattcagcgtcatattttatgacccctacttgcaggatgggatagaac

SEQ ID NO: 30681 - DNA, 117 bp, Homo sapiens
  chr11:46920042-46920159
  hypo
ggcctctttggctccacaagccttctccttagttcaagcccaacctaattccatttccccactcactgcagttgcgctcatcagactggtcatcacagtccgcgtcaccatcgcagc

SEQ ID NO: 30682 - DNA, 173 bp, Homo sapiens
  chr11:61490870-61491043
  hypo
cgcccctacctaatgcctcccactgctgcccgcaggaatggttgtctgcaactgggtagtcatcctcagtgtgtgcatcactgtcctctgcgtcttcgaccccacgggccgcacctttgtcaagctgagagccaccaagaggaggcagcgtaacctgcggacctacaacctgc

SEQ ID NO: 30683 - DNA, 213 bp, Homo sapiens
  chr11:62369471-62369684
  binary
cgggcttaactctgtcctcgctggagccctgcagctcctcctcgcgccccaaagactcgcgcgccttagcgcttcgccaggttatttgcaagcggctttgcctgtcatttgcataaatggtctacgctcccttaccctttccgcacgcctcttttccttcgtccccaccccacagagccccggaggcgcccggcagcgccccacaaaagcacc

SEQ ID NO: 30684 - DNA, 428 bp, Homo sapiens
  chr11:62389464-62389892
  hyper
cgaggggttcccgccccaaaccccggctcctgtccgcaggccccgcccctgcagcggctccgccctgcgtcccgccttcctcgcactcccctaccagctcccagctggggctggcagcgccgccagggcacgcttccggtcatctgtgcacccccccgccttgtagacttgatttccggtcccaccgccaggttccgggaaccaccgggtggtgacgtcacatccggcgtgccaaactcgcgtggccggcagtcaaaaccccgggtaggtgcagaatctcgagtaggtgcacgtggtacctacctcgagacccgccccctcatcacggaattgcctgagaaagccagtcctggcgcccagatcttcaccttattcatccatccagtcagtcacgccacccaatagctgttgctcaatacttattacac

SEQ ID NO: 30685 - DNA, 88 bp, Homo sapiens
  chr11:63779256-63779344
  hypo
actcctgtaggagggatgtccagggaccccacgggaagatgggtgtgtctgggcagagtcagatggggtctaacttgggcaggtaggc

SEQ ID NO: 30686 - DNA, 80 bp, Homo sapiens
  chr11:63864329-63864409
  hypo
cgagggcctcccccggcagagctgagagccgatgcctgtccctccgtgagctgggtgcgagtggcccttgctggtccccc

SEQ ID NO: 30687 - DNA, 305 bp, Homo sapiens
  chr11:63885581-63885886
  hypo
cgcggccctgggctgcagatgctgcccatcaacccgtaccgcgccaaagaagagtacgtggtccacactatcttcccctccaacggcagcagcctctgcaaggccacacacaccattggctacggcaccacgcggggctaccgggacggcggcatccccgacatagactactcctacacatgatgcccgcccacccgggctgccccgcctcagccccagctgccctggcgtggccatgtggctttgcccagcctgctgcaatccaagagagcaaggaagagaaattccatgggtgactttcctcc

SEQ ID NO: 30688 - DNA, 306 bp, Homo sapiens
  chr11:64129097-64129403
  hypo
cggctccacccggcaggctgtggactggtggagcctgggcatcttgctcttcgagctgctgacgggggcctcgcccttcaccctggagggcgagaggaacacgcaggctgaggtgtctcggtgagtagggctggacgtggagggcggccagagggctgcagggcctgcctgggcagggctgtgggtggggggcttgctgcccctgacacccccccaatcctcccagacggatcctgaagtgctcccctcccttcccccctcggatcgggcccgtggcgcaggacctgctgcagcggctgctttgta

SEQ ID NO: 30689 - DNA, 634 bp, Homo sapiens
  chr11:64135647-64136281
  hypo
cgcggtgatgaccgatgggctggaagcgcctggtgctggagaccggccaggtcgggcagcggtggccaggagcgctatgatgcaggtgggctgggctgggctgggttggggggaaattggttttaggagaggcctaggcccggggactctaggcctagatccaactggcgcccgcagcgtgagctcagcaaggtcctaagcctctccgacatggggcgtggcggggccgcggggctaccaggtgggacctctgacgcgccgccttcgccttcgccttcgccttcgcctccaggactcgcccttcttccagcagtacgagctggacctgcgggagcctgcgctgggccagggcagcttttctgtgtgtcgccgctgccgccagcgccagagcggccaggagttcgcagtcaagatcctcagtcgcaggtgggagggcccaggcgcgggcaggggtgggggtggcagagcgctgtcccgggggcggggccgaagcgcggcgaccgtaactccttctgctccgtcccccaggctggaggcgaacacgcagcgcgaagtggctgccctgcgcctgtgccagtcacaccccaacgtggtgaatctgcacgaggtgcatcacgaccaggtgatggcttcc

SEQ ID NO: 30690 - DNA, 33 bp, Homo sapiens
  chr11:65307510-65307543
  binary
cgcggccggagggcccgggcacccagggcgggc

SEQ ID NO: 30691 - DNA, 61 bp, Homo sapiens
  chr11:66475619-66475680
  hypo
cgaggcgctggttctcgctgagccaggtctcccgcatggcagccttgcggtcgaagcgggc

SEQ ID NO: 30692 - DNA, 250 bp, Homo sapiens; identical to SEQ ID NO: 29779
  chr11:67432668-67432918
  hypo

SEQ ID NO: 30693 - DNA, 74 bp, Homo sapiens
  chr11:67450470-67450544
  hypo
cggcacaacgtgtgtgtcttattgcgatgctttccaaacgatgatgctcccttcgtcatctcgcttctgcggcc

SEQ ID NO: 30694 - DNA, 72 bp, Homo sapiens
  chr11:68564274-68564346
  hypo
cgccgccccaccgtcctcgtcagacagcagcccgggcgggtggactcaccatggcataatagttgctgttca

SEQ ID NO: 30695 - DNA, 167 bp, Homo sapiens
  chr11:68564381-68564548
  hypo
tcctcccaccagtcgctcacctagtgggcgcaaacaccagacaaacccgcaggctcagcaggggccaggcaggctccctggcagcagcccagagccgcggggaagggcaggcagtgcttttggcagacatttcggcgtctaacaggggccattccagaacagggaac

SEQ ID NO: 30696 - DNA, 267 bp, Homo sapiens; identical to SEQ ID NO: 29781
  chr11:69931095-69931362
  hypo

SEQ ID NO: 30697 - DNA, 109 bp, Homo sapiens
  chr11:69972743-69972852
  hypo
cgcgggaggtgagcatgaatgctaggcttcggtgcaggctggtacttgcgggaggtgagacatggatgccagaggcctcggtgcaggctggtgcttgcgggaggtgagc

SEQ ID NO: 30698 - DNA, 189 bp, Homo sapiens
  chr11:71185648-71185837
  hypo
cgggtgcttagtgagggcccctgtggagaagcccccgggggtcccgcctgctcctggctctcccctgtaagccgggcgcttagtgagggcccctgtggagaagcccccgggggtcccgcctgctcctggctctcccctgtaagccgggtgcttagtgagggcccctgtggagaagcccccaggggtccc

SEQ ID NO: 30699 - DNA, 197 bp, Homo sapiens
  chr11:71188519-71188716
  hypo
cgcgcaaggtggccacggccatcctgtgaaccgccgcagtggtgcaggtgctgttcccgctgtcccacactcgtgtttagcaaggcaacactcaggaacacaatttgataaagatattttttcatgaaggaataacccctatgagttaaaacctcatttctgcatataccgcaattggcagaacccctaccatagcc

SEQ ID NO: 30700 - DNA, 835 bp, Homo sapiens
  chr11:71229615-71230450
  hypo
cgcccttgcccgctttacctgcttggcggcgcctcctgcggccagttcctcggagcatccacctgtgcagggcccgcgtcctcccctccccgcgccagcctgaagcccccgggcagcctcggtttctccttttcttctggatctccagggactgcgcggcacctggggtcctctggtggggaatgaatgagtgagtgaatgaatgaatgaggaacagggtggccatctgggtctcagtgtctgtctgggggcggggtggggggcgtcccctgatgggtccggcttgtcagcgccactcctgggggcttcccgtgggggtggcacagggcagggcccccccatctcagggctgcttcctgtggggagggtccccgagaagcggagcgtgggctggtttttagggggtaacccacgaaggttccgccagcccccggtcggttctgggaacccccgggcttgaggaacctgcccggcaccgccctggaacccgggcctgcagcctcctcggggcctcgtctccttcctcccagggaagctgtggggcagggacctggtggacggcgggtgggacccgactccctcccatcccctcacggtggggtcgcggctctgggggctcctggggccgctgccggaccctcagctctgtcgccggggggccgcagtctcggggcggcacagatggggcggctccaaggcttcagccacagacattggtttcctctgttgggggcgcggaggcccaaggtcagggagtctcagggtttgcttccttcccaggcccctcctgggctgggggcgggtgtctcctgcgccccctcgggccgccctctgc

SEQ ID NO: 30701 - DNA, 120 bp, Homo sapiens
  chr11:72466088-72466208
  hypo
cgggctctgctccgggtgcagccacggcttgaagtgaggcaggtgcttctgtttccactcggggtacttgaggcacgccttgtacatcttcttcatggcctgtgggcccgccgccccgcc

SEQ ID NO: 30702 - DNA, 139 bp, Homo sapiens
  chr11:72475539-72475678
  hypo
cgcaggtgaagaaactgaggcaggccgggtcgtgggggtcaggtaagtgtccacaggcctccctagcctggcctggctcgtgccctttccatagcccccagcaggcagcactgctgcgctaagcagaagaaattacacc

SEQ ID NO: 30703 - DNA, 317 bp, Homo sapiens
  chr11:72475723-72476040
  hypo
attctaagaggcttggggagggacaggtggcggggtagggctgagtctctggagagcaccaggtgggcgggccggtaccaggaacccccagctattaggccctggctgagtgagtgtccacaccagatgttgccgtcaggtgttgcctggtaggccatcttggctgcccccggagaaactccccctggaaacaggaacccaaggggtgttgctccaccaaggagccatgctgggcttgagtacgtttaaagcctggtgacagcagggaccccgacatgcagtggtattacatttgagaaaacaggccagccaggtgc

SEQ ID NO: 30704 - DNA, 236 bp, Homo sapiens
  chr11:72532378-72532614
  hypo
tggtgctgggagcggagcgctggcttcccactcttcaggcgaggcagtggagcgggttgctcttgccagagaggttcctagtagggtcgcagagaaacgaagcggcacggcgaggattgggacccagggctgactccagagcccgagggccttccactgctccacaaacagcagcgcgtccctgtgcaaggtcccaaacctgtgtggggctcagcttgcttttcaggaagggggcg

SEQ ID NO: 30705 - DNA, 364 bp, Homo sapiens
  chr11:799220-799584
  hypo
cgtccccacacactggagagacttgaaggtgggggctctgcccatccactggggaatatctgggccagcctaaaagtctgtggggcctaggcctgggcaggctctgggggctgtggagccgaggagccaggcagagcggggtccttgggggccaagcccatgcgtcggatgctgtcctggtacttgcggcggccgagctccaagactgcgcgcacctcttcagccacgtcctgccggtcactctgctccagggcctgcaccaggagccccacagcccctggctgcccagcctggcgctcagcccaggagaagagcatgtgacggatctgctcatccagatcatccctgcaggcagaggatgggc

SEQ ID NO: 30706 - DNA, 39 bp, Homo sapiens
  chr11:823426-823465
  hypo
cgggtagtgaagggaggtggctgttgggggtgccaggga

SEQ ID NO: 30707 - DNA, 410 bp, Homo sapiens
  chr11:823494-823904
  hypo
ccctccgctccatttaaccctcctcactgcaggtgctgcgagagatgtgcaagcagggataccgggatggcctgcgctttctgcagcggaacggtgcgcggacccgggcgggagagggcggggtgggctcggctctgctaccccctgcgggccgcggccgcgctgatgaactgagaatcccttctctccccaaccccaggcctcctgaaccggcccaaccccttgctggcgttgccccccgcccgcccccacggcccagaggacaaggaccaggcagtggagagcgcccaagcggaggattactcgcagctgcccggagaagatcacatcctggagcacctgcccgcccggctcaatgagggtgcgcacctgggggacgggaggggaggaggggaggcaggagggaaaga

SEQ ID NO: 30708 - DNA, 49 bp, Homo sapiens
  chr11:86085693-86085742
  hyper
cgctgcctcgagcttctgaatcgcctgggcaacctggaagccgcccatc

SEQ ID NO: 30709 - DNA, 127 bp, Homo sapiens
  chr11:93212118-93212245
  hypo
cgtccccctcccgcgcctcctctccctgccgatggggtccgcagccggctgcggggctcactcggtgatggtggggcgcgtggccacgtacacaaacaccacgatcaagagcacgaccacggccagc

SEQ ID NO: 30710 - DNA, 226 bp, Homo sapiens
  chr12:109507780-109508006
  hypo
cggggagggcggtggaggagaggggctggcgaagttggcagggagcagattgtgcagggactaggaggctgcgggcggcatcagcttctattgtgtttgcagcggggagccactagaggactttgaactggggactggtttgatctgacttgttagaaaaggaaggctggaggggcaagaatgcaagccgagaggaaaggtgggaggccgctgcagttatctggcc

SEQ ID NO: 30711 - DNA, 143 bp, Homo sapiens
  chr12:109898449-109898592
  hypo
cgcctggcactcttccaccaggccttggactaggtagtacttggcttctgctagcagctcctcgatctcccggcggctctcgggtaaaggcaccgccccgtctcgaaggtagttgagtatcgtaccaaagtgcttcccacagc

SEQ ID NO: 30712 - DNA, 159 bp, Homo sapiens
  chr12:109970799-109970958
  hypo
cgggctccctctgttcgcaccacgtgcagtgggtgccaccagcctccgcctcgccctcaccgtctcccattttctcctcacatggtctctctgtgggagggtgtcagctgctgctctgttcctcttaacaatcccacaggagacctgcctctcggggac

SEQ ID NO: 30713 - DNA, 390 bp, Homo sapiens
  chr12:111800610-111801000
  hypo
cggtggtggagggggctcgggtccaggcctgaaggtggcctcagtgctccagacagcgcagccattctccttgggcgggagggcactgggccggcggggcaggggcagggctgggaccggggctggggcagaaggcagggatgggactggggccagggcagagggcagggacgggggcaagggcagggactggggctggggctggggcagggccatgccacccccgccacgtacagccgccagctgctgctccagctcgcgcaccaccagccgcaggtagtcgaagctggcacgcgacagggccttgacccagccctccatggcatcctgactctcagcggccagcacgtaggtgcgcgcccgggtccccgcaaagcgcacagcgaaggc

SEQ ID NO: 30714 - DNA, 58 bp, Homo sapiens
  chr12:113704033-113704091
  hypo
cgctggcggcctacctctttgcacacaatcacctcttctacctgatggagctggccac

SEQ ID NO: 30715 - DNA, 615 bp, Homo sapiens
  chr12:113796265-113796880
  binary
cgccccgtaggcctcccctcgcgccagcccctcccatcccggaaaggctcagcccaagcccggccccgcccgccctcggccccgcccatggcagagcgcagtcacgtgacccgggctgcggggcgcagcattgtgcggtcatggtgggccagatgtactgctaccccggcagccacctggcccgggcgctgacgcgggcgctggcgctggccctggtgctggccctgctggtcgggccgttcctgagcggcctggcgggggcgatcccagcgccggggggccgctgggcgcgcgatgggcaggtccctccagcctcccgcagccgctcggtgctcctggacgtctcggcgggccagctgcttatggtggacggacgccaccctgacgccgtggcctgggccaacctcaccaacgccatccgcgagactgggtaagggttggcttatccccacgcggggccatcgggggagggggatgcgtgggcgccggacctcgcctgttcccgggaccggcctcttgccgggtgggaacgcccgtttctctgggggtcagctactcccgaggctgcagcaccgccctgcgggccaagtaccctgtttgggagctggctactgc

SEQ ID NO: 30716 - DNA, 345 bp, Homo sapiens
  chr12:120031912-120032257
  hyper
cgcgctctctgcggctcccttcctcacggcccggcccgcgctaggtgttctttgtcctcgcacctcctcctcacctttctcgggctctcagagctctccccgcaatcatcagcacctcctctgcactcctcgtggtactcagagccctgatcaagcttcccccaggctagctttcctcttctttccagctcccagggtgcgtttcctctccaacccggggaagttcttccgtggactttgctgactcctctgaccttcctaggcacttgcccggggcttctcaaccctcttttctagagccccagtgcgcgccaccctagcgagcgcagtaagctcataccccga

SEQ ID NO: 30717 - DNA, 62 bp, Homo sapiens
  chr12:122237462-122237524
  hyper
cgccgaagaacacacaactgggaaatacttgcaagtggatcctctcgtatgctgctatattc

SEQ ID NO: 30718 - DNA, 582 bp, Homo sapiens
  chr12:122460955-122461537
  binary
cggccgcgcgtggttttcgggatcacattagcgtccgcccggcgtggcccggtcgacattaaggggatcgaacctttccgcggcctcgtcggggtctgctcggaatcggcccctgggccaggcccgaggcgcaagcagatcgccaggttgggtcagagttgttgaaaactccccgctgcctgatttcaactttattatttttttcccacgccttcactggggtcccggagggagaggagccgccgcaacgctggctctgagtgtcagcgcccgcgggctcgtctcgaccctttatttcgagcctggaagctgggcaggccctgtggcaggggatgtttacgtttgggggtgtcgtttctcgagtagcgcctcggtctctaaaagccactgggggcgagcctccggtgtggcggtgtcacaagttagctgtcctttctgagtcaaacccaacaaaaaaggcaagaggaaaatcaataaagtccacgtgctccccggcctcctatggaaagggctggctgcgatggccggatgcccggccgtgggctgggtttggctccagtgggacaaagaattttcagaacc

SEQ ID NO: 30719 - DNA, 63 bp, Homo sapiens
  chr12:122463078-122463141
  hypo
cgatggtaggagacgaaagcttgggctgcagcgtaagcttggaggcccgctgcggtggctcac

SEQ ID NO: 30720 - DNA, 345 bp, Homo sapiens
  chr12:123874193-123874538
  hyper
cggccgggccgcttcctttgctgccgcctggctgggagtggcgcccacacggctccgccatgagcctggcggtgtttgacctcggaaaagtttgactgcgccttcgtggcgtctccgcagcccaagaccctacttccccggaggtggccgcggtcccaggctgtgcggggcctgcgcgggcccctcggagaggtcacgggtctcaccgcctcggtgttgaatggtccccgaggcggcgagggcccggcgttgcttctggggacgccctcctccgtctgtacttactcagaggaggggccccacgcccagaggcgcccgcagtgacctgaaccgccccaccgcccc

SEQ ID NO: 30721 - DNA, 192 bp, Homo sapiens
  chr12:124335343-124335535
  hypo
cgccacgcagctcgccgcaggccccctttccaaggggctggccggccgggccacctaactgcttctttctttcttccttcttgccctccagtttgaagggcaggagatttccctggactcccgcatgggcatcttcatcaccatgaaccccggctacgcaggccgcacggagctgcccgagtcggtgaaggc

SEQ ID NO: 30722 - DNA, 258 bp, Homo sapiens
  chr12:124456333-124456591
  hyper
cgtttgtgcattctgctccgtttcacgaatcacaggcaaatcgttactcagagtaaactaaagccgcatcaaagcttcaggaaggggctggcaaggtagtgtacttacggaaaggctaccaggacgggaggcgatacaacttgtcagggagggtctctaaggttccccgggtggtaacaagcatttaaaaaggcgatgtggattcagacggcctcctccccacagcatcccagacaaagccgggctaggccccggggc

SEQ ID NO: 30723 - DNA, 251 bp, Homo sapiens
  chr12:124879871-124880122
  hypo
cgccccacccccgctccctcctgccatcgcctggaacacacagccattagcagccaccctgagcagtaattgtccagattgctgtaattcacggcagacgaacatgctgctgctcacgacattattacaaatgtcactgagcagggcctccgcgtgcacggcccccaggggacgctcactgccgtctccatgggcaggacccaggatgagctcactgtcatcactgaggacccaaccttgagatggtggga

SEQ ID NO: 30724 - DNA, 74 bp, Homo sapiens
  chr12:124893329-124893403
  hypo
cgaaggttacaagcactccaagggcattgcttcctgatcatctggctacatggagctacgaagtcatccgtgcc

SEQ ID NO: 30725 - DNA, 188 bp, Homo sapiens
  chr12:124893570-124893758
  hypo
acgcagcttccccctacagaaagctggttgttaaacatttaccagcactctacggcagaaagatgcgtgtcgacagaacgtgagcaacatttaacacgcacatggaagcctgttccgcctgtacagatgtgtgctgtgccagccgaggctctgttgtaaatcctaattcagatcccgacccgcaactc

SEQ ID NO: 30726 - DNA, 178 bp, Homo sapiens
  chr12:124970986-124971164
  hypo
cgttcattcccgggctggaactcagacagcagggagggcctccgccgctggggctggatgatggagccgggcgacaggtgggaggcatagtcgcgggagtggtgctggtactccaggagcccgacgtcctgcaggaggggacagaggagtggtgagcgtgggcgggcacgggcatggc

SEQ ID NO: 30727 - DNA, 286 bp, Homo sapiens
  chr12:125605555-125605841
  hypo
cgcgtacatgtgcaagtgttcacagcatggtggctggttccgtgccgtaatcacgggccctgggttggccagagcgctgaggctgattgaggtgtggtcgtgctgtcgcagggctccctctggatgtggccatcgccccgcctgagagagcctcctgcgccgtttggcgaggcaggtgtgacttggcaccctggcaggggctgcgggtgaggggctttcggaagaatgcaggctttaaaccactacactggtcgccaccagcagtgagagggagcgggtgctgggc

SEQ ID NO: 30728 - DNA, 106 bp, Homo sapiens
  chr12:131623219-131623325
  hypo
cgctcccacccattctcgcactccgcccccgcccgcagctgtgtgattttccatttgcttagggaccacgtctgccctgctccatgggagctggctggctcatggg

SEQ ID NO: 30729 - DNA, 145 bp, Homo sapiens
  chr12:131623397-131623542
  hypo
gcgtggacagatgcatgggggtgaaagcgtgggtgccgggcagatgggtgagcagaggagggagtgagcgctcagcacagcacgcctgcagtgcccttaaggggagtcagcgtggagaaccgtgcggctggagacgccacagtgc

SEQ ID NO: 30730 - DNA, 92 bp, Homo sapiens
  chr12:132329469-132329561
  hypo
cggcccccgcccgctgaagcggtggacaggcacccccgttttaatttgcctttagcagacctctaggcaaggataggggctccacacaagga

SEQ ID NO: 30731 - DNA, 280 bp, Homo sapiens
  chr12:132603391-132603671
  hypo
cgccgcacgccgcgcagctcgctgggcagaggcagaggcagaggcagcagcagtacgacccctccacggggcctcccgtgcagaacgcctccagcttgcacacgccgggaggctgccccagccggggtccgcgctgcagcgtctttgcaggtctcccagcagcaggcgacagagccacaagcacagctctcagtccagggaaggacccagcagccaatcgcagcgccgccacctttcctgccaggccggcgctcgccaccaggcaggctgtttagcttgc

SEQ ID NO: 30732 - DNA, 915 bp, Homo sapiens
  chr12:133147764-133148679
  hypo
cgcacgtggcgagcggccaccccggcttggcctgccgaccccgggagtgccaggtgactatccgcctcgccccgccgggagcccgcggccaacgtgcctctctgtctctctctctttttctcttgtagatcacgagctgctcaggcaagagctgaacacgcggtttctggtgcagagcgccgagcggcctggcgcctccctgggcccgggggctctgctgcgggcggagttccatcagcaccagcacacacaccagcacacgcaccaacacacacaccagcaccaacacacattcgcccccttccccgcagggctgcccccgacgccgcccgccgcacccccgccggtgcgtaggcccgcgtgctggcagggggcgggggcgggcgtggggcggggacacgcagcaggcacacacagacacacgctcgcacacacaccagcccaggaggaggtggggggccggcggcacctctctgtcgtctgtccggtccccaacgtgccttctggtgtccccaccccaagctgtgccatgaggcccccaccctcggcagtggtcctggacttaggcaggcaccccgtgcccacgtgcatgggacaccctcacgcctgcactagatccccagtgccagggctggaggcccagacaggcctgagggcacagggaccatgactcagggtgcctcccgtgttccccgccccggaggcccggtctgaggagggagttgctgggggctggagtcccctccactctctcgagttttattcggaaactggccagtttgtcagtaacccggtgtgtccccagcgcgacccagcagccagggcttcacgccccaggcctcagccaggcacacagactgcctgggggggccgagttcccaccccatgcaaggggacccttagaatggcagggcc

SEQ ID NO: 30733 - DNA, 136 bp, Homo sapiens
  chr12:133280443-133280579
  hypo
cgggaatttagagaaggaagcagagacaactgagaagacagactggccgggaacacggaggatctgggatggaagaggggagagctgggaagccgcgcctctgagtagcgtgggggcagagtcgccatcctaggtg

SEQ ID NO: 30734 - DNA, 263 bp, Homo sapiens
  chr12:31255691-31255954
  hypo
cgggatctctcagccgaacaagccctctccaggtggtaggtacagagtggagagaggctgagttttgatcacagtcggagaggctgagggaaggggtagaacggagcagctggtgacgtgggtgatgacccgggaggtcctgacgtccacctgctgggctcttgtctcccccgcccaggtgtgtggtgatggtgggcatgcccttccccaacatcaggtctgcagagctgcaggagaagatggcctacttggatcaaaccctc

SEQ ID NO: 30735 - DNA, 186 bp, Homo sapiens
  chr12:34358307-34358493
  hypo
cgtcggaggaaagggggcctcccggaaagctcaaagtctgagcaggggatggaaaactctggcgtccccactcaacagcagggcggtgctgcggcgatccagtgcacgcccttgccgccggcgatggcgggaggctcttggaggccggaaagcgcagcgcagcggcccacagtgctccggcgtgga

SEQ ID NO: 30736 - DNA, 137 bp, Homo sapiens
  chr12:34358522-34358659
  hypo
ggctgaggggtccctgatccgagccccgcggcctccgagtggggatgaagcctggagtcaggcaggcgtggctgggccaggctcttgtgtcatccaggcatcactgccggtgtctatggccataccaccctgaaggc

SEQ ID NO: 30737 - DNA, 95 bp, Homo sapiens
  chr12:38595387-38595482
  hypo
cgcagaccgggcagtgcgggaaccagatcggcgccaaggttggcagccagggctctgagggcccagctcgggcctgccgggtggccagggaagat

SEQ ID NO: 30738 - DNA, 37 bp, Homo sapiens
  chr12:38595561-38595598
  hypo
cagctggcgaggcggccagggtggaccccagggacac

SEQ ID NO: 30739 - DNA, 34 bp, Homo sapiens
  chr12:47629013-47629047
  hypo
cgaacaagatgagctggtggacggaggccagcgg

SEQ ID NO: 30740 - DNA, 142 bp, Homo sapiens
  chr12:47629208-47629350
  hypo
gaattcctgcctctgggacatctccaggtatggtccgaactcctggagaagctacctggagaacctggagaacctgttccagtgcctgggccaggtgctgcccgagtcttgcctcctggtgtggaacacggccatgcctgtg

SEQ ID NO: 30741 - DNA, 112 bp, Homo sapiens
  chr12:47629379-47629491
  hypo
gcccaagctccggcggcagaaggccaccttcctgaaaaacgaagtggtcaaagccaacttccacagcgccaccgaggcacgtaaacataacttcgatgtactggacttgcat

SEQ ID NO: 30742 - DNA, 243 bp, Homo sapiens
  chr12:47629544-47629787
  hypo
tggacgtgtgcaccgctgcctctcccagctgctgctggcccacgtggccgacgcctggggtgtggagctgccccaccgccaccccgtgggcgagtggatcaagaagaaaaaacctggcccgagagtcgaagggccgccccaggccaacagaaatcacccggccttacctctgtccccacccttaccttcccccacataccgccccctgcttgggttcccaccccagcgcttgccgctgctccc

SEQ ID NO: 30743 - DNA, 213 bp, Homo sapiens
  chr12:52294173-52294386
  binary
cgcctcccgcggccaggggcgggcagccgcagagcagcacgctgggccttggctccggtagcagcaagttcgaaccccgctcctgctccgcttcggttctcgctcctcggcccttgggcctccaaacaccatttcctggcagttcgttgcgcattgcgctctccccgccaccaggatgccagtgaccaagaaggatctggcggaggacgcgcc

SEQ ID NO: 30744 - DNA, 40 bp, Homo sapiens
  chr12:52387815-52387855
  hypo
cggcgcagcccgcctgacggccctgcgcatcaagaagacc

SEQ ID NO: 30745 - DNA, 196 bp, Homo sapiens
  chr12:52467443-52467639
  hypo
cgctcggaggtgctggaggtgtcggtggaggggcggcaggtggaggaggccatgctggctgtgctgcacacggtgcttctgcaccgcagcacaggcaagttccactacaagaaggagggcacctactccattggcaccgtgggcacccaggatgttgactgtgacttcatcgacttcacttatgtgcgtgtctctt

SEQ ID NO: 30746 - DNA, 228 bp, Homo sapiens
  chr12:52913581-52913809
  hypo
cggtcctcaccctctggatgctggggtcgatttgcaggttgaggggagtcaggagactctggttgacagtgacctcttggatacctccaggagggcagacaggaaagccagggccaccgaagccacctccaaagccagctccgccaccgagcccaaagccaccaccagctccaccgccgaaaccaaatccactaccggcaccacctccaaagccatagccgcctccag

SEQ ID NO: 30747 - DNA, 220 bp, Homo sapiens
  chr12:52913838-52914058
  hypo
ccaccactagtgctgatggatatcctcttggagccccccaggttgtagaggctccggctgccatagccacccactccacaagcacccgcaaggctgaccctgccgaagccaccaccaccgccacccccggaccgggacacggaggtgaagctggtgcgggagacagacggggtgatggcagaggcggtgctgaagctacgactgcccccgctccggaagg

SEQ ID NO: 30748 - DNA, 101 bp, Homo sapiens
  chr12:52914087-52914188
  hypo
tgttcctggtggagcaagagaaccaggcactagtgggttgggaggtgctggagagaacagagctcagcaggacgcagaaggtggctctgttacccaggaac

SEQ ID NO: 30749 - DNA, 194 bp, Homo sapiens
  chr12:54150983-54151177
  hyper
cgatgatttcattatcgacgtgctgtctgtctcgggctcagcccggttgccagggcgactctgatcgattgccttccggtcttcttggcttggccggctgcttcctttctggagcctggctgttggcgagcactccctagcggccctctctggtactgcagagcttcccggttgcaggcttgagagactcaggc

SEQ ID NO: 30750 - DNA, 251 bp, Homo sapiens; identical to SEQ ID NO: 28441
  chr12:54388354-54388605
  hyper

SEQ ID NO: 30751 - DNA, 277 bp, Homo sapiens
  chr12:56472747-56473024
  binary
cgaagtcttcaggcttgaagttctggagaaaacaactaggctctccgggcgagatcccgaataccagtttaagggatttgaaatgcaaggccgtctgggactccactgccacggatgggcaccaggcggcgccggtcggatccgtcccgggactagcagggctttgggcagcaacccgcagggagcccgaccgcctctggccaggtccgggcagctggtgggggaggttccagaggtccacgccattcgtggacgcagtctctagtgtcctctccgc

SEQ ID NO: 30752 - DNA, 117 bp, Homo sapiens
  chr12:63195619-63195736
  hypo
cgctccgatgaccaggcactcatggggaatcttcttctcggtaaagaagcgtgtggggggcgtgctgggggagcccggggcccccacccctccgcgcagggaggctgcccgggtcag

SEQ ID NO: 30753 - DNA, 160 bp, Homo sapiens
  chr12:63195813-63195973
  hypo
tgtccacgatgtcctgcagctgctccgtgatgtggtgctgcagcaggcgtgacgccaccaccgcggccccggaccccgcgtgcccgtcaaacagcgaccaatagtggcaggaaacaccctcggattcctgtgggagaggacgacagggaggagtgagaac

SEQ ID NO: 30754 - DNA, 437 bp, Homo sapiens
  chr12:89747140-89747577
  binary
cgccccaccaccaccatcgcctgctgggaggtcgcgctggttaatgatttctgggcaaggagctcggcttctgacgggggagccggtctggcggggctgcctgagcgaggtgtgctgggacgcgccgggccgggccagcagtccccgccatgggcgaggcgtgaggaagtcctcccgcaagacctgcaggctgcgggggctcggcaggggggctcgacgattggttacagttggcagggaggcatgtcagagggggcctccccagccctctcctgccgccgcctcctccctttgtccagcgccgggcactccggggagcaccagccgcgcctgcgcgctgcgctccctgccaccgccccgccgtccccgtctccccgcttgggcacggggctgtgcgcgacgcagtggacgggtgcggggctcagcgagggactccc

SEQ ID NO: 30755 - DNA, 105 bp, Homo sapiens
  chr13:100068654-100068759
  hypo
cggtagacatgaggacgcagggcactgacagctcccggactgtgctgcgcgggctgtggccccacacctgcccaaaggtgagctcctctgcaccccgtgttctgc

SEQ ID NO: 30756 - DNA, 617 bp, Homo sapiens; identical to SEQ ID NO: 29805
  chr13:106912373-106912990
  hypo

SEQ ID NO: 30757 - DNA, 181 bp, Homo sapiens
  chr13:110008382-110008563
  hypo
cgggcatgctggcaccatggcggggcacgggagagcgcacgggagggcacggtactagagaagggtttctgctacattacccaggaagcctgcccttcacgcgtgtccctgccattgtgctgctccgaaaccgcacggctctcgaatgttaatgcctacctaattatatattttggcttcc

SEQ ID NO: 30758 - DNA, 95 bp, Homo sapiens
  chr13:110486576-110486671
  hypo
cggtgtcactctgggaggagctcgtggaagccctgtcggcactgaccatagtaccttgactaggagaagtttctcaggtatgaccaggaagaggc

SEQ ID NO: 30759 - DNA, 204 bp, Homo sapiens
  chr13:112691506-112691710
  hypo
cgcgtctccaccagtggccacggcgcgcagcccttcctcaggcccagctccctccgcgtctccaccagtggccacggcgcgcagcccttcctcaggcccagctccctccgcgtctccaccagccctttcttagacgcaactctctcagcgtctccaggtcagctccccttccctgctgctgaggggagacaacggtgcccaccc

SEQ ID NO: 30760 - DNA, 44 bp, Homo sapiens
  chr13:112716634-112716678
  hyper
gcacgcgcgcgtgcgcgcgcgcgcacacacacatacacacacac

SEQ ID NO: 30761 - DNA, 93 bp, Homo sapiens
  chr13:112716721-112716814
  hyper
accgcccgaaagaaagcctgggtcgcttttgaggagaaggagtttcttgacccttccccgcaaacgctactggaacggcctccaaactaggac

SEQ ID NO: 30762 - DNA, 352 bp, Homo sapiens
  chr13:112760444-112760796
  hyper
agctgccctggctggtgattggaggtttaacgtccggaattcaggcgcttctgcagctcagatttgccggccaaggggcctcagttgcaacttttcaaaatggtgtttctggaaaataacaaattcagactcaactggtgacagcttttggctatagagaatgaaactgcttccctttggcggtggaactcttaaacttcgaagagtgaaagaatacaatgaaataaaatgccataagatcactggatttttcagaaaaaggaagaccccaaattactcccaaaatgaggctttgtaaattcttgttaaaaatctttaaatctcgaatttccccctacaacatctgatgagt

SEQ ID NO: 30763 - DNA, 134 bp, Homo sapiens
  chr13:113274734-113274868
  hypo
cggcctgcactcaggactgggtttatcatcaagaacctggcaggctgcctctaaagagagcgtcacctgcttatggggcccatgtacgtctttccactgcagctagacaagtcccgaattcaaatgacgattac

SEQ ID NO: 30764 - DNA, 282 bp, Homo sapiens
  chr13:113291506-113291788
  hypo
cgtgcttctgtcagtcgacggtttttactccagcgagcagcatcacccttaaaaaggtggcagaaacatgggagatgggtgggaggagggcaacagagccaccgtctgctttcatcgcccaagcgcagcggctctgccacctggcagccgaggccatgcaagatttcgcaggaggagcccatggccgcggggaggaggagtgggcgcaggagcccacggaacaggccaggcaggagggaaggaggagtgggagacccaggccattctccttcccactttggc

SEQ ID NO: 30765 - DNA, 35 bp, Homo sapiens
  chr13:113350364-113350399
  hypo
cgtctcggctgacggctgcgtggccttggcaagtt

SEQ ID NO: 30766 - DNA, 647 bp, Homo sapiens
  chr13:113350643-113351290
  hypo
gtggagagtgggtgaccttgccctgctctcccggggagagcggtggtcactggtgggaacgcccctgccacgcccagcagcctttctgcctctgcgcttgcctcctccggttggagcgagtgacccgttctgccgaagtccagtcccgtgtgtgctgcggccccgtctctctccctctctgagtgacactgtctgccctgctgcttgccgtcccgctgttggcaccgctttagaccccatatttcccagcggtcaccgtgctcatttttggcttccagctaccgtttttcttaggttaccccgcgtagctggcccgtccttccttctcctgtctcttctgtgcctaccgcggggggttcccttaccaaggtctccatcacccccaggcccacctccctcgggcccctctctgcccttgccctccacctcagcgactccgtggggcttttgtgatcccagctgcagttagcgagcgcccctgtgtgctcagagacacgccagtgagccgggaaggacagagacccaagtcccatccctctggggcccccttggaatgggggaggcgaacaggaaaccaccacagtgagtgttggggtgccccgcaggcgacggtgctgagaaaaagagagtggggttgggggcagtgc

SEQ ID NO: 30767 - DNA, 318 bp, Homo sapiens
  chr13:113383516-113383834
  hypo
cgtctggttggcggtcagctcatttatgattgagcctgaccttatgacaggccacctcgttaacgattggatgttgtttttatcactctttactacgtttgctttcccacccctgctgtttccatgggtttatccgactctgcccactgaggcagcacagtcccctcgccttagcattgcgggcccagagtatctaacgcgtccgagtgcgaacagtgtcagaaggcactgaggcagcgcggttcccacctcggcattgcaggcccagagtatctaacgcgtctgcgtgtgaacagtgtcggaaggcactgaggcagc

SEQ ID NO: 30768 - DNA, 306 bp, Homo sapiens
  chr13:113477621-113477927
  hypo
cgtgtccgcatcatttctgatcatcgtatctttacaggcccttaggatcggaaaacctgctgcttagaggagctacactgaagaacactgagaaaatctttggtaaatatttaattaattattaaccattgcccctaacattaaggatgcatgaagcaaaagttaaaacccgcagcggaacccgagagcgtttcttggcaccttgaggtgctggaggctttctggccgcgcaagttctgccccactgagatttgatcagtgaataagtgcaatcctgaagcagcagcatcagagaatacggcttac

SEQ ID NO: 30769 - DNA, 146 bp, Homo sapiens
  chr13:113508784-113508930
  hypo
cgagctgagcaagacggtcctgcgccacagcgggagcctgaccagagacaacctgtccgggtaggcagcgcgtccccgcccccacccccacactcccgcaaaaggggcttcagacccagtggccttcacctgcaagtcggggagcc

SEQ ID NO: 30770 - DNA, 121 bp, Homo sapiens
  chr13:113825842-113825963
  hypo
cgtttgagcattatgtccccttgaaaatcagactgtaaagaactgacgattgttcatgatttcagattttaacagaacgagccaagacccgctgatgatcaagataacgcacgtccatgtg

SEQ ID NO: 30771 - DNA, 173 bp, Homo sapiens
  chr13:113825992-113826165
  hypo
gaatgacctgtcactgctggagctggagtggcccatccagtgcccaggtgcggggctccccgtgtgcacccctgagaaagacttcgctgagcacctcctcatcccacgcaccaggggcctcctcagcggctgggcacgcaatggcactgacctgggcaactcgctgaccacgc

SEQ ID NO: 30772 - DNA, 52 bp, Homo sapiens
  chr13:113984308-113984360
  hypo
cgggtgcgtgcatgggagcccaggtgcgtacatggaaacccaggtgcctgca

SEQ ID NO: 30773 - DNA, 86 bp, Homo sapiens
  chr13:113984409-113984495
  hypo
gggtgtgtgcatggaaacccgggtgtgtgcatggaaacccaggagtgtgcatggaaactcaggtgcgtgcatgggagcccaggtgc

SEQ ID NO: 30774 - DNA, 150 bp, Homo sapiens
  chr13:114616940-114617090
  hypo
cgggagatgaatcacacgtgagccgacggtggaggaggcattgatcgggagatgattcacacgtgagccaacggtggaggaggcattgatcaggagagattcacacgtgagccgacggtggaggaggcattgatcaggagagattcacgc

SEQ ID NO: 30775 - DNA, 148 bp, Homo sapiens
  chr13:29913861-29914009
  hypo
cgggcatagtcccagttgggaggagcggtgaggaggggccgggtgcggacccagcgcttcccattgacgtagacgactttgcagccatccttgacctgggagcggagaaggggcctggaccgcaaggcccggtgtttctgggattggg

SEQ ID NO: 30776 - DNA, 165 bp, Homo sapiens
  chr13:32526656-32526821
  hypo
cgtcctgcgtcccccgattcctgctccctggttgccgcgtccttggctggcgtcagaaaaatggctacaaactttctagtaggtgagaagatctggttccacaagttcaaatatggcgatgcagaaaggagattctacgaacagatgaacgggcctgtggccggc

SEQ ID NO: 30777 - DNA, 237 bp, Homo sapiens
  chr13:32885424-32885661
  hypo
cggagcggctcggaggcggcgtctccaggcacctgcttgctcttcgtctcctgagggcacggggcgtctttctcccccgattcctccagctgcccgggctcctcctgcctgtcagctcctgacctccgtgatggtggctgcggctggctggcctccgcagggcccgggagcgccttgctctccgcttcgtccccatctctccgcaggcggatcaagcccctgcggccggtggcgggc

SEQ ID NO: 30778 - DNA, 284 bp, Homo sapiens
  chr13:44544261-44544545
  binary
cgtcattggccgcgctgcaggtgggcggacacggcgagcggctgacgcagtgtcgcgaggtggtgctcaccacatccaaggccatcccggtgcaggtggatggcgagccctgcaagcttgcagcctcacgcatccgcattgccctgcgcaaccaggccaccatggtgcagaaggccaagcggcggagcgccgcccccctgcacagcgaccagcagccggtgccagagcagttgcgcatccaggtgagacgcgtcagcatgcacgactatgaggccctgcactac

SEQ ID NO: 30779 - DNA, 89 bp, Homo sapiens
  chr13:52343302-52343391
  hypo
cggccgctgggctgtgcggctgcggcagaggagagggccagccacagcatggtgtccgcgccctgggcctcggagcgcaggcggtcccc

SEQ ID NO: 30780 - DNA, 139 bp, Homo sapiens
  chr13:74707123-74707262
  hyper
cggctctgcgggttcccggcccgggtggacgtacaaagttgccccttgtcaactccggccaggtcccccgtaattgaaaataacagccaccggccagcccctggctacttgcatggaccaggcactgtagcaagtgaca

SEQ ID NO: 30781 - DNA, 212 bp, Homo sapiens
  chr13:74707414-74707626
  hyper
accccgctcgaggccggggggccaactacttccacgagccccccctcccccccaagttcagccctggggttttatttcacatccttggcaactgtcaggcaaacactgcaaccaacaattccactaggggtagaaaaacacttgcttaattcacgttacttgataacttcttctggaaaaaaaaaattaggggaggtggggaagaaacctcc

SEQ ID NO: 30782 - DNA, 915 bp, Homo sapiens
  chr13:74707668-74708583
  binary
aacagcatcgcccttccccggccccctcccgcttcccagcactttccccctttaagaacacagaccaaccaaaatgatttaacttgagcagatgacagaaggaaaataaaacacgttaagagaatacggtctgatttgggatggcaaaaaaaaaaaaaaaagaggagggggttgtttattttgataagaaacggaatcggcacagacctgaacagaagctgcagagcaggagaaattgttttctttccctcacacagagtccccctctctctctccctttctctctctcacacgcgcgcgcgcacacacacacacacactcgcacacacacggcgtcacccgcgcacacgcacacgcagagcctctcagcggctctctgcagttctcaggaaatgaatggggggcaacccggggaactgttgtacttgcaaatgacttacccggatcacatgatgcgctaaatgtagggtgggccggtgggtggaggctgccgagttgcgagccccggtctagtgtggggagcctcgccaggcccgcatcgaattaccccggggcccagccgagggggttgcaggacgccgcttctcctccctcgcagcccgcagctcaggaaaccggagaggcgcttggggtggggtggggtggggtgctgtgagggggggggccgaaaacaagaaacccccaaacaaaagagctccgggtcctcctccccagaaacaaagccccgccgctgccggcgagccccggggtggggccgagggcgggggcggcggcggggaggggctcgctcagcaggcgctaagtcgctttattgccataaaatggggcccccgagccgctccgcccgaggattaggaggcgggctctgagtgtgatggttgaaatcccctgtgggaaactaacccctccccgctc

SEQ ID NO: 30783 - DNA, 43 bp, Homo sapiens
  chr13:76054897-76054940
  hyper
cgaagatgacgcgaccagccaaaccggttaaggatttgactgc

SEQ ID NO: 30784 - DNA, 152 bp, Homo sapiens
  chr13:98829232-98829384
  hypo
cgccgcctcctcgcccctcctgtcgccgtgagccgccttctgccagctgtggaggccccggggcctcggtgccacccgcgggggctgagccactgtgtcgccctcgtccccgctgctgctgctctctccgtgctcggggtcgcaggccgggc

SEQ ID NO: 30785 - DNA, 352 bp, Homo sapiens
  chr13:98869699-98870051
  hypo
cgtctacgaccgtcgtcgcaggaaatgatccttgtaactttctcgtgttgctgtcttgtcactgctgtactcgagcttttgtagctcctgagacttaagtagcattcatcctttgcctgaggatcaagtgtgggcttcgtagctcggggagcctgggagagagcaatgagcctccatggaggggccctgtacaccgggaggtgcctgggcaactcccatggctcatctcaaccacagtcctcggcggtttgttttctgcattagcttctcatgccagaacaccctcttatttgtttacctgcttagtgttggcctcttgcaggtagagtggccactccttggagggcaaggc

SEQ ID NO: 30786 - DNA, 220 bp, Homo sapiens
  chr13:98870098-98870318
  hypo
gcatgaaactgactggtgacagttctgctcggtcgtttaactatacgagagttggtgctgtcctagcataacaagggaaagagcaagtgggaagagcttctgagtcccttcctcgtgttttcacagcgtgaaggtggggctgggattggagtccggcccgccagaccctcaacttacccatcttctgggcactaagagccgcctcctttgtgagattcgc

SEQ ID NO: 30787 - DNA, 192 bp, Homo sapiens
  chr14:101096264-101096456
  hypo
cgggagggatgcgctggccgtggggaccagtgcccgccgctgcagctgatcctgccctgtcccgtctccatgtgaataaagccttgttccagccagtgcctcactgcgtgtattccttggcgactcggagaccaagatccaggggtacccggacttctactcccgatagcaggcaacggatgcctcctgctc

SEQ ID NO: 30788 - DNA, 469 bp, Homo sapiens
  chr14:101200752-101201221
  hypo
gcagcacacccaggtgagctacgagtgtctgtgcaagcccgagttcacaggtctcacctgtgtcaagaagcgcgcgctgagcccccagcaggtcacccgtctgcccagcggctatgggctggcctaccgcctgacccctggggtgcacgagctgccggtgcagcagccggagcaccgcatcctgaaggtgtccatgaaagagctcaacaagaaaacccctctcctcaccgagggccaggccatctgcttcaccatcctgggcgtgctcaccagcctggtggtgctgggcactgtgggtatcgtcttcctcaacaagtgcgagacctgggtgtccaacctgcgctacaaccacatgctgcggaagaagaagaacctgctgcttcagtacaacagcggggaggacctggccgtcaacatcatcttccccgagaagatcgacatgaccaccttcagcaaggaggccggcgac

SEQ ID NO: 30789 - DNA, 183 bp, Homo sapiens
  chr14:101492091-101492274
  hypo
cgtggcgcgttcgctttatttatggcgcacattacacggtcgacctctttgcagtatctaatcccgccttgcaagctttcctggagctaacatcaactgcgggggtgggggccactaggtctgcgctcagtgtgacccagcggggtttgtgatgtgtttgtcttgtgtgtgacgataactcac

SEQ ID NO: 30790 - DNA, 204 bp, Homo sapiens
  chr14:101970419-101970623
  hypo
cggtcgggcctctgaagagtgagagacagtggtgcttacagctgggtgatgccagagatggagagaagcagagagatcccagacatgttctggatacggacacgacagatgcagaggagcgtgaggaagaccccggggctgagccctaaccttggcttgagcagctggggctgagttggcgccatggacgtggcagcagagaac

SEQ ID NO: 30791 - DNA, 495 bp, Homo sapiens; identical to SEQ ID NO: 29810
  chr14:102068306-102068801
  hypo

SEQ ID NO: 30792 - DNA, 362 bp, Homo sapiens
  chr14:102523351-102523713
  hypo
cgcacaggtgcacacgcgcacacacatgctgcacagttgcacacacgtgcagacacgctgcgcagatgcacacgtgcacacacatgcacacccacacgctgcagttgcacacacgtgcacacgcacacccacatgcacagttgcaaacgtgcacacactgcagatgcacacacgtgcacacacatgcacagccacaagctgcatagttgcacacgtgcacacgctgcgcagatgcacacacgtgcacacatgctgcacagttgcacacacgtgcacactacacagatgcacacacgctgcacagatgcacacacgtgcacacatgcacacccacacgctgcacagttgcacacacacgctgc

SEQ ID NO: 30793 - DNA, 377 bp, Homo sapiens
  chr14:102975682-102976059
  binary
cgccacctcctacccgtcccctcccggcctgcacggccagacgtcgggcggcggagggtcgcggggccgagcggggcgtccgcgcgcaggtggccggcgcagcgagggctgcacctgcgtgcgcgtgtgccggaggaggagggggcggcggccgcgggcgcggcgcgggggacggggactcaccatggggggcgcgggggccacaggccgggcgtccccgcccctgccgcggaccggagcgcgcgctgtcccccgcgggcgagcgggcaaaggtcccacgacggacgcacgggagggagccaccgccgcccgcgcccgccgcagccgcgctctgagccgccgcggccggatcgcagggcggcggtgccgtcgccggc

SEQ ID NO: 30794 - DNA, 241 bp, Homo sapiens
  chr14:103433137-103433378
  hypo
cgcaaggggtgtgaacggtttgccccaagtccttcagtgggttggtgggggcgtatctccacctctattccaacagaaccactgccccagacatgagaagttctggggaacagcagtgagacctgcaccccagcctgagaggcacggcctggcgtggagcacaggatcaggcagaagaggcggggcagaccccatggactgagcagggagcggattcacggccgctaatggggccgcgcac

SEQ ID NO: 30795 - DNA, 130 bp, Homo sapiens
  chr14:104159892-104160022
  hypo
cgaaataattgtctggccgactcgcgagctctgagtgccagccacactgacctggcccactgagagccagcagggctaggtaacctgtcttgggagtgtgagaccgccccgccctgccacgcccctcacc

SEQ ID NO: 30796 - DNA, 123 bp, Homo sapiens
  chr14:104160134-104160257
  hypo
tgttactcggcctgcagccccagtgccaggagccaccccgaccgcgacccggccaggctggctcagggaggccgaggtggcgctgaggtggcttcagcacgctggggattggctcctgctcac

SEQ ID NO: 30797 - DNA, 152 bp, Homo sapiens
  chr14:105196121-105196273
  binary
cggcgtcgtggggaggagcgtggcgtcggcgtcgtggggaggagcgtggcgtcggcgtcgtggggaggagcgtggcgtcggcgtcgtggggaggagcgtggcgtcggcatggtggggaggagctgtggggtggcaacccagaggcaaggagg

SEQ ID NO: 30798 - DNA, 163 bp, Homo sapiens
  chr14:105247313-105247476
  hypo
cgccgtcggccctgccgcgtcccacccgtgggtcattcaggtacacgggaacattctccctcaagttttgcagcatcagccgtacgcaggcgttcacacttcagaatcagagcagctgtcctcggtgatagcccagcaagtaccatttttcatactgacactc

SEQ ID NO: 30799 - DNA, 333 bp, Homo sapiens
  chr14:105611103-105611436
  hypo
cgggtctgcggcatggacagcgaggggccgcagggagacaggcctgcccgcagtccttccgcaccaggactagcctcgccagagcctctgtccagcatagccaggacctgcatagtacgggacccagggcccacccaggtgctgctccccactgggcactcaccacggccacctccacagcactggcccccgaggacgcccggtcgcaaagcaacaccagcaggcggtcccgtgccacagcccttgtggctggcagggagcggatcccggagcaaatggcgcccaccgtggtgccctgggcagagacaggcagtgcgtgggcagggcagggcc

SEQ ID NO: 30800 - DNA, 37 bp, Homo sapiens
  chr14:105715538-105715575
  hyper
cgtcgtggggcccccgggggcgaccaggacggtgccc

SEQ ID NO: 30801 - DNA, 38 bp, Homo sapiens
  chr14:105723707-105723745
  hypo
cgcaagaacctcgcaagcaatcagatggttaggacgcc

SEQ ID NO: 30802 - DNA, 250 bp, Homo sapiens
  chr14:105723873-105724123
  hypo
cccccaggacggctgggacgtgagcggtgaggcccgtgaacaaaggtgcatctgaaggcaggcagtcccagagggccgagacaacgggcaggaccgactgcagcacagccaacagcctcacaagaggcactatgagaagaccggcggcaggggtggggccagtgacatcaaaggaaaccaaaggaaagcagtaagaactacctggggaaacgcccgtgacagccaacacacaccaacgggaaaagtgaac

SEQ ID NO: 30803 - DNA, 237 bp, Homo sapiens
  chr14:23315027-23315264
  hypo
cgggaggccggccggatgaggggactgaggaggagacggaggtgatcatcattgaggtggacgaggagggcggcggggcggtgagcgcggctgccgtggtgctgcccgtgctgctgctgctcctggtgctggcggtgggccttgcagtcttcttcttcagacgccatgggacccccaggcgactgctctactgccagcgttccctgctggacaaggtctgacgcccaccgccggccc

SEQ ID NO: 30804 - DNA, 98 bp, Homo sapiens
  chr14:23884191-23884289
  hypo
cgcccgtcgcacctggtaggtgagctccttgatgcgccgctcgctcttcctcatgcccttcaccgactctgcgttgcgcttctgctcggcctccagct

SEQ ID NO: 30805 - DNA, 61 bp, Homo sapiens
  chr14:29236194-29236255
  hyper
ggagcgagggagcttcacccccggggcggtggttgtttcttttttctttctttcttttttc

SEQ ID NO: 30806 - DNA, 61 bp, Homo sapiens
  chr14:29236614-29236675
  binary
cacccccagcaccaccaccaccaccaccaccatcaccaccacccgccgccgcccgccccgc

SEQ ID NO: 30807 - DNA, 66 bp, Homo sapiens
  chr14:37131997-37132063
  hyper
cgggtgcgttcgcccagtccccggatgcgtagggaggcccagtggcaggcagctgtcccaagcagc

SEQ ID NO: 30808 - DNA, 586 bp, Homo sapiens
  chr14:50469917-50470503
  hyper
cgtgtccctgcttgtgtcaacatagaaaacgcccatggcaacgggcaagtgcggcctgaaatggcagagtgtgtgtttcacaaaacaggggtggctcacggctgcagccgcccggggaggtcctggccttgccttcgaggggctggtcctcggggggtggatgcagctttgcggggctggctccacgtcgcgccgcggcggtttgggctggggagcagccctgcagggaggcgccgccgggtgggccgcggagatagctgcagggcggggcccccgggggcgcggggacgcccagcggccggatatcagctgccacgcccgcgtgggcggagaaaagagcaatttgactttggacggagagctgagatgcggggaggaaatccaccaccggcctctggcgactcctgtcctgcgcgcaggggaggcagcgcagcccgtgaacacccccgagcccggtgcgggccgagcagttctccgcacctccggtaaaggtgcaggaccgggtgatggtctctgcagcagtcagaaggctcctctcccagcccaggaacgtctgcaataaattgcttccatgtgcgggcttccc

SEQ ID NO: 30809 - DNA, 119 bp, Homo sapiens
  chr14:64385274-64385393
  hypo
cgtcagatgccggatgaataatttactgtcgttgaaggtctgtgcggtgatgcatgttgggcgagcatgggagggaaaaggcagaaagagtagccacgcgcttttgctgctgtcttgtc

SEQ ID NO: 30810 - DNA, 52 bp, Homo sapiens
  chr14:69070536-69070588
  hypo
cggccgcgctggccccctgtccgcatgctgtcaggctacctccgtgccagac

SEQ ID NO: 30811 - DNA, 213 bp, Homo sapiens
  chr14:69259278-69259491
  binary
cgtaaaacaggatcgcccaaaacttgtcccaatcccagccctccccccgaagcccccgggctgccctgccaggcaaacttcgcccctcaaaaccctggcctccagattcacatgtaatccccgccagcaactgttgaaactcaaagggtgggaaggacggggccaaattccttcaaacttgggagaaatgccggaggagaaaagaatcatctc

SEQ ID NO: 30812 - DNA, 219 bp, Homo sapiens
  chr14:69261392-69261611
  hyper
cgtttctttggaaaggacggggcgggccgaagagagcgcattctcaccacccccaacacacacttttttttaaaactgcatttcttatttattcgtaaacatctgggcaaacccagcgaaaccttccaaatcacaattgtttgagaaaccggctgtttttcaactttgtgaaacccaacttttgctgcagccacgaacctacgtgatcccagcggggtc

SEQ ID NO: 30813 - DNA, 409 bp, Homo sapiens
  chr14:74100394-74100803
  binary
cgtccggggtaaactcgcgaggggatcctacctcttccagatggttccacacgggacctctaggagctcaaaggaccctgggccctccgaagtcgtctcttcttgcagcccgttgctaagtggcgccgcaggaccagcccaggtcccatcacgtggccctgcagggttttgccccacagggccacgacctgccaggccgggcccccctcctccctcctcttcagcgcggaacctcggccgccagtgccaggccgcctcgaccttggcggaggtcaaagccgcgacagtcccggaccatgtggccggcggtccgggcagcgctccgagcctctggggtccccctccaggcctggaggccgatatccacatcgtcctttttctcccaaaaggccgcgaccctgaccgtcac

SEQ ID NO: 30814 - DNA, 330 bp, Homo sapiens
  chr14:93214751-93215081
  hyper
cgagagcctgagagagcagacgggaggccctggcctcgggcgtggggactgaacccggttctgtgctggggctcgcggttacctgtggcaggcgaccgtggtggcagtggtggcggcggcggcggtgagtgaccgcggtggtggcgccggcgggaccgtgagaactcgcggcggctcgcagcctcacaccaaacacccacgacgtcggcactgctgtgattgctgcgggcgccgccgctcctcgcttaagggccactgtgccgcggtgactggtggagctatggggcgtggcatctgccaaaaccaatgggaggagaggacgaggccggc

SEQ ID NO: 30815 - DNA, 108 bp, Homo sapiens
  chr14:93415131-93415239
  hypo
cgcccgggcgccgcccacgctccgagggacccatgcccgggcaccacccacgctccaagtccgggcgccgcccacgctccgagggacccacacccggatatcacccac

SEQ ID NO: 30816 - DNA, 329 bp, Homo sapiens
  chr14:93425284-93425613
  hypo
cgatgaggcgctgagaggttcagtgactgctggacagtgagtgagcccgggatggaactgggtctgcacagcacccagccgcgcccctacacacggagccatgtgatactccgcaaacaacaggcctttgtgctcctggtccccgactcctctggggaaaaaggtccctgacaggaggatctggtaggggctggggtagggagtgcaggggggcagctgccaaaaccctctcagccccggccagcacgggctctgcacagggtctgctctaaggacagaggggtgggccctaggcctagccgatccagctgctggtgccagggtcatgg

SEQ ID NO: 30817 - DNA, 144 bp, Homo sapiens
  chr15:101513869-101514013
  hyper
ggggccacccctctctcttcctgaagcccccgcgatcgtgcaacgggccgcgccgcctcctgctgtgttccacggtgattctcaagagcacgcgggcagtgggcggtgacgccgtgtgtgtgtgcttcctcccgcgcaggtgcc

SEQ ID NO: 30818 - DNA, 157 bp, Homo sapiens
  chr15:101845367-101845524
  hypo
cgccgctcctgaaacagactctggccgacagtctggaggaaggtggacggatggatggatgggagtgcctgccctctgtgggcagctaggcacccttacccggccaggaggcacgtgcggcagcagaactgaatgaagagcttccgttcgcacagcc

SEQ ID NO: 30819 - DNA, 152 bp, Homo sapiens
  chr15:102043329-102043481
  hypo
agctggggaactgcccacactgggaggggttgggaagcgtaggagggcacctgtcgcagacgttgaggaggggctgcctttcccctccaggggctgacctcccaggtgattcccagagccagaccacaattccagaattcagtgaaaacagc

SEQ ID NO: 30820 - DNA, 544 bp, Homo sapiens; identical to SEQ ID NO: 29831
  chr15:102076822-102077366
  hypo

SEQ ID NO: 30821 - DNA, 144 bp, Homo sapiens
  chr15:26234718-26234862
  hypo
cgcggcaagactccaagtagaagcggaccttgagaggcagccaggccaggcggcagccgcgcccggagggtgcggaatgaggagcgcaaggtgggcagagcgtgaaaccttcaccgactgcacctccgccctcgctgccctacc

SEQ ID NO: 30822 - DNA, 339 bp, Homo sapiens
  chr15:31621317-31621656
  hyper
cgctccaaaccacgtggcaggtgatggggtagagggtgagagcggggccatttctaggcattcggggtcagttaagggtgtgggggctcaggttgggggtgggagtcagtgtgggctcagagttcagctcgggacgcggctgcagggtgggtgtggccctgggggaggggccaggctaggctcagctcggctccaggtggatcctgagtatcgggtgggggcagcgattggggcgtggctggggttgagatccgctttgggggatgatgcccgtgctgggcaggatacttaatgtttgggaaatttttctacggcctctgtcagggtggcctgccactc

SEQ ID NO: 30823 - DNA, 507 bp, Homo sapiens
  chr15:31774606-31775113
  binary
cgcccaggggcccgccagcgacagtccactgtggaagtgccttcaaaggagaaatgtgagcagcctgtcctatctgctcctctatgagcaaatccaaattgtgagatgggaaccctgctttttggaccctaggtgtctttggaaagctcctgtcacctgaactgcccggcactgggagccatcgctgtacctcacggcgcccgcgagacgggtggtccagtgccctttccacggccgcccgcggcttggatggcagtgtgaatggtgcttgagccggggctgggggaggaggttttgcttatgaaatggagctgtgtgtttctaaagggccacagtgaccaccagggcgtcagctggcggccaggtacccgccttctcctaggcctcgggatgggaggcaggtagagctcacagaggagcctccaccgcagccccgggtgcgcgctcgctctaagccctgggtactaccaaccgcgcacaagggaccgctacctggaagaggtcatc

SEQ ID NO: 30824 - DNA, 247 bp, Homo sapiens
  chr15:40762832-40763079
  hyper
cggcacgtctggactcggagagagcgctgcccgcctccctgcctccagacccgttgctggaggaagggctaggacaggcctgagtttgtggcgaatcccccttgtccacttccctgaggacacacgctgcaggagagcagcctcgagtcttttctgccttcgaggtctcaggagcttttgtccccaagcccagaggacaggggtggccctgactcaggcgccctcttccgggtaggggtccgcgtgc

SEQ ID NO: 30825 - DNA, 43 bp, Homo sapiens
  chr15:41788242-41788285
  hyper
gcttccaggccttccccacccccaggcccgccggggcctcccc

SEQ ID NO: 30826 - DNA, 133 bp, Homo sapiens
  chr15:42162038-42162171
  hypo
cgccgtgcggaagcgggccaggaggcgtgcccgctccagctgggccctgcgctgctccatgcgtcgctgcagcactgcccacgcctgcgtcacagcttgctgcctctgctgcaccgcatgggcctgaggcccc

SEQ ID NO: 30827 - DNA, 782 bp, Homo sapiens
  chr15:60884567-60885349
  binary
cggggcgcccgggctcacctttcatcgctgcgatcacaaaatacatcatttaagccgcggtgcggagagcgcagggagagcggatggtccgaccccggagccccctctgccgccgccgcgccgccgccgcccgagccacagcagcagctgccgcagctgcccgcccgccgagagccatcccgagccataagaggctccatgtgaccggctgacatcacggccgccgctctgtttacaccgcgcccctccgcttcctcccggggcgggaggcgggaggcgggaggcgggaggcaggcgcgccccagcgccgcgccccgccccgcccccgcgggcaggtgagtagcagcggcggctctgctggcccaccccggccgggcctgccctcccgcgccccgggccctcgcccgggcgcccgccttcccctcgccttcgggatcacctgtggccgccggtcgcttttctgcacgcagcgccccgcggaacgcgcctctgaccactttctgcccccactcggtggggcaagaggctcgcaacccgacgccactctcccgctggcttgccggagcactcgggggcgataaatgcgccagctcgttggtggaaaagacaggtttggtctggggagctacggtcacccgcatttcctagagtgccccagctctaatcggaaggtacggcccacttctgggccgtggagaacgaagccactgggaccgtccggggagtggagtaagctcctccgaagtctttctggagagactcggcctgggcgggggaactcc

SEQ ID NO: 30828 - DNA, 132 bp, Homo sapiens
  chr15:62978897-62979029
  hypo
cggtgatgcgcgtggatgagaagaccaaggaagtgctgcaggagtggcccctcaccaccgtcaagcgctgggcagcctcacccaagagcttcacactggtagggactggcagagggcaaggagagcactagc

SEQ ID NO: 30829 - DNA, 741 bp, Homo sapiens
  chr15:63089582-63090323
  hypo
cgacgaccccgagacccaggtaccagcagggcctggggagtgcgtcctcccggtcttcccgtgaacgctgcacatcgggcctcagaagaggcctaaggcagaacaggaacttttgaagtagacaatgtgtgtgtgagtgtgtctggtttgaggaaccggtaggaggcagtcatccaagcgagatagtggcacagactgtggtggtggccatggggatggagacaagcggagggatttgagaagagtctagaaggaaggcttggcctggcccggtgaaggctggagcacggcatacctgagggaggggaaggagtgaaaggcggctccttgtgggccagagcagggcacaggagctccctgaagggagagctggtgtgggcagggggaggtggaggagattgaagtgccggagccacacacaggtagaactagtgagtgcgcgtgagcctgcccaggcacggggctgtgggttcagcgactgttgccatagaggtagcgactgcaaccacacgagaggaaaagccagggagtcggggcagagcctggaggaatccagcatttaggaccactttaccgtgcaagtggcacaggagacggagaagcagcagctgctgcagggaggaaagccgcgggcatcatgttgccaggatggagtgtttcaacccaccagagacagagttaagaaagagggaagactgggaactggttattggcctgttccggtaaccatcgagtgccatc

SEQ ID NO: 30830 - DNA, 203 bp, Homo sapiens
  chr15:64454743-64454946
  binary
cggaatccggcaggcgtgatctttcaccatctccccagcactgaggggtgtttgcaaaaagcctgctctgagactgccagtgtcggccccagatgggtatccggggatccaactaactccctgggtcagggcaggggctgggggtgtcggggtgggtccgggtcgttccctggactgaatgggcaggacggcccagacgccac

SEQ ID NO: 30831 - DNA, 195 bp, Homo sapiens
  chr15:67357339-67357534
  hyper
cgcacacgttcccgaggctctcggccggtgtgatctcaccgactagagaataaaaacagcccaggggcgccggcgccggccaagggccttgacggggatcagcaagcgcgaggccaagtgcgggccccaacttcctgggcccgggccttccgcgcgccccctctcgggctcgggtcctctccagggtgcactcgc

SEQ ID NO: 30832 - DNA, 189 bp, Homo sapiens
  chr15:67357544-67357733
  hyper
cgcttacttgctgcgagtccaaccctctccggcccgcaactccaaccgagccgcccgagtgtggactccgagagcggacgccacgggccgcgctcagccctcccgcccgaggcccctctcgccgtgtttcccaggacttcctccccgcgcccgcccgacttcaggtcggggccgcgcagggtcccgcgc

SEQ ID NO: 30833 - DNA, 115 bp, Homo sapiens; identical to SEQ ID NO: 29849
  chr15:68888212-68888327
  hypo

SEQ ID NO: 30834 - DNA, 174 bp, Homo sapiens; identical to SEQ ID NO: 29851
  chr15:68937507-68937681
  hypo

SEQ ID NO: 30835 - DNA, 214 bp, Homo sapiens
  chr15:70718600-70718814
  hypo
cgcctcgggggcccgtcgactcactccccagaggtgcctctgcctccggcttcggttcagcgctggctcctcgaggtgccaggtggaatcccaacattttttccgccttcctcaggcctggcaagtggagcccaaaaacagatgcctagcaccttgttcttggcgagaatgacagattttcgagtccccttccaggagccgtgctcgcttcccc

SEQ ID NO: 30836 - DNA, 118 bp, Homo sapiens; identical to SEQ ID NO: 28590
  chr15:72612103-72612221
  hyper

SEQ ID NO: 30837 - DNA, 79 bp, Homo sapiens
  chr15:72612906-72612985
  hyper
attcctcttctctattcccactatcgagccagtccctcggagccaatcccaccccgccccatcacacatctctgtcttc

SEQ ID NO: 30838 - DNA, 209 bp, Homo sapiens
  chr15:73615717-73615926
  hypo
cggctatggtggtggcggctacgccagctgatggtgtgggagccgagggggagccacaggccccggggggtggggaggagctggatgagggcaggagtgggctcagtccagcgggggcagagaatccagccagctgttggatgtggaaggaggatgaagacggtgtgtccacctgggacgggctgctggcgggcgaggcggagcccagc

SEQ ID NO: 30839 - DNA, 71 bp, Homo sapiens
  chr15:74219413-74219484
  hyper
cgccgtccctgcccctgccggggcgcgtgggctcggacaccgtgcgcggccaggcgcggcacccattcggc

SEQ ID NO: 30840 - DNA, 56 bp, Homo sapiens
  chr15:74219620-74219676
  hyper
cctaccgccagcagccctcctacccgcagcagttcccctacccgcaggcgcccttc

SEQ ID NO: 30841 - DNA, 196 bp, Homo sapiens
  chr15:81294105-81294301
  binary
cgcctgagctgcctcccgcgctcctccccgaggaaaggattttgatttcaaagaaaggaaggaaggaaggacaactcccagcttccccgtcccgccctccccgctccgagggccgcgccaggccatgcccaagaaggcggcggcggcggcgaaccagcagaagggactttcctggcagcccggcgacgaggagcgc

SEQ ID NO: 30842 - DNA, 83 bp, Homo sapiens
  chr15:83523579-83523662
  hypo
cggggtgggtgctgtcccgtctggctccgcccgcgtggggaaggggactccgccatccctcagcacacccctggggggcccac

SEQ ID NO: 30843 - DNA, 181 bp, Homo sapiens
  chr15:84323434-84323615
  binary
gtggaaagtgggcgtgggggtgaccgggacgcggcggaggcactggaggagcgacttcgaggcagcgggtagtcggaggagtgtgcactcggaaggctggtgcgagcaggcgagggtggcgcagagtcccagggccccgcactggccgcctcccttcagccaggagtcgccgcctcaggtc

SEQ ID NO: 30844 - DNA, 137 bp, Homo sapiens
  chr15:89921803-89921940
  hyper
cgcggctgcttcccgcccgcgcaggatcaggccggcccccgcgggcctggagctggatccagagctagggaaactggaaaaacaggcacaaactcggaagccgcggtacggcaagagcctaagcaaagaatcctttc

SEQ ID NO: 30845 - DNA, 98 bp, Homo sapiens
  chr15:90746768-90746866
  hypo
cgaggggaatcgaggggacctgcttcccgaggagcagctagaatacttggttattattaccaatgcagctgcaggacctggtccacttctacaagccc

SEQ ID NO: 30846 - DNA, 297 bp, Homo sapiens
  chr15:91840031-91840328
  hypo
cgctccttctgcccgatcgctgggctcacgctccttctgcccgatcttgggcgcacgctccttctgcccgatcgttgggcgcacgctccttctgcccgatcgttgggcgcatgctccttctgcccgatcgttgggagcacgctcattctgcccgattgttgggagcacgctccttctgcccgatcgttgggcgcacgctccttctgcccgatcgttgggcgcacgcttcttctgcctgatcgttgggcgcacgctccttctgcctgatcgttgggcgcacgctccttctgcctgatc

SEQ ID NO: 30847 - DNA, 104 bp, Homo sapiens
  chr15:92459227-92459331
  binary
cgtcctgaccaccctggagcgtaggttcaacctgcagagcgctgacgtgggtgtgatcgctagcagcttcgagatcgggaacctggcgctcatcctcttcgtga

SEQ ID NO: 30848 - DNA, 87 bp, Homo sapiens
  chr15:93352994-93353081
  hyper
cgaggcgagtcctcttggatcgaattaatgcattggctcttcccttcgcaacagctttgatgaccgtttcccgcctttgtgcaaagc

SEQ ID NO: 30849 - DNA, 225 bp, Homo sapiens
  chr15:99256133-99256358
  hypo
cggccatctagtgtgcactttggactgatgagctcccctacctgaaatcctgtagcaagtccctataggataggcatgtggtacagtgtgaagctcctgagtggtcaacagctaccccgtgacaacatgccacactccatgtgccactccctcccgcctgcctgctgtgtccttggccccagtggtgctctcccgtgctgaccagccggcacggctcacctggcc

SEQ ID NO: 30850 - DNA, 453 bp, Homo sapiens
  chr15:99434503-99434956
  hypo
cggtgcctcccctgcccggtctcatctccgtctctcctctctctccacagtgtgcccaagcacgtgtgggaagcgggcgtgcaccgagaacaatgagtgctgccaccccgagtgcctgggcagctgcagcgcgcctgacaacgacacggcctgtgtagcttgccgccactactactatgccggtgtctgtgtgcctgcctgcccgcccaacacctacaggtttgagggctggcgctgtgtggaccgtgacttctgcgccaacatcctcagcgccgagagcagcgactccgaggggtttgtgatccacgacggcgagtgcatgcaggagtgcccctcgggcttcatccgcaacggcagccagaggtcagtcgcggccacacgtgtggtcactacccgccccacctcacccgccaccctagcacacaaaggtagactctgtcggttgtttcatcc

SEQ ID NO: 30851 - DNA, 322 bp, Homo sapiens
  chr15:99459893-99460215
  hypo
cgagaagacaaaatccccatcaggaagtatgccgacggcaccatcgacattgaggaggtcacagagaaccccaagactgaggtgtgtggtggggagaaagggccttgctgcgcctgccccaaaactgaagccgagaagcaggccgagaaggaggaggctgaataccgcaaagtctttgagaatttcctgcacaactccatcttcgtgcccaggtacccagctcatgtgaaatttcagttggcaaaacccactgctcaggccggttctgttgcctttctccccaccaggtagtgtgtaagtcagcagctggggggtacaatac

SEQ ID NO: 30852 - DNA, 209 bp, Homo sapiens
  chr15:99465447-99465656
  hypo
cggccgcagacacctacaacatcaccgacccggaagagctggagacagagtaccctttctttgagagcagagtggataacaaggagagaactgtcatttctaaccttcggcctttcacattgtaccgcatcgatatccacagctgcaaccacgaggctgagaagctgggctgcagcgcctccaacttcgtctttgcaaggactatgccc

SEQ ID NO: 30853 - DNA, 179 bp, Homo sapiens
  chr16:1035474-1035653
  binary
tggctgagctccaagtgcctgctgaagtctgcagggaaacacgcttgctgcccgtggccctcggcctccagatggccacacctctgccgacgacggaccagctccctctcccttctatctttctttttgaggtggtgggattattccacaaagaagggctgccgtttggtccctcttcc

SEQ ID NO: 30854 - DNA, 224 bp, Homo sapiens
  chr16:1061203-1061427
  hypo
cggccagggcagagacgtaggacagagacgcagcgcagagcggccagggcagagatgcagggcagagacacagcgtagagcggccagggcagagacgcagggcagagacgcagggcagagacacagggcagagacgcagggcaaagcggcagggcagagacgcagggcaaagcggcagggcagagacgcagggcaaagcggcagggcagagacgcagggcaaag

SEQ ID NO: 30855 - DNA, 587 bp, Homo sapiens
  chr16:11219568-11220155
  hypo
cgaggagcccaggctcaaacccctttctccttggtctcaaccttggcccgaagccctcacttggcttccgcttgtgcgttgagcctcagtgggaactttgatgttccactggtctctgcagcttgaggctgcctgccgcccacttggcgtctcccaagtgatgtgcctggcagggccacagccactacgatgtccccccccccaaattctcaccacccccctctatcccacatgctcagagtgaaccatgctattgtttgaccgtagccctcctggacctcccaatccagcccaccactgaagtcctggggtttggactcggctcctccacctccactcagcacctgcctttccgcttctacgaccaggggcgccggggcagcagcgaccccacagtgcagcgctccgtgtttgcatcggtggacaaggtgccaggtgagccagccccccgccctgcgccacagctcgttcatcatggtgggcgttcaaggtctttctctctgtggagcctgtgtgagctgcccttcctctctcagaagccccgtcggctggcagcaccagcttcttagaatttgtcaaagcacagc

SEQ ID NO: 30856 - DNA, 385 bp, Homo sapiens
  chr16:1397859-1398244
  hypo
tgggggcaggggggctcacgactgtgctcctgcaggcttaagtgacccctttgtgatcgtggagctgggcccaccgcatctctttccactggtccgcagccagaggacccaggtgaagacccggacgctgcaccctgtatacgacgaactcttctacttgtgagtgtcctaagccccagccccagccccaggctccaggctgccggagcgagactcccgactggcctctgtccgcagttccgtgcctgccgaggcgtgccgccgccgcgcggcctgtgtgttgttcaccgtcatggaccacgactggctgtccaccaacgacttcgctggggaggcggccctcggcctaggtggcgtcactggtgtcgcccggccccaggtgggc

SEQ ID NO: 30857 - DNA, 75 bp, Homo sapiens
  chr16:1400771-1400846
  hypo
cgccgggtcacactgctgtggggcccctggactcacctacgatgcagaaggtggcagcaaacgcttccacgcagg

SEQ ID NO: 30858 - DNA, 133 bp, Homo sapiens
  chr16:1424307-1424440
  hypo
cgtccctgctggctgcaagttcttggaccctcactgatgcctggtactggacagtgtgctgctgaggcctgctctgagacaggcaaagccacccctgcctgtccctgaagggccctagacccccttcctcctg

SEQ ID NO: 30859 - DNA, 177 bp, Homo sapiens
  chr16:1424469-1424646
  hypo
ggccccaggcaaccgcaccccggggaaacctgtcagacccgaccgtgggggtcggcgcgccgggaacctccacagcctggccagcccctgcctggtgctcggttcagacaagctggggcccagcagaagcaaagaggcggtcactgccccacctacccgacatcgagtcccgccctc

SEQ ID NO: 30860 - DNA, 233 bp, Homo sapiens
  chr16:1493342-1493575
  hypo
cgggtctggcacctgcccctggagtccacccagctccggcaccactggcccctgggagctctgggcctgggcagcaggggtgagctgggctccaggcccagaagcagctgcccccaacacccaggaaaggggcagctcgacctgtgggtgggggagccgctcacctccggcgcctccttttcgggggcctgggctgccggccgcgcctcctgctgcaactgcctcagctctga

SEQ ID NO: 30861 - DNA, 563 bp, Homo sapiens
  chr16:1493691-1494254
  hypo
ccaccctggccggggcgagagtgggcgagtctggcggtgcccgccgtggaggcggaggcggcggcgacgtggtcctcccccgccagcaccccctgcagggctcaccactgctccagctggttccagtgcttggcggtgtcctgctcggggacagaggccgtggatgtcggatggctggactcatacctctccgagagctcctccaggctcaagggctcggggctggccaggcctcctgccaggaggagccccaggtcttccagggtgacggctctcagctgggaaggggccgatgcccctgagggtccactgtcagccaactctacaaggaggcatcttgggagcttgccccttggggcccggcccccactggagcttacgggaacaaggccccaaacccccgcaggaccctcgcccaccacccagagctcaacgcgtctccttgggtcacacaggatccagacgggcttggctcagacaagtccagggccctgcctgaagacacacagcactgggcggcaggaacaagcgagctggagggagcccggggtcagaagcagagc

SEQ ID NO: 30862 - DNA, 422 bp, Homo sapiens
  chr16:1682411-1682833
  hypo
cggcttctgctcagagcgcagcttccagcaagcccgccggacctgctttctggcattttctcaccagccgcttggcctggggctcctcgccttgcagcgctttggctgattgtgtgctgtctaactcggtcaaaccaagttgccaggaagtggcccgtatcccatgctccagggttcttaccactgcttttctgagctatggtttgtgtgtttccagtggctctgagtgtgcgtgagttctgggtccctggctcacctgaagcctgtggtctccactgcaaatgatagcaccatggtccagcgaggggcttgggccgcaggcaccgtgcctggcgctggtcttcctgggggacggccagccttcccaggcctctcgccctctacactgggacccaggtctgcgtcggccctcgttcagtcac

SEQ ID NO: 30863 - DNA, 865 bp, Homo sapiens
  chr16:1796445-1797310
  hypo
cgcttgctcatgttcaggggtgagctctggtccagtcaagccacagggtcagcaccttctggtcactccctggccctgacctgagcccggggaggaacgtggggcaggcgcgggtgggcccagcctcgagctcttcagcacagtgatggtgacggggcagcggtggcggcacagccagcccttcttgggtccccagtcagagccctctgccctacctgggctggacttgtttctgaacagccacaagctacagggggctgccgctgtgtccctggcgaggcactggcccattacaagcaatcgtctggggagggcaccagtggaaagccccgttccaagccatttcaggagggtggccctgcttccgaggagccggagtcagtggccggataagcagagccactcgggagtggtgaggcccggaagggttagcccggtgggcggcagaggagctctggcccgcagggtgtcgggcgaggcaaagtgcaaagcattggtgcgcggggcctcaggcagccacggcggagccgcaggccagggacctgcagtgactcgctctccctcctccctgtgtttggccttagtgtccacaggatgaaatgtccgagtcaggccagtcctcggcggccgccacacccagcaccacaggcaccaagtccaacacgcccacatcctccgtgccctcggccgccgtcacacccctcaacgagagcctgcagcccctgggggactatggcgtgggctccaagaacagcaagcgtgcccgggagaagcgcgacagccgcaacatggaagtacaggtcacccaggagatgcgcaacgtcagtataggtgggtgcccacctccgggactctgggctccctc

SEQ ID NO: 30864 - DNA, 160 bp, Homo sapiens
  chr16:1807721-1807881
  hypo
cgtctgcggtgtctccctcgccgctctctccctcgcccacgctggggggcttttggagactgggtacctgccacaccctgccacacacactctcctcttcacaggcctgcatcatgggggctgcggggggcctgccctcctgatgggcgatgggagcaga

SEQ ID NO: 30865 - DNA, 431 bp, Homo sapiens
  chr16:1807999-1808430
  hypo
gctgctccctctctctcctgccctgcaacatgggagcagccgaatcattgctgggttttctgtaataagaatgtattgttagttccagtccctaattgacctttgtcccttccttcccctgcctctctgtgcgtcgctggactcgccaggggagttctcaggtgagtatctcactctcctgtctgtctcccctctgtgtgacggggggagtgggtggacgggggatgccccgagctatcccgtcaccgtggctgtgtggactgccccccacgtcgccgcagcgcctctgcttctgctcgcagccaccgccgctcggaagcttgttcggtttgctccaccagccacttgacaatgacctggatatccaacccccccagcctgaggagtcccccgcgggccatttctgaaggccctgcggagccctaagccac

SEQ ID NO: 30866 - DNA, 217 bp, Homo sapiens
  chr16:1814037-1814254
  hypo
gccctacctgtctcagatttctggagggatgggtaggagccagggttcgtgcccacggcgcctccctgctccctgcagctgagtcccaacgggggccaggaggacacgcggatgaagaacgtgccggtgccggtgtactgccgccctctggtggagaaggaccccaccatgaaggtgagcccgcgaggaccccgctcaggctggctgggcgagcggg

SEQ ID NO: 30867 - DNA, 112 bp, Homo sapiens
  chr16:1814369-1814481
  hypo
caagccagcgccaggccgcgatcccctgacctgcgaccgcgaaggagacggcgagcccaagagcgcccacacgtctcccgagaagaagaaggtgagcatggccgaggccacc

SEQ ID NO: 30868 - DNA, 118 bp, Homo sapiens
  chr16:19708387-19708505
  hypo
cgccagccagtttgcgagtccgtgcccagcaggtgccagcccgcgtgccctgtgccaaagcgcttttctcttgtagcccgcgggcctgggcgcccacagcacaacctgctccctgatg

SEQ ID NO: 30869 - DNA, 47 bp, Homo sapiens
  chr16:19708561-19708608
  hypo
ttgccaaggcaggctcaattttgcccggagtggggaggggaggtgcc

SEQ ID NO: 30870 - DNA, 75 bp, Homo sapiens
  chr16:2104688-2104763
  hypo
cgaacacctctgcaacggcaggagctgggcgagttctgtcactgggaggtggtgctgctgacttggtctcaaccg

SEQ ID NO: 30871 - DNA, 187 bp, Homo sapiens
  chr16:2105384-2105571
  hypo
ccgccgcttctcccccagctgactttgtcctgcagtggatggatgttggcttgtcctcggaattccttctggtgctggtgaacttggtcaaattcaatagctgttacctcgacgagtacatcgcaaggatggttcagtaagaaaagaattgagatcctgttctgataatggtcctaagttcagctcc

SEQ ID NO: 30872 - DNA, 183 bp, Homo sapiens
  chr16:2129581-2129764
  hypo
acagaccaaggaggcgccggccaagctggagtcccaggctgggcagcaggtgtcccgtggggcccgggatcgggtccgttccatgtcgggtgagccttggccccagccacctccacacaggcaccggggctccctcagttgctgctggtcccagtgttcaggaaggccccgagcccaggggcc

SEQ ID NO: 30873 - DNA, 208 bp, Homo sapiens
  chr16:2301873-2302081
  hyper
cggtgttcgtgaccgcgagctctcggccgggcccagctactgcagtatcggcgctggaaaggcgatcaaagcacggaacccctcccgagggggccgtcagggaggccaggggctgcctggggtgagcccggcctcctgcccctttgggaacaggatcagagctgcaggtttagtcaccgaaatgggggtgggggcagcagaacccagc

SEQ ID NO: 30874 - DNA, 400 bp, Homo sapiens
  chr16:25078047-25078447
  hyper
cgggcaggcggcgccgcaggaagtgaccgggcaagaacgggggtcgccgcccagctcggccttctggtctctgcgccctcggcctggggctccaggccacaaggggaggccgtgctgggcgggcccgaagggggtgggcggggccccggaagagacgtgggggcggggccaacggaccgcggaggcggagccgctacagtctgggcgctggagcggtgggagcagcgctcgtccgccgttggggcccccagcccgcgcgcgtgaagcagctagccgaccaagccccggaaggcgagtgccggagggggcgggacagctcctccggggccagcgggcaccaggcttgggggctgaggcccagcggcccgagaccaactgggctgaccgaggccgcctcccc

SEQ ID NO: 30875 - DNA, 135 bp, Homo sapiens
  chr16:2544830-2544965
  hypo
cggcttctcaaaagtcacttatcttaagtggaagcccttctaatacttacacaaagattaaggcaaataatgtggctgcgcaacgtgactctcactcgtaattccagcatggtgggaagatcacttgaggcctgc

SEQ ID NO: 30876 - DNA, 100 bp, Homo sapiens
  chr16:28925777-28925877
  hypo
cgaaggcctcagcggctggacccccatctccgctcagctcctccagaggctccagcgggggcgatggatcccgggacaggggcagcaactccgtggagcc

SEQ ID NO: 30877 - DNA, 31 bp, Homo sapiens
  chr16:29153254-29153285
  hypo
gtggaataatcctccgtggcacgagggggtg

SEQ ID NO: 30878 - DNA, 55 bp, Homo sapiens
  chr16:29153320-29153375
  hypo
atcctccgtggcatgagggggcggtggaataatcctccgtggcacgagggggcag

SEQ ID NO: 30879 - DNA, 163 bp, Homo sapiens
  chr16:29231876-29232039
  hypo
cgtgccgggagctgatcttggcaggtcgcgtcctcccgaagcctgcacttcagccccagggttttccgaccgcctctgctcccagaggggaccctcaggggcgaagaggccgaagacagcaccgagacctcagtgtcgggcgcgggtgctcccaaagcgcagc

SEQ ID NO: 30880 - DNA, 88 bp, Homo sapiens
  chr16:29607025-29607113
  hyper
cgagcgcacacaggcgtgcccttggtttcacgtgcgccagttttcccactttctacgggggggagtggaaagtgaaaatagtaagatc

SEQ ID NO: 30881 - DNA, 549 bp, Homo sapiens
  chr16:30959765-30960314
  binary
cgagcgcggggtggggcttcgggaccccggggatgagccgggccaggtcccgcccctccgcgcaggcctccggggggccggggcttaccatgtaggggaggggagatctatccacatacctcaggtaacagggaggtgcgcgggtggggggagggctgggcggaccaaaggccggaggggtggggcctggggatagcgagaggcttgagaatggggccgcttgggggagggaagaggcagcccggcgaggggcaagcgggggacccagccgggctgggcccctgggccccgggtctgtacaatacggtttgctataaaactcaaaatcttccagccggggctgcggagttcgtgtgtgtatctgcggggtccctacctacagatgagtgggctcacctctcctggactcattttgggagggatttggaagtgtggacacctggggtgtccagctgtaccttggagggggctggggttggcgtgcacctcggtggggtccgggcgcttggataacgttcttggtgggtaggggtcgcggggaatctctgc

SEQ ID NO: 30882 - DNA, 201 bp, Homo sapiens
  chr16:31138407-31138608
  hypo
cggtaagtggggctgggaagctgcctgcaggtcccccgtctccccttgccgaggagcccctgctgagccgtgcactgtgcctcactcccaccctgcctgcagatcaccaaggtgaagtatgtggacaagatccacatcgggaactacgaaattgatgcctggtatttctcaccattccccgaagactatgggaaacagccc

SEQ ID NO: 30883 - DNA, 291 bp, Homo sapiens
  chr16:31499204-31499495
  hyper
ttggtgctaaaccagacagaaggctccatctactccaagcgtgcagctgaacttggggcactcacgagccagaggcggggcacagagcggaacggggcgcggggcggggccgaggggaggcccgcaagcgggcagctgaacgcccctcccgtaggtcatcgtgcagcgctgcctggccgggaagagcctgacccacatcaaggcgggctgcatcctgtgtgggtacctgaagctgacgcccatgtttctcatggtcatgccaggcatgatcagccgcattctgtacccagg

SEQ ID NO: 30884 - DNA, 257 bp, Homo sapiens
  chr16:31548824-31549081
  hyper
cggcgtttccccgcggaggtcatgaggtccccacggcccaggccccgtccccggacagccccgggtgccccaggagctccggccgcagctcacctgggaccggcctcccgtggagccaccccttgcccagccgcccccaagttcccgcaggaggaactggcgacagacacgtccagcccgcagccgccggccgcaccggcgctgcactaactgggacgcgccccggggccgcgctggctcggatccgcccagacccc

SEQ ID NO: 30885 - DNA, 63 bp, Homo sapiens
  chr16:31549116-31549179
  hyper
cgctgccctcccttcctgggttcccggggctgagcttcctgggaggtccgcacacccccaacc

SEQ ID NO: 30886 - DNA, 193 bp, Homo sapiens
  chr16:4203995-4204188
  hypo
atcgtgaacactggagattcaaacagcagagagaccacctcacaccattctgtcaacccgtgccaagtgcccaggcctgtgccaacgcttggcacacaatgattcaacagaggcagcctcatgcttcacggcccgatgctcgcttgttgtctatggccgtaggctaacctgcaaataaagaactggactgcac

SEQ ID NO: 30887 - DNA, 187 bp, Homo sapiens
  chr16:4234090-4234277
  binary
cggccgcgagatcggtccctgtccgcagggtcgggtagtggccccctcggggacagcgtgtgaggattcgggcgcgaaggacggggtcagattcagccaggtgcccactttccccacggtcacgaccctggtccagaactgccctgccccgggcctcagtttccccactaaggagaggaggcgtgcc

SEQ ID NO: 30888 - DNA, 507 bp, Homo sapiens
  chr16:46683305-46683812
  hypo
cgagactgcgcagagatgaacttcaggggagaaaaaagaaacacatgtcacagtttttcttaaaccgtgagagaggaggagcaggaggagaagagaccagagcccctctcccaggcaccggggctttccttggatgtcctgagactcaagatttctcacctctgcaggtggacctgataatcctacgcagaagaaccgctacagggcagcgagaacgcctgcaatggcagcagacagccgagcctccccagcacggcgtctcccgggacaaatgagcgtccacgtcgcttgacgtcatggtgtgtgcatttgtcctgtgctgggctccctacactgctcgtgatcatcggagctgcctgccacgggtcacatgtccagcactttctctatgagacacgcttctggctccactggctgaattcggctatcagccctcttccgtactcattctgccacgagtttcagaaaagcattccatcaaaccgctgtgtcctggaaaggctgagc

SEQ ID NO: 30889 - DNA, 49 bp, Homo sapiens
  chr16:468053-468102
  hypo
cgcactcttttttgtccggcttctctcactgaacctgattgctcccaga

SEQ ID NO: 30890 - DNA, 36 bp, Homo sapiens
  chr16:468131-468167
  hypo
tgaaatcctcttcagggttgagccgggctccgcgcc

SEQ ID NO: 30891 - DNA, 876 bp, Homo sapiens
  chr16:58030638-58031514
  hypo
cgcctgtgtgtacccgccggtgccgctgcaggtctgacgcgtacttgaagcgtttctcgcagtctgggcacttgagtggcttctcgcgggccggatcgcagcggtgctgcacgaactcggaagaggagaagaagcggcgttcgcaaagcgtgcagcgcaggggcttctctgccgccgcacagtgggccagctggtgcttctgcagggccgacgcgcgcttgtaggccttgttgcacacagggcacttgaagggccgctcggccgcgccgggcaggcacttgtgccgcagcagctcggcagattggtcaaagcctttctggcacacggggcacttgaagagagtctcgagggtgtgcacgtgctggtggtagagcaggtggctgggctgcccaaagcccttctcacataggccgcatttgaagggctcctcggtcttgtgtgtgcgccggtggcgcatcagtgcgtactgctgcttgaagcccatggggcacaggtcgcacttgaagggccgctcggcgctgtgtgtgcgctcatgctgccgcaggtccgagggccgcttgaaggccttctggcactcgccgcagcggaagggccgctccccacttggcgtgcacgggtgctgcagcagctccgacgactccttgaaatgcaactcgcacacgttgcagcggaacaggtggtgctcgcccgagtgcgcgtacatgtggcgcaccaggtgagagcggtgcttgaaggtcttctcgcagactgcgcacttgtagggccgctcggagctgtgcgtgcgcttgtggtgcaccaggtgcgacgactggctgaagcttttgtcacacagcgtgcacttgtagggcttctcaccggtgtggatccgctcatgcc

SEQ ID NO: 30892 - DNA, 132 bp, Homo sapiens
  chr16:67184509-67184641
  binary
cgacggttgagccccttgcgttgttctcctcctcccggccgtgtcgcaccgccgggaccggcagcctgaagggacaagaagttcacccatgtagccaactcccccgcggcctcagctccggcccaggactgc

SEQ ID NO: 30893 - DNA, 66 bp, Homo sapiens
  chr16:68269820-68269886
  binary
cgtcccagcgcacccgccgtagccccgaagaggacgaccagtgatccgggccaggggcaggggtcc

SEQ ID NO: 30894 - DNA, 113 bp, Homo sapiens
  chr16:68269896-68270009
  binary
cggccgcggggtcagggcccgggggagggggcggcggcggcggcggagtcatggccgcagaggaagggggctctcggccagacacgcggaccgacgaggcgcacgcacgcacc

SEQ ID NO: 30895 - DNA, 106 bp, Homo sapiens
  chr16:68270022-68270128
  binary
cgcggatcagcttgggcgggacaccgtgtatcgggggcggcacctgcggcccggctggctcagtgggcgctgccaagacccgcccgtggcgccccgcggggcgggg

SEQ ID NO: 30896 - DNA, 125 bp, Homo sapiens
  chr16:68270157-68270282
  binary
agttacctgccggccccgccggccacgtgaccggggcggctccgggaaccttgggggagggccgccagaactcaacccaggacgcaagagctcacgctcccggcctgggcgcacgcttaggatcc

SEQ ID NO: 30897 - DNA, 637 bp, Homo sapiens
  chr16:68270868-68271505
  binary
cgagcgctctggccgatggggggctagcgttgagcgtgtgtgcgcgcatgcgggctgcagatcctcccttttccatcccgcacctacaacccaattgacagccccgcatttggggctcccattcctccctttgcccagtggagcttggtgaggctcctttatggcgcgtttcccggccgttccttactttcccaaactctcccagggaggtgactgagaaactgaataagtgactgagaaactgaataatccagcaggaaggagggggctccagcgtggcgggaactgagtcacgcggttgcctagcccgactcgagactgagacgggagccgcaccacgcgctttcggacaaggagggtgctgcggcccggcccctggacaatggagagagcggggcacccgggcgcatcaccagagctcatgcccgggaaaggggcgaggcccggggggagagagctcagcgtagctccacttggcagctaaagaaacaggcgcccgggacggaaatgactcgcgcccggacacggcgacagggagagcatgggaagtgcttccttcgcccggcgggttcgagcgagtagcactttactttccctacaggtggaggcgggccttggtgcgcggctgtccatctcc

SEQ ID NO: 30898 - DNA, 48 bp, Homo sapiens
  chr16:72460075-72460123
  hypo
agcacagcggatgttttcacacccagcaagacaaaggccgtcgtctcc

SEQ ID NO: 30899 - DNA, 350 bp, Homo sapiens
  chr16:75136341-75136691
  hypo
cgggacagttaagttcctttagtgacggagaagggatcctgccacaagctctgccttcttcacagctgagacactgctctcctgatatttctcctgtggcttggaggacttctgggtcgccttttgttcacgtcgcctcttttcacctgcccttcaaatattcatgtcggcctgggtttgtcttctgccttctttggattttggtctgaactttctccctggactgcctctttatcccacatccatgcctggcacccatgtctctgttccaaacctcagctctaggcttcagcagcctcctggaggtctccatcagctggccgggcctcctcccacccaactcagaatcc

SEQ ID NO: 30900 - DNA, 284 bp, Homo sapiens
  chr16:77227386-77227670
  hypo
cgccccagtcagaggccctgtcaagcacctctcggctctggagtcctgcagcccctgagaatagtcccacatgtagccctgagagtagctctggaggccagggcggggaccccagtgatgaggagtggcgcagccagcggaagcatgtgtttgtgctgagtgaggctggcaagcccatctactcgcggtatggtagtgtggaggcgctgtcggctaccatgggtgtaatgaccgccctggtgtcctttgtgcagagtgcgggagatgccatccgtgccatctac

SEQ ID NO: 30901 - DNA, 213 bp, Homo sapiens
  chr16:81533335-81533548
  hypo
cgtccagtcctttacccctcctttacccagcagcgccctctgaatctgaaacagttttgggggcggcagctccggtcctgcccagcaactcgcagttgttgcctgtggcattcagattcaagtctgggcttgtcagcccgggcgagactctcctattttggccctatgggaggcatccaaactcctctgcccttgccttccggggcgccccac

SEQ ID NO: 30902 - DNA, 47 bp, Homo sapiens
  chr16:81765480-81765527
  hypo
cggtcagtgccgaagccgttgtgatgaagcctgcgttagtgagaccc

SEQ ID NO: 30903 - DNA, 280 bp, Homo sapiens
  chr16:84998400-84998680
  hypo
cggtgagggacaggaaaggatggagctccgtgactgttgatagggacagatctccaagacatgttgtgacgtgcaaaacagcaaagtgaatgtttgctaccattcgtgcacaaacacatccgtgagcaaacgtgtgtatgcacgcacacacacctgttggcttcaaacgtgtgtgtgcacgcacacgcacctgtcagcttgaaatgtgtgtatgcatgcacaggcacctgtcagcttgaacatgctcagagaccgtctaggccccgcgtgggtaccaccc

SEQ ID NO: 30904 - DNA, 178 bp, Homo sapiens
  chr16:85932121-85932299
  binary
cgcctagcaccttcgatgctcctgtttcagtcgcggtctcagcgggcagtggcctcctttgaagctgggattctcctgcccctcccgggcagcgcaggccaccggtgacccgggacggtctgtaaacgaccttcgcgtccccgtccccgtggaataacgcgcggcgggcatcactgcc

SEQ ID NO: 30905 - DNA, 39 bp, Homo sapiens
  chr16:86903437-86903476
  hypo
cgtagaggtgacggcggcgcaggcgcagtttagaactgc

SEQ ID NO: 30906 - DNA, 814 bp, Homo sapiens
  chr16:8767901-8768715
  binary
cgccctgtttgtcttccggagcgctggggccaggcggaggaaagtagctgggagcaagaagggctggcagggccctgagcgccgagatggggagtgaggtggggagggcgggatgctccttcccttctccgcaaaggaaccccttctgattccgactctggagctccagagaccggatccgagacgcgggtggaggtggagttacactcgcctgcagccctgagggtgtaaatggcccattaagatccaggttaaatcaacctatggagctgccccccagagggtcagggtccccacaacttgacgggggtcctcagccgtctcctccccagtcccaggactccctcccagccctcgcggtccctctggtgggtcccgccccagcccccgtctcccccgcccccggaggctggactctgcccccgccccgcctgccacctccctcctgggggcggtggcccgtggcgggcgcacccattggctgtggcgaaagcgagggccggggctggcggcgctgattggccgggacgctcggcggagccagggagtccggcgagtcgctgggggaagtcgagcagacacccagcgctgccggaactcggggcgcgcatcccgcaagtcggaacccggcggatcggatcccgcagatcggagacggggcctggaggtgagcgcgaggcgccgggtggcttgggacgggcccttccgaggggagccgagaggaggtccttctgccctgcccccaggagcaaaacctgggcatcttctcctggaaacggagccctcatcttcccaagacgcggggccctccccc

SEQ ID NO: 30907 - DNA, 426 bp, Homo sapiens
  chr16:87744572-87744998
  hypo
cggggaggtcccgggcacctcagcccagggcaactggcttctgaggtagcagccccgccagcatccaggacagactaaggggaccgtgaccaagggctctccaagcctagtcacccaggacagtcagagacggaaccctcgcccctcttgagagagctcatgggctttgggggccccaataccaaaaggtgctggaggaaggcagtggtggcagggacccaagttagggctgcgcaccacggcgcatgctactcagaggttgcactaccttcagctgtccctcaaaccaacggttcctggtggcgtcgtagaagtacagatcgttgaagaactcgcccgacaggctctcctcctcttcctcgtcacagacacccccgaagaacagtgtctggtgattcggggccatggccacggaaaagccagacc

SEQ ID NO: 30908 - DNA, 328 bp, Homo sapiens
  chr16:88111298-88111626
  hypo
cgggcctggactgcttcacctacaccgttgtggcagttgcgttaggggcttgggaagggcctacgtgaagccgtgttcgctgacttagagcggggcctctctgggctttctctgggaggagttccgcgttgccatccagacggtcgtagctccagcctgctccaccccgtcaggatcctgggctgggtccccttgggggtgagggtctgggatgagctgctctcgaaagggggatggcgctcatgggttctgcgtctccatcgtggtggggccgcctctgaagatggccaccacaaggagccgggccgaggcctcccaggaggtcacc

SEQ ID NO: 30909 - DNA, 518 bp, Homo sapiens
  chr16:88792758-88793276
  hypo
cgcggcgctgcagcagcaggaagaagaagcagacgctgtcccagatgatgccagcctcctccacaggcagcaggcagtcctggtctctgtccatcatctccttggctgcaaggcaggcaccggcaagggtcaggcccagggcccaggagcagggggcttccccacgccctcccccgccaccgtcctggccactcacggtcatagtagcccttgacggtgcatacaaggctgaagagctggatgacccagcagaagccggtctgcatctgctccacgaagacgcaggccaggagctgggggagagcagggtcagcggggccagcggggccccagggcggtgggtgcgggggggccggaggctcaccgacagcatgttcttggagatgatgacggtgacgttgtacagaatgaggcagtcccacagcacgaggcgggcccgtgtgtccctctgcagcagggccgtgccgaagagcagcaggtagaagcaggccagcaggtagcccagcccgaagatgctg

SEQ ID NO: 30910 - DNA, 340 bp, Homo sapiens
  chr16:88793673-88794013
  hypo
tcccaccccaggcctgtcggcgtgcagccgctgggagcggacacacgtctgcctgggtgagtggccgggtgtccctgggggagccccggtgtgagggcatctgcacaagggctgccgtgcacacaggctgaggtctgcgtgcgtgcgtgcgaggtcagggcctgcaggccgccatgtgcctgaccacacctccgcccgtgcacgcctgtgtgcacacttgtgagcagatttgggggcgtgaatgtactctgagggtcctctgcagaggcgggggtggtggggggcactcactgatgaggttggtggagttgggggcccggaagaaatcaggcaggtacag

SEQ ID NO: 30911 - DNA, 279 bp, Homo sapiens
  chr16:88946079-88946358
  hypo
tgcctgtgcagacaagtgcatgcaaataaacacaggcatcccaggcatgtgtgtgcaaagctgggtcacgtggtgtcacaagtcaaagcttgcactctaccgcagcggctccccaggcactgcacccctgcagggcaagggcgaggcccaccccagggcctggtcagccaggggcgcacccggaatctgcattcctaacgcgagccgggggagctgctgctgacctgaagcacttggataactctgccgttccgccttcacctctggccccacccagac

SEQ ID NO: 30912 - DNA, 49 bp, Homo sapiens
  chr16:89202519-89202568
  hypo
cgttttcttctttgaaagcacaggaaccacagccctgtggattttgcga

SEQ ID NO: 30913 - DNA, 112 bp, Homo sapiens
  chr16:89203215-89203327
  hypo
agatggcaaaggtctgtttcaggtaactcctctgacggccacaacgatgtcttcagacgtcaaaggtctgtctcaggtaactcctctgacggccacaacgatgtcttcagac

SEQ ID NO: 30914 - DNA, 210 bp, Homo sapiens
  chr16:89354795-89355005
  hypo
cggccttgagggtgggcaaggcgaaaactcgctttcctgtgccccacatcatggaaccggctagctacggggaaacaaagctacagaaccacccagatgccaggacaggccggatgtgtgaagaacggggggatgccaaccttgtagtgcccgttgttggcagcgtcgtgcaaaggcgtgtcgtcatctaggcccttggtgttcacctcc

SEQ ID NO: 30915 - DNA, 298 bp, Homo sapiens
  chr16:9186882-9187180
  binary
cgattcagggaagggccgcctgcgtcagggtgtctgccctgcgttccaagtgtgttttctgctccccagcccagctgctaaccttgaataccttgcaacttgagaatcgcggcggtgctctagctagatccaccggaggcgattttgacacctccctccgccccccgggacagatggcaacgcctggggacgtttttggttggcttctcctagaaggggctgttgttgggcacccagtgtatagaggctgctgaaggtcctgcagtgcccaagataaccgccccggccccctctcagc

SEQ ID NO: 30916 - DNA, 238 bp, Homo sapiens
  chr16:945437-945675
  hypo
cgggagggccttcggggcggccgtgggcccctagccggggccaggcaggacgggagccgccgggttctctggctacatgtgaccgagaaggcagcaggctctgctgctgtctgtgcaggacgacctgggcaggggaggggcgtgtccaattccaacgtgtttggaacatggggctcgcgagactggcgggggagtgggagagccaggagaggctgcaccgcgccctgaaggacggcac

SEQ ID NO: 30917 - DNA, 198 bp, Homo sapiens
  chr17:1011791-1011989
  hyper
cggagacaccaagtccctgtctcctggctgggaagagggtggcccctctcttgcggttgccgtggaaacgggggattcctgcccacccgctccagggaggcggcgaggctcgggctgacaggcgcgccaggtgactcctggcacagccgccggagccctgagctgggctggcctggagggggcggccaccactgcccc

SEQ ID NO: 30918 - DNA, 76 bp, Homo sapiens
  chr17:14212398-14212474
  binary
cgacgttgccacgtgtccgctcctttcgggagctaggggggcgttggcttggacatcccgttctggaagggtggcc

SEQ ID NO: 30919 - DNA, 53 bp, Homo sapiens
  chr17:1451516-1451569
  hypo
cggaacacgcaggtgggacccacagctctgctgcccgcccctgcctggccgac

SEQ ID NO: 30920 - DNA, 272 bp, Homo sapiens
  chr17:1775571-1775843
  hypo
cgagtgccatggaatgcctcagcacgaattctaatccatgggagtctttgacaaaataaaaaatttacactttcccagagcattccttctacccaagtttaaatctcttaacccaaatcctttgcactaaaacggggtttcccttttgatcttcaggactcgggcagccgcaagtagctcctccagcgccagcagccagcccagcagcaagcagcaggccccagccgcagaatggaagctcgggaatgggtgagatgcctcacggggcgtgc

SEQ ID NO: 30921 - DNA, 300 bp, Homo sapiens
  chr17:19140744-19141044
  binary
cgcggcggtggcggcggctccgcgggctacggtcgctcccgcctctcgagcgctgccggtggccgcagcggcgcacccacgccggcccggaggagcagaggtgagccacagcccgtggggctccaaggccagagcgagtccccggggcgaggaccctccccctctccagggcgcggacgcccccagagcacaggctcccctacctcaccagccccgccagggcatgcgcccctgccgccccgctggtccctacgccaggctctgggggatccccttctttccaaccaggccccgccccac

SEQ ID NO: 30922 - DNA, 130 bp, Homo sapiens
  chr17:19623347-19623477
  hypo
cgatctccccgcgcaccacaggcatctcagtatagagtgacctccccacgcaccacgggcatctcagcatagagtgacctccccatgcaccacgggtatctcagcatggagcgacctccccgtgcaccac

SEQ ID NO: 30923 - DNA, 338 bp, Homo sapiens
  chr17:19646495-19646833
  hypo
cgctgggggacggtgctcccccagcttcccttcccacagggccatgcacctgcagcgatggcgcccaccatgggctggatggtgaggttgaaggggtagttccaggtgccaatgacgaggaccacgcccagtggctccgagtggatgtagagctcgtcctgctgagtctggggcgtcttctccacgggctcatccgcggcccactcagggagcttctggatcatgtactcgatctcctctaggacgtacaccacctcctcatagtaggcgttccattcattctgcagcgacagagccggagtgagcttccagggccagggcccgcctgcagctggggc

SEQ ID NO: 30924 - DNA, 101 bp, Homo sapiens
  chr17:19771712-19771813
  hypo
ttctgcaccttttgggggtcccttgactgcgagaagctggtgacagctcagggccctcttcgcagagaatcgtttctgcacaccgactcagaatcgcacac

SEQ ID NO: 30925 - DNA, 300 bp, Homo sapiens
  chr17:26851601-26851901
  hypo
cgcattgcgtcaccagggcccgagcaagtccagggccactgcccagccggccccggccctgggcccttcaggctctcaccctcagacaagtatcctggctttggctttgaggaggccgcagcaagcagccctgggcgattcctcaagggcagccacgcgcccttccacccgtacaagcggcctttccatgaggacgtcttcccagaggccgagaccaccctggccctcaaaggacactcctttaagaccccagggccgctggaggccttcgaggagatcccagtggacgtggcggaggcc

SEQ ID NO: 30926 - DNA, 53 bp, Homo sapiens
  chr17:27940911-27940964
  hyper
gatgaatccttagaggagcgctgtccctatcccttgctccttctggccggtcc

SEQ ID NO: 30927 - DNA, 58 bp, Homo sapiens
  chr17:34400043-34400101
  hyper
cccccattgtattgactccacattgccccctgctggtgaaacaagtgcgaaggtcagc

SEQ ID NO: 30928 - DNA, 226 bp, Homo sapiens
  chr17:36886750-36886976
  binary
cggagctcccggcccgtcccgccggtgtctggcttgcctcagctcacaggcttttcccgagcgccagtccctgccaggacctccgcagccagcaccttctcttgcgacctttttcttaccctctcattcctccctcgccccttcagccctgtcacctcctccttcctagatggcctcccgtgtccttccctttccactgattttatttttccgtttccaaaccacc

SEQ ID NO: 30929 - DNA, 194 bp, Homo sapiens
  chr17:37074886-37075080
  hypo
cgccgccgacgaggacgaggtctccttccaggacggggacaccatcgtcaacgtgcagcagatcgacgacggctggatgtacgggacggtggagcgcaccggcgacacggggatgctgccggccaactacgtggaggccatctgaacccgcagcgcccccatctgtcttcagcacattccacggcatcgcatcc

SEQ ID NO: 30930 - DNA, 191 bp, Homo sapiens; identical to SEQ ID NO: 29869
  chr17:39788236-39788427
  hypo

SEQ ID NO: 30931 - DNA, 87 bp, Homo sapiens
  chr17:3985702-3985789
  hypo
cgacaattaaaaagaacgatcagcttacctaaaatacgtgcacagtgaacggaaagtgagctgcagggactgcttgtgctcctgctc

SEQ ID NO: 30932 - DNA, 199 bp, Homo sapiens
  chr17:40436563-40436762
  hypo
cgtgagccaccatgcccggccctttgggataattctcttaatccataaactcaaacccaccttcatgtaagtgtgcacagagcacactgtcccattcaatagagcaggggtgtaggctgggcgagaatggagatgccatgctccgcaccgcagaaaaatggtgggctagcccagcccagggaggcctcttcactccgcc

SEQ ID NO: 30933 - DNA, 343 bp, Homo sapiens
  chr17:42254319-42254662
  hypo
cgacaccaggctgcggcgcgccggctcctggaggctggagctgatgcccgggcggccgggcgcaagcgccacacgccgctgcacaacgcttgtgccaacggctgcgggggcctggccgagctgctgctgcgttacggggcccgcgctgaggtccccaatggggcgggccacacgcccatggactgtgcgctgcaggccgtccaggactcccccaactgggagcctgaagtccttttcgccgcactgctggactacggggcgcagccagtgcgccctgaggtgcgctgggaggccctgacataggaggctcctgtgtgggggagcccgcggctggaactgctcc

SEQ ID NO: 30934 - DNA, 425 bp, Homo sapiens
  chr17:43246865-43247290
  hypo
cgcacggtgagttccagcggaaggacttctctgagacttacgaacgcttccacaccgagagcctgcagggccgcagcaagcaggagctggtgcgagactacctggagctggagaagcggctgtcgcaggcggaggaggagactaggaggctgcagcagctgcaggcgtgcaccggccagcagtcctgccgccaggtggaggagctggctgccgaggtccagaggctccggaccgaaaaccagcggcttcgtcaggagaaccagatgtggaaccgagagggctgccgctgtgatgaggagccgggtacctaggggtgcctcccagcctggtggacccaaggagaaggtcccatttcgtgcacactcaggccagctgggtctcaaggaggcaggtggcagatgaaaaccaccgtcaacaccctgtgc

SEQ ID NO: 30935 - DNA, 879 bp, Homo sapiens
  chr17:43324795-43325674
  binary
cggggagaagggctgcttcttcactagagttggcggcgagggagcccgcttcgagggggcggaggctttcgtggctggcccagtatccctgcgggaggccggagggggcgagcgggcagctggggttagacacgccgggccagccccgcagcagttctccttccggctgccccgccccatttgcgccagtcctgcctcccacccgggcatctggccccttttcctttcgccctacccagtacttagtgacgccataagtgacctcgccttacatctccgcgcgtgccgcctccgtcaccgcctgccgggtccccatttcttccgggcctgcccccgctcctcgcctgcccctcccctccaccagccagtgtcgccccatctgtctgtcctccgggcacttgtcccgcccctcactgcgtgtccctcccccgcccgccggctctcacctaggccgagacacgccccgggctgggcgggatcttggggcggccgggctagtagggctggatcaggcggaagccggggcccggggctgggcttcgtgtcctgcgttccgggagcgccaacccctccaggttaggaatctgagagtacgggctgcgcgcacctggggcgggtgcctgggaggaggtggaggaggagacggtcctcagaacgggtcctgggggtcggaggcgagggcgggggttgtaagtggccgggagaggtccctcccgcgggtcccggcgccccccgccccgtcggggacgcacctacttcgtgcagtttgtgcagcgagcgcgccagctcctagttggagaggtcgctgatgcgcgccgcgtggcagaaggcgagccccgcgtgggagcgccccccaacccccgcagcctgggctgagcc

SEQ ID NO: 30936 - DNA, 74 bp, Homo sapiens
  chr17:4436345-4436419
  hypo
cgctctacctgcaccgcgcccaagttgtgcagaagacagcagagacgtgcaacagcccgccctgtggggccaag

SEQ ID NO: 30937 - DNA, 164 bp, Homo sapiens
  chr17:4436450-4436614
  hypo
gctggtgagggacctcggacaggagagcccctcagccttagccctgagccgcctcaactcgtgcgccaccatcctctgtccccacagcctcatctttggggccatcacctgctttacgggatttctgggcgtggtcacgggggcaggagccacgcgctggtgcc

SEQ ID NO: 30938 - DNA, 238 bp, Homo sapiens
  chr17:4685696-4685934
  hypo
cgactggagcagatttcgataatgcgtgggggctggcgctgagcgtcgtcacccacaggtggggagattgggccttacctccccttccacaccacatccagatgctgcgctcggtcttctcctcggcgttcggggtgcttggtgccatctactgcctctcggtgtctggagctgggctccgaaatggacccagatgcttaatgaacggcgagtggggctaccacttcgaagacaccgc

SEQ ID NO: 30939 - DNA, 147 bp, Homo sapiens
  chr17:48687012-48687159
  hypo
cggtgcctccctgccccgtgaccctgaccagctagccacattgcttgtcttcctcaagtgccctgtgcccccagcttcgggctggacattcagagccagccacccaatgggctcagcgcaccccacccataggcagagtgaggtggg

SEQ ID NO: 30940 - DNA, 78 bp, Homo sapiens
  chr17:48687246-48687324
  hypo
aatgctggacgatgtaattgcttccggcagctcagccagcgctgcgtcaggtactgcgtctggggtgtgggctcatgc

SEQ ID NO: 30941 - DNA, 341 bp, Homo sapiens
  chr17:4890368-4890709
  binary
cgtcgggctcggctatgtgcagtgaagctggggttggggtaaggactccgccccagggcgcaggtgcgcagtcctggctaggcagcctgccagggtgcggagcgggagcgggtccttgggctgcacttgggcggcgccggatcggacgcttggcactctgggcggccccccggcggagtggtggtcccaggagaacctccgaggtgggagggtcccgcccgcatagagggatgttctggagaagccgggagcagagtccgcgggcacgcggtgggcgagggacagtgcaggtgccgggtgcgggggtctccgggacagtccccggcacgcgctggtccgcc

SEQ ID NO: 30942 - DNA, 218 bp, Homo sapiens
  chr17:60744620-60744838
  hypo
gcaccaggcttcccgaactggctcaggcttccgagggagcagagggaggtaggaggttctgagcagggccccgggagccacggtgtgagcttctctctccgggggtgctggcgccctgccctccccacagaccagccggacaaccccagtgaggagaactgtggagtgatccgcactgagtcctcgggcggctggcagaaccgtgactgcagcatcgc

SEQ ID NO: 30943 - DNA, 111 bp, Homo sapiens
  chr17:62776313-62776424
  hyper
cgttcctcgactaggaaagggtatacacttgagtcactaagcacactgggccccggaggcggggtcatcgagctgcccagagccaacaaaccccaaggtggacactgcccc

SEQ ID NO: 30944 - DNA, 61 bp, Homo sapiens
  chr17:62776446-62776507
  hyper
cgcagcgcactcacgtctgctgggcgggcctcagggagcccaagggccgggtgggcggggc

SEQ ID NO: 30945 - DNA, 272 bp, Homo sapiens
  chr17:65040729-65041001
  hypo
cgcagccgccggaccctgcccagggcacccacgcctcggcgaccaccatgtcccagaccaaaatgctgaaggtccgcgtgaccctcttctgcatcctggcaggcatcgtgctggccatgacagccgtggtaaccgaccactgggctgtgctgagcccccacatggagcaccacaacactacctgcgaggcggcccacttcggcctctggcggatttgtaccaagcgcatccccatggacgacagcaagacctgcgggcccatcaccctgccc

SEQ ID NO: 30946 - DNA, 184 bp, Homo sapiens
  chr17:72367880-72368064
  hypo
cgcagtggccctggcgcgccttgccaccaggaccaggaggccctcctactactaccttctggcgctcacagcctcggatatcatcatccaggtggtcatcgtgttcgcgggcttcctcctgcagggagcagtgctggcccgccaggtgccccaggctgtggtgcgcacggccaacatcctggag

SEQ ID NO: 30947 - DNA, 345 bp, Homo sapiens
  chr17:72368130-72368475
  hypo
tgccaccccctgcaccatcgggccgcctcgtccccaggccggacccgccgggccattgctgctgtcctgagtgctgccctgttgaccggcatccccttctactggtggctggacatgtggagagacaccgactcacccagaacactggacgaggtcctcaagtgggctcactgtctcactgtctatttcatcccttgtggcgtgttcctggtcaccaactcggccatcatccaccggctacggaggaggggccggagtgggctgcagccccgggtgggcaagagcacagccatcctcctgggcatcaccacactgttcaccctcctgtgggcgccccgggtcttc

SEQ ID NO: 30948 - DNA, 1345 bp, Homo sapiens
  chr17:7254483-7255828
  binary
cgcagtgcccgcggcgcgcacgttcccacccaggctcggagcgcgaggtccccaggtgggccccaaccgccggatcctgcccttctgcactggggcccagccgcctcccggcctttcctccctcccccaggagatgagacgtatcttgacatcttccgcgacttctccctcatggcgtcagacgacccggagaagctgagccgtcgcagtcatgacctccacacgctgtgacccgaggcccacggggcccgcgcctgcctcccttccccgccaccgggccctctgccattaaagcctccgtgcttcgctcttcccttctggttcacttcttgggcgccaccttcgggcccgtagggtgttgggcgctgcggctcccgaggtgcggggagcagctgggggtttgcgagctccagtccagcaaggtgcgactccggggagcgaggcggcagcttcggccgcggcctgagcgcagggcgctgcggggcgggggctctcgggctggggcgacgtggccagcccagtcctgccgaggggtggggctggccctggggctcgctggccccgcgccgccgcggagagagcgcgcccgggccaccccggctggaaggcatccccggaatgcggcggctcagcacccgccccctcgggaattccccgggggagccgctgggagggactcggctcccgggctgggccggccgggcctcgggctctgagcggtgggattagaggctccagccccgccgacttgcagacgtgagatcgggcacacctgagcggcggcggggcggtcgtggccacatccggggcgacgtgcctgagtcaccccgtcccgccagcgtctgccagtccagccagtccgcccagtctctcgcgtccgagactcgcctccagcctcccacctccgcccgggccgcgcgagcctcgcgggggcgggggcggggcgccaaggggcggggctgtctcttaaagggccccgggccgctgcccttaggccacttcctgggggcggagaggacctcagcggctgcggcgacacccagggaaggcggcgcggccgggtcccgaaactcctggctgtttccatcagagccctcggacactcccagcccgggctgagcacgcatcgtcgctccccggcggatacaagggggctccgccatccgctcccgtcagttcggcctccatctcctgggacccgcgccggcagccaggccaggcctctgagtggccccagagccctggctggactcgtccacggcggcagcgatctgcccggggtctcggaggccatcccttcagagtcggccctgtgctcgccaccgtcacctgctggttggattcc

SEQ ID NO: 30949 - DNA, 230 bp, Homo sapiens
  chr17:72875508-72875738
  hypo
cgcccccagcccagccctcgactaccttcaggcacatgttatcagagagcctggggaatagatggtgttccacatggcagctgatgatcgagtggccgaacgcccagtccagcacgggcagccgggccaggttaagcacccccaggctcatcatgtgaatccgacggggcttgttgtcccgggagaacatgggcagtccgatgtgctgtgacagacacgtgggtcacgcc

SEQ ID NO: 30950 - DNA, 282 bp, Homo sapiens
  chr17:7320371-7320653
  hypo
cgcgtgcgtgacaactaccgcgccaacaaggtggccttctggctggagctcgtgccccacctgcacaacctgcacacggagctcttcaccaccaccacgcgcctgcctccctacgccacgcgctggccgcctcgtccccccgctggcgccccgggcacacgccggcccccgccgcctgccaccctgcctcccgagcccgagcccgagcccggcccaagggcctatgaccgcttccccggggactcacgggactactccacggagctgagcgtcaccgtggcc

SEQ ID NO: 30951 - DNA, 88 bp, Homo sapiens
  chr17:73910336-73910424
  hypo
cggcccggagctcgctggccctgatcttcagctcagcctgctcctggagacagcggaggccctgctgcattctcctcccaggaattgc

SEQ ID NO: 30952 - DNA, 349 bp, Homo sapiens
  chr17:74003316-74003665
  hypo
cgttccttggagatggggtctgtcaaatccttctcgtagctggactcgtcctgcaggagctgggccagctcttcactgatcatcccggagaggagggcctgctggatggggatgcggcctgtcctcttggggtcgatgagccccccggtcaggtgctgcacctgcaggtgtgggagcacgctctcccggggcatccagcccttctggacggcctcgcccaccgagagcctcttcttggtgacggggtcctcgatgccggtgaaggccttctgggcgttaagcagcctctgtgtggaggtgttctcgatcaggcccctctccatcgccttgtgcacagagtagcgctcac

SEQ ID NO: 30953 - DNA, 506 bp, Homo sapiens
  chr17:74003908-74004414
  hypo
cgatggagagtgaggagcttggcttggtctccccagctacaagcagcgcaaactcggagatgggcaggtggccgtccttgtacagatggtactcctccttagagatgcgccggcagcggagggcggcctcgatggagtactgcttcccgctcttgcggtccaggagcacagactcctccccacagggccccgaggtggtgacctcctcccagtcacactcgagctcctgcagctgcaagtactggcccctgtcgatgatgcccctcttgtaggcctcgtatggggacatgtccttccccgtctcgggttccaggatggagatcttggtggaaaggttggtctctcgcgtctgggtctcctggctgagctcctcccggctcaccttggcgtggaggtcccggagcgtccgctccttctcgtagatctggtccttctcgcggaggatggccgcctccagccgcgagagctcctggccccgctgggccgccttctgtcgctcgctctcc

SEQ ID NO: 30954 - DNA, 270 bp, Homo sapiens
  chr17:74005186-74005456
  hypo
cgggcttcctcctctccagcagcaggcgcttgctctgcagctcgtacaccgcgtcctccgcggcccgcctcttctgggccgcctcccgcacctcctggcggagccgctctgcttctttctccagcaccgggtccttctcgtggcgcaccacctccttgctcaccgtcttggtctccaccttggcccgctcgcgcctccactcgtcgcgctcaccctgcaggcggatgagctgctcctgggagcgcccgtggctgttgacgagctcgttga

SEQ ID NO: 30955 - DNA, 154 bp, Homo sapiens
  chr17:74005497-74005651
  hypo
ctcctctcatgcctcaccacctcctgggtcacctccttgtactccaccgtgggcttctgggcccgcaggacctccaggtcgggcagcagcttctccacctccttctccacaccgctcctcttgcccgccatctcctgcagcttggccttgagcc

SEQ ID NO: 30956 - DNA, 48 bp, Homo sapiens
  chr17:74475354-74475402
  hypo
cgcccctgcggaagcagacaagggacaggtgggcatacgcttgtctac

SEQ ID NO: 30957 - DNA, 92 bp, Homo sapiens
  chr17:74965156-74965248
  hyper
cgcagccggcctcggctgtttaccaggcacccgttacgctaattgaaatgtgccaaatagctgcccggggcggggccgagcggagcagcggg

SEQ ID NO: 30958 - DNA, 84 bp, Homo sapiens
  chr17:75082793-75082877
  hyper
cgcctgtagttttcgcctgtccaggacgccttcacccctgcttcctttgagaaaagtccctctcccactccaagtggtactgac

SEQ ID NO: 30959 - DNA, 56 bp, Homo sapiens
  chr17:75411761-75411817
  hypo
cggcaccgaagccgagggaaggcagcattagtatgagctcccagcccaccgggctc

SEQ ID NO: 30960 - DNA, 96 bp, Homo sapiens
  chr17:75411846-75411942
  hypo
cacgagggaagcatggcgaggtggacggtgcggaggcataaggagcaaaataaggcagatgcagtggctcagtggctcctggtggctgcgaggagc

SEQ ID NO: 30961 - DNA, 170 bp, Homo sapiens
  chr17:76337740-76337910
  binary
cggcctgggaggaaggtgcggcgctggggagggaggggagccctgccctggtgtgccctcggtcccgcgccgcacaccctgccgggaagcccggggccgcagctgctcgggcggcccggcccagaatagcctcccttccgggcagggctgccccggcccgcagcgccagc

SEQ ID NO: 30962 - DNA, 187 bp, Homo sapiens
  chr17:76482434-76482621
  hypo
cgtttggatcaccgtgatctccggcactggcgtgatcttcttgaacccaaagcgcaacttgtccaggcacgtgggcaggtacttgtcaaagaggatcatcaggttggccttctccgactgcaccttgcgcctctcgatccagctgctcaccaccctgggggtgacaggaggcgccgatgacacagcc

SEQ ID NO: 30963 - DNA, 49 bp, Homo sapiens
  chr17:7748395-7748444
  hyper
cgcagccaccccgtccctctgaccggccttttggttccctgccacacac

SEQ ID NO: 30964 - DNA, 184 bp, Homo sapiens
  chr17:77769064-77769248
  hypo
cgctctcgttccctctcacgttcccgctccctctctcgctccctctccctttctcgatcccgctcccggtccctatcccggtctcggtcccggtcccgaggggcctctgcgcggcaggtgctgctggtgctggtgctgctcgctggcggggacaaacccatgtttcgaaggccctcccgggccc

SEQ ID NO: 30965 - DNA, 106 bp, Homo sapiens
  chr17:77899559-77899665
  hypo
cctgtcccagctctggtcccccggccccaggtcctggacgctggctccgcgcagcagcaggcggcctccggaggacacgatgtgactggctgccgctacgtcgcac

SEQ ID NO: 30966 - DNA, 190 bp, Homo sapiens
  chr17:77917679-77917869
  hypo
cgattttttttaattcgggagtggtgggaatgaagcctctcagaccgtccatgccgtgcttcccttcgttaatgcagatcgtccaccctgcacgtccacgtccagcaggctgagccaggagggaaacctagacccgggccaggggcgagccgatgaccgcatgcaaaggcggcgtgtggtaccggcactc

SEQ ID NO: 30967 - DNA, 152 bp, Homo sapiens
  chr17:77923970-77924122
  hypo
cggtatccccccaaaccctcgagggaggtgttgtgttttgtttttttttttcaacgcagcagctttgattgctttatcggtgtgttcacagagagcctcacacaagaaaacggggccctcacgaggaggtggcccgtgggtgcgggcgggcg

SEQ ID NO: 30968 - DNA, 162 bp, Homo sapiens
  chr17:78590602-78590764
  hypo
cgaagaccaattatttgttggtttttaaggaccagagttcccaggagtaagtgaaacacgactcgatctcttaagtgtgcccaatactgccagcacaacattcctcacaccggtccagcttgctagttaccttggatactcgcccaagcttcagctgactgc

SEQ ID NO: 30969 - DNA, 310 bp, Homo sapiens
  chr17:78598720-78599030
  hypo
cgcagcgttccccagctggctccaccccgatggggagtgtggaaggtgtgttgaggggtatccagagaaggcctccccaagaaattgatctttaaactgagatctgaagagagagtcagagccggccaggtgacccgggggaggggaactcccagcagagggaactgtggatttgagggccgagaggtgagtgtggccaggccgcagtgtaagtacgaggaatgagtagtgagtagatggtccacggagagtgaacaacgcaggcagtgaaggcactctaggagaaccaggcagcatcactgatgtgaac

SEQ ID NO: 30970 - DNA, 194 bp, Homo sapiens
  chr17:78649377-78649571
  hypo
cgggccttgggcgttgcctcctgcccctcaggccgcccatgactgcaacgccccactccagttcatgggctcaggcccgcggaacccggctgctctgctcaccgggctcgggcccgcagaacccggctgctctgctcaccgggctggccccagcttcactgctctcacaccagcacatccgtgaatttcagaac

SEQ ID NO: 30971 - DNA, 60 bp, Homo sapiens
  chr17:79060187-79060247
  hypo
cgcgctgcgttgggttcatgggccttggttttgtgttttattgtttgaatctcaggctgc

SEQ ID NO: 30972 - DNA, 196 bp, Homo sapiens; identical to SEQ ID NO: 29898
  chr17:79060680-79060876
  hypo

SEQ ID NO: 30973 - DNA, 257 bp, Homo sapiens; identical to SEQ ID NO: 29900
  chr17:79074754-79075011
  hypo

SEQ ID NO: 30974 - DNA, 169 bp, Homo sapiens
  chr17:79253772-79253941
  hypo
cgctacaggggccgctctgccagccccccgcatgccgatggtcttttcccgtctgcgccggatttacgcctctcttttcagccggttaccatgttccaaccgggcacgaatcactcgctcttgtcattttggtggagaaggtaatgctgctggaattatggaagagccc

SEQ ID NO: 30975 - DNA, 261 bp, Homo sapiens
  chr17:8012317-8012578
  hypo
cggcagctacctgccatttcagaagggaccccaaactcaattcataccctcaagaattccctatgctagggtgtgaaaacacctgaaatccccaggcgccatgagcgcagggaccacaatgtcccaggccaggagaccctggtgggactgctggtcccgccccgcacctcgcacctctcaatggccgcccagatcttcaggccgtcgtctcggtagtggtagttggggatagccaggacgccgcgggcccgcaggctgtcc

SEQ ID NO: 30976 - DNA, 67 bp, Homo sapiens
  chr17:80277699-80277766
  binary
cgtgtgtgcagagacgggtgcgcgactccatgcgtgtgtgcagaaacgggtgcatgtggacacgtgt

SEQ ID NO: 30977 - DNA, 68 bp, Homo sapiens
  chr17:80332182-80332250
  hypo
cgtcgtgaggggtcagagatggcgctgacccccgagtccccgagcagcttccctgggctggccgccac

SEQ ID NO: 30978 - DNA, 404 bp, Homo sapiens
  chr17:80332292-80332696
  binary
cctcaacagctcctgggccagcccgaccgagcccagctccctggaggacctggtggccacgggcaccattgggactctgctgtcggccatgggcgtggtgggcgtggtgggcaacgcctacacgctggtggtcacctgccgctccctgcgtgcggtggcctccatgtacgtctacgtggtcaacctggcgctggccgacctgctgtacctgctcagcatccccttcatcgtggccacctacgtcaccaaggagtggcacttcggggacgtgggctgccgcgtgctcttcggcctggacttcctgaccatgcacgccagcatcttcacgctgaccgtcatgagcagcgagcgctacgctgcggtgctgcggccgctggacaccgtgcagcgccccaagggctacc

SEQ ID NO: 30979 - DNA, 230 bp, Homo sapiens
  chr17:80394871-80395101
  hypo
cgactgggacccgggccggccgcatacactctggagtctcctacactgagacccgggcctggctgtctcaggcggctcccatgttggctctgggtacagccccgggaggcgtgtccagggccgtgttggccgcctcccctggagccactcacctgtttgctttctcacccagtcctcctcatgcagaagtaccggcggtgcggctttccgcagctgtgggcagccagtgc

SEQ ID NO: 30980 - DNA, 82 bp, Homo sapiens
  chr17:80395146-80395228
  hypo
gcaccacctcaggaaccacgtgcagtggctgcaggtggcgggcagcgggcccacggactcactgcagggcatcatcctgacc

SEQ ID NO: 30981 - DNA, 244 bp, Homo sapiens
  chr17:80571137-80571381
  hypo
cgcccccgactacagtggtgggagcgggaggtggccaggggttcacacaggcatcaacgccaaacacagggtgggtatgggtcagggctgcgttccacagggcacaagccgcctgtccccgcaagacatcccagggccacaggggagggaggacagaccagaaacgcagccggagtcatccatgcccacgcacctgtacgatcagacaggaaagctgctgagtaggcaccgtctgaggcagtca

SEQ ID NO: 30982 - DNA, 271 bp, Homo sapiens
  chr17:80571776-80572047
  hypo
acccagagtcagatctcaagtgttagacaagccagggtgacgccggctcacttgaagctgccacttcaacatgcagggacattgctgctgccagccaccctccacctccacaggccagcaggagcctcagacctcccagagccacacaggcctcctacagatgcatttcctccctccctcctccagaggtgcccttggggcacagggagagaggagggcaggccgccccgtcccgacacagggagagaggagggcaggccgtcccatcccc

SEQ ID NO: 30983 - DNA, 139 bp, Homo sapiens
  chr17:80763321-80763460
  hypo
cggtgagacgcagcacctggtgatgaaggggcggtgtgtggcctgggcggtggcagtggtggccgttcaggaaggggctgccaggaggcagagggtcccgaaggccgggtgcttccccagggaaggcgctggtcctgtc

SEQ ID NO: 30984 - DNA, 269 bp, Homo sapiens
  chr17:80965953-80966222
  hypo
gaggaggcgcagggaagaggtgcgctatgcgcttaatcctgcaccgagacgtcagattctcagggcaggagcttttgtgggcaccgcacctagcacagggcctggacccagtgagcagatgtgaatgagaggcctgtgcgctggcctgagaggctggctaactttctccaggttcctagaagaagccactttcaaggctttcgagaagtgttgtgagctaattcatttgaaagcctctgtgccaacaggcggagcagaaagcgcaggcc

SEQ ID NO: 30985 - DNA, 328 bp, Homo sapiens
  chr17:80995234-80995562
  hypo
cgttctccaacccggagcagtgcccctcttcataccaggtagcagtttaatttctagcattaatccctaaagtttagccagctcaacccagttagccagaggatcccagatgtcaaaaagccaggggcataaacaggcgcagggaggaaatgcacccggggaggcgagcgcctgttctgccctgggatggatggtgggccgtgtctccagggccgctgcagccaagcctccatcatcgctgcagggccaggtgagtgccctgaagctcctcacgagaaacacaggcggaggcacctgtgaggacgaagggccggaaggggccttccac

SEQ ID NO: 30986 - DNA, 64 bp, Homo sapiens
  chr17:81049931-81049995
  hypo
cgcagggttcaggggcttcagagggggttctgtgagcagggcttggcttgaaagccatttgggg

SEQ ID NO: 30987 - DNA, 188 bp, Homo sapiens
  chr17:81062393-81062581
  hypo
gggttcaaaacagcgcgagtcacaggagacagaagggaatctgagcttgcgattgctcattcttgtcaccctcctggctctgggacacctctgccatctcctaccaagggtaccccattcctggcgagttggaaagtggcctcatgggcagaaaacgagggcaaagggagctgcgtgctgtgagagac

SEQ ID NO: 30988 - DNA, 145 bp, Homo sapiens
  chr17:850237-850382
  binary
cggccccacggtgcgtcctccaggggccgcatgaggagagacgatacacgccagcactcagggcccagcacgggccccccactcagtgaaaagcatcctctcactcttaggcttgtcatgatcatgcaccggcagcgtccccctc

SEQ ID NO: 30989 - DNA, 186 bp, Homo sapiens
  chr17:8977478-8977664
  hypo
cggctctcgcgaaccagtgcgggagggaagcctgacaggggcgaggtggcttcctgcaagacggcgtgtaagctcagcaactgcatttttctgaggaattagggatgggacgcggccagcccgctctggttggagcttggtgctgtgactcattctcatcaagggtcactgagcgtctctctgcgc

SEQ ID NO: 30990 - DNA, 186 bp, Homo sapiens
  chr17:9233928-9234114
  hypo
cgtgcactggcttcggctttctgtttgggacgtgggttcacgtttacgaacaacaagggatggcccctggcagagcctcgttcgcactcgctcctgcctccagtttggcaacacaacacaaaggcggtatggcttgtatacactttccaggctgagcccctattcagagggggctgcagcttgcgc

SEQ ID NO: 30991 - DNA, 257 bp, Homo sapiens; identical to SEQ ID NO: 29910
  chr18:10485485-10485742
  hypo

SEQ ID NO: 30992 - DNA, 423 bp, Homo sapiens
  chr18:12433995-12434418
  hypo
cgggtccccggccggccgacgtcttcctcctgccttttctctcggggctgtttggacatggcaccttcctccagcatctaggctgagttctgggtttccccgccccgttctgctctgcgtactcgtccctggcgttgccactctgtgaccttgcctgcgtgtcgcgtgcccgctgcggaagccgggccgcggggcttgggagctgaggggaggccgagtccggagatgcgcggcgcgagcccggccggcccgcacatggtcactccgccaggcttggaggaccctggaggggccctcagagtggccactgcggacgccatcctccagcccgggtgcagcccccggaggctgcgggtcccgctgccatctccactgccacctcgtgcgaggcccaggccgggatcccccgccagagctgctccc

SEQ ID NO: 30993 - DNA, 56 bp, Homo sapiens
  chr18:13499663-13499719
  hypo
cgccgcacacgtcctgccatggacaccggagaatccatctccacacatgtcccgcc

SEQ ID NO: 30994 - DNA, 52 bp, Homo sapiens
  chr18:13826252-13826304
  hypo
cgccggcatctgggctttctgcacgggctgcggcattgtcttcatcctgtac

SEQ ID NO: 30995 - DNA, 79 bp, Homo sapiens
  chr18:13826592-13826671
  hypo
ttcaatatgtacctcatactcatcatgtgtaattccgtgatggaccctctcatatatgccttccgcagccaagagatgc

SEQ ID NO: 30996 - DNA, 120 bp, Homo sapiens
  chr18:3051295-3051415
  hypo
cgtgaagcagggaagatgctcactgcgtgaagttgggagcagcatcggtcctgcccagtgctgtgcatgggtgacttgatcgcatgagactttgggccgagaggggctttattcatactc

SEQ ID NO: 30997 - DNA, 33 bp, Homo sapiens
  chr18:34823862-34823895
  hyper
cgaggatgacggcggcggcggcggcggcgaccc

SEQ ID NO: 30998 - DNA, 105 bp, Homo sapiens
  chr18:44260345-44260450
  hypo
cgtacttgacgcggatggacacgtcggtgttgcgcgtgttgtagaaggcaggcagcagcaccgacgcgttctcgtacacctgcagcacgcgatagaacggccgcc

SEQ ID NO: 30999 - DNA, 249 bp, Homo sapiens
  chr18:54694241-54694490
  hypo
cgtcactgctgggaagcatcggcatgctgaactcggcacctcagctgcgctgcattaaaacctaccaggtgccccctgtgcagcccgcgtcccccggctcccacaatgccctcaagctggcccggctcatctggacttccaaccgcaacgtcatcctcatggcccatgacgggaaggagcaccgcttcatggtctaatgctgctgcctgccgccgtgactgcgttttagttctctaaattatccaagcc

SEQ ID NO: 31000 - DNA, 172 bp, Homo sapiens
  chr18:56008826-56008998
  hypo
cgttgttgtttgggttcgcgctcctaatcacacacaccgggagatcctcctatgaagctaacttgtttttgcctccaaaatagcttgcagaagatggtgcgtccggatcagccacaaacagtaacaaccatctaatcgagcctcagatccgccggcctcgtagcctcagctc

SEQ ID NO: 31001 - DNA, 486 bp, Homo sapiens; identical to SEQ ID NO: 29913
  chr18:59483218-59483704
  hypo

SEQ ID NO: 31002 - DNA, 44 bp, Homo sapiens
  chr18:63417693-63417737
  binary
cggagagatggatgggctgcagcccctcctactttcacccctct

SEQ ID NO: 31003 - DNA, 336 bp, Homo sapiens
  chr18:63418336-63418672
  hyper
cgcccgggtccctggcgtctgacgccgtggggagggcagcgaggccccaggtgagtgtgtctgcctgcgcggggctggggaggcgccgctgggcagatgtgcgcccttgctgtgcgcctttggaagcaggactaatcagtgagcggagagcgggcggggatgtccgtgtggagtttcccttggcgtccccaagttactgcgtgttgcagtgagatgtggctctgcaaggcaggacaggcttgtggacggaggcgggggcgtttggcccggaaagccggtgttgacagacaccaggtgcgacacgaggagtagtagttgagggtaagagcaaatccc

SEQ ID NO: 31004 - DNA, 153 bp, Homo sapiens; identical to SEQ ID NO: 29916
  chr18:74069268-74069421
  hypo

SEQ ID NO: 31005 - DNA, 684 bp, Homo sapiens; identical to SEQ ID NO: 29918
  chr18:74083302-74083986
  hypo

SEQ ID NO: 31006 - DNA, 935 bp, Homo sapiens
  chr18:74091392-74092327
  hypo
cgtgacaaggtttggtctgtcgatacccgtcagggccgggcgcccacagagcgcagggacctccggaatggctctccttattcttaggcatgctagcggcttttgtgaccactcccaggggagaagagccacttttggaccccggcatcccccctggcacctgagtgcgggtgaaccgagcaaggagcaaaggctggcattctttgccaccgagggcaggcggggggcccgtgcgtccgctccgggaaaggaaaaccaaattgcttctgatgcttttgtaaccattgggctgaatccacgggggagccacggagttgcagctgacgcggtgccagatgcgtttgtgcatccacaggacctcggggtagtaggtcttgtggctgcagtaaggacacgggtgaacgactaaagccgcctgcagggaggaggccgtctccttattgctggggtcatcccgcgtcgacctcgcacttaaatctagcggcatgaggtctggggccagcgcccgcttccctcccccagagtgttccttgttgtgcaaatcggacagcttttctgcagggtgacccgtctggccctccgctcccgtactggaagggaactccacaccatcaccagggacgggcacctcctgcttggggtgaaatgctggcatctttaagtccatagaaaatctgtgctgctcttgccttctagaagtctctctgctactgttttcaagtatggacacagaagctgcgatccctgccttggactcgccggtgtctctttccgaggcgttatctcccatcttgtgactctggtctccactggagagctcggtcgaagtcacctcttcggaaaagcagcagcggcgcggctgtccccctagaggaggcaaaatatgaaacgggaagttaccatttctcatcagaacacagcaagacacacggtgc

SEQ ID NO: 31007 - DNA, 367 bp, Homo sapiens; identical to SEQ ID NO: 29926
  chr18:74171117-74171484
  hypo

SEQ ID NO: 31008 - DNA, 122 bp, Homo sapiens; identical to SEQ ID NO: 29927
  chr18:74171505-74171627
  hypo

SEQ ID NO: 31009 - DNA, 183 bp, Homo sapiens
  chr18:74195379-74195562
  hypo
cgcctccctgcccactcctgtgggaagctccctctcggcatctgtccgtcatcagcatctgtccgtcatcggcatctgtctgtcacgggtcatctgccgcaccacactgagaacccatgagtgccaaatgtcccccgtcagctggcccacccgcatttcatcttcctggcttaagaaggtgag

SEQ ID NO: 31010 - DNA, 246 bp, Homo sapiens; identical to SEQ ID NO: 29932
  chr18:74325503-74325749
  hypo

SEQ ID NO: 31011 - DNA, 173 bp, Homo sapiens; identical to SEQ ID NO: 29933
  chr18:74325938-74326111
  hypo

SEQ ID NO: 31012 - DNA, 430 bp, Homo sapiens
  chr18:74696524-74696954
  hypo
cggcttcacatgcatctcggaggaaatccacgcgtaaatgcgggtgggcaatgccacctgagcccctgcacgcctgctgggacagagcacgtccagggtacagtgcggctgagccagaggcggcagccacccttgtactcagcttagttggggattctgggagcccttagtccccgctcagtggagctgagcagagggtaccttaccagcttaaaaattttggaaagcgtgccctgggcatcgactcccttgaatcccttgtgagccgatttatagtcggacgctctgcctccgtagccaaatcctggtctctggccttcggccccctgcaagagaagaccacggagctcaacctccacccgcggtgctgggcacgctgcttgagccactgggagctgccaccagggccccggggaagggcccaggcccc

SEQ ID NO: 31013 - DNA, 144 bp, Homo sapiens
  chr18:76129277-76129421
  hypo
cgcagtaacacacggcacagaccgcgtgcctttcctccatctgcttaccgagtcggcgcggccacttaccacccatggcagcacattgcaaggtttgtccgtataaaagaaagtgccggcagatcgtgacgtggaggcctcgga

SEQ ID NO: 31014 - DNA, 180 bp, Homo sapiens
  chr18:76129450-76129630
  hypo
ggccaggctttgctgcgatcactaaaacctggttcgaaatgagccactttagccctccgcatggtggcctcctaggcatccaggcagagggaccctccccgacagcgctctgggggcagcccaggaaggctcagtgctgcggtaattcggggcctccaggtccaccttacgctcatccac

SEQ ID NO: 31015 - DNA, 464 bp, Homo sapiens
  chr18:76435960-76436424
  hypo
cgttcactcaggaagccgaagcccagaagagtgaggtctcaaagttcacagcacgtggcctagaattcaggggtgcagagctcctgcttggtaactcatcccctgtgcggtgatgcttctgatcccacagcaatgcctgcttctgcgaggctggtccagggctggaacggagccctgtgccgtgatgcttccgatcccacagcaatgccacgctcctccagagctggagcagattccgatcccacagcaatgccacgctcctccagggctggagcagattctgatcccacagcaaggccgcgcttctccaaggctggagcagattctgatcccaccgcaatgccgcgcttctccaagactggagcacattctgatcccaccgcaatgccgcatttctccaaggctggagcagattccgatcccaccgcaatgccgcatttctccagggctggagcagattccaa

SEQ ID NO: 31016 - DNA, 178 bp, Homo sapiens
  chr18:76552775-76552953
  hypo
cgggtggcgtgagactggcgggtggtgtgagattggcgggtggcttgaggatggcgagtggtgtgaggacagcgggtggcatgtggatggtgcgtggcctgtggacggcgggtggcatgaggacggcaagtggcgtgaagatggtgggtggcctgtggatggtgcatggcctgtggac

SEQ ID NO: 31017 - DNA, 232 bp, Homo sapiens
  chr18:77083049-77083281
  hypo
cggtaattgggatacccgtcacctcaagcatttatcgttgcttcgcgttagtaatcctccgtttatcgttgcttcgcgttagtaatcctccgtttatcgttgcttcgcgttagtaatcctccgtttatcgttgcttcgcgttagtaatcctccgtttatcgttgcttcgcgttagtaatcctccgtttatcgttgcttcgtgttagtaatcctctgtttatcgttgcttcgc

SEQ ID NO: 31018 - DNA, 150 bp, Homo sapiens
  chr18:77270851-77271001
  hypo
cggggcatcctctgccggggcatcttccgccggggcatcctccgccgggacatcctccaccgggggctcctccgccggggcatcctgctccggggcatcgttcgccggtcttgtcgctgcggtggaagtgtcgtgttcccagccaggctg

SEQ ID NO: 31019 - DNA, 338 bp, Homo sapiens
  chr18:77271089-77271427
  hypo
gagagtccaccaacggcaattacaggaacctaatggccttcctgccgcaccgctccgtggcacccggctcgctgtgatgaattgctcattatgtgcagtgttggaatagcctccacaagattaataattggataatcaatacagaaattcaatcttggggtgtttttttcactccggggtcaatatgtcctgaagattacaaggcccgactctgcctcccccctccccgctgcttccgcgttgggagtttggccagcacctcgccacacgatgggtcatggtgcgttgtctccgtacctccgtgacttttctattctttgcaaacagcaggttctgcc

SEQ ID NO: 31020 - DNA, 51 bp, Homo sapiens
  chr18:77456042-77456093
  hypo
cgtgccggagttgatggtgagctccgaggtgagccgggcatcagtggcggc

SEQ ID NO: 31021 - DNA, 31 bp, Homo sapiens
  chr18:77482822-77482853
  hypo
cggcaggagttctgcggggccttcgtgctgc

SEQ ID NO: 31022 - DNA, 315 bp, Homo sapiens
  chr18:77509030-77509345
  hypo
cgtttctgaaggtgtgtcctgctgtcaacagcactctgggtgtttttgtcggccttgtgaggggaacatatttctaaacctcaaacagagagtcacagctggcatttcccattctttgccatcctcttgctgccattagaactctgccacggatggcttcctcgcttgattttagaaagaaaagaattgttggaactggttcttgcacctctcgccctccccctcctctccctgcttgccccagggtcccgcctggctctcgtctgccccgtcttcactttcggtcggggcccctgcccctgcccctgctctgct

SEQ ID NO: 31023 - DNA, 116 bp, Homo sapiens
  chr18:77509679-77509795
  hypo
tcccgtccacctgccagtgggttgagctcttccaggggttcgggacacccctcacggcagcaccttcacgtttacgagaactgtctctgtcttgttttgtttcaagttctcaaaac

SEQ ID NO: 31024 - DNA, 576 bp, Homo sapiens
  chr18:77608097-77608673
  hypo
cggtgaaggcagaatgtctgaaaccctagcgtgggctcagcagctgccaggggccagtgatgaacgccaacctcatctgtcctcgatccctgaggctaatggtgacgcatatgcttctaagtagggtttgccttttgcttggaaggaaatgttataattatttcaccctaacccgctgcattcgttgcttagagctgcgcagcctaaaacaccagaaatgtattctctcaaccccgggagtcccaagtacagagtaggggtccgcaggcctgtgctgtctctgaaccgctggggaggggcctgcgttgccgctcgggctcctgcagcaccggccatcgtcagccctccttggctgtgacctcggcctctgcatcccacggcctcagtgtcggcctctcccctcttatggggacatccgtccctggactcaggcccaccctaggggccttgtcttagccacacgcgaaaagaccctgtttccccatgaagtccgtctcacaggtcccggggctgagactcgcacacacttccggggacgcagtggaacccacagctctgcctttgggcagcagccgc

SEQ ID NO: 31025 - DNA, 235 bp, Homo sapiens
  chr18:77642685-77642920
  hypo
cgcggccggcaaggctcaggacctgcaggccatggagtggcgaggctgccatggagtggcgaggctgccgtggagcgcggaggccgggtacacctgcgcgtggagcgcggaggccgggtacacctgcgcgtggagcgcggaggccgggtacacctgcgcgtggagcgcggaggccgggtacacctgcgcgtggagcgcggaggccgggtacatctgcgcgtggcacgcggaggcc

SEQ ID NO: 31026 - DNA, 145 bp, Homo sapiens
  chr18:77644520-77644665
  hypo
cgatgcagtggaggagcagggctgggtctgggcctgggcctgggcgtggcagctccccaggcccacggggcaggaattctagattctgggattcctttcatcgttgctttttgtgttttctacctagagcggagaaatgtttgtg

SEQ ID NO: 31027 - DNA, 39 bp, Homo sapiens
  chr18:77644881-77644920
  hypo
cagccaagacaccatccctgaaactgtgataatgagagc

SEQ ID NO: 31028 - DNA, 278 bp, Homo sapiens
  chr18:77808879-77809157
  hypo
cgtcggctcagtgcctcctagaaagtggagtgtgggcacgtttgcaggggatccaaccaggcgtctgctcagtgcctcctagaaagtggagtgtgggcacgtttgtaggggatcccaccaggcatcagctcagtgcctcctagaaagaggagtgtgggcacgtttcagagaaaactggcttaggcctccctgtttctggcgtggccttccctgggagcgagttagggacacggaagctcacccgcttctgaatgggtccactcctggggatttccgcg

SEQ ID NO: 31029 - DNA, 368 bp, Homo sapiens
  chr18:77809186-77809554
  hypo
gaagctcacccccttctgaatgggtccactcctggggatttccgcggccttccctgggagcgggttagggacatggaagctcaccctcttctgaatgggtccactcctggggatttccacggcctttcctgggagcaggttagggacatggaagctcacgcccttctgaatgggtccactcccggggatttccatggccttccctggatgatccactcctggggattttccgcagctctccagatgacgtgcacgcacactaaacacccagaagttagggaggcactgatccagtgaagtcctcagatcaaccttgtgagctttttacaagtacctgtcactgttaaactgctgatgaaatgtgaaac

SEQ ID NO: 31030 - DNA, 912 bp, Homo sapiens
  chr18:77943609-77944521
  hypo
cgcatatacactcagacatgctcgcacaccctcacacatgcatataccctgacatgctcgcacaccctcacacacgcatataccctgacatgctcgcacaccctcacacacgcatgcacccacacaggcaccctctcgcatatactgtcacatatgcttgcacaccctcacacacgcacccacacatgcatacaccctcacgcgggcttgcacaccctcacgcacgcatgcacccacacatgcaccctcacacacgcatataccctcagacatgctcgcacaccctcacacacgcatataccctgacatgctcgcacaccctcacacgcatgcacccacacaggcaccctcacactcgcatatacagtcacatatgcttgcacaccctcacacgcacccacacatgcgtataccctcacgcgggcttgcacaccctcacgcacgcatgcacccacacatgcaccctcacacacgcatataccctcacatatgcttgcacaccctcacgcatgcatgcatcctcacacacatgcacccacacatgcatacaccctcacaaggctcacacaccgtcatgcacacatgcaccctcacatgcttgcacaccctcacatgtgcatgcaccctcacacatgctcgcacacccacacatgctcgcacaccctcacacatgcatgcaccctcacacacgcatatgccctcacatatgcttgcacacccacacacgcatacaccctcaaggctcgcacaccctcacatgcaccctcacacatgctcgcacaccctcacacatgcatgcatcctcacacacgcgcacaccctcacacacatgcacacacagcccttgcacacccccccaaaggatgcacacacacatccctgtgcacacgtgcactcatagctgctgctctc

SEQ ID NO: 31031 - DNA, 279 bp, Homo sapiens
  chr19:1005441-1005720
  hypo
ctctgggccatcttctgcctgctggtgctgtccagctacacggccaacctggctgccgtcatggtcggggacaagaccttcgaggagctgtcggggatccacgaccccaaggtgggcggcctcggggggctgcgggtggccttggggggctagcggtggccccgggctgggctgtgtggggcaggggtggtcagctggacgtggaggacgtccactaggccaactctggtcccaagagacatttattcaattaatttatttatttaaagaaaaatagcc

SEQ ID NO: 31032 - DNA, 61 bp, Homo sapiens
  chr19:10370250-10370311
  hypo
cggcctgaccggccccccgccccgcccccaccccgcccccaggcctaaatgtgcacagcat

SEQ ID NO: 31033 - DNA, 88 bp, Homo sapiens
  chr19:10370575-10370663
  hypo
ctggaccccttcattccacggaggaagctgaggccacagggagcggccatcgccattgggaaggggcgactccacggaaagcccagac

SEQ ID NO: 31034 - DNA, 291 bp, Homo sapiens
  chr19:10402604-10402895
  hyper
cccctccgtgccttgaggatgataatacgataagatagtgcatgtcaagtgcttaggacatattgagcgctcggagttagttcaaacttggttcttcgacccctagccctgtctccggatgccccgcgcctcgctgctccccggctcttggaagttggctcggaaaggcccgtgagctgcactctggacggactgtttccagcctcagaggccagggtctacctcgcactgggggaccagaatctgagtcctgatgtcaccctcgaaggggacgcattcgtggccactgcc

SEQ ID NO: 31035 - DNA, 341 bp, Homo sapiens
  chr19:10402960-10403301
  hyper
cgaaaaccgggagacccgggagaacgtgaccatctacagtaaggaaggaggcggggtctccgcggctccgaggtgggaccagaggaatgcgaaggcggggcgaagagtgggcgggacctcagtaccggaacaggcgtggcccgaggggcggggcaggtgggggcggagacgtaatcgctggggaggaggagcctgtacagcctgagaggcggggcgccgtaccctagttcgttctcagcaccccgaggattcgggcagataaggggcgggccttgaccggagggaggggtatggtcagtatactacgaccaaatgctccgcccccaggcttcccggcacca

SEQ ID NO: 31036 - DNA, 131 bp, Homo sapiens
  chr19:10403330-10403461
  hyper
cgaggggcagatggtgacagtaacctgcgcagctggggcccaagctctggtcacactggagggagttccagccgcggtcccggggcagcccgcccagcttcagctaaatgccaccgagaacgacgacagac

SEQ ID NO: 31037 - DNA, 508 bp, Homo sapiens
  chr19:11144009-11144517
  binary
cgaggtgcgtgtgctccgcctctgcaccgtcaacagcgtggaggagaagatcctagctgcagccaagtacaagctcaacgtggaccagaaggtgatccaggccggcatgttcgaccagaagtcctccagccatgagcggcgcgccttcctgcaggccatcctggagcacgaggagcaggatgaggtgagcccagcaccggccccgacccctccccagcgtgaatggtggacgcgtgagcggctttcatttttgtttttttaccttttttgcactcttattttttttgcatccctttggagtaaagggagtgtgggctgaacggaaagaggatgagtacttgctttttctttgaagtggtttttttttctaaactgctggtgaaagacgccggattgacagccctggagactgaagtcctctatttatccacagagcagacactgcagcacgggcagcggcagtgccagcttcgcccacactgcccctccgccagcgggcgtcaacccc

SEQ ID NO: 31038 - DNA, 177 bp, Homo sapiens
  chr19:11199850-11200027
  binary
cgagaaatttcaggaggatctttcagaagatgcgtttccaattttgagggggcgtcagctcttcaccggagacccaaatacaacaaatcaagtcgcctgccctggcgacactttcgaaggactggagtgggaatcagagcttcacgggttaaaaagccgatgtcacatcggccgttc

SEQ ID NO: 31039 - DNA, 55 bp, Homo sapiens
  chr19:12749512-12749567
  hypo
cgccaacaaacaggtaattcccaatcaccggcaagaccccgccggattggacccc

SEQ ID NO: 31040 - DNA, 200 bp, Homo sapiens
  chr19:12951477-12951677
  hyper
cggggccatgcttgtgtgggtgtggtcagtcgcagagggacggtcattggggggcggagactcaggtgggcggagactcaggtgggacggacagaaaggaggagtcgtacctgaggggcggggccatcccagatgaagccagaatcgtcttggaaggggccaggctgactcggcaacgaaaaaatttagagaggcggggc

SEQ ID NO: 31041 - DNA, 152 bp, Homo sapiens
  chr19:14181154-14181306
  hypo
cgcgtccgccgattcctcctccttggtcgccgcgtccttggctggcgtcagaaaaatggctacaaacttcctagcacatgagaagatctggtttgacaagttcaaatatgacgacgcagaaaggagattctatcagcagatgaacaggcctg

SEQ ID NO: 31042 - DNA, 179 bp, Homo sapiens
  chr19:14181846-14182025
  hypo
tggaggcctgtgtgcgctctatcgagctggacgggctggtctgggggacctccaagctgatgcccgtgggctacggtatccggaagctacagattcagtgtgtggtggaggacgacaaggtggggacttacttgctggaggaggagatcactaaatttgaggagcacgtgcagagtgtc

SEQ ID NO: 31043 - DNA, 33 bp, Homo sapiens
  chr19:14584167-14584200
  hyper
cgaggggccggtgcgcccctcaccagcattggg

SEQ ID NO: 31044 - DNA, 55 bp, Homo sapiens
  chr19:1482826-1482881
  hypo
gctccagagcccctggggggaggttggagagccaagccccgcccaccacagcccc

SEQ ID NO: 31045 - DNA, 59 bp, Homo sapiens
  chr19:1496674-1496733
  hypo
gtaaccgctgtggggagataggagctgtgtgtgtgtgtgtgtgcgcgcgcgcgcgcgtg

SEQ ID NO: 31046 - DNA, 366 bp, Homo sapiens; identical to SEQ ID NO: 29953
  chr19:15302345-15302711
  hypo

SEQ ID NO: 31047 - DNA, 228 bp, Homo sapiens
  chr19:1577427-1577655
  hypo
cgaggcaggggggccggctggcagtggagcattctggcagcgccgggcgaccaagtcccgactggcagcggctggagtttggttttcagaagcgaaggctggcgttggcacacagggaaggctgcccgatgacgtgcctcgactgtgttacatttactgaaggagagcggcctcctgggcatgccactcaggcacggtgaggctctgtggcaccaccagccgcatggc

SEQ ID NO: 31048 - DNA, 548 bp, Homo sapiens
  chr19:1577687-1578235
  hypo
ccacagcagaccagagtcccgtcctcacgctgcacagtgggtgatgtgagtttcaaaactacgcctccagaccgagaaaccctcccagctgtcagcaagccgtggcgccgagctgccgggcacctgctggctgctctccagtctcaaggagctgggacagcgggcatggggaggagctggcctcgagcccaaaggtcgtagggagccaggcagggcccaggagcacccggcacttcccgaagccggactctgtagaggacgagcgtggagggtctttcgggtgggggcagccccagctgtgtgccccgaggccccgggaagtggggacgggccgaggagggagccaggagcacggccttcctcctgggtgtctccaaggctgggcttcgccgccgagcctggttcacgtggggccgaggaccgcgtctgcaggcggctccagcaggcagcacgggctctcggcagggcctctggaaaggacagggagggctggctttagcgactccacgggacggggacgcttgggctcttctagggagatgggaagc

SEQ ID NO: 31049 - DNA, 247 bp, Homo sapiens
  chr19:17264714-17264961
  hypo
cgcagagtagctattacttggcctccaaaaacaactattttcctcccaattttgacctgtaggaactaccatgtgttttattatttgttacttggggtcagcgaggaagagcgccaagaatttcagctcaagcagcctgaagattatttctacctcaaccaggtaaacagcctcaagcccgagccacaaacgccacctctgttcccggcctcaagctgtttatgtatagccgggaagtcagaggcag

SEQ ID NO: 31050 - DNA, 354 bp, Homo sapiens
  chr19:18117804-18118158
  binary
cgatccccatcacgggctgagggtgaccgtgtttgtttatgaccgccccctccacccacacacctcactgaggtggtggaagtctcctgagccaggctcagaggcggacagtcacggcaggggatgggttcagcggcagcgcattacgctgccacgagagggcgccagcgtcccgcagacgacgcagaggcaactcccgctggagaaactccatgcgacttttctttggggaaactgaagcccagagagaggtcacgccgtcccgtggccacaccgcagctgtggacctgggggtgcccgagcgtcccctgcattcagctctgtggcgggacgggggctgaggatgactggagc

SEQ ID NO: 31051 - DNA, 101 bp, Homo sapiens
  chr19:18255890-18255991
  hypo
cgccgagccgagacccgtcccccgtgtgtggcagcctgcggccccccatcgttatccacagctctggcaagaagtacggcttcagcctgcgggcgatccgc

SEQ ID NO: 31052 - DNA, 612 bp, Homo sapiens
  chr19:18368482-18369094
  hypo
cggtcagacatgaccccggcccggctgcccagctccacccacgtgacggggtggagcatctgccagtgccgggcttggtcccggcgggtgctgtagccgcgccaggcagactggatggtcgtggtggctctgcagaggtgtgccaggttccgccgcacacggtagccgcgccaagtagcttggatgaccatggccccccggtgccacagccggatcctgcgacgcgccaggtagccacggacgcccgcctggatagtgatcactgcgaggatgcggatctcctctgcagcctgcatggacaccattggctccccggaccgcctgggaggcaccaccgccttgttgcgccaggtgtcccaggacgcagcacccctggctggctcccatgcgcggttccacgattggccaccaaccacaccagcgtccgcggggccctggagtatagtggagttcagggatgccttgtgactaacggcaggattctgggggctataggagtcctgccgtctccacggtgactcctggttaaaaaggggtggcagggaaccacttggggaagactcatagcctagagacaccctccgaactcccggggccagcggaggaatgacc

SEQ ID NO: 31053 - DNA, 312 bp, Homo sapiens
  chr19:18879409-18879721
  hypo
cgtcccagcagccaccacccccgccacccccacaggcgcccgtccgcctgccccctggtggccccctgttgcccagcgccagcctgactcgtgggccacagccgcccccgcttgcagtcacggtaccgtcctctctcccccagtcccccccagagaaccctggccagccatcgatggggatcgacatcgcctcggtaagcccagggtggggtccctcggggcctgactgggggtcttgtagaggacagcccgggggctgcagaacagtcgggttacctgctgcatgggccaggggtcagaaccccagcgaac

SEQ ID NO: 31054 - DNA, 197 bp, Homo sapiens
  chr19:18988706-18988903
  hypo
cgagccaaaagtcttgagtcgtctttgattcttttatttctgtttcatctacacccaaggcgaatctgatgggttctcccttccaaacagggtggggggtctgacgctcctctgcctggctacagccccggatgtgttaaatgtctgcatctcgcacctcccgttccaaaaaacgtcacggagctctgagccactgc

SEQ ID NO: 31055 - DNA, 322 bp, Homo sapiens
  chr19:19391586-19391908
  hypo
cttcaggggaggcagccaaccatcctcagagcagctgacatttaatttggcatcagctgtggaacttggcaggctccagtaacactgacacatagaaagatgctgcaacagccccatccgggtggcagaaaccaccacccctcgggcggtgcggtgcttcccgggggagaaggtgagcaaaggggtgcagcgggccctctgggaagggaaaagatttgggtccttccagctcatcaacactcgggctttgccgctaagaatggcccacatttgcactcttagtccttccttggtttacagggcactgagggatgtgggggag

SEQ ID NO: 31056 - DNA, 76 bp, Homo sapiens
  chr19:19448030-19448106
  hypo
agcagaccccatattggcactgccgcctgctcttccagctcgctgtgagtaccgcggcccgggaacgagggtgccc

SEQ ID NO: 31057 - DNA, 106 bp, Homo sapiens
  chr19:19680307-19680413
  hypo
cgctggggtaagggttgttcagatgggagtaaaaatactcattcagcacttccgtcgcctgcttgctgaaattccgccgcttgcgcctgcaaaaacagccgccttc

SEQ ID NO: 31058 - DNA, 173 bp, Homo sapiens
  chr19:19737446-19737619
  hypo
cgcacgtagaagaaaatgcgggtgtacacagccaccatgagcaggaagacaagcaggctcgacagagcccagacggccaaataggagcggctgagcaggggtgccatgcgtgagcagcggtccagggcacagaggcagtgccaggagtgggcaggcagcagccccaggcccag

SEQ ID NO: 31059 - DNA, 178 bp, Homo sapiens
  chr19:19737702-19737880
  hypo
ggtgccgctccacggcgatggccagcagtgtggccaccgacgcagtgaggcttgtgtccagcaagccctgccgcaggaaccagccctcaagtgaaagtcgggctgtgcggggaccagtgtggaacatgaggaagaggtaggccacgcccgcgaagaggtcagccgcggccagattgcc

SEQ ID NO: 31060 - DNA, 50 bp, Homo sapiens
  chr19:2302510-2302560
  hyper
cgcgaagccggagctggggttggcgaccgagaaccttcctgcctcccctc

SEQ ID NO: 31061 - DNA, 112 bp, Homo sapiens
  chr19:2302951-2303063
  hyper
cagcggcttccacgcagacgcccgcagcaccacagcctgtgcacggcgcatccacgccctgttacaaatgttccattcaacgccttctagcacattcacagatcgtccgccc

SEQ ID NO: 31062 - DNA, 155 bp, Homo sapiens
  chr19:2339592-2339747
  hypo
cggcctagtggccaccccagctcaacccagggacgcgggccctgccaccctctgctgtgtggtctcctctgccctggggacgttcggggcggttccttgcacttcagtcccccccgggtcccctcctgctcccgggttttctgccccgttccccc

SEQ ID NO: 31063 - DNA, 301 bp, Homo sapiens
  chr19:2413723-2414024
  hypo
cgaggagccctctggccggttctttctggctggcatcgtgagctggggaatcgggtgtgcggaagcccggcgtccaggggtctatgcccgagtcaccaggctacgtgactggatcctggaggccaccaccaaagccagcatgcctctggcccccaccatggctcctgcccctgccgcccccagcacagcctggcccaccagtcctgagagccctgtggtcagcacccccaccaaatcgatgcaggccctcagtaccgtgcctcttgactgggtcaccgttcctaagctacaaggtattttc

SEQ ID NO: 31064 - DNA, 601 bp, Homo sapiens
  chr19:2461998-2462599
  hyper
cgtgctgttccatccgccaggagcgccgtttcctgcctgactgcgcggccctgggcctcagtcttgcgctctgcaaaccggggtctcgaatctaccccagccctcctgtctcggcgctggggaggggcttcgggtgcccagagccatccccgcgggacccccagggactggactccaagtcccagaaagccccgcgcttcccgtgggtggggcccggggctttccccctcccagcgcgcagtttgggaggcgctgggcaattttcaaattttggcgccgaacgggaggggcggtgacagctgagaccgtggtccccccgggggcacccacgcccaggctgctgctggcagctgcgcccagagcccgaggtctggggcatcccgcaaagctgccccgtccattccgaggggcctcccaaggcaccacacgcgccagggggctccgggcccatttccattatggaaaactgaggcacaggaaggttagggaccggtcggggaatccgcaccaggggcgtagcggaggcgggattcgaacgcgggaccctctttcccccgggagctagaaattagtgaccaattggctgggcgcggtggctcac

SEQ ID NO: 31065 - DNA, 598 bp, Homo sapiens
  chr19:2579147-2579745
  hyper
cgggatgggtgcccccggccgggcaggtccagacgccaaggtctgcacaggggtcacccggacacacctgactcggaccatgtggctaagtttgttttgaaatttcactgccccagcgtaacccagagtccaggccacgcccagcacggctggctcccgtccgggtctctgtgtcctgcagctcagggtggccagggcgggcgggcaggagggcaggcacctggcacccacccagacctgcgccctggccatcaggctgccccgggaagccgggcgaccgggaagatagcagagtcaacagggcgggtgcaggaaagggcgctccccatgcgagcctctgaagccctcggcacacagccctggaggctgggaatccttgagcgttttcctctgaggtctccaagtgtttatggtaacaagaggagggaggagggcgaggggacggccgccgctgggcagcagctccgcctgctggtcaccttcctcggggacatgcaaggacaagctgccgacggaaggggctttggcagaaatgcggggagcaggggacgcacccccacggacaggggcttttctggttgccaaacgtgcagacgac

SEQ ID NO: 31066 - DNA, 101 bp, Homo sapiens
  chr19:28296843-28296944
  hypo
cggcctcggccacgctagctcactggccgcaccgctgcccgccttgctgttcaccagtccctgggcatcccgcatctggttgctgaggaacgcctgacgcc

SEQ ID NO: 31067 - DNA, 389 bp, Homo sapiens
  chr19:28341898-28342287
  hypo
cggcctgctggccgctcctctgtcaggtctccgggtcaactagatgtcggccacgaacgccagacttagcctccggctcgccatgtttgaggtcgaccagcaggccctctcaccggagtgagctgtaaggagggatgctcagtgaaccaatcaagacgtgggccacggaggtcagcagggctctgggcaattcatggtcctgacctggcaagcaccactctgggacctgagcgttgcaaacccatctacacccgtccaacctgtgttggccggcgctcctcgctcgctcaggcctccgggttgacaagagttcagccgtgagcgcctggtttagccgccagcttacagtgtcggaggtcaaacagcaagccctcccccggagtaagcag

SEQ ID NO: 31068 - DNA, 259 bp, Homo sapiens
  chr19:30165123-30165382
  binary
cgaggagtgcgtgcggcggcaactgagggccacgggccgcccgcccagcacggagcacgcggcaccctggatccccgacaaggccacggacatctgcatgcgctgcacgcagacgcgcttctctgccctcacgaggcgccaccactgccgcaagtgcggcttcgtggtctgcgctgagtgctcgcgccagcgcttcctgctcccgcgcctgtcccccaagcccgtgcgcgtctgcagcctctgctaccgcgaactggcc

SEQ ID NO: 31069 - DNA, 247 bp, Homo sapiens
  chr19:3114752-3114999
  hypo
cgtatcccgaccccagggtctccattggcccgagccctccgggctgcttcagacactgccgtaggtggcgcagtgcgcggtccaccccctcctggtggctttccgtcctcccgctggtttgggtgctgtgtccctgtcctgcccccccacccccggcagccggcctgagcacccaccgctgtgttgcagctacctgaccgacgttgaccgcatcgccaccttgggctacctgcccacccagcaggac

SEQ ID NO: 31070 - DNA, 66 bp, Homo sapiens
  chr19:3115027-3115093
  hypo
gcatcatcgagtaccctttcgacctggagaacatcatcttccggtaccgcccgggccacagcaggc

SEQ ID NO: 31071 - DNA, 412 bp, Homo sapiens
  chr19:31767664-31768076
  hypo
cggtggacagtttggataagtcccgtagccggaagcctaagtgtgactctaggtgactgatgtacgtggaaggagtcctgatttgggacgcacaatcgttacaaaagaagacggggtggccagtgtccaagtttttgaggaactttgttccacctgtccttcgaagctggtatttcacgttggccagccagtggctgatggtggtcatggacagcccggtgaacctggagatatgcatccgctcctgggggctcaggtctgacatgatgtacttcccttctgaggtctgccggaggctggcggcaaactgggcctggaggatcaggaggtgctgggggttccagtttgactggcggcccttcctcttctgggcgggcgtcgactcctcagcctcctccagagtggccccgtc

SEQ ID NO: 31072 - DNA, 701 bp, Homo sapiens
  chr19:31768105-31768806
  hypo
gagtggaggattttgacgtgtggctctctgtcaagttcttcagcatatcggatatatctgacaaggcattctcgcgtagcggcgagtttgacatgaatgatacgacggcagatgtctttgccgttgtcaccgtggatgaggaggttgccggggctgtggacgtgggtgacagaagcactgaacccaaggagcagcctttgtcactcttcccttttgtcaagtctatgggctggtcgttgttgacgtggtagaaatagcggtcgaggtggtctgccttcttggactgcaggggcggcggggtggccacagcagccttctccgccaggctgttgctcatcttgaaaagcatgctcatggggtccagggcaggcagggagggcttggcggccttgcccaggtgaatgttcatgactgactgcagggcgctcaaagggttaacaaaaggctgttcaggcgggtggtcggtgatgatggccgtgctgccactcaaactgctggctaggggcttcaccagctccttgccattctccaccggctcagcgagggggctcccatccttgcacccatcccgcggggggctggggctgttctcctggctgcggaagcccccatcgctggatgcctccatcttgatgggttccccgacttcgctgctacatggggagggagtggcccgcttgggcggggaaagcttcccatcc

SEQ ID NO: 31073 - DNA, 72 bp, Homo sapiens
  chr19:3219654-3219726
  hypo
agatgtgcccaagctcacagcctcactattctccgtgctcacagcctcgctattctccaggctcacagcctc

SEQ ID NO: 31074 - DNA, 247 bp, Homo sapiens
  chr19:34177611-34177858
  hypo
cggtgtctgactcaggaggctgcaggaagcgcacccacaccgtggccagcttactcaggggctcgcgacagttgctttccagctggggccttgctggggaccatcgatggtatgtgtgcaggcactggccggcatgcacccgggcatgtatgcatatgtgtgttattgaacccgcgtctgcttaggtccgtgggtgcggtgcacatgtgaacaccgtccccatgaccgtgcaatagcagctgctccc

SEQ ID NO: 31075 - DNA, 86 bp, Homo sapiens
  chr19:3494538-3494624
  hypo
cgggcctgccggctggagactccagaatttggggccactggggctacacttaggtgggttcgggtacaggcgcaagtgcaggcgtc

SEQ ID NO: 31076 - DNA, 122 bp, Homo sapiens
  chr19:35581628-35581750
  hyper
cgctgtcccaaccacttaatttattttaacttgcttaaccctcaaagtcagtttgaggtcagtactcttttcggagagatgggtacggagtcctggagaggttaagcaccacgacagagccg

SEQ ID NO: 31077 - DNA, 149 bp, Homo sapiens
  chr19:35581779-35581928
  hyper
gcaaatgtggcctgcagatcatgtttccttacccgcgctttttctcctccctgcatagccgccacgtgtcctaagcacagcagctaccagcaacgcttggacccgcgccgggtgcagctctgcgtccccgcggccgccctgcctgctcc

SEQ ID NO: 31078 - DNA, 403 bp, Homo sapiens
  chr19:35617152-35617555
  hypo
cgcccccaggcccagcctcaccatggagtccccaatgtagcgtgtgaggcacaggaacacgtccccaccagcctggaagtggcgtgtggcatagacatcctcggcctcggggatgtctgtgcgtctctcgaagcggccaccggtccagtggaagagcacgggccgctgggaagccgaggccagcagcaggtggggccggccgtccagctccagggcctcagcgtccgtgtcccggtgccaggcgtgcaggctctggtgcgggtaaaagccgggcccgtcgcggcacagcagcgtggtgctgcccgccttggaggcatcggccaccacgaagcagggttgcccttccagccacaggagctcggcgtcattgggccgcagcagccgccgcggggccagggtctgc

SEQ ID NO: 31079 - DNA, 234 bp, Homo sapiens
  chr19:35738737-35738971
  binary
cgcctgggtaccgaaaccagccactggccagttggcaacctgggggagtctaacgcgaggaagcgcccagggttcccccaggatgcgctttccctcgccgccacctggagacagcagagtcacgcccagcgctgcgcaggctgatcgccgcgccgcgcccccgccctcggtcgcaggtggctcgttccgggaattcctaagcggaaaccggtcccaagccccgcgccttcgctc

SEQ ID NO: 31080 - DNA, 32 bp, Homo sapiens
  chr19:3691238-3691270
  hypo
cgcgtcctccgctgccggaacacggagcgccc

SEQ ID NO: 31081 - DNA, 63 bp, Homo sapiens
  chr19:38976252-38976315
  binary
cggagcgcctggacctgcagcgcttccactcgcacaccctgcgcctctaccgcgctgtgtgcg

SEQ ID NO: 31082 - DNA, 37 bp, Homo sapiens
  chr19:38976790-38976827
  binary
ctccgtggagttccagtttgtgcctgtgctcaagctc

SEQ ID NO: 31083 - DNA, 272 bp, Homo sapiens
  chr19:39663613-39663885
  hypo
cgagtttgagaacatgtcggtgacacgctccaactccctgcggagagacagcccgccgccgcccgcccgtgcccgccaggaaaatgggatgccagaggagccggccaccacggccagagggggcccagggaaggcaggcagccgaggccggttcgccggtcacagcgaggcgggtggcggcagtggtgacaggcgacgggcggggccagagaagaggcccaagtcttccagggagggctcagggggtccccaggagtcctcccgggacaaac

SEQ ID NO: 31084 - DNA, 473 bp, Homo sapiens
  chr19:40362772-40363245
  hypo
cgccgtgtaggctgccaggctgcggcacaggaaggctttgtcacccttttgcgcgcacaggtcgtatacgcattggcggaagtactcagagggactcagcaccgcctggcaggtcgcgaaggggccctgggggttccggagctgcccgcaggcctcgttgctctcatagggtgcagtctcctctgccaagcacactgggcagccttggggcccgcagccctcgccacagcccttggaggagccgggcgcccgccatgcagccccgaaggtctccacactggacgctgctgagccattgggcaggacaaagtcgtcactccagttgccattgaagttcccacagaggccacagagccgtccacggaaggggctggggatggacatgaggaggtgggcatcgccatcaaagagaagccgcagccccttggtcgtctgcagaaccatgtttcggccctcggcggtcacccgcacgc

SEQ ID NO: 31085 - DNA, 36 bp, Homo sapiens
  chr19:4064382-4064418
  hyper
cggccccgccgataggtgctctcggggccccatggc

SEQ ID NO: 31086 - DNA, 97 bp, Homo sapiens
  chr19:4064872-4064969
  binary
cgccgactgggtgtccgggcccgggtggacagcaacctcccgccgcggcccaccgtgcgcccccgccagccagcccgggcagcgcctcccagaaccc

SEQ ID NO: 31087 - DNA, 166 bp, Homo sapiens
  chr19:42813649-42813815
  hypo
cgcgcccagccctccctattcactttgctactccccttgacttatctgcatgctgatggccaccctatctttatattccaggacaccatggatacccagggaccagtctcccagccttttcagcagcctgagaaacctggtcgtgtccgtcgtcggaagactaggc

SEQ ID NO: 31088 - DNA, 331 bp, Homo sapiens
  chr19:44222791-44223122
  hypo
cgcacagcctttgagtcgggtgacctcccccaggccgcctctcacctccaggagctgctggcctccacggaaagcatccgcctggaggtgggcgtcacgggcgagtcgggcgcgggcaagtcctccctcatcaatgccctgcgtggcctggaggccgaggaccctggcgcggctctcacgggcgtcatggagaccacgatgcaaccgtcgccctatccacacccacagttccctgacgtgaccctctgggacctgccaggagccggctctccaggctgcccggctgacaagtacctaaagcaggtagacttcagccgctatgacttcttcc

SEQ ID NO: 31089 - DNA, 345 bp, Homo sapiens
  chr19:44223175-44223520
  hypo
atcctgtgccagggcaagaagttctactttgtgcgcaccaaggtggacgaggacctggcggccacgcgcacccagcggccgtcgggcttcagagaggccgctgtcctgcaggagatccgagaccactgtgccgagcggctgcgggaggccggcgtggctgaccctcgcatcttcctggtgtccaacctctcgccggcccgctacgactttcccacgctggtgtccacctgggagcacgacctgccctcccaccggcgccacgctggcctgctgtcgctccccgacatctcgctggaggccttgcagaagaagaaggccatgcttcaagagcaagtcctcaagacc

SEQ ID NO: 31090 - DNA, 237 bp, Homo sapiens
  chr19:45567162-45567399
  hypo
cgggtcgctgtggcccgcgctggcgctgctgttgatctgctgtgtgtgctgttcccgaagaggctccgggagcctgagctagtgagcctcctcctccctacccgcaggtcaccctcggagtccagctcagagtcccgctcccgctcccgctccccgaccccgggccgcgaggagaagatcacgttcatcaccagttttgggggcagcgatgaggaggcagccgcagccgctgctgcc

SEQ ID NO: 31091 - DNA, 80 bp, Homo sapiens
  chr19:4697654-4697734
  hypo
cgagacgatctgaagggaaacaaacaggtgtgggtcatgccctggcctgcccggcgctgctcggaggagaaggccactgc

SEQ ID NO: 31092 - DNA, 615 bp, Homo sapiens
  chr19:4816550-4817165
  hypo
cacctggcccccaaagggcattcgagccccatagggcgccccagtcccaaatgacatgtggctcccaaaagccacctggagctgctccatctgtgcctggtaggacaagtagctctggaggtaggctgagtaggctgcgttcagtgccgccgcctgcatccgctcaccgtccaggtgttggctctgttcccgcagggctcgggtgtcctgttccttcctccacatggcctttcgggcctgaagcctgtggggcttgaaggtgttggccaccttcctggcgaagatctgggagtgttcgtccagccgcaccagcccggagagcaggctggccgtgtcggagctgagctgggccggggagctctccaggggcaggaaggggatgacacagtctggcgacccctgtcgcgtgaggttgctcatcatggcttggttcacctggtgcaggctcaggcgacagtcgaagttggaggtgagaagtaggatgatgaaagctgagtggtctatggcgtcctgcaggcagctcagctccccgcgccccggcacctggaaatcctcgcagaaggtggccccgtcgggcacgccaagggcctccagcttctcccgaacccgcagggc

SEQ ID NO: 31093 - DNA, 94 bp, Homo sapiens
  chr19:49127280-49127374
  hyper
cgcgtgttagagtctctgtctttgcagctaaagacctcctccctcacgccccttttcttttgtgaattcaatggatgagacaggcccactctcc

SEQ ID NO: 31094 - DNA, 40 bp, Homo sapiens; identical to SEQ ID NO: 29973
  chr19:50789768-50789808
  hypo

SEQ ID NO: 31095 - DNA, 153 bp, Homo sapiens
  chr19:50979533-50979686
  binary
cgtcatgatgcggagcgggctttatgacgtcacacaagagcgggctcctgatttgtgatgacgtccctggagggggcggctcctggagatcaggccaaaggggcggccccatcctgctgacgtcaggccccaggtgcggacgggtgccagtgc

SEQ ID NO: 31096 - DNA, 88 bp, Homo sapiens
  chr19:51535218-51535306
  hypo
cgctgctggttacgcggacgggcaggcgcagccgcagcagccggaggtcgtgctcgtggctcgtcgaggctcccaggtagccgggatg

SEQ ID NO: 31097 - DNA, 248 bp, Homo sapiens
  chr19:52390956-52391204
  hyper
cgaaacgaactccgagcgaggactccccgagagctccccgcaacacggacctcacgcgctagcgaacaacagaaaaaaaaaagcgcgctctccctgcccctgaaacattcccagaagcccacgcagaccagaccgatgacctgtctccactgctggaggcgagtcagggacccgaagtctctaaacactcgcctctacccgccgccccgcgaaccccacacactgcagacgcgacactcgcaagtttc

SEQ ID NO: 31098 - DNA, 143 bp, Homo sapiens; identical to SEQ ID NO: 29974
  chr19:53806012-53806155
  hypo

SEQ ID NO: 31099 - DNA, 80 bp, Homo sapiens
  chr19:54109766-54109846
  hypo
cggcaaggggttctcgggacatatcaggtagtaggggcactatgagggtgagcgccgctgagacaccaaaataggccaag

SEQ ID NO: 31100 - DNA, 285 bp, Homo sapiens
  chr19:54109903-54110188
  hypo
cggtgagggtggagggcttcttctcctgcgggacaggtatatgcaccgggcggtgagggtggagggcttcttctcctgcgggacaggtatatgcaccgggcggtgagggtggagggcttcttctcctgcaggacaggtatacgcactgggccaggaaaatgcacggaagtgaaggtacaaaaccctcttccctcttccccatctgagaacagggtagcctttaatgaaacctgtgcccagcggcagcccaaacagtgcccaaacccccgatgagacagaatgacc

SEQ ID NO: 31101 - DNA, 77 bp, Homo sapiens
  chr19:56104962-56105039
  hypo
cggagctcgcagaccaggcagcagtagggtttctcaccagtgtggacgacctaggggtgcgggaggaagggcacaac

SEQ ID NO: 31102 - DNA, 396 bp, Homo sapiens
  chr19:56151971-56152367
  hyper
cggcccggccacatcggagccaatggctggtctctggacctcggtctccacatttgctcagccggcaggaacatcccttctcccgccctctacctcggtgggtggccacggccgagcaggcagcgacggcccagtggaaagaggacaaacccttgtgggccttagggcgaagacgtaactttgcttagtctcggtttattggccgatctcttgtcaagcggcggaatcgttccgttcgggaggtgggaggggagcggggccgccgggggcgggcgtcttcagtggaccccacgcctccggtcccctccccgcagggcgctccgcagaggcgaggggtgggagcgccggctccaggcggcggaacctccgcactgggctcgcgcgcttccggccggc

SEQ ID NO: 31103 - DNA, 309 bp, Homo sapiens
  chr19:58556364-58556673
  hypo
cggccctgtgtacagcgcccccgcagagatggtggtgaagtcccgggggcagagagggtgctgggcgagctgaggcactactaccatggcttccgcctgctacggatccacaccaagatcgcagcacgcatgctctggcgcatcctcaactgccacaccctgacccgccaggcgcgcaggcagttgctccggttctgtgccgacctcttccgcctggtgccgttcctcctgttcgtggtggtgccgttcgtggagtttctgctgcctgttgctgtgaaactcttccccaacatgttgccatccacatcc

SEQ ID NO: 31104 - DNA, 91 bp, Homo sapiens
  chr19:58878569-58878660
  hypo
cgcgactaccgagctgccagggccgggacaggcagaagcctgccccgaggtctcacctctggagggttacgagctgtgccaggccggctac

SEQ ID NO: 31105 - DNA, 291 bp, Homo sapiens
  chr19:5961947-5962238
  hyper
cgcgtggttccccttgttttccatggccagtgcttactcctgcacagacaccatctccttcaggaagctcccactgtgagaggcgtgcctgccctgctgcactccctcccgagcaggccttatatcctgccacggggcacgcggagaccacggccacagcagctgaaacagcctatcacccagcgtacaccgcatcaacaccctgcaatgagtgtttgaactaggccctctctctgtcattcatctacacaacaccagctgctacgtactcacaaatatttactaagccct

SEQ ID NO: 31106 - DNA, 45 bp, Homo sapiens
  chr19:5962455-5962500
  hyper
tctcagtgccaaacacagagcctcacacttaacaggcactcaacc

SEQ ID NO: 31107 - DNA, 393 bp, Homo sapiens
  chr19:6007912-6008305
  hypo
tgccctggaatcccaagggaggccacagagaggagaggagcaggcgatggacatggatgcggaggggctgctgcttcagagaggatgcttgttggggggctcggggctccagctcctcagcgtcacccggggacgcctggcctgagcgctggcggttcccgggagggacacgcaggagctgcctgcctgggctggggcggtcacctcgcagtgccgtctgtacaccagctgcagggccttgacgtcgtgcagtgtgacgccgtcctgcagcaggaagctgcccaggtcgggcgctgggaactcggggaagacgtgggagacatctgggggaggaacacgggaacatcagaaatggcgaggctcttaggacaccgtggacaactggaaggccac

SEQ ID NO: 31108 - DNA, 200 bp, Homo sapiens
  chr19:601344-601544
  hypo
cgtgacgtcctcaaggggcatctgcgccgtggcctgggtcagagcctcactccttttcgtggctgagtcgtgttccatggtggacgggtcgcgccgtgtttgtccctccgtttggtgatgggcacctgggctgcctctgcctttttgctactgtggatcgagctggtgtgaacacagcggagtggtcgtcgtccgcagtc

SEQ ID NO: 31109 - DNA, 35 bp, Homo sapiens
  chr19:638348-638383
  hypo
cgaggtgtcattaaagaaactcagacgcctggggt

SEQ ID NO: 31110 - DNA, 112 bp, Homo sapiens
  chr19:638476-638588
  hypo
gggaagacctgggctcctgctggcgagaaggcggtggacatttcttcagtgtctggtgccgcgccctctgcccagcgtgctccgtggagggtctcattgtcttcctccagac

SEQ ID NO: 31111 - DNA, 98 bp, Homo sapiens
  chr19:6664841-6664939
  hypo
cgcccagcctctgcttcgtgagttttctttcccctgaggcaccctctgagttctccacgtgtcagacccatgtccaatgcaccacgctccttccttca

SEQ ID NO: 31112 - DNA, 186 bp, Homo sapiens
  chr19:6664968-6665154
  hypo
taccatcacgcagtcgaaccaggcgttcatccagcacacggacgaccaccttctccccagcctccaggtgtaccacaccacccaggaagctgctgtcccaccagacccgggagctgctggtggcccgtccgcagggtgactgctggctgaccaacagctccagctcctcggggtagcggggtgtgc

SEQ ID NO: 31113 - DNA, 182 bp, Homo sapiens
  chr19:739235-739417
  hypo
cggcgtgtccaaccgttggctggaaggaggcgtcaagtcctgggagcttggatggtcggggcgggggctgtgggtctgcagactgagccccagtctccgccgtgaccccgggcaaggcaggatctctctgggattcacctgctcctctgagaaaccaggaatggtggggctcgagggctcac

SEQ ID NO: 31114 - DNA, 1037 bp, Homo sapiens
  chr19:7459644-7460681
  binary
cgttaaccccacaaaacgcccacctaaccctgctgctctccctctggatccccgcaacccagctgtcccctcagagcccccggccctactgacagccaggctcgcattgctctccttcaaaaagccccccaaccccgctgacccgcccctcaaaagtcgccctcaccctcgccgcgagcaccctcccacttcggtgcccgcgcccctctcaaggccgagccgacgccccctcaccacggctcggggagcagcagccccaggtccccgggagcgccccgccctcgagggcacgcctccttccgggtcacgccctctgccccgcctccgaggcgggatcgcgcatgcgctgctctcctcgcgcggcttcccgcttccggctcccagctgctagctactgtggatctgggggggccggacggaggcatcggaggcggctgcgagagtggcagaggagctggcggagagcggcctgcgggcgatcgggccgaggtgaggacggcggcggggcggtcccgaggaaaacggggctcaggagggggccctcggtctcttcagggggtggcctggggcgcgggacccccggggctgcctcgggcctcccgccggctcctgggggacttctccaggcaggcgaacgggtgctggggtgcaggctgctccttcaatgcatggaggctctaggcggcgattgcagggtgcagaggtgcagacgatgcccgcccgctccgtccgagccccagccagtcctggggtgctacggcttactctcctccaggagaggagaggaggggtcacttgggccccagcctctgctcctcgttcaggagcgcccggggcaggaccagggatggaatggaacccaccacaatacccagcaccgtcgtatttcaggcctcccgggagaaccctcacaccccggagcagacagccctccctggcagggagcgtttgggtgcaaaaccgtgagaactatctgtgccatgggttttagtttcttgtataagaactcagttggtgctttcattgcggacgggaac

SEQ ID NO: 31115 - DNA, 685 bp, Homo sapiens
  chr19:8274278-8274963
  binary
cgggcggcgcgtgtctgcagctgctccgggtagcccgctaggcgcgccgtccccagccccgccgccggccctcggtgcgcccggccgcctgcacccccaggtaagcgagcaccccgcgccgcgaacaccgccccgaacgccaccctcacggcggtccccggccccgcctccgcggccatggcggccccagcccggcccccactcgcagctgggctccagcccccatcaccccgccggggactgtccccctcggggcttcccatcatggccgtctccccgagctatccgcgctcccccacgagggccggggcgcaacgggtgcccgaggacgcggctgtgaaacgggctggagcgagtaggggcgatcctggcctcgtgacgcgggggaatccggatgtgtgagccgggggagcgccccgtttccccgacgtgccagggctggggacgcagctggggccctggcctcggagtccgcagcccggccgcgtagacggcttctgagaaccgcttaaacacgtcattccaagcccgagctaacccatcaggcggccggggtgaggtggaggtgcccaggcggggataatgtcatttggcctggttggaccagccagcgagggctttttaggcccagggcctagccgggagtgtgtgcggagcagaaaagaggccagcctggctgaaacgc

SEQ ID NO: 31116 - DNA, 689 bp, Homo sapiens
  chr19:8372877-8373566
  hyper
cgcgccttcccacaagcgatgaagtccaagtccacgtgctgggggagtgtcatgaactgacgtgcggtgcagccagtgactaggcgttgtcggtgcgcggcggcggggcgaagcctcgcgaggggtgggagcccgcgctgcggggcgtcactcacctgcggcctgggcagaggtcggggtggaaagcgggctcgcggcggcctccaggcctagtccgaggccgagcagcagcagcagcgccaggcccagagcccctgttcgccacgctccaacctgcgccatccaaccgccgctcatgctgtccccacagcggcgccggccacgcgctgtccagaccgctctcttatccctgcgcacgcgcacgcgcggggttggggcggggcccaagcccctgagttctgcggcgcccgcggctacgcgtaccgtaaatgtcagaatagcagggaaaagagaattagaggcccgtccccactttccccagtgaccagatcagttgaaaggtatggagcccgcttgaagttagaaacttctggggatgggaaggaatttgttggtgttcatttgcattatttcccgttccaaatgaggactgctgcaaatgttactgcctcgtgatcttctttaatatggcagccacgcccctcaggcactccgcatttcctccctcatcccactgcttttgtggcgcc

SEQ ID NO: 31117 - DNA, 305 bp, Homo sapiens
  chr2:10150733-10151038
  hypo
cgggtcaggtggacaggcatgtgtatgggcaggtcaggtggccaggcgtgcgtatgggcgagtgaggtgggcaggcaagtgaggtgggcaggcgtgcatgtgggcgagtcaggtgggcaggcgtgggtgtgggcgagtctggacaggcgtgcatacgggcgggtcaggtgggcaggcgtttgtatgggcgggtcaggtgggcagacgtgtgtatggtcggtttaggtggacaggcttgagtatgggtgtgcgtatggacgagtcaggtggacaggcgtgcgtatgggagagtcaggtggacaggc

SEQ ID NO: 31118 - DNA, 126 bp, Homo sapiens
  chr2:10328941-10329067
  hypo
cgctgcggagagagtggtgtgtgtcttcctgtgtcctcctaggagcttctgtctgagaagtcagaagtcatgagttcccagtcctggccgcatttggaggctggatcattggagggaggcgccggc

SEQ ID NO: 31119 - DNA, 55 bp, Homo sapiens
  chr2:10600813-10600868
  hypo
gaatgacatccacagccgagacagcagcaatgagggcacatgggaaggatagggc

SEQ ID NO: 31120 - DNA, 35 bp, Homo sapiens
  chr2:106742088-106742123
  hypo
cgatgtggaggccaggagcagacgggcaccgactc

SEQ ID NO: 31121 - DNA, 205 bp, Homo sapiens; identical to SEQ ID NO: 29991
  chr2:110011299-110011504
  hypo

SEQ ID NO: 31122 - DNA, 215 bp, Homo sapiens; identical to SEQ ID NO: 29994
  chr2:110016725-110016940
  hypo

SEQ ID NO: 31123 - DNA, 146 bp, Homo sapiens; identical to SEQ ID NO: 29999
  chr2:110048964-110049110
  hypo

SEQ ID NO: 31124 - DNA, 554 bp, Homo sapiens
  chr2:113341898-113342452
  hyper
cattctctttggacccgaggcaccaccatactttccattgcttacttccgttaaaccccgagcgctgccatggcaagccggaaatagggatgaagcaatttagccagaagagggcggaagtggctactcagggcgccgccatgacgagccgggccggaagaagaggtagggcgccgccgtgacagattagtcctaaagggaacggggttgttagttcaattggctaccggaaaaaaccaggctgggctgggcgccgccatgacaaccgataccggaaaaggcgggtcgttccccccggacagccctacgccggcaaaggtctcgagatgtgagtagtgagagcgcctaccccatacgtgctgccgctccccttcttttacccagtgatctagacctagtctaggacctcgggaactaggaccagcctccctccttcttggagatctgaccctcaggattcagcgccttcgctcacgagctccaaccctccgcatgcccaagccccgccctctaagcgtttaggcctcgccccctctcgcgctgcttaggacttc

SEQ ID NO: 31125 - DNA, 270 bp, Homo sapiens
  chr2:11965015-11965285
  hypo
cgcgtcatcattggcctgacagcagagagaattgagaagcatttctcccctgccccaccccggggctgacatttctaagcaagataggaagggagcactttctaggctaggagttgggtgcatttgtaccgtgaaaagcattcctcagttgtggcttaatgccagttacgacgctgcctttccggcctgctccagcaagtagctactggttcacgtgcagtttggggctgtgaaacctaggcagaaggcggctgtctgagggctgtcccc

SEQ ID NO: 31126 - DNA, 330 bp, Homo sapiens
  chr2:120974105-120974435
  hypo
ccgcctagcacctgcgcaggtgcagtctccacctcaagccagctgggccttatgatagtcaaaattggtattaatcagccacacctagcattccttcacatctgcatccacgccttttaaaaagctatattatttatatgttcaggctccattatccataacctcaatgatgaacaagatatccgtaaaataggaggactattcaagactttacccttcacttcctcttcccttattattggcagccttgcacctacagatatgcctttcctcacaggcttttactctaaagaccttatcatcgaaaccgcaaatacatcatacaccaac

SEQ ID NO: 31127 - DNA, 83 bp, Homo sapiens
  chr2:127801072-127801155
  hypo
cgcagccgaggaggggctcagccgtctaccctgtctccagcggaggagcttctgagaccaggagcgggggccgtcgggtgagc

SEQ ID NO: 31128 - DNA, 117 bp, Homo sapiens
  chr2:127801235-127801352
  hypo
aaagtgaaccaagcaagggtcccagaaacgtcacacgtgaactcgcccattcacactcacccattcccatgcacactggccattcactcagccattcacacgtgcacacattcgcac

SEQ ID NO: 31129 - DNA, 587 bp, Homo sapiens
  chr2:128158471-128159058
  hypo
cacccgccccttctgatccagtgtcccgcagtcctgcccgcttcaccgccctcgcctagcccccgcgggtggtaaaagtccagcccggcggagcgcccctgcctccttccacgcccctggcctgccctgcgcagctacgcccagcccgcgtccatcccggaccatcctgttgaaggcagtcccctggcacgcagggctgggagctcttagctgaggatggaaccgactgcaccaggagccgctgggaggaaggccgaggggcgcagaggagaggcaaggaaaaaacagcagcccaagaatcgggcctccctgttacagcaggagtcgcatctatttatatatgttatgtcttattgctcagcaaccagctctcggccggggcgtgggccgggaagaggggtctcctggtgcagcgggttggcgtgactcatcaccgccgcgcactctggcctctgggcctaggttaacagactcccgggtttcaggctgggcccaggcggccaggccctccctgctgaggaatctgggttggggcagtgccagctccctgcttctcacctggccacagaaggggtagcgggaggagc

SEQ ID NO: 31130 - DNA, 110 bp, Homo sapiens
  chr2:131487004-131487114
  hypo
tctcagacctggcctacattctcctccacatgctcatctcctccagcagcctgggtggctgggagctgggccgcatggcctgtggcattctcactgatgctgtcttcgcc

SEQ ID NO: 31131 - DNA, 295 bp, Homo sapiens
  chr2:132301071-132301366
  hypo
cgcgacctcagtacgtaaagcatgctgaggcggtgtcaggtcattttaggctcttcagtttcgcgtttggtatccggcatggctgccacctgtttctggctggagcctcggacactggctcactgcagttggtggtgtcgacagagcggtaggagggcggcgggcagcaggagcttctcctgctgggcaggaagacgagtagaagggagcggcaccgaggcatgctggaggctggagcctgagccaccccggctcgcctcgctgcggttggtggtgacctcggacactgcagctc

SEQ ID NO: 31132 - DNA, 291 bp, Homo sapiens
  chr2:1482094-1482385
  hypo
cgagtcaccgtgtgtgtctgttgcaccaggccctgtggcggcctgggcatcgtgtctgcagtcctagccgggagcctgcagggaggtgcgcgtcagtcctgttctaaaggaggcactggagccttgtccgaggaggcacaggggctgtgtgtggcaccggctgcccccgggcaccatgcgcccctgccgctttctggccttcactgcactggggtccaggccccaaaggtcagagcagagggtctgggaagcctccatgcgctgggtgttaacccttagttcctgggtggc

SEQ ID NO: 31133 - DNA, 186 bp, Homo sapiens
  chr2:148602743-148602929
  binary
cgtttgccgtctttcttatctcctgttcttcaggtaggtgcagggagcgcggcgcggtggggctgctcctgcggccgcggcggccgctgctgggggccgcggctggtgttgagtcggagagtccagtggagcctggggaggttgcccactccctgcgcccctcggctgccaccgcccccccccccc

SEQ ID NO: 31134 - DNA, 230 bp, Homo sapiens; identical to SEQ ID NO: 30005
  chr2:1488408-1488638
  hypo

SEQ ID NO: 31135 - DNA, 136 bp, Homo sapiens
  chr2:151342572-151342708
  hyper
cggtacaggtgggcaccgaggcaccgcgggcggccggcagcgcgaagaggaggttcagctgctgcccggcccctgcgccaccagcgcattcctgggtgtaggcgtcacgggcgccgcggctgcctgcgctcagttt

SEQ ID NO: 31136 - DNA, 167 bp, Homo sapiens
  chr2:151342737-151342904
  hyper
accgcgtcgcctctgggattttctcccgcctcccatcacccccgcggcgctccccgcctccccgccaaccagcaggttagatctaggaggggcgcccgccttgagccgggtggttccgccgaggcgcacgcagcgcccatgcaacaccccacagtatcgggccacct

SEQ ID NO: 31137 - DNA, 266 bp, Homo sapiens
  chr2:151343277-151343543
  hyper
cactgtaggaacgtaattctggatagacaaaatgggcaaaagaggaaggaaagagggcaaagaggttacgtttaaacgcacgacacccattgaacacccttcccctccccgctccccagttaagaaagaaaaccttcacacatcagaccacacactaagcacatggaccctttccgaaacccctgtcctactccccactcaccccacccggctctcacagatctgctgacccgaatctcccaaccccaggttatgcacacaggaac

SEQ ID NO: 31138 - DNA, 91 bp, Homo sapiens
  chr2:1520228-1520319
  hypo
cgttataccgcgtcccttacagcccaccttgcgaacctttcccgccccggtccgaggcctccagggctccctgggtcctgtggtccactcc

SEQ ID NO: 31139 - DNA, 237 bp, Homo sapiens
  chr2:1543326-1543563
  hypo
cggagtccgcaagggtggggcggtgacggtgcactggactttgctggcggtgctggaatggctatgcggagggcgctgtggtgcggggactgcgctccccaggaggacctcgggagttgtttgtttgtaggtattacagtattgtctaacgttgccgcgttgacacagggtcacgggaagccacctccagggcctgtggtcctcttcaggcaggcggggcggggaatgctcaggacc

SEQ ID NO: 31140 - DNA, 461 bp, Homo sapiens
  chr2:157292161-157292622
  binary
cgccgggggagccgggcgagggttctgggctctgacggcggggtcgcagggtcgcccgcctcctggacacgtctgtaggcctagggaagcctgccggccgggaggtacagagtaggagaagccagatcccagggcggacaacgagaagtcgtcaggtaagccagccccgccagcgtgccggcggacgagtgtctcctctcccgcaggcagatggccagggcggcccgcatgggcgagggcacaggaaatcggacaccgccaccgtcttccccagcctggcctagctcaggctttccagtccgccagcccgctggcaaggcggggcggaggtctggagtccggcatcgccgaggcacaaagcaggaactgcagccaggggcgagggcccttgcgtgtggcgctgcgcgaccccacccggcggcaggacccgcgtccccgtctagtcacgttcattgggccac

SEQ ID NO: 31141 - DNA, 123 bp, Homo sapiens
  chr2:1688962-1689085
  hypo
cggacacctgcagccggagggcccccaaacgcagaccatccctgccccttgccccgggacaggtctgtgctcagcactccgcgcacgaatgggaaacgtgagggaaggaaaaactggagcagg

SEQ ID NO: 31142 - DNA, 86 bp, Homo sapiens
  chr2:1689123-1689209
  hypo
ggcacctgacgcgcgggtcccgaggaaggccgaacccgacagaatccctggagcctcgtctctgccaggcagtgtgctgacagggc

SEQ ID NO: 31143 - DNA, 279 bp, Homo sapiens
  chr2:1771840-1772119
  hypo
cggccactcactccagaagcccgtccaatccgcaaccactcactctttccaaggccagcgctccgatgatgctgtagcctcagtcccggcctctgtcaaaggccctccagcccctgacgccaggccacctttgagctcctcttctaagcgccccctttagtatcttgcacacggctgtccccgtgtgagcagctggtgtgagtagagcgtagggagcttatttggcaatctcttcgatgatccttgtgcgtgtctaatgacctgtgtttggcacacgac

SEQ ID NO: 31144 - DNA, 45 bp, Homo sapiens
  chr2:182521331-182521376
  hyper
cggcgacttggggactcggtaacctgtccgggcagtgaggcgagc

SEQ ID NO: 31145 - DNA, 280 bp, Homo sapiens
  chr2:182521646-182521926
  hyper
aggcacagcggcagcctccgggggcgcctcttcctcccggccgccctccagggcactcacccggttcctgcgcctcctccagggcatggcggagtcgcaggctgggcccgagccaggggtccggggaggcctttggagaaggaggtggagggcgcggcagccccagctctagccgcgtccagcgctgccacagcaacggcgcgcagggcagggacccaggagggaggcggggccgcgcctgacccagtccagcaccctggcctgccagcctcgccgcttc

SEQ ID NO: 31146 - DNA, 559 bp, Homo sapiens
  chr2:1846385-1846944
  hypo
cgcccccgccccaccctctggctcctgacctgcctgcaggtcgctggggctctgaggccggcgtgggttgacctcacgtccacccctgcaccccactgaccgctgcacaactgcgcggatgccccaaaattagactcatcgtccacgtcaccaacccaaagccccagtccagcagaccgggtgcgtccttgctgagttttgcttccctcaggttccgttgatgtcacacccaaggcctctcctcgtctgtccagcttccgcttccaggcgcttccgcttccaggcgcttccgcttccaggcgcttccgcttccaggcgcttccgcttccaggcgcttccgcttccaggcgcgcggtgctagtaccggcccccgggctgggaacacctccaggccagcgctttagcatcatccgaggctctccgcttcctcagggggacccgagttcttccacgcgactcgtaggccccgccatcctcgctgggctctccctgcaacccttgccgccatccttcgggctggccgatgtccctgccttgtctgtggctcgttcccagctgc

SEQ ID NO: 31147 - DNA, 171 bp, Homo sapiens
  chr2:191208170-191208341
  hyper
cgcagtcccctatgagagtacagatgaatggaggaggaagatttaaaagtgaattcgtgggcggcgacaaggaaacagcagccgtggccaagctgaccccagagcccttcccttcctggccctccctctgaatcatcgcgctccacttgtgacgtcgcggacgcccggctc

SEQ ID NO: 31148 - DNA, 388 bp, Homo sapiens
  chr2:20646879-20647267
  binary
cgaggcccggagagacccgggagagagctaggccgagtccaccgcccgagtctgctgcccgagcccgcgttacgcacaaagccgccgatccccggcctggggtgagcagagcgaccaccgcccgggagcagcgcggcgagacgcacggtgcgccctatgcccccgcgcccccaccgcccccgccgcggcagccgaagcgcagcgagagaacgcgccaccgcggggcccgggtgcagctagcgaccctctcgccacctgcgcgcagcccgaggtgagcagtgagcggcgagcgggagggcagcgaggcgttcgcgggccccctcctgctgcccgggcccggcccgctcatggcggccatccgcaagaagctggtggtggtgggcgacgg

SEQ ID NO: 31149 - DNA, 461 bp, Homo sapiens
  chr2:20647309-20647770
  hyper
cgagttccccgaggtgtacgtgcccaccgtcttcgagaactatgtggccgacattgaggtggacggcaagcaggtggagctggcgctgtgggacacggcgggccaggaggactacgaccgcctgcggccgctctcctacccggacaccgacgtcattctcatgtgcttctcggtggacagcccggactcgctggagaacatccccgagaagtgggtccccgaggtgaagcacttctgtcccaatgtgcccatcatcctggtggccaacaaaaaagacctgcgcagcgacgagcatgtccgcacagagctggcccgcatgaagcaggaacccgtgcgcacggatgacggccgcgccatggccgtgcgcatccaagcctacgactacctcgagtgctctgccaagaccaaggaaggcgtgcgcgaggtcttcgagacggccacgcgcgccgcgctgcagaagc

SEQ ID NO: 31150 - DNA, 228 bp, Homo sapiens
  chr2:208633316-208633544
  hyper
cgtcaggttgtagccgatgccgcggcacatgggcaccgtgatttcctggcacaccggggccttggacgcggcggccgcccggcccaccagctgcgctaggagcagcagcaacagcgagggcggcgcggatgggtcaggccgagccatcgccccctccctcccctcgcctccagcagcccgcgagggacgcacacaggcagaggaatccgggccggggcttctccctcc

SEQ ID NO: 31151 - DNA, 426 bp, Homo sapiens
  chr2:216946200-216946626
  hyper
cgtaatttcgcccacacctgccccgtctttgctctgcagctccacactccctcagccccgccgagagctcctggctcccgtctccaggttaccccaggtcaccacagccacctctctgcaccagcggcccgctcacgtacccagctccaggagctccttcacgatggcttttccgatgcccgtggccccgccggtgacgatggccacttggccctgcagcaaaccaggcgccaggtagctcctgcccttagcccaggaggccatccctgcagcggggtgccagagcagctgagcgcaggcccttctgggtctcagggacattcgaggcgggcgggcggacagggcggtgctcgagcccacgtgaccaccagaaccccgcaccctccccggcccggccccgccccgcccgccggccgcggcaaagcc

SEQ ID NO: 31152 - DNA, 618 bp, Homo sapiens
  chr2:2189479-2190097
  hypo
cgagtcccgcgttccttacgtgaggcggacgcagccgggcctcccagacgcccgcgttccttacgtgagggggacgcagccgggccttccgggccttccgggccttcccgagtcccgcgttccttctgtgagggggacgcagccgggcctcccagacgcccgcgttccttacgtgagggggacgcagccgggccttccgggccttcccaagtcccgcgttccttctgtgaggcggacgcagccgggcctcccagacgtccgcgttccttccttgagggggacgcagccaggccttccgggccttcccgagtcccgcgttccttccgtgaggcggacgcagccgggcctcccagacgcccgcgttccttccgtgagggggacgcagccaggccttccgggccttccggagtcccgcgttccttccgtgagggggacgcagccgggcctcccagacgcccgcgttccttacgtgagggggacgcagccaggccttccgggccttcccgagtcccgcgttccttacgtgagggggacgcagccaggccttccgggccttcccgagtcccgcgttcctttcgtgagggggacgtagccgggcctccccgagttccgcggtca

SEQ ID NO: 31153 - DNA, 33 bp, Homo sapiens
  chr2:2190245-2190278
  hypo
agggagaatctcatgcacccatcctggaattac

SEQ ID NO: 31154 - DNA, 163 bp, Homo sapiens
  chr2:224702626-224702789
  hyper
cgagagcgcgtggcccgctaggaactccctgcgcggggaactccctgcgcggagaacaccggggacttttcgcgattctgccgcgcgagtgtgtcctgtattccttccgcaaacgtttatcaaacctggcaaagatacttccgatacactcgcagaaagtgcc

SEQ ID NO: 31155 - DNA, 168 bp, Homo sapiens
  chr2:232260775-232260943
  hyper
cggccccgcggccctggacaccgctccaggaccctggcggctgggaccccaggtcttgccggcagctgggtcccctctcccttccagacccctgagggccccctgcgtccgggccactctcctcctctcggggcttccttccgcgggacctcggaccgccgcccgccc

SEQ ID NO: 31156 - DNA, 41 bp, Homo sapiens
  chr2:232260984-232261025
  hyper
cggacccggcaggtggagcgcccgcagcccagggcctcgcc

SEQ ID NO: 31157 - DNA, 99 bp, Homo sapiens
  chr2:233198455-233198554
  hypo
cgctgccgacggtgaggctgtgggtggtgccagccttccaggcctggctgggcagctctgggcttgtcaggctctgacccatcccgtcccgcagatggc

SEQ ID NO: 31158 - DNA, 129 bp, Homo sapiens
  chr2:233198583-233198712
  hypo
acccagcgcagttccggcactacgcgctcaatgtgcccctgtacacacacttcacctcgcccatccgccgctttgccgacgtcctggtgcaccgcctcctggctgccgcgttaggtgaggggtgcagtc

SEQ ID NO: 31159 - DNA, 254 bp, Homo sapiens
  chr2:233283897-233284151
  binary
cccaggtcccagcccccgcagtcctccatgacctctagcatgggccgaggactcagtagctctatctcgcgcatgtcgaggcacgaacggaaaaaggcgctcaccttgcactgggccgcgccgccgggcccatccctgggccgtgccagcaggcgcctcaggcgctcctctttctgctcgccgaaggccgcgatggtgccataggtgagcttttcgttgggggtggcatggcgcttcagtcagcagccgcagac

SEQ ID NO: 31160 - DNA, 49 bp, Homo sapiens
  chr2:234737283-234737332
  hypo
cggcccagttctgtaccaggagaagctgctgaagccggcagctttgctg

SEQ ID NO: 31161 - DNA, 273 bp, Homo sapiens
  chr2:234737409-234737682
  hypo
gggcgcccccaagaaggtactgtgcctggccctgggcccaggtcccgggagctgagggtgcaggccgggtgccctggtcagcctgggagggagggtgcaggctgagggctgcccatgcccctccaggtgaagcagtaccggaaggtcttgctggagaagtgcctgggccccctgagggagcccgtgagcaacagcgtgactgccgagggcatggaggccctgaccaagatcctggctgagctccgggaaggggatgtggggtcctctttcgac

SEQ ID NO: 31162 - DNA, 350 bp, Homo sapiens
  chr2:235950041-235950391
  hypo
cgaatagcactggcaacatcttcgatgagcttccagtcacaaacggactccacgcagagccgccggtcaggcgggacaaccccttcttcagaagcaagcgctcctacagtctctcggaactctccgtcctccaagccaagtccgatgctcccacatcgtcgagtttcttcaccggcttgaaatcacctgcccccgagcaatttcagagccgggaggattttcgaactgcctggctaaaccacaggaagctggcccggtcttgccacgacctggacttgcttggccaaagccctggttggggccagacccaagccgtggagacaaacatcgtgtgcaagctggatagctcc

SEQ ID NO: 31163 - DNA, 412 bp, Homo sapiens
  chr2:235961011-235961423
  hypo
cgctctgcacatcatctcttttctcccgtgaatcctggcagtgatcgatttcaggggacatttggtagtaggccagggaacatggagaatagagagcccatggccattcctgcgccgtctgctggaattctgcggggagcagagcctgccccactccctacactgtctcacgctgtgtgcctcttcctctgcaggccctactgaagatggactgccagggcctggtggtcagactcatccaggactttgtgctcctgaccacggctgtagaggtggcccagcgctggcgggagctggctgagaagctggccaaggtctccaagcagcagatggacgcctacgagtctccccaccgggacaggaacggggttgtggacagcgaggtgagcagcggctgagcttcgagctcacc

SEQ ID NO: 31164 - DNA, 172 bp, Homo sapiens
  chr2:236459184-236459356
  hypo
cgactccagactcagagttgatgagggtctgcaggcgtcggtctgggagccacagacaggtgtgtttgccgcagaggtgccgagggcccagcaggactgtagcacaggatcagcaccatccacacctgaggcgtggggatctccgggcatgatgcggaatgtagtgacgatc

SEQ ID NO: 31165 - DNA, 640 bp, Homo sapiens
  chr2:236648390-236649030
  hypo
cgtctggagggcctcggacactttcaggctgggatggggactctgattttttgcttctcaggcactgatgtggttcagacccaggattctaggagggaaggttcccgtcgcaggggagggaatcagacgtcgctctgggcggcagtggagctggcaggcagcctctgggctctggcagcattgtcctctgggtccagcgatttggggtttagacagggtttctggacggcatctgcacagaggagcggaagacaagagctgggaaccgatgcgtgccttccctctttaaaacaagagtttcgaatccccatgagggttccctagcgtggtctcagagcccaggatctggagggggacgtctgtcattggagaaggcagaggagccagggtggaatccttcccgctgcccagcaggagcagggctggcctagcgggccgggctgggcactgcagcaaccttgtaccatcccctcctgagagcatcaggggccgggacgtccaaggtagcaccaggcccctcatgcccgcaccccctcctcatggtcacctctgttcctgcagggtcccggtggtctcccgctaaccccgcgtggtctctaacgcctcctgtcagccgctgctctgctgtctccacccgtgc

SEQ ID NO: 31166 - DNA, 366 bp, Homo sapiens; identical to SEQ ID NO: 30025
  chr2:236685979-236686345
  hypo

SEQ ID NO: 31167 - DNA, 131 bp, Homo sapiens
  chr2:236791021-236791152
  hypo
cgcttctgcccagtggtctctttggtcggcagggtgttcttctcctgcgtctccgttttcttcagcttggccctattgaagctggcgattccccccacgtctggtttgtctgccattttcttaaaacaatc

SEQ ID NO: 31168 - DNA, 317 bp, Homo sapiens; identical to SEQ ID NO: 30027
  chr2:236801881-236802198
  hypo

SEQ ID NO: 31169 - DNA, 544 bp, Homo sapiens; identical to SEQ ID NO: 30029
  chr2:236839051-236839595
  hypo

SEQ ID NO: 31170 - DNA, 64 bp, Homo sapiens
  chr2:236897051-236897115
  hypo
cgcacctgcttcagatactactcagaatttcttgtccttaaatgccacccccaacccccgcccc

SEQ ID NO: 31171 - DNA, 139 bp, Homo sapiens; identical to SEQ ID NO: 30031
  chr2:237018173-237018312
  hypo

SEQ ID NO: 31172 - DNA, 161 bp, Homo sapiens
  chr2:240061326-240061487
  hypo
cgtcccgagtccgactctagccgtaggacacaggacaaacgcttcgcactgacctccgccgggatgctggggacggcgggcgcgataccgttctccgcgctgacgctcccggagctgttgttgggtgagctgggtccggagcctggggcgctgctgcacgc

SEQ ID NO: 31173 - DNA, 139 bp, Homo sapiens
  chr2:240165157-240165296
  hypo
acattctaaagtgtgtttggtggggggttgctgacatagacaaaaacaatgaaaccgctgtgactcaagagtagtataggtcacacctcactgtgcacaccccactgtgctaacagagctgcttttcagacacgggaac

SEQ ID NO: 31174 - DNA, 95 bp, Homo sapiens
  chr2:240316126-240316221
  hypo
cgcctcctcacacgccggggccctgggcgaagcggctggagaacaagctgcacacacctgccttggccttggcacaacagtcgcatttgccactc

SEQ ID NO: 31175 - DNA, 44 bp, Homo sapiens
  chr2:240690358-240690402
  hypo
cggtggctcggcaaagtcagtccctcacacatcctcgatccagg

SEQ ID NO: 31176 - DNA, 136 bp, Homo sapiens; identical to SEQ ID NO: 30040
  chr2:241697788-241697924
  hypo

SEQ ID NO: 31177 - DNA, 196 bp, Homo sapiens
  chr2:241989264-241989460
  hypo
cttcaacggaggctcctgcgatgcccatgacgactcctacacctgcgagtgcccgcgcgggttccacggcaagcactgcgagaaaggtatggcgggcaggggcgtccgggccggcgtcagcaccctggagagcgcccgcggtccgccgtcctgcttctctgctgtctctctccttgtttcgcgaattgctgacctc

SEQ ID NO: 31178 - DNA, 56 bp, Homo sapiens
  chr2:242148880-242148936
  hypo
agggccgccactgagcaccggctcccttccaggagaggcctcggccccagtttgcc

SEQ ID NO: 31179 - DNA, 726 bp, Homo sapiens
  chr2:242664623-242665349
  hypo
cgaccttgcagggactcgccgccgcgacctcagtgtggcttttacaggactccccccgagcatcagcagggaccccggcggacgtgggcgggcgcgcgtgagctcgggctgcccggccgggcgtgcgggcggggacatggtaacctggtccacggagggcggccgccaccctcgcgtagctttcctgtggttttccaggactgtccggtacagcccgggctccgcgtgccccgcccgctggagcacctgccaccgaggcgcgcgtggggccactgccgtggcggcggctgccctcctcacactcggctccgcgccgcctccggccaccgtgcgctcccgcgtggggcgcctcggatgggcccgggagggctgggggctcttccctggaggaagcggcctccgcttcgctggcgccgcctttttagcttggacttcagtcctccctcggggactcacctccggagtaaacggctcttcattagcttggagtggccgcaggtcccgtgaccagcacccgcgagaccctgtgcgacagctgggctgatgctccgtttctctgggaattggtgattttttactgtgaagatgaaattaccctaatagcatgaagatcgtgggtctgtgtgtccgtgaagtgagtcccgtctgccaggagctgacgaaccacgaatgcttctgcctgtgctgtgcattcccaggcccgcagctcccggtcgaggggactcc

SEQ ID NO: 31180 - DNA, 130 bp, Homo sapiens
  chr2:242793077-242793207
  hypo
cggtcgcccccaggcagctcagcccctggacggcctgcaatggcctgcaccctgcctgcttctcctgaggaaatgcgctgacccgggctcatggtggagggtctgcagaacactggtggccaaggaagcc

SEQ ID NO: 31181 - DNA, 114 bp, Homo sapiens
  chr2:242815156-242815270
  hypo
cgcaagggcggtggccacgttgcctacggcccccagggcaatggctgcttctcccaaggctattaccagaagaggcagctgaggtccaggttccacaaggcccgctgtgggtgc

SEQ ID NO: 31182 - DNA, 93 bp, Homo sapiens
  chr2:25464444-25464537
  binary
cgctgcggacgtccccgacgtacatgatcttcccctggtgccgcaccatgcccaccgtgatggagtcctcacacacctccgaggcaatgtagc

SEQ ID NO: 31183 - DNA, 101 bp, Homo sapiens
  chr2:25623195-25623296
  hypo
cgcactgtgcaaatgcacctcgtctcaaaagcacagatgggctttatgttcagagaggcaggcccttctccatggagactgctgaacactccgctcaacgc

SEQ ID NO: 31184 - DNA, 322 bp, Homo sapiens
  chr2:2575361-2575683
  hypo
cggcagatggcggggccagcacctgagatatcccgttcccctgctatgctggagagggccatggtatgaagtggggggcttcacactgcccccggccctgatctgggaggcccttccaggcgaaggcggctcccggcttccccttcctgctgcccctcttcctccccatgcccgcctctccccccacgcctgcctcctccctcccgctcctcgctgcctcctcgcctccaggccacagtttctgtagctgggtcttcagacttcagaagtgtccttttattgtaaagacttcagtggtttcctagaaagcgccggattttcg

SEQ ID NO: 31185 - DNA, 57 bp, Homo sapiens
  chr2:2575769-2575826
  hypo
ccttcgcaggtgtcgaaccaggagtcacctccgcatctgcgcagcagcgggcccggc

SEQ ID NO: 31186 - DNA, 251 bp, Homo sapiens
  chr2:27308893-27309144
  binary
cgcccgacgtgtctacgtcggctgaagagacagcgggggcggcgggctcctggggtctcgcctgagacggggcacctagccctgggcgagcgccgcacccgggcccgcagcggcaccgcgcccagagcggcctctccccacgcccggggcgcgccggctcagggaggctcggggccgcccatgcagacttttggcctggcgcgatcccccaagaacccctccagggccggcctgcggaggagccgatcctc

SEQ ID NO: 31187 - DNA, 111 bp, Homo sapiens
  chr2:27309206-27309317
  binary
cgggcgccgcccaccgccatactaaacgatcgaggaataaagacacttggtttttctaaaaaaaactaaacgaaccgttctgctacggtacggggtcgggggctgccgggc

SEQ ID NO: 31188 - DNA, 228 bp, Homo sapiens
  chr2:2769802-2770030
  hypo
cgaagcgccacggagtccctcagtcaattcctggcatgtgagcaggaaaagggagcacagaggaggagatgcgggggagccattgcaagggcagcctctaaagcctttctcggttggagtccctgatgtcacgatgagtcgctggtgccattggataacaagagttccacgctcaaggaccgcccctccaggcctggtggaatcagcagtcacggctgactgccctgc

SEQ ID NO: 31189 - DNA, 128 bp, Homo sapiens
  chr2:3307454-3307582
  hyper
cgccagacgccggcaacctgacttctgagtgtttcccggcaccgtgaacacaatagacgacacgtgatacggtgcggcctctgcgcccgggaagcttcgccctctgctggcagacggcgggatccatc

SEQ ID NO: 31190 - DNA, 163 bp, Homo sapiens
  chr2:3321063-3321226
  hypo
cgcacgaggtgctgaccgagctgagggcctactgtgtgcctcgcacgcggggtggagcatggagccccaggagcgcacaaggtgctgaccgagctgagggcctactgtgtgcctcgcacgcagggtggagcacggagccctgggagcgcatgaggcactgacc

SEQ ID NO: 31191 - DNA, 42 bp, Homo sapiens
  chr2:3349551-3349593
  hypo
cggatgcacatgtaggaagggaatgcggccccggggcaccac

SEQ ID NO: 31192 - DNA, 205 bp, Homo sapiens
  chr2:3352473-3352678
  hypo
cgatgcaggtaccgggcattttccagggaatcaacgactgaaaggagcgaggacctgaggcaacaccaggagctattaacccttcccagccaccactccccaggagagctggagctccagagtgagggatggcggcttccgactgtgcaggaggagaccagactccgttgtcacagaaggcaggggcagggctgcagtccacagc

SEQ ID NO: 31193 - DNA, 293 bp, Homo sapiens
  chr2:3352710-3353003
  hypo
gtgcacatgcgcacaggcgggctgctcgcagccggaaccatggggcccaggctgttcaggatggagctgtcctgattttcaggacatctcaccccagagacacggcatggcaacagcacgggtgcaccctttccacgtgtgtctgtacaaaagtgtacacttcaggtgcaagagcatacccatggcacatgcctcagagctgaactgcaaattcaaaggagagggaagcgagcagagagaggcagacatgcaggtttcagtcccgattctgccacgcaccagctccacactgc

SEQ ID NO: 31194 - DNA, 535 bp, Homo sapiens; identical to SEQ ID NO: 28942
  chr2:45398-45933
  hyper

SEQ ID NO: 31195 - DNA, 246 bp, Homo sapiens; identical to SEQ ID NO: 28943
  chr2:45969-46215
  hyper

SEQ ID NO: 31196 - DNA, 143 bp, Homo sapiens; identical to SEQ ID NO: 28944
  chr2:46450-46593
  hyper

SEQ ID NO: 31197 - DNA, 66 bp, Homo sapiens
  chr2:47200517-47200583
  hypo
cgagagccttccagccaccgcatggtgcagggaaacccttgctaccctcatttatcccccgtcagg

SEQ ID NO: 31198 - DNA, 352 bp, Homo sapiens
  chr2:582796-583148
  hypo
cgtgtgaggaagaagctccaggcggcggcagccagcgtgtgaggaagaagctccacgcggcggccagtgtgtgaggaagaagctccacgcggcggcggccagtgtgtaagaaagaagctccacgcagcggccagcgtgtgaggaagaagctccacgcagcggccagcgtgtgaggaagaagctccaggcggcggcggccagcgtgtgaggaagaagctccacgcggcggccagtgtgtgagaaaagctccacgcagcggccagcgtgtgaggaagaagctccaggcggcggccgccagcgtgtgaggaagaagctccacgcggcgcttgctcagggaatcctgctccagggc

SEQ ID NO: 31199 - DNA, 213 bp, Homo sapiens
  chr2:67624288-67624501
  hyper
cgcggacctgactactacccgaacaacccccaccagtctggaggattttgagcctagacactcctccagagcaggctcctgtcccggctgcggaagtgcgcgcgccctcggcaccttaacagttccgcccctctcccggacccagccaatcagcggccgcctcttgcgcgcgccccaccgaccaaaatggcggctgccgttggtgcggggtgc

SEQ ID NO: 31200 - DNA, 280 bp, Homo sapiens
  chr2:70369049-70369329
  binary
cggctctagtgactggcggggaagaaggggaaaaagaattagtgtatctggacacaacacccagcatgtgctaggcagaaactaagtgtgcgaagcggatcccgatgtacaaaggggaaaacagcggctgggaaagcctgagccacgggctccaggcggccagtcgcggtcctcccggcgcgtgccctcctcctccccgacctggccggagctgaccggggcgggtgtaggcccgggggcgggagggctactggatcccaggtggggcgggtgtaggccc

SEQ ID NO: 31201 - DNA, 128 bp, Homo sapiens
  chr2:71453820-71453948
  hyper
cgaaaaccccctattgctcccgaggggcaggggctgaccccagcggacgccccttttcgccgatggccgcgacgtgggaccccgcgcgctttccctccctacaggagctcgggcaggcgcgtgccgcc

SEQ ID NO: 31202 - DNA, 228 bp, Homo sapiens
  chr2:71454386-71454614
  hyper
aagtttcagcttctgattggttttaatgtctgtcttttctcttccttcattttttttttcctgtggtggaacacctccttgagggagatgccggctctgattggctgaaaggacgctacgctagcctgggataggcattgggccaaggatgcgcccggcccactcgtgggggaggagaccaaggcgccgcactctgggtttgtttacacaggctcttgctcccgcttc

SEQ ID NO: 31203 - DNA, 125 bp, Homo sapiens
  chr2:72310184-72310309
  hypo
cgcgggctgaggcttgcacacagtcagattcccgcgcagcacgtgcacaggtgtgcccaggggcgagcggtgtttgaagtgcttgggacaggatggtcggaggaaggcgtgcgctgagcttgaac

SEQ ID NO: 31204 - DNA, 698 bp, Homo sapiens
  chr2:73052641-73053339
  binary
cgccctctcgttccccagcgccggaccagcctcggagggagaacgaaggctgctcctgccccgagggaggcagcgggagggtcctgagtcactgggctgtagggcgccgggaagggaccccgcgtcggggctgcgaagggagacccgcctcgcccggtatgcagggtctctccgaagggaggggccggcgccggacctggggacagccggccggaggcccgacccagaggagcctgccccgtcccgcccgttcccgcccctctgtggtcccggcacccggggtacctgagcgtgggcccgatgcaggccgtgtcagtgctctcgatctctcgcaggatccgctcgtgctctgccgctgtctccaggctctccgcctccgccatcttaccccgctccatagactgggggcgccccgcagcgcgtcccctccgtcggctcggctcaccttttccctgccccacaatgccgctcccaccacaggctccacagccgccccagcctctggctacccgcaggccgacccctccctcaggctcgacacgcccccttgcgtcaccgcgtccgtcggcgttctgcgtaatgtccgctgggatttgtagttctctgggaaatgctaggttggattccattcattcatacatggaatccgcaaatactagttgaagcccactgtaagcaaaaacagttaacgacagtgc

SEQ ID NO: 31205 - DNA, 937 bp, Homo sapiens
  chr2:75060920-75061857
  binary
cgccccacaccccgggtccgcgatcacgctccccccacccatagccgagcctgacgcggcggtggctcatgcgcctttccgtcccagcctttagccacggaccacacgtcccatctcaggcgccccgcccctcccccgccccccgcccccggcgcgcctccccaggctgccggctccggtgtctgagcggccgcgcccgcgagccgtgagcgatgattggctgcgccacggcggcgggcggtccgtgggcgcacacaccctccccgcgcagccaatgggcgtgcgcacgtcactgatccggaggcccgcgggccggcagcccctcaataagccacattgttgcatgaaactccggcgcaggagtcccgggctgccgctggcaacatcgtgtcacccagctaagaaaatccgcgggcccgagccacgcgcctgtgaatcggagaggtcccactgcccgagtggagccgggctgagattcttctcaagttgagcctcagtgatcctgtggccgaagttagcgccttgacgtgggacaaccggacacgtcgccaggagagaactgaggcgccttctagcagttgtgacgccaaaatcacgtctccggagacccgcgccctccgccagccgggcgcaccctcgccggtagccttctttgtgcgccgtccggactcccagctcccggcccggcagccgagccccagcacaaagcagtcggaccgcgccgcccgcctcccctctcgcgtctccgcctcggtttcccaactctgcgccgtcgggccgcggcaggatgattgcctcgcatctgcttgcctacttcttcacggagctcaaccatgaccaagtgcagaaggtaagtcagcgcgggcggggcggcaggctgggctctggcaaagtggtctggcctccatcagtctcttcctcgaccctgcggggaccc

SEQ ID NO: 31206 - DNA, 154 bp, Homo sapiens
  chr2:7907371-7907525
  hypo
cgtagcctagtgcttctgaggaaccgcagacccctaggcaggagccaggagaagaccgccaagcacggcgaggccggccgtgctaccaaataaggcacctctcctgcagggagctgggacctaagggactcgcgctgggcacggggcaggcggc

SEQ ID NO: 31207 - DNA, 97 bp, Homo sapiens
  chr2:8658450-8658547
  hypo
aagctcggaacctggaggctcagaatgcggcggctgctagctgtgtgacaatggacaggtcactgaggtccctggcaatgggtgggaggtcgttagc

SEQ ID NO: 31208 - DNA, 71 bp, Homo sapiens
  chr2:875867-875938
  hypo
cgaggccggtttcccgtcgggctgcaaacggcagagcacgcggccctgtcccgggcaggctcggctccagg

SEQ ID NO: 31209 - DNA, 372 bp, Homo sapiens
  chr2:9609477-9609849
  hypo
cggttaaacagccctattgtagaaggtgggtgttgctgaccagggacttgactacaatagttctgttggcggccctgttccctggggctctacaagaatagaaaacccgtgtggccctggactggccccgctctcccacgtgctgcagtcggggtgcagaatggaagttcacattgctgtggctggtcctcaggagccgtggggagggcagtctgcgggaggctgcggcccttccactggactttcactctggccttcttccctgtcctcctgacaccactcctcccgcctcccctccctctccctcacctcccacaaacacaccagaactattcaactctgaggaacaggagtatgagacagcttccattc

SEQ ID NO: 31210 - DNA, 158 bp, Homo sapiens
  chr2:97530642-97530800
  hypo
cggtcagccccgctgggccagcagggctcccagggcccaccgctgtgagactcggtaccttgcagacacgggccacacgagccaccacctgctcggcatagcagtcggactccactgcccgctccctgaagaagaagtagaccttgtcgtcgtccccc

SEQ ID NO: 31211 - DNA, 383 bp, Homo sapiens
  chr2:98350752-98351135
  hypo
cgcccctagagtccaccctcatgtggcttcatggggcacccacagctgtggccaggagtgtatgccagtgtgtgcgtgtggatgtgcaggaacacgcatgggcacccacctgcttgtgcatgctccagggacggcacccttgtctggggcaggtgcttgtgggggctgaggctgccttgctccccacacccctgcccctgacctgggagtgtaccgctgtgtgtgcccagcacgcataacgtccccagacaaaccgcggccgatgcccatggacacgagcgtgtatgagagcccctacagcgacccagaggagctcaaggacaagaagctcttcctgaagcgcgataacctcctcatagctgacattgaacttggctgcggca

SEQ ID NO: 31212 - DNA, 572 bp, Homo sapiens
  chr2:98408820-98409392
  hypo
cggatctccggcagtgggagatgattacctttgctttttggcaatggcgatggaggctgctctgtaaacacttctagggctggggagtcatggtggtcgaagtctttgtccatggcttctatgagactggtgatgtccgagtcctcggaactgtgcctcgcgctgctggcacgttctgggtgggaagggtgtgcgaggggggcgggagacagcctttcaggctgcggctcctggggctgaggcactggcggtggcagaggaggctgagggtgctgctccagcgggctgtgggcatggtgctggctgccgtgctggctctgctttgcccctttggactttctgcccgctgtatgaccttgagtcactgtgttcgaatctaagacaagggggcttgttttgttagcagactgtgaagaagctgcttgagcagaagtcctactagaggtacttgaactgtttttggctctgacgttttccacgtcagctgagtttctattgctgtgactgctgtgtgggtggaccgatgggccacactgcttatgactcccggcactgggtcgggatgatgaacc

SEQ ID NO: 31213 - DNA, 213 bp, Homo sapiens
  chr2:98703022-98703235
  hyper
cgcccacgtccagtggctgagctacaacgaactgccccacctcttttaaagcgtctttctctgaactgtgcaaggaagagagcatcgcctgacagtggtgaggtgaaaattaaaactacacaggggtcaatgctctgctgaaaagtatgaaaagaagttcgtttgtagcgtttcccgcagtctcctcgcctctcctcggcctctggcgccttc

SEQ ID NO: 31214 - DNA, 201 bp, Homo sapiens
  chr2:98703475-98703676
  hyper
ggcctcggcgccccgccctcttggccacggtccgcagccatcgccccagtgagggcgcggtctgtgggcggggccggctccaggagccgcgctgtgattggccgtgtccaggcaaccgcggagacgccgtcgtcaacagaccgcgctcggaaccagaggcgcgggtcacagagacctagaacagctggaatccttcgcccc

SEQ ID NO: 31215 - DNA, 77 bp, Homo sapiens
  chr2:98703736-98703813
  hyper
gcccgccctctcgggtcaggcgggcccgggaggatgggagggtggctgctgagcgggagccgccacgtcttccaccc

SEQ ID NO: 31216 - DNA, 164 bp, Homo sapiens
  chr20:10687213-10687377
  hypo
cggaaggagcctgaggcctggagggggattcggaggccccgacggaccgcactgtggaggagctttctgtagagcgcaggatccacttaagctccgcgtgtgtgtagggattgtgtgtagggatacggcaaatatcctgcagttgattgccagacgtacagatc

SEQ ID NO: 31217 - DNA, 78 bp, Homo sapiens
  chr20:19673407-19673485
  hyper
cggcgcgctgaccgacgatgctgagaaattccaccaggtggcgctgcgtccgctgacgctttattatcgggcgaaaac

SEQ ID NO: 31218 - DNA, 297 bp, Homo sapiens
  chr20:25231684-25231981
  hypo
cgaaagagtagaagttggggtgttcagaggaagatttgtcaagctttgccatgcttggcaaatcagcacgtcaaaacatctggctaacatggagagctttgtgcttggcaagaggtggcggttggtcatgaagacatttaatggattctctgaagtggtggcaaggtggcaaggagagtccaacctgaagctgcagagcctgggattgcgctgcatggagaagaaagggtgtgcgtgattccacgctccttttcatcctggcctttccattcggtctgtgcaactgtgggcttgggc

SEQ ID NO: 31219 - DNA, 151 bp, Homo sapiens; identical to SEQ ID NO: 28994
  chr20:25566244-25566395
  hyper

SEQ ID NO: 31220 - DNA, 59 bp, Homo sapiens; identical to SEQ ID NO: 28995
  chr20:25566411-25566470
  hyper

SEQ ID NO: 31221 - DNA, 38 bp, Homo sapiens
  chr20:2801696-2801734
  hyper
cgtggtcacagacgcgccgggagggagggggccacgtc

SEQ ID NO: 31222 - DNA, 262 bp, Homo sapiens
  chr20:30196349-30196611
  hyper
cggctccgcggcggcctgggagcgtttccatcagctgggcccgaggaatgcggagctatttaacctgagcatccccaggtgtacggaggcgcctggctgtctggggcccgcagcctttggcacagccgcgctagacaaacagcgcgccgcccccgccctgcccctccgcccccagctgcagccgggcctgggaaccggcgggcgccggcggcttgcataagaggctccgggcctcgcagagggaggggggacagaggccacc

SEQ ID NO: 31223 - DNA, 270 bp, Homo sapiens
  chr20:30772699-30772969
  hypo
cgttaaccacgccgcacattttcccatccagtgccttcgctcatgttgttcgctctgccaggaattcccttctctggctccactttccaaactactgcctattctttaacacccagctcgtgacccaacttcagagaagtctccgccctctggtcccacatcatcacatacctggtgaactataagccacgttgaacacagttgggttttgtctccttggatgaccgttggataccagttacacctcttgccccggtgtaattattagtc

SEQ ID NO: 31224 - DNA, 145 bp, Homo sapiens
  chr20:32250068-32250213
  hypo
cgtgaggtcacaatgttgccagggcccagggggcagagcagacggagtgtgggccatcgtccccagtggtgaccagccctgccatgggaaactatagttcccacaaaaggaccaaagcacccaagcaggcccgcaaggagaggcc

SEQ ID NO: 31225 - DNA, 73 bp, Homo sapiens
  chr20:34147099-34147172
  hypo
cgggcacccaccgtgaggatgtacacattgccacccatgtctgtgaactccaggtcttctggccggcccttcc

SEQ ID NO: 31226 - DNA, 131 bp, Homo sapiens
  chr20:34147230-34147361
  hypo
gtcctctgcctccttcagcttcactaccggccaccagcccctcaggcggcggcagcgaaacagattgcacctcggcccggccccattgcgggccagctgcacagagcagagctcggggccccgggccccac

SEQ ID NO: 31227 - DNA, 64 bp, Homo sapiens
  chr20:35929641-35929705
  hypo
cgtcaggcagcaagcgacttgggccatggcctctgacctagacttctcacctccggaggtgccc

SEQ ID NO: 31228 - DNA, 236 bp, Homo sapiens
  chr20:371973-372209
  hypo
cgcggctgcccccgcacaagcatgtggctcggcccactgaggtcctggctggtacccagctcctctacgcctttttcactcggacccatggggacatgcacagcctggtgcgaagccgccaccgtatccctgagcctgaggctgccgtgctcttccgccagatggccaccgccctggcgcactgtcaccagcacggtctggtcctgcgtgatctcaagctgtgtcgctttgtcttc

SEQ ID NO: 31229 - DNA, 215 bp, Homo sapiens
  chr20:43976984-43977199
  binary
cgaagaacagcagcagcgcgaacagacgggcgggggccatggcaccgcggactggagaaggcgcgcaggctgcggcgagtggccccgggcgggcgcgccacccatcttataggcggcctaccggccccgccccggcccgcccccgccccgccgcccgcaccccgcccggaattccccagtggaagcgaggcctgcggggcactgcgcccgcccgc

SEQ ID NO: 31230 - DNA, 33 bp, Homo sapiens
  chr20:44879699-44879732
  hyper
cgtgcccgtgtactcctctaccacgaagaactg

SEQ ID NO: 31231 - DNA, 63 bp, Homo sapiens
  chr20:5297756-5297819
  binary
gaaggtgaccctttcaaggaaagcccggctccgacgagtgcggtgtgggcctttggagatggc

SEQ ID NO: 31232 - DNA, 57 bp, Homo sapiens
  chr20:58514041-58514098
  hypo
cgcagcttaggtgtggaggctccaggtggccggtccccgcgcggctcagatgaagtg

SEQ ID NO: 31233 - DNA, 115 bp, Homo sapiens
  chr20:58514400-58514515
  binary
acacgcgcaccgtaccgctgatgccaaggtccgagcaagtgacacgctccaggcacacgagctgccgctgcaggcgctcgccaaagtcggcggcctcgacgggcggcgggaaatc

SEQ ID NO: 31234 - DNA, 106 bp, Homo sapiens
  chr20:60495300-60495406
  hypo
cgtggtgtcacagtgattgcatggaagcgtgtcatgattgtgtggaagcatggtatcgtgattgtgtggaagcgtggtgtgattgtgtggaagcgtggtgtcatag

SEQ ID NO: 31235 - DNA, 268 bp, Homo sapiens
  chr20:60495440-60495708
  hypo
ggtgtcgcggtgattgtgtggaagtgtggtgtgattgcgtggaagcgtgtcttggtgattgcatggaaatgtgtgattgcatggaagcgcagtgtcacggtgattgtgtggaagcgtgtcatggtgattatgtggaagtgtggtgtcgtgatgattgcatggaagcaccgtgtcatggtgattgtgtggaaatgtggtgtgattgcgtggaagcgtggtgtcacagtgattgcatggaagtgtggtgtcacagtgattgcatggaagc

SEQ ID NO: 31236 - DNA, 33 bp, Homo sapiens
  chr20:60639846-60639879
  hyper
cggcgccggcgccgcagccgccgcgccgggccc

SEQ ID NO: 31237 - DNA, 252 bp, Homo sapiens
  chr20:60912922-60913174
  hypo
cggggcggcagcggcacaaacctcccgccccacagagctggtccagggctccccgagggtcgcaggtgcatgctgcagagggacaatggggtcaggccctggcgccatgtgggtggcagaaccccttcctgccctgaccctctgctcaccttggcagttggggaaaccatggtagccagggcggcaccggtcacaatgaggtccagcaaactcaggctggcataggcagcggccggcctcatcgcagccctc

SEQ ID NO: 31238 - DNA, 68 bp, Homo sapiens
  chr20:61013047-61013115
  hypo
cgactgcccggggctcagcgggcaggcagggagatgcctcaggactcacgggtgaggggtgttgggcg

SEQ ID NO: 31239 - DNA, 56 bp, Homo sapiens
  chr20:61013193-61013249
  hypo
gggagctggcagctgagtgccatccttccaaagacgtggtgctccagggcgcatgg

SEQ ID NO: 31240 - DNA, 120 bp, Homo sapiens
  chr20:61013278-61013398
  hypo
cctgaatggagtcctcactgccggcccggcctgcgctgcctgctctcggcctccctgtgtgtcgcgtgatgttgtgtgccagggttgggcggtggctgtgtgaggcctgtgaggacacac

SEQ ID NO: 31241 - DNA, 116 bp, Homo sapiens
  chr20:61330805-61330921
  hypo
cgcccagcctctggtgttgtgtgtcagcaccccgagtggaccgggacaggctcccaagtggactgagacaggctcccgagtggaccgggacaggctcccgagtggactggagacag

SEQ ID NO: 31242 - DNA, 90 bp, Homo sapiens
  chr20:62204139-62204229
  hypo
cgcgactgcgggcaaaggtgcaccggtttcggtggcgccggcagccgagcccagggctgtagtagtggcagacttggtagcacaggggcc

SEQ ID NO: 31243 - DNA, 95 bp, Homo sapiens
  chr20:62204387-62204482
  hypo
cacaggtccaccagggcacacagccgggccagggacggccctctggtggccgcggggctgttgggcagcagggtggaccctggaggcgccacctc

SEQ ID NO: 31244 - DNA, 390 bp, Homo sapiens
  chr20:62273399-62273789
  binary
cgccccggccccgccccggcccctgcccgctccgagctccgccccggccccgcccccgcaccttctcgcgcagccgctcgcgcagtgcggccaggtgtgcctcgcggatctccttgctgagctccatcttgtagttgagcttctcctccgcctggcggctgaagttgttattctcctccagcgccttgtgcagcacctcgcgctcgtgctcgcgccgctccgccagctgcttcagcacctgcgcctcctgcgtctgtgcggggccggcgggcgcgcgtgagcggcaaccccgggccctgcccggccggactcctccctgctctccgcctcccgcccagcgcccgctcgcctcacctggcgcctccacctgcccaggcctcggtgggcgcc

SEQ ID NO: 31245 - DNA, 103 bp, Homo sapiens
  chr20:62310122-62310225
  hypo
cggaacagcacactctcccacggaacagcacacacactcccacggaacagcacacacacccacggaacggcacacactcccacggaacagcagactctcccac

SEQ ID NO: 31246 - DNA, 306 bp, Homo sapiens
  chr20:62513518-62513824
  hypo
cgctcgttccccacagacgtggttgagcttgcattttctcccctcagcacagtctcatttgggaagaggaaagggaaacttgcacgcatgggccggtcagggcactgagaggcctttctgctctggcactgcctgccaggcgtgcacctcagggggcccgtccgctctagcaggcaaatggggcgtgttctctgtagtcagaggggctgtgagaagacaggaaagcgagcttagtgggtatcaggcaagggggtgaaattgggttgtgagatgagaaagcagcgtcattgcagggctggggggccg

SEQ ID NO: 31247 - DNA, 45 bp, Homo sapiens
  chr20:62513897-62513942
  hypo
gggccgaggggctctgggcctgcaccccctctgtagacacctggc

SEQ ID NO: 31248 - DNA, 98 bp, Homo sapiens
  chr20:62581888-62581986
  hypo
cggagggttccaagccgtaaccaacacaagagagacgcgcccagaccaacagcctcaagcaaaatggcaccttcgaccctgggctctgcccggtgccc

SEQ ID NO: 31249 - DNA, 100 bp, Homo sapiens
  chr20:62839658-62839758
  hypo
ggacatgatgacccggggaaacctgggcctcctggagcaggccatcgccctgaaggctgaacaggtgcgcacagtctgcgagccgggctgcccgcctgcc

SEQ ID NO: 31250 - DNA, 58 bp, Homo sapiens
  chr20:62863342-62863400
  hypo
cggaagggccagttcttccctgaggctccaggacctcagcggccctccctgcctcact

SEQ ID NO: 31251 - DNA, 243 bp, Homo sapiens
  chr20:62863429-62863672
  hypo
ctccccttgtgtctggcttgagagagtctccaggcttctcctcccaacccttcgcccctgtactcaccccggcctctctgtacccaggtgcccagttccaggctgtgtggggctcggtcacatcagcgggaaatacgcctctcacaggagcgcatccggctgcccactggccgcccgcaggcagaaggaagggtccctcaatggctcgtcattctcctggaagtccctgaagaatgaaggacc

SEQ ID NO: 31252 - DNA, 881 bp, Homo sapiens
  chr21:36163875-36164756
  binary
cgtatataaaaataaaaaccacccaaatgcaaatacgcattttgcaattgataaggtgcggaaaaattaaaaataagaattagatgccaaacagggcgagttgcatccctcctctccccccaccccaaccaaaattccacactctttggaataaacaacttggttaaaaagttaagtcaagggtataaaatctttctttttattcacagcattgctaaatcagaagcattcacagtttccctccgggaatcttcctgtttgctttccagcgcgtcccctgggtgctggggccggcggacaccctcgaggtgcgtcgcctcggacacctccgcgagggccggggcgccagcagacggcggcggcgtgggcttctgggcgcaggaggctgcgcgggcctgacctacagcgagatcctggccgtcgggcgccctcggccccaggacggtggccgggcccagggcccgggatcccggcgggcttgtcgcgaacaggaggcccgcgcgcccggaggcgaaggcggcggcccgcggggcccagccgggccaggcctggcgcctcagtagggcctccacacggcctcctccaggcgcgcggagggcgccatgttggtgggggagttgctgtggctgccctcggcctccaccacgtcgctctggttcgggaggctggggttgagcagcgcggagccggtggaggcgttggtgcagggcggcaggatgcgcggcggcgagcgctcgccgcccaccatggagaactggtaggagccggccgaggcgccgtagtacaggtggtaggagggcgagctggcttggaacgggcctccctgcgcttgcgacgagccggggtagggcggcggcaggtaggtgtggtagcgcgtggcc

SEQ ID NO: 31253 - DNA, 246 bp, Homo sapiens
  chr21:37582287-37582533
  hypo
cgcctcgcacaatgatcaggacacaggcgaccccgatgaacacgtccctttcctgccccgtcagtatcccctttgtctctttctctccatcgtctcagccctgctctggcttcttgtctcttactcttggatctgactggtttcttcccatcccaaatctgctaagagatttgggatggggagaaagcctagctttgctcatatgtatcctgtgctttaaaaatgtctgacttcccggctgggtgc

SEQ ID NO: 31254 - DNA, 338 bp, Homo sapiens; identical to SEQ ID NO: 30091
  chr21:40506192-40506530
  hypo

SEQ ID NO: 31255 - DNA, 91 bp, Homo sapiens
  chr21:42613666-42613757
  hypo
cgcgtggcgtctacactgggtgacccatgtctacactgtgagtcctaagcgggtgcccctctctgtcgccctcccgcagccatcaagttct

SEQ ID NO: 31256 - DNA, 82 bp, Homo sapiens
  chr21:42613819-42613901
  hypo
gatgtgtggagccggcttgcccgttgctggatctgggaccaacggaggtagtcttgtgggtatcttttagtcttaaaggggc

SEQ ID NO: 31257 - DNA, 147 bp, Homo sapiens; identical to SEQ ID NO: 30094
  chr21:42617817-42617964
  hypo

SEQ ID NO: 31258 - DNA, 92 bp, Homo sapiens; identical to SEQ ID NO: 30095
  chr21:42617995-42618087
  hypo

SEQ ID NO: 31259 - DNA, 824 bp, Homo sapiens; identical to SEQ ID NO: 30098
  chr21:43160967-43161791
  hypo

SEQ ID NO: 31260 - DNA, 283 bp, Homo sapiens; identical to SEQ ID NO: 30099
  chr21:43161857-43162140
  hypo

SEQ ID NO: 31261 - DNA, 333 bp, Homo sapiens
  chr21:43725921-43726254
  hypo
tcctgcttatcggccgcgcggcatccccttgtcgcagcactccagcatccatgcagccgcgcggcaccccgtcttcggagcactccagaatccatgcagagcgcagcaccccacatccagagcgctccagaatccatgaagcacgcggcaccccctcgtcagagtgctccagaatccatgaagtgcgcagcaccccttaatcggagcgctctagaacccgtgcagcgagcagcaccccacacccggagcgctccagaatccatgaagccagcagcaccccacacccggagtgctccagaatccacgcagcacgtggcatctcctcgtcatagc

SEQ ID NO: 31262 - DNA, 114 bp, Homo sapiens
  chr21:44110034-44110148
  hypo
cgcggatgaggatacaggcgaagaagatggagacacacgcggatgaggatacaggtgaagaagatggagacacacgcggatgaggatacaggtgaagaaggtggagacagacgc

SEQ ID NO: 31263 - DNA, 445 bp, Homo sapiens
  chr21:45114158-45114603
  hypo
cgcatctggagcctgcgctccggctcagcgacctttcctctcaaatgcggaagcgtgcacttacagttcagaccgttctcctgtaagttcattacaaacacgggcggaaggcactcaggctttcgttggagaaacagaaataaggccttcttttgagcagcgattgctggatcattgatctgtttgaggaagtgtctgacctgggcctgagagctggagaaggtgcagattcaaagtgagcggctcctgaggagagccgccaaggctgctcgccttctccgtggcttccgcagctaccgtctgcacggtgagagggcacgggcacacggttcgggctggcgtgcagctctcccagccagccacgctctgctcaggcctggaagtgaaagccgcctccttcccgttatgccccccatacaggagcctcggtttttcagcaaaacgc

SEQ ID NO: 31264 - DNA, 105 bp, Homo sapiens
  chr21:45499846-45499951
  hypo
cgcactcctaagtatgagcctctccacgctccttacctctccgctccagctacctgcagaccagcagcctcttagccagtgaccaccacctcactgaagaggagc

SEQ ID NO: 31265 - DNA, 98 bp, Homo sapiens
  chr21:45617247-45617345
  hypo
cgcccagggatggccggtccaggcgcagggccgattgtccacttctggcccctgaggtaccgggagggctggtgagcagcatgtctcgctctgagacc

SEQ ID NO: 31266 - DNA, 236 bp, Homo sapiens; identical to SEQ ID NO: 29041
  chr21:45628864-45629100
  hypo

SEQ ID NO: 31267 - DNA, 226 bp, Homo sapiens
  chr21:45834132-45834358
  hypo
cgtctcttgagctggcgtgagtctgtctcttgagctggcgtgggtctgtccttgtggctgctggggacccgcggtgctgtggatccacaagggccctgctcacggtgctgctgcggaggcagcctcctcccgcagggcagggatgttggtgtcagcctcgttccttctgcgcaggcgcagcattattcatgggctcactgctctacccggggagcgtgctggggcc

SEQ ID NO: 31268 - DNA, 285 bp, Homo sapiens
  chr21:46155048-46155333
  hypo
cggcggcaagtcacgagcagggcgtcactgtcccagcgcggcttcccagcctcctgcaggggccagggttggggtgcattctctgtcttctcagtgaggacgcgcaaatgttccaggatggaagataaatgttcaggaaaacgaggacccagaaattcttcatgggctgcatgagccctgaggcccgactggcaggccactgaggtcacctgaaaaactggtgacaacgggcgggctcagcggctacccggggacaatcacggcaggcggaagagcggcactggc

SEQ ID NO: 31269 - DNA, 55 bp, Homo sapiens
  chr21:46315941-46315996
  hypo
cgcctgcggtgtgagtgctcccgcctgcggtgtgagtgatcccgcctgcagtgtg

SEQ ID NO: 31270 - DNA, 98 bp, Homo sapiens
  chr21:46686353-46686451
  binary
cgagcgcttcgcgcagctgagggcaggaggctgagagctcagtgcgaagcctccccacagcaggcttcctgggctgcggagacagcaccgccaaggtc

SEQ ID NO: 31271 - DNA, 391 bp, Homo sapiens
  chr21:46935349-46935740
  hypo
cgcggggcacagtgcagggacagcatggccaggcagctgccctgagtgtcgccagcacgctgtggccaccgccagagtgcggcacagggcagggggaatcctagggggcctgctagcaggataagcggaggcccccattgctaaggcaggcggccctcgaggcaggggtcgtggggatgcactgagggccgcctgcaaagttaccacaggggcgcccgagagtcactggttcacattctgaacaccgtcgcttggaagacactgcaaacccagcttgctgacaccaggaggatggacagccagctggggacaagtctcatctgcagcctcagggcctgaggcttgggcggagcacagagtgcagggggaaggggttgtcactgggctcagg

SEQ ID NO: 31272 - DNA, 505 bp, Homo sapiens; identical to SEQ ID NO: 30163
  chr21:47413791-47414296
  hypo

SEQ ID NO: 31273 - DNA, 44 bp, Homo sapiens; identical to SEQ ID NO: 30164
  chr21:47414327-47414371
  hypo

SEQ ID NO: 31274 - DNA, 68 bp, Homo sapiens
  chr21:47689571-47689639
  hypo
cgctgtggccactacgggcttgtggcaaggaatcctggcagcctccttggagccgctgccagaatggg

SEQ ID NO: 31275 - DNA, 129 bp, Homo sapiens
  chr21:47689700-47689829
  hypo
tgcactgaacggaatcatgcagggcctagaacagcaggtgctacaggggctgctctgtcctcatccccaagttccgtggaagtggaacaaaataaccgactggaaaccccaagacacagtttactctgc

SEQ ID NO: 31276 - DNA, 67 bp, Homo sapiens
  chr21:47918529-47918596
  hypo
cggcgacccgggcgactcacctccactccgctccagagccattccagcgtcgagccctggctcgacc

SEQ ID NO: 31277 - DNA, 119 bp, Homo sapiens
  chr22:18265358-18265477
  hypo
cgatctgaccccgtggcatccttcctttcctacaaactgcactgagacccaggtgtcatcgtgaagttcatgccagccagaggagccactgtggcgtttccggccataggcctgggcag

SEQ ID NO: 31278 - DNA, 196 bp, Homo sapiens
  chr22:18265523-18265719
  hypo
ggaagagatgcctgtatgggaccaactcaggcagccacagagggatggcccagcaccccacaaaacccaaagtgctcagcgtctaggatctgtttacggggcagagaagtggatgttcttttcctggttcaaaggtagaaacaggcttggagagccgcacccggcatcagccagccaggcagacgcctggtctagc

SEQ ID NO: 31279 - DNA, 206 bp, Homo sapiens
  chr22:19799727-19799933
  hypo
cgcaggcgcctcctaatcaaatgcagaggatgagcacaactgtttggagaacatggggcctcaggcaggctggctctcacctcgtcgctgcccctccctggcacggcaagcgtccagcgtggctggcccccggccaggatgctgctccggcagaagcccacactctccaagcacacggagtccacgacagcgctcctgccctccgc

SEQ ID NO: 31280 - DNA, 187 bp, Homo sapiens
  chr22:21011052-21011239
  hypo
cgctctccccgctgcagtctccatggccaccaccaacctcagctaagcgaaacacgttgccacacgctcaagcctaccgcatccagcaggcgtcttacccttctccttctctaagctgggcaccgaacatcagggtatgcagacacaggagagcccggtaatggcctgattccttgccccctcagcc

SEQ ID NO: 31281 - DNA, 98 bp, Homo sapiens
  chr22:22057979-22058077
  hypo
cgcgtttcagaaactcccggcggggggatggtgggttctttcaggacccctaaagacccaggtgattctacacagggcactgtgtaggtgccatccag

SEQ ID NO: 31282 - DNA, 279 bp, Homo sapiens
  chr22:22068426-22068705
  hypo
cgcaggcacgcctgcattagagggtcaccttctcacatctgggactgaagatgtgtgtgggcagaacgcagcgtttgtaatcgtgtgaacggaagacacaaacggccggtggcggccacccaggatggtactgggacccggtcaccacggcgctgctgtgcccttccttggtgccccggcctgagatgctgcctaacttggacttggtgcttcttggtctttgcttgtcctgatggctgtgccccgtgtgtggccctgagccacactgctgcgtgttcc

SEQ ID NO: 31283 - DNA, 354 bp, Homo sapiens
  chr22:22292773-22293127
  binary
cgctcccagggaatgcgggcagggagccagggcggagggcagaggacgagagcgaggaggagagcgcgggcacccactgatgctggcggcctcgggtattcgctttctctctcttctcccaccttgttccttttccccggatgcacgcatgcactagtaatgccgaatttagaacaacagggaaaggaaaggaaatggcaaaggaagggaaaggaaatggccgacaggaaatggcaaggaagggaaaatccactgcaactctgctgcctgctggcctgtccagggacaactattcagctgggtgggacgttgctacccccttgtggcacccctgctgcagcctgcgattcttac

SEQ ID NO: 31284 - DNA, 500 bp, Homo sapiens
  chr22:23800960-23801460
  hypo
ggggagggttcccagagggctgccgggcgaagggagtcctttccaaaacggtttcctgagctctgatgcacacacatgcagctcacccccaagtctagcgttccattagtctaccgttccgttcttcccagcacattcggtgcgcagccgcgaccagtctaaccgtggcacctttccaccggccctgagccctggcgtgcccctccacgacatcccctgggcacggagttgtgtcgacaggtctctgtgactggctgggcatgttttcggggtttgcccgcggggcagcgtgtctcagagtttggctgtacgaagcggtgttgacgggtaaacccggttttgtctctccctccggcggttgagggctggttccgcgttccatctgttagtgatgggatcgtgttgccgtggacgtccgtgccgaggtctgtgtgtggacagcgctcagaccccctggctgcgcgcccgggcgtgtgctgggcccatggactctgcgttca

SEQ ID NO: 31285 - DNA, 180 bp, Homo sapiens
  chr22:24205104-24205284
  hypo
cggtctcatcaatgttatttataaagtagccagtggagattaagtttccgtgttcagcggtgaagccttgagctatcacggcctcagcttcatggaaaaaggaagaagaaattttaaaaagcaagcagggcaggcagacctgaccaaatgaacccctcggtttcactgtctcacaccttc

SEQ ID NO: 31286 - DNA, 174 bp, Homo sapiens
  chr22:24819901-24820075
  binary
cgggagccggcgtgcgagcggcaggtcagccggggtgctaggtctggcgtgcggggtcctgggtgccgggtccggggtgcggggtgccgggggtccggggctggtggccgggcggcgtggggccgtcgggggtgcggggccgggaggactgggaggctggggttctgctcccct

SEQ ID NO: 31287 - DNA, 61 bp, Homo sapiens
  chr22:24820486-24820547
  binary
aggtggaggagccgggcggagaccggttccccgggaaggtgaggcgcgggcagagataccc

SEQ ID NO: 31288 - DNA, 305 bp, Homo sapiens; identical to SEQ ID NO: 30171
  chr22:25561932-25562237
  hypo

SEQ ID NO: 31289 - DNA, 99 bp, Homo sapiens; identical to SEQ ID NO: 30176
  chr22:31260817-31260916
  hypo

SEQ ID NO: 31290 - DNA, 163 bp, Homo sapiens
  chr22:31475566-31475729
  hypo
cgcgtgaattttgaagtattcagaattggtcttagagggcgcctgaccctcgttctggataataacatggcatctcgcccaggtagagaaagcctaggaccttgaaatatgtcctccgaagtgagctctgtttgcctctcctgctgtgtagcattgacaagtc

SEQ ID NO: 31291 - DNA, 345 bp, Homo sapiens
  chr22:31489493-31489838
  hypo
cgggcactggaggagctgcgggcggtggctgaagcaggccgggtggcagtgacccaggcagccgaggtagctgtagccaccgtggagccggtggcccgggcagctgaagagctgcgggcagagagagcagcactgagccggcggctggatgcactgagcaggcaggtggaggtgctgagcctacggctgggggtcccacttgtgtccggccttgagcctgagctggagcccagcgagctgctcctggctgccgccgaccccgaggccctctttcaggctgccgaggatgccgggacccccgtggcccacccacctgccttcagcacccgccgccgctcctccacc

SEQ ID NO: 31292 - DNA, 69 bp, Homo sapiens
  chr22:31494664-31494733
  hypo
cgaggaccaggccagcccacgggccggcagcctggcggcgctcgagaaacggcaggccgagaagaagaa

SEQ ID NO: 31293 - DNA, 68 bp, Homo sapiens
  chr22:31494797-31494865
  hypo
gagaagctggagaaggagggcgcggccgggtgagctgcagaagtgggctgggcagtggggggcggggc

SEQ ID NO: 31294 - DNA, 127 bp, Homo sapiens
  chr22:36519474-36519601
  hypo
cgcctttctcatctggacccagacccagacagaccccggggccattccgttctgcaggcaaacaagccagtcccgctagaatgtggcagtcacaggctttcaacatggaaggtggagctgcctggac

SEQ ID NO: 31295 - DNA, 800 bp, Homo sapiens
  chr22:38379141-38379941
  hypo
cgccgccccgtagggagacccggcctaggccgctggagttccgagttccagggtccttgtgatggaagggcgggcgcggcccccacacctggtcttccagccctatccaaggaggactgccagacagtcccgctctgaggtgcaggaggccgggccgcctcggctaccctgaatccacccgaagctagagggcccgagcccggggggcggtcgggtgctcacctccagagcttgcccagcgtcttgctgagctcagcgttgtgcaggtgcgggtactggtccgcgagcttcctgcgcgctgcctgagcccacaccatgaaggcgttcatgggccgcttgacgtgcggcttgcttttgctggcgccgttgacgcgcacgggcatgggcaccagcgtccagtcgtagccgctgagcacctggctgacggcctcgcggatgcacacggggaacttgtcatcgtccgcctcgccgtcctgctgctccttcttgaccttgcccagctcgcctggccccgggctggctcgcaggcccgatccgccgccgccgccgtcgggccctagcgagggcgcgctccccggggacaggcagcggggctcctccgagcccacggggctcagctccacctccgataggtcctgctcctccgccatgtcgcccccggccgccgccgccgccgcctcggccgcctcccccgggccagccgccggggtcctcgcaaagagtccaacgcccacctggatggaaggagggcgcgatggagcggccgcgcgcgcagccccgagggcggcccgagacaggac

SEQ ID NO: 31296 - DNA, 230 bp, Homo sapiens
  chr22:38381994-38382224
  hypo
cgacgccacccccggcgctgccaaccctcctccccccgcctcccttctcttccctgtgcccagactcttgttcggggccttgaaacagtgagctgtctttgttcgaaatacaggtgaacggcaatcatgtgattaacacacacacacataaaaagctttttaacagcgcccgctcggcctcagaaccgcccggagaggagccgccctggatggacagagggacgagggac

SEQ ID NO: 31297 - DNA, 592 bp, Homo sapiens
  chr22:38434385-38434977
  hypo
cgggcccaggcaggtggaagccatggctctggccgggtcacagggcggctggggtttgacctggcggccatgatgggctctggacccaggagccacccgggcacaggatgggacgggttgagagattggtcgtccaggcgttgagtgtgccctcgctcctccccaccttccgccgtggccttgagccccttgcgcccgcgcccatggggttaaatctctccctgtctctctctgctccaagttgttttccaagtgaggcagagaatggttctcttgttaccaacatggcttctgggcattgggtaatgcgctccctcttctcccgcagcgccacaaagggaccttttgttcccctccctgcccctctcgctggctcttcccggccccccacccacccaaactccctcctccccccgccggcgcccgcaccccggggctgcgcgctgaccgtggcggccgcggcgccctccctctcccagcgcctgcactggcggccgccatcttgcgagcggccctcagggcggcctgggctttcccagggttctcggggccggggcagtcgtagggggcggctggggctccacaggacgtt

SEQ ID NO: 31298 - DNA, 146 bp, Homo sapiens
  chr22:38435006-38435152
  hypo
ggcaggaccctcccgtccccagcctccgcgccaggcctcgtccctgcatgggacaagaggcagccctccgccatttcccgcggcccttgcctcccgggagcggctcccctctgacgactgagtggactgcgcttgagggggccgcc

SEQ ID NO: 31299 - DNA, 84 bp, Homo sapiens
  chr22:38687297-38687381
  hypo
ggcgggccgtggcacctgctgtcttgggaaacacaggtcaatacatccacacacacacacacacacacacacgcaggggacgcc

SEQ ID NO: 31300 - DNA, 391 bp, Homo sapiens
  chr22:38694593-38694984
  hypo
tgctgcccatggtggcacaagctgtcagcacggatgaggctggagggctctgggaccccagtgaggtcaaccacactgtccagctcgtacctcccgtctgtcgggagcccctcccgccaccagctcactctggccctctgagtcagggccttccccatccagtcccccaagcccgccttggcctccaggtgactcacgaatttcagcatgttccagtcaaagacgtagtcataggagaagccctgccggtggaagaggttgcggaagagctgacgtaggtaagagtagtcgggcttgtcgtcaaaccgcagggagcggcagaagttgaggtatgttgagaattcggctggagggtgttgcagaggatagagaaggccactgtgaggcccac

SEQ ID NO: 31301 - DNA, 219 bp, Homo sapiens
  chr22:39756401-39756620
  hypo
cgcactccccacgggctctctcgcccctcctcgccatcttctcaggctcattcctgaccttcacattgccaatctcatggccaactgtcattgatggatctctcagcagcgtctggcagccgtgaggggtttatgcatcctcccttgaatccaaacggctgcagaatgtggacgccctcaccccgctcgccgcagaatgtggacaccctcaccccgctc

SEQ ID NO: 31302 - DNA, 53 bp, Homo sapiens
  chr22:40061917-40061970
  hypo
cgtggacacccgcaacatcaccaaccgctcggactgcatggccgccaactacc

SEQ ID NO: 31303 - DNA, 172 bp, Homo sapiens
  chr22:40074986-40075158
  hypo
cggggccatctcgggggttgaatctcggtcttgctgcctccgagcgtggccctgggctggcctctgcctccagcagcctctgggatgtctccgtcctcatcctcaccgccctccctgccacgcaggacacgctgcgggactgcacccacgacgagcgcagctgcctgagcag

SEQ ID NO: 31304 - DNA, 195 bp, Homo sapiens
  chr22:40075302-40075497
  hypo
gctcgagctggagatggcccatggcctgggccctggcccgaggctgcctaccggctccccgggcgcccctggccgagggccgggaggggcgggcggcgggggcgacaccgagggcggcttgtgccggcgctgctactcgcctgcccaggtgggcaggggctggagaggtgtgagggtcgccagagggggggcacc

SEQ ID NO: 31305 - DNA, 106 bp, Homo sapiens
  chr22:41634855-41634961
  hypo
gcaaattgccctgcaggtccagccgctgggtcagctggggacagcgaggagaaagtggggctgagccaggcagggaccccgcctttgcaagtgctgcttcttcccc

SEQ ID NO: 31306 - DNA, 710 bp, Homo sapiens
  chr22:46815686-46816396
  hypo
cgccctcacccatgcacatgcactcatactcgtgcacatttacccacgctcacgtgcatacccgcattcacacccacatgtgcactcccacacgtgccttctcacattcatgtgcatttattcatacgctcacacgtacacttacccaaactcatgcacactcacccacgcacacgtgcactcacccttatgtacactcacccacaatcatgtgcatactcaaaacccacgtgcacttaccgacactcacactcaaatgtgcactcacccacacgtgcgctcatactcacatgtgcacacctacccacactcgtgcatactcatccacattcacactcacatatacactcacccactcaaatgtgccctcacccacacgtgcactcattcatactcacatgtgcacacctacccacactcgtacatacccacattcacacccacatatgctcacccacactcaaatgcactcgcccacacacgtgcactcatatatgcacactcagccactcatgtgcactcacgtatgcactcacccactcgtgcactcatgtgcacatttacccacatgtgcatgctcacccactcaaatgtgcactcacccacacatttacacgtgtgcttcttcacacacgtgcacacacccacacacatgcatactcacccaggtgcactcacccactcacgtatgcactcacacgtgtgcacac

SEQ ID NO: 31307 - DNA, 209 bp, Homo sapiens
  chr22:47075172-47075381
  hypo
cgtcgggtggtttagttcgagtcccttttgtggagaaagggagatgaaaactgaccacgtgccaggtgtggccgaagcccccagggagggccacattcggggagcggggggtcgggggagggccaccgactggctctgctgccagcacaggcccctccctggaagtcctcgggagcggagcgcggatcggcacgggctctgggctcccc

SEQ ID NO: 31308 - DNA, 221 bp, Homo sapiens
  chr22:47199299-47199520
  hyper
cggttttctctcctgtgggccttgttggagatctcgcttctgctgtgggagctggggcccggcccccaggagctgaggcggggagggcggttggttcttgcgacccggccgtcagcgttcagcgtcgccctctagtggccaggtgctgtctttgcagcctgggcttcatgaccacagcagggcacgttggccttgtgggtggggggtgcttacacttgcgc

SEQ ID NO: 31309 - DNA, 236 bp, Homo sapiens
  chr22:48996174-48996410
  hypo
cgcaggtccagcggggatcagagtggaggcctcgcaccagctctgggacatgaaggggcccgaggcagcccttgtggccacacgggccttgtcatggttcggcctttccactctgtgttccgaactgtgcagtgtgtatgtgtaggcacagatgtgtgcccgtgcccatgcctaggactttgcgtgtgtctgtacgtgtgatttcgtgtgtgtgtgcatcttcgttggcgacacac

SEQ ID NO: 31310 - DNA, 221 bp, Homo sapiens
  chr22:49138251-49138472
  hypo
cgggtggagcgggtggtgctgtgtggcggagctggcggcgcagtggagcgggcgttgtggtggacccggtggcgtggcagaccaggcgacgtggtggacccggccgcatggtggaccaggcaacgtggtagactgggcagcgtgatggaccaggcgacatggtggaccgggccgcatggtggaccaggcaacgtggtagaccgggccgcatggtggaccag

SEQ ID NO: 31311 - DNA, 574 bp, Homo sapiens
  chr22:49138501-49139075
  hypo
accaggcgacgtggtgggccgggtggtgtggtgaagccggcagcacagtggagcaggcattatggtggactgggcagcatggtgtattagaagaggagagatggcctggggtgctcagcggggctgagtccccagctgggagctcaggtgcgatgaagcccaagggactgacggtgtgaggagggccctctgctgcctccatgcagcccacacgcggggcccccacagtgcggacatgttggggcaatgctgcctggccccgccctcagcccagccctgggacgcaggctcagcagcccccggattccagtcaacatccccaggactcactcgggtcaggcacagtgtccaagctgtgtgagtctccgggagccgctggaacaaaatgccacacacccggtggcttcaaaccatgaaacccgttctcactgttctgggtccagacgtctgtggtcacagtgtctgctgggccgtgctcccgcaggaggcagcagcagagggtcctccctgcctcctcctgccattcttccggttcgggggtccagacgtctgtggtcacggtgtctgctgggcc

SEQ ID NO: 31312 - DNA, 178 bp, Homo sapiens
  chr22:49698417-49698595
  hypo
cgtgtttatcatccggcacacgggagacccacgcgtgtttactgtcgggcacaggggagacccacgcgtgtttactgttcggcacacgagagacccacgcgtgtttaccgtttggcacagggagacccacgcgtgtttactgtccggcacaggggagacccacgcgtgtttactgtcc

SEQ ID NO: 31313 - DNA, 171 bp, Homo sapiens
  chr22:49698626-49698797
  hypo
cggcacaggggagacccacgtgtgtttactgtccggcacagggaagacccacgtgtgtttactgtccggcacacaggagacccacacggggcctgtttaccatccggcacacaggaggcccatgcatctttaccgtcaggcacacgggaaacccacgcgtgtttaccgtcc

SEQ ID NO: 31314 - DNA, 298 bp, Homo sapiens
  chr22:49729101-49729399
  hypo
cgccagcggccgctctgtagcaataattcatcgcttgggtccagcgttagaagcaggtctcggctctggtgctcagaagggacagcgtgtgcgggaagctttgctgccctggacgcggcgccaccacccaaccccggcccctgcggtcccagagtatcagccacgacttggtgcctcctgcctgggtttctctgtgcactttcaggcatgttgaagtcagaccattcacagttttgccgcaggtcgacacggagtgccccgtggcttagcaggtgtgagctctctctggggctggccc

SEQ ID NO: 31315 - DNA, 1272 bp, Homo sapiens
  chr22:50718718-50719990
  hypo
cgctggacaggaagggctagagtccggctttgagtttgtggccggggacaccacccctagaccgccccccaccaccagcgctggctggcacctgccggctcctgggggcccaacaggccgctgtgccacccgccaccagccccagagcccctgcggccgccccgcccgtggccccgctcgtggccccgcccatgtgcacctgcgcagcatcagcttggggttcttggccaccacgtactgctccaggagctccaggaagagcgtgtgcatgatgtccgtgtagtactccagtttcccgtgcagcgccaccgtcagcagggacgcgaagtagaccttggcgcgggccgagaactcccgctggttctccagggtgtggatgaactgtaggggccggcggtcaaagcctgcccggcgccacctgtgtgccctcccgcccgcccgacgcctggctcacattgatgaggaaagacttgctgttcagcaggttggagaactggtagagggcctgctccaccaccggccgccgcggctcagggatgtccagcttgccggtgatcatcacgtccttgtcgccgtccttggagggcaggaagaagacgcggtcggtgtaggtcttgtagtccagcacggggatgccggcctcgtgcacgtcgttggtctggtcctccatctcgatcatcaggtctggggggaggctggcgtgagacgtccctggccacgtggggccctgacccccacgctacacacagcatccccgccccaggaggcgccccagcaccagcccccaagcggtccctacctgtgaattccttcttgcagcggtcccgcacgctctcctccaggccctccagctgggacttgatcttctcatactctcgttcggcctgctggctcttcctcctgcaaggcacagcgggcctcctaggttctgccggggctggccgctcagctgcccggatgaggaggtggatctacacgcctgcctgtgcagggcggcggatgaggccagaggggccgaggcgggagggccgagggctcagggtgttggcacagccggggggcgggctcaccagtagcagtagacagacaccgcgatgacgaccaccatgggcacgatgaccagcggcaagatgaggctgagcggcacgtcgctcacccgtgtgtcgtactccacgcggcccagcacccactcgcgagagccgaacttcacctgtgtggggggccgggttcagcgcggtcccgtgggggcaccccccgccagtccccgctcac

SEQ ID NO: 31316 - DNA, 153 bp, Homo sapiens
  chr22:50899708-50899861
  hypo
tccccaacttaggacaggccaggcagagtcagaagcaaggaaggtaagggggggggggtcccagaatctcagggtaccacagttatggggaatcccaagtgggtggggaaggagcagacaaaggcccgtttcccacgggcacccagaaccccc

SEQ ID NO: 31317 - DNA, 235 bp, Homo sapiens
  chr3:114070275-114070510
  hypo
cgggagtgccccgcggcgtgtcctggcccgagtcctggatccccgggaacacatcgcccacgttctgtgacacgatgcgcgtgcactcgtcgatgactgttttgatctgcaggatgctggcggccgtgaggatctgcagagcttccgactgcgagacccgtagcacgccgctgtacatgaagtcaatgagcttttgcactgactgcactgacaccaccgacgggatctcgatgtc

SEQ ID NO: 31318 - DNA, 216 bp, Homo sapiens
  chr3:11578015-11578231
  hypo
cgccaccacacacctagggaggatgtttgtgttccacggaggtcgccacccatctgttttcagagtaaacgtttgtgtgagcgcactctggcggggagtcccgagagcggaccctcttgccactgcacccataggtgcggaacgaacctgctgccccgaccctgcggctccgaccggggccgagcagcgaaggaccaccctggtctggtcacctac

SEQ ID NO: 31319 - DNA, 546 bp, Homo sapiens
  chr3:11655438-11655984
  hypo
cgaatctgctccaccaggagccggcgacgtcatctcagagcagctgcctgactttctatgactgtttccacatgtgtgaaaatggtagtgtgaacccacacacaggctcagagcgatacccggcacggtgccgcctcctccccacacacactctggacttacaggctttcttccatgcacgtttctccctccctagaatgtgttcagaagccctctctgccaatgcatactcatctgcactttcaaaacccgacttgagtgcctcttgtcagcctcagccccaagagcaccccttttggtgccatctacctgggctgagctgcctggcagcgtcccttgtgacgtgctgctggctccaactcaaaaactactcatttctcagcaacaccattgtgtgctaccgccaaacaggcgatcttgctctctgcagtaggttccagtccagaccctgaggagtaagatggtggtcccggaaaccagttcaaatttctcactggcatacagagtgctgaaggaaggctgtgtataggccccccgattctgatc

SEQ ID NO: 31320 - DNA, 253 bp, Homo sapiens
  chr3:121741110-121741363
  hyper
cggcgctccccacggctccgcctcccgccccgcgcgccgccgtttcctgctccgcccccgcctcccgggggactgcggccaccttccctacctgctgccgcctcctgctcgctgaaacaccgtcccccaccccgctgacggagaagattcccactttcctccagaagttctcgggaaatctcatcccctgcaaatgtatccccctctccttctagaattatgtggatataactttctagggtgtgtttcctgc

SEQ ID NO: 31321 - DNA, 54 bp, Homo sapiens
  chr3:121902674-121902728
  hyper
cgcgatttgtatttattttactgtgaatctctggccttatatcagaaaaaaaaa

SEQ ID NO: 31322 - DNA, 61 bp, Homo sapiens
  chr3:128004552-128004613
  hypo
cgcccacgctcccttagcccattcctgtccagcgtcaggccagtcccacgttcctggagcc

SEQ ID NO: 31323 - DNA, 57 bp, Homo sapiens
  chr3:128713000-128713057
  hyper
cgtgcggcctgggggcggggctccgcggggcggggctttccccctcagccactgcgc

SEQ ID NO: 31324 - DNA, 92 bp, Homo sapiens
  chr3:134080498-134080590
  hypo
cgcagctcctcttcggctcgagctgcccggccctgcgcattgcccagagcctgctccagcagctcggcacgccgccgctggtcctcgatggc

SEQ ID NO: 31325 - DNA, 150 bp, Homo sapiens
  chr3:14386858-14387008
  hypo
cgaggagctctgaaagagcagcgggtgcagcggagcgcatggaaggcaccactgcaatgttgacacgctgcctccggcctcctccattccacgtacactgaaggcaccgccacgatgctgacacgctgcctccggcctcctccattccac

SEQ ID NO: 31326 - DNA, 516 bp, Homo sapiens
  chr3:149375406-149375922
  hyper
gaaaggtcgcacgattccaggacaggcagccccccgaaagaagttcagcccgagccaactccaccacgtctcgactccggaagcccgaggagcctggagccctggagtggtgccggatgagcgcgcgagctccagcgggcactacctgggcgggcagcgaagctgagcctgagcgcgcggcggccgccgtcccgcccgaacttgccgtcgggcctgggtcgctcgggtgagtcccgagattgcggagctggagccgaggcttggctgacaaatcccgacccgactctgtgcctggcagtctaagggcttcggctctcacatcccccgagctggcctaaggcgctagtgctgggcgaaaaggaggcgcaggagaagcagacagcgcggccgcagcagctcccggactgtcccataaacaaagtttggagcaaactcccacccccaggaaagaggcgggcccgaaagttgagctgttgaattatgtatgacctcctagtccctagccggccagccccc

SEQ ID NO: 31327 - DNA, 72 bp, Homo sapiens
  chr3:150848450-150848522
  hypo
cgcggctcttccttcacctgtgggtgcacatgggcctgctcccttgctccactgtggtctctgcccagacgc

SEQ ID NO: 31328 - DNA, 123 bp, Homo sapiens
  chr3:156533976-156534099
  hyper
cgacggctgtggttactcaaactgatctcatcgcaggtcgtcacgacacgcgcttcccctcgcctgcacgcggcgtggcgtgagaggggccctggcagccggcgcgcccacccctgatccttc

SEQ ID NO: 31329 - DNA, 142 bp, Homo sapiens
  chr3:156534539-156534681
  hyper
cgccaaggaggccgagaggggcccaggggcgaggtcgactctcagcccgctgtccccttatcccacgtttcgcagcctgaggtgtttgttgtatatcgggaactgacacttttcggcgttaaaatgagggcgtcacctgctc

SEQ ID NO: 31330 - DNA, 54 bp, Homo sapiens
  chr3:169540679-169540733
  hypo
cactgaagaaccttgaagtcctgggactggatgacaataaaataggacaggtac

SEQ ID NO: 31331 - DNA, 75 bp, Homo sapiens
  chr3:176915778-176915853
  binary
cgcgtgtccggggggcggcccggcggcgttgggggctgggcgcacacgcggcgggcatgtgggggagtgcggcgc

SEQ ID NO: 31332 - DNA, 114 bp, Homo sapiens
  chr3:179391556-179391670
  hypo
cgggtgagacactcttagacttgggccgagttcacctagccctagacaagtgctacctaaagtgtgtcagctgactgggctgagagatgagtacaacactaagagtagtgtttc

SEQ ID NO: 31333 - DNA, 581 bp, Homo sapiens
  chr3:180546449-180547030
  hypo
cgaccttcgctcgctttctgggccggggcctggtgagagtcagggggccggggcccctgaggcagagaaaactgttcacgccttggaggagagtgtccacttggctcccagggccggcctgcacagcctgcagcgtctccatggccttctcctgctgccgccgggcctccaggccctccacgtcgggcgggtagcagtggccacgcatcacggtcacctgctgtccctgggtgatggcccggctccggcagctgtgcagcgcgtggtcccggcaggtccaatacgccttctcccccacggccttctcccgcttgtagaggaacgactcgtgcaccaggaagctatccccgtagcacgtcctcaggaactcaaggggccgggcctgtcccaggcccaggatcgagcacttcttgggcgtcaggctcagcagctacaggattcggggtccgtcgtcgtcctccgggccggcttgctcagcactagcccaggggtgggctctggctccggctccttggggcactgccacaggccccccctctccagcggctcctccactcggcttccagagccctcaggacccc

SEQ ID NO: 31334 - DNA, 237 bp, Homo sapiens
  chr3:183209981-183210218
  hypo
cgggctgtaggcgtacagcgctctcatggccccacctgaggagagggaggaaacacggtgggcatcgctccatttttctggtttcttccctcttaaccactaaaattcaacttctgattaggccaagtctaccctcttgccaagagaaacagtcgattgatggctctcctgaaagccagagtgggtcctaggggcagtgagttgccagcgctggagacaccgcgacacaccgtttac

SEQ ID NO: 31335 - DNA, 102 bp, Homo sapiens
  chr3:18462342-18462444
  hypo
cgggctcccgttctgctccaggcgggcaatcttggctggtggacccttcggatcactcacattgttagacatttctgaatgttctttcccctgagttgcctc

SEQ ID NO: 31336 - DNA, 129 bp, Homo sapiens
  chr3:185365800-185365929
  hypo
cgcctaaagcgcagtgtgtgccctggagcgccgactgcattctggagacggggaatcctttgattccacaccgcttcgttctttcgtataaagctgactcattacatctagaacttggttttgaattcc

SEQ ID NO: 31337 - DNA, 477 bp, Homo sapiens; identical to SEQ ID NO: 30190
  chr3:185374988-185375465
  hypo

SEQ ID NO: 31338 - DNA, 98 bp, Homo sapiens
  chr3:185441721-185441819
  hypo
cgaagcgggtaagcaggttcggtctgggcaatcccagggaagccgaaggagacaaatccagcgccagactatgcagagacaaatttcggtaactctac

SEQ ID NO: 31339 - DNA, 197 bp, Homo sapiens; identical to SEQ ID NO: 30192
  chr3:185445861-185446058
  hypo

SEQ ID NO: 31340 - DNA, 334 bp, Homo sapiens
  chr3:187443068-187443402
  hypo
cgctctgctcacctgcccgctctgctcacctgcccgctctgctcacctgcacacggggactgagtgggactttctcctgcccgctctgctcacctgcccgctccgcttgcctgcccgctccacttgcctgcccactcctccgcttgcctgcccactcctccgctcgcctgcccgctccgctcgcctgcccgctccgctcgcctgcccactctgctcacctgtacaaatctggctccgcaggtttcgcatttgtagggcttctctccagagtgaattcgagtgtgggttttcaggttggctggccggttgaactgggccccacagatgttgcaac

SEQ ID NO: 31341 - DNA, 380 bp, Homo sapiens
  chr3:187456733-187457113
  binary
cgtggttccgggagctcaaaccgaatggtgtttttaccgctgcctaacgctagagagagccctccatcaaggtttgaaaccgtcaacccctttctcgcccctcccctccttcccattgacctagtttggccagagcctcccgatttggagaatgccttccgcccttcccccctcctctccagccagagaggctacagaggctgttggattattggtaatctaataactccaataacccgctgaaaaatccaaagggaaatctgaaagtgtaaagcactgtttagggacaaggacaaggaattttaataaggctgcaactgccgtagtgaaccccgcatcaggggccctgccgtggggctcccggtctcagcagtgtttca

SEQ ID NO: 31342 - DNA, 509 bp, Homo sapiens
  chr3:187457654-187458163
  hyper
tcagccaaggtccttattcacgttaatgaagatggaaggcactaactgtccttggaaagcgatgagtcaaacttgaccgcgcttcaaactcgttcccagattcgtttccagtccgaacagaggcgcgtttctccgacgcggcctccgacggctcccgcagtgggaggggccgaactcgatccccgccgacccgggcgggggcgacggcgctgtctccccctgcagagcgcgcctgctgccgctaggggccgccagcatgcggacgcgcgtttgccatcttaagtcacgagctcggagaaagaaaactttacggaggaactgttgtggcacaaattctggcctatccacatgacccccaccccctcacacacacacacccggtttctcgccaggctactatgcagaggatgttaggaaggggaagagagcgatttcagaatcgaggctcgccctgcaagtctttggtccaggccttaacccccctcttaacacgcaaacccccgagctcc

SEQ ID NO: 31343 - DNA, 522 bp, Homo sapiens
  chr3:192635635-192636157
  binary
cgcgccgagtagcagctccgcggcagcgcggcacccacccccgccccccaccccgcccccctgggcctcctcccctcgcaggctcccaggctttggccccggctcgtgggcgggttggcgggcgggcgtctgggcgggcagtcccccgctccgtgcgctctgggcgtgcgagcttcgggaggagctggactgcagcgagggtgcgtgtgtggccccgacacccttttctccggccccacgcccgccccgatgctgcgcgtccctgccctgccctggccctctctggcagcggcaacggcggtcgtagagccaactggagcctcccccgggcgaggaaagtgaagtggaaacaatgtgaaattcaccagctctgaaatcaacaagctgccggctccggtgttacggagccagcaccagcgtctccatttaaagggacagcgcacccagtggaaaggaaaataaataaatgacagaggtctgcacgcatataccacttgccaatccgtacttgggaagacgcgc

SEQ ID NO: 31344 - DNA, 142 bp, Homo sapiens
  chr3:194061709-194061851
  hypo
cggagactcagctcccctccgcccctacctgtcgcctggtcaggccccagaggcccccttccccagctcctgtatgcgctgctactagggccctgctgcccgagcctcgatagacacggtgagccgcagagaaccgcagctc

SEQ ID NO: 31345 - DNA, 147 bp, Homo sapiens
  chr3:194407289-194407436
  hyper
cgcgcgtgtctcccccgcaccaaccttttttgcacactcgaagctgaatattttcttttttagagaatttacccgcacctcctgcggggttcctaagcactctctctgctcccctccccccaactccctaccacagggccgctccca

SEQ ID NO: 31346 - DNA, 154 bp, Homo sapiens
  chr3:194407836-194407990
  hyper
caagatctggagcaagagcgaggcgggccgtcagggcaccaagatgaagctgacggtgagtgcgcagggtatccgcatggtgcacgccgaggagcgcgcgctgcgccgcccgggccacctctacctgctgcaccgcgtcacctactgcgtggcc

SEQ ID NO: 31347 - DNA, 102 bp, Homo sapiens
  chr3:194408028-194408130
  hyper
gcacgagctgaagcacaaggccgtgatgctgcgctgccacgccgtgctggtgtccaagcccgaaaaggcgcaggccatggccctgctgctctaccagacgtc

SEQ ID NO: 31348 - DNA, 155 bp, Homo sapiens
  chr3:30713687-30713842
  hypo
cgcggcatgtcatcagctgggaggacctgcgcaagctgggcagctccctcgcccgggggattgctcacctccacagtgatcacactccatgtgggaggcccaagatgcccatcgtgcacagggacctcaagagctccaatatcctcgtgaagaac

SEQ ID NO: 31349 - DNA, 194 bp, Homo sapiens
  chr3:3221338-3221532
  hyper
cgcagcgtcctgctgatctccttcgccggccatgtctgtttacccgcaaaggaggctgggacagggcggtgccgaagactccgagggagggcccgtgtcgcgcggctgccgcgcaccggggccacagcgccccctggcggccccaggggagcagacggcggcgcgtacccaagcctgaaagtgatggcctaggc

SEQ ID NO: 31350 - DNA, 46 bp, Homo sapiens
  chr3:3221564-3221610
  hyper
cggggacagaacgccgtcccctgccatccacggctgagtgcccggc

SEQ ID NO: 31351 - DNA, 205 bp, Homo sapiens
  chr3:39185671-39185876
  hypo
cgcagatcctatcgcagtgacagccacaatcctcccgggattggcgcagtgcctgcagctcccgcttctcctcccgatcgatccttcgcacacctgaagccctcagcagagctcgacgtcgccgggctgggtagggctgtaggaagctcacttcttccaaccggccacctgccacagcgactgccaagtcctcctccacagaggc

SEQ ID NO: 31352 - DNA, 277 bp, Homo sapiens
  chr3:42905952-42906229
  hypo
cgcagcactacaggacgtcgggactgggcatttccttccaacatggccgccactgcctctccgcagccactcgccactgaggatgccgattctgagaatagcagcttctattactatgactacctggatgaagtggccttcatgctctgcaggaaggatgcagtggtgtcctttggcaaagtcttcctcccagtcttctatagcctgatttttgtgttgggcctcagcgggaacctccttcttctcatggtcttgctccgttacgtgcctcgcaggc

SEQ ID NO: 31353 - DNA, 357 bp, Homo sapiens
  chr3:50374299-50374656
  binary
cggtcggctttagtcatagctggataatgcccggctcaggtctaccacaagccatacagctgctttttccgtgttcaacctgtctgtgacagaaaccaagggggccccggcacccagcatctaggcggtggaatcggggtcttacgcacggttccgcgggcaggtccccggccaggacccgcggggagccacgtagccaggagggtggggctgcccaccgacccaggacgcggcaacggaccggggagggcggagctccagcgaccgcttcccctcccgcccgccggcaccccctggctcccacctggtcccggcgcggcctgcgagctagcgaggttcgcgcggtgaagtactgct

SEQ ID NO: 31354 - DNA, 234 bp, Homo sapiens
  chr3:50374684-50374918
  hyper
gcagtagccactgctcgtcgtgctgctccaggtcatttcgaaagaaggcgcctccgcctcgcccatagccgtacccgcccgtcccccagtcctgcgcgtccgtagccgccaaccaccgccccggtcgcgtgcgtgcgtgtacgcgtgtcagtgtgcgcgtgcgcccgggccagagccgcgccgcaaccgttaagactgaaacgtagatcgccgggatctagctcttgtctcatt

SEQ ID NO: 31355 - DNA, 34 bp, Homo sapiens
  chr3:50374946-50374980
  hyper
cacgcttcgcccccaggaatgacctcatcgctcc

SEQ ID NO: 31356 - DNA, 206 bp, Homo sapiens
  chr3:5137574-5137780
  hyper
cgttttatttggacgctctgaatccgttttcccctagcacatcggcagagcagaccgcctgcctcggccttgtcaacgccaagggtgttttggacggatgtgtctatcctgaaagcttccagcctggctttgaacttgacttggcaacggatgaaaacctcggcgagcatccccagacaaccccgctgcgcgtcagagcgctgctc

SEQ ID NO: 31357 - DNA, 38 bp, Homo sapiens
  chr3:51989952-51989990
  hyper
cgccgctctgctgccggcctgcacgctcggggtggccg

SEQ ID NO: 31358 - DNA, 138 bp, Homo sapiens
  chr3:51990500-51990638
  binary
tcgcctactcggccttcgcggctcaccccttcctgtacgggctgctgcagcgccccgtgcgcttggcactgggccgcctctctcgccgtgcactgcctggacctgtgcgggcctgcactccgcaagcctggcacccgc

SEQ ID NO: 31359 - DNA, 117 bp, Homo sapiens
  chr3:52280022-52280139
  hyper
cgcacgaggacgcacgctaccctggaatgcaggctacgccgagtgagtgcccctccccgacccccagctcaggcccgggcctgaacccgcttcgggtcctgcgcccgcctagaaagc

SEQ ID NO: 31360 - DNA, 466 bp, Homo sapiens
  chr3:52552661-52553127
  hypo
ctgggtgctctggtggtggccctgcgtgggctgaggcggcagtcagggaccccactcccctcgcgactctgctccaggatgagctggcccggattcgtgcgcatcgccagctggtgtttcgctaccacgtggttggctgtcggcggctgcggagcgaggacctgctggagcaggggtacgccacggccctctcagggcacccactgcgcttcagcgagagggaggtgagccctggccctggcctgccccgctccatcccgccccgccccgcccctgcgcgccattgccccaggccccacggcccacgcagtcaagaaccccacctcccctagccagggggcgcctcctgctgagtccagcccgggactccgcccttgacctgggcctcgcccactgctgtgggcctgtcctgcccagcgcccttgtgtccttccgaggactgagccccgccccctgccctgactcc

SEQ ID NO: 31361 - DNA, 199 bp, Homo sapiens
  chr3:53195788-53195987
  binary
cgcgcctctccgagacccgatccttctgtccctcgccacccgatccgtccgtcccttgccctccgcgtgctccatcgccccacccccacccacacccctacccccgcccgccgccccctcgatcccgtcctcccggagccgcgcccccggcccacgctcgccgccccctgccagtccagccgcctctccgctctaccgc

SEQ ID NO: 31362 - DNA, 506 bp, Homo sapiens
  chr3:54660189-54660695
  hypo
cgataactgcgcaggcgcggaccagagagctcttttctgaggatccggcaagatggcagaagtagagcagaagaagcagaccttccgcaggttcacctaccgtggcgtggacctggaccagctgctggacatgtcctacaagcggctgatgccgctgtacagtgcgcgccagcagcggcggctgaaccggggcctgcggcggaagcagcactccctgctgaagtgcctgcgcaaggccaagaaggaggcgctgcccatggagaagccggaagtggtgaagacgcacctgcgtgacgtgatcatcctgcccgagatggtgggcagcatggtgggcgtctacaacggcaagaccttcaaccaggtggagatcaagcccgagatgatcgaccactacctgggcgagttctccatcacctacaagcccataaagcacggcgggcccggcatcggggccagccactcctcccgcttcatccctctcaagcagtggctcagctaataaaggc

SEQ ID NO: 31363 - DNA, 970 bp, Homo sapiens
  chr3:66024122-66025092
  binary
cgctcccctgcacacgctcgcgcactcaagccatcataaaacaaactttctgggcttccccgcgagccccgcacaggcgcccgcgagctttgtttgcattccggtgcctctgggtccacgttccggcgcccgcccgtgctctcccggaccagagtccactctgcgccgctcgggttatttttttttccttccttcctttctctcttgccttttacaaatgcggtgcctcctctttgcctcccgcccggctcgcctctcctcgctggcaggctgttactgagggtgagggaagcccttccagccagttgccgggagccctgaagacgcggtggcggggcggcggggagcagggcgggaggtaagtgctcgcggcccctttaagcagatacaaaggctcggcttgttttgttacagttcattctattccgcgccgcggagcgcagcggccggcgacaggagacgcgcgcgcatgcgccccgcggccgccagccggccggcccacccctcccctcctccccgaagggagagattccaacgtgcttcccgatgggtcctaaaaccgacctgccgggagaaggcaactcccccccaacccttcctgaacccctatcctctctccttttctttcagtgccctggactccgcggattcctttggggctggagggccgcacacgtgttttactccaactgtttgcaacttttgaaacccgggcaatctggctttggcatttgaaaaccatttcaaacaggtgggggttggggaggctgccacactcaccctggcgctcacactcacgcacacgcgcacgcactcgcgccggccctaagcctcctaaccgccctcggccagtggctggccaggctgtcggtcacccagcccggctggttcgccgccccccttgccgcaggtcccactgaaacccccgagacccgccccggggcgctcgccgcctccctgcctgccctgc

SEQ ID NO: 31364 - DNA, 1570 bp, Homo sapiens
  chr3:66550318-66551888
  binary
cgcacgacgcgtgctggctaacccccaaatctctacgacccacgctcgctcgtctccagaccccacgaggcacgctcttcttctccaggctctctcgcacgcctactcccccggacctccacgcagaatctcccttccgccactccaacctgacagtcttccaacacgcacaagcacgcacaactccacacacacaacccagtccgcaccccctccctgagtacgaacccccgccgctccatccccaagtgacagagccccggggcgcagagagggcggaaagggcggcactcacaggctccgcgtccaggagggcaggtccccgggcaacgcagccagcccgcgcccaccgcagtccagcgagtccccagcgcaagtgcaggcggccgcgcagggcgcccgcgggccggccgcggcggtcaccggctccagccgaagcaaaagcagccagagaaggagaaggcaaggcgagcggcgcggggccccgagccctccccggaccggccgcgccatcttgtctggagcgcgctgcgaactccgggcgcggggactgtgaggacccgaacggccgcagacgcgggcgggcccgcggggcgctccgctcggctctagactccgcaccggggcatggcccccgccccaagttctctctgcggccgcggctccggcactcagcgtgcccccggtgcccgggccgctccggagcacccggcgggggccgcaaaccccgcgcccatccgggccggccggcccgcccgcgctagctgcgaactccgccgattcgggcaaggtgtacccagcctgcgctcttcgtccgcccggggcacgccgagtgccgctaccgacaccggccgagggcagtgctgccgctgcgcctggaagacaggcgttcagccccgcagcccgagctcggtgccggcaggcatcttcctctgggctcggagcgcaaagccgtagacctcgggctggacggcgcggccggccccgcgctgggaggccccagtgcgcctcgctgtccccacgccgcggccagagagcgcgcgcgcgcgcgcagcctcgggttccgcacggctcctccgcgcagcaagagtcccgccgacctcgcagccgaacaatcagccgcttgctgttcgcctccccgcggcccagccccggccggtcccccaagccccgcccccggccgctcgcccgcacacaccccctaggctccgcgctccgcggccgcctgctggcccacgttggatgctttgcaacagcgccccgccacgcctccccgcctgctgctcattggctgccggagtccaccgtggccagcctcgagggccattggagcgctcgctgtgatcccgcccctcccgcttcaccggctaccccgcccccacactcttttcccacccaaggtgtgaagggcgggagactgggaggagaaagggagggacggcccccgcctcttaaaggagacacgcaggttgttgttggagaacgggaacgcgggctggggaaaggaggcgtgaagatacgccctctgcgtcaagaaggggagagaaagttaagagggtaaaacgccccc

SEQ ID NO: 31365 - DNA, 140 bp, Homo sapiens
  chr3:85010663-85010803
  hyper
cgggtgtctgacacgttacttaggtttttaatccgcgctgagacaatctcacagagaccctacttcacctctcagtaacttgcatttctcagctctgctgtgtgtgtgtgtatgtgtgtgtgtgtgcgcgcgcgcgcgcc

SEQ ID NO: 31366 - DNA, 258 bp, Homo sapiens
  chr4:100867945-100868203
  binary
cgcgatccgcatccgtcccggcccaggaccaacctcctgggccggggcgtccgagctgactcggtggtccgcgcacggcgccagcaggctcgaagcggacctgcccgggaggcggacgatagcagccgggctgcccatcgcggggaggggttccgcccgggacccgattgccggcattggtagcgccgtgccctgtgacctccaggcgaggccctcgcagctcaggccaggaggacagggtccgggaaggggacactc

SEQ ID NO: 31367 - DNA, 1352 bp, Homo sapiens
  chr4:106156138-106157490
  binary
cgtctggtgaagaattctgttcaggttccagcagcaatttgcaagctcctggtggcagctctgaacggtatttaaaacaaaatgaaatgaatggtgcttacttcaagcaaagctcagtgttcactaaggattccttttctgccactaccacaccaccaccaccatcacaattgcttctttctccccctcctcctcttccacaggttcctcagcttccttcagaaggaaaaagcactctgaatggtggagttttagaagaacaccaccactaccccaaccaaagtaacacaacacttttaagggaagtgaaaatagagggtaaacctgaggcaccaccttcccagagtcctaatccatctacacatgtatgcagcccttctccgatgctttctgaaaggcctcagaataattgtgtgaacaggaatgacatacagactgcagggacaatgactgttccattgtgttctgagaaaacaagaccaatgtcagaacacctcaagcataacccaccaatttttggtagcagtggagagctacaggacaactgccagcagttgatgagaaacaaagagcaagagattctgaagggtcgagacaaggagcaaacacgagatcttgtgcccccaacacagcactatctgaaaccaggatggattgaattgaaggcccctcgttttcaccaagcggaatcccatctaaaacgtaatgaggcatcactgccatcaattcttcagtatcaacccaatctctccaatcaaatgacctccaaacaatacactggaaattccaacatgcctggggggctcccaaggcaagcttacacccagaaaacaacacagctggagcacaagtcacaaatgtaccaagttgaaatgaatcaagggcagtcccaaggtacagtggaccaacatctccagttccaaaaaccctcacaccaggtgcacttctccaaaacagaccatttaccaaaagctcatgtgcagtcactgtgtggcactagatttcattttcaacaaagagcagattcccaaactgaaaaacttatgtccccagtgttgaaacagcacttgaatcaacaggcttcagagactgagccattttcaaactcacaccttttgcaacataagcctcataaacaggcagcacaaacacaaccatcccagagttcacatctccctcaaaaccagcaacagcagcaaaaattacaaataaagaataaagaggaaatactccagacttttcctcacccccaaagcaacaatgatcagcaaagagaaggatcattctttggccagactaaagtggaagaatgttttcatggtgaaaatcagtattcaaaatcaagcgagttc

SEQ ID NO: 31368 - DNA, 71 bp, Homo sapiens
  chr4:110343729-110343800
  hyper
cgtccaccagatggcggtggaagcccaccgacattgtagactacgtaggaagagcgtccagatggaaaagc

SEQ ID NO: 31369 - DNA, 281 bp, Homo sapiens
  chr4:123300379-123300660
  hypo
cgggacagtaagggaggaggctgaactgcgcgattttacctggcttctccagaagggtaaggcggccagttggacccggtccttgtgttcggagaacagagtcacccaggcctcgaacgcctgcgatggtcggcgtctcttccctaggtgacgcaagacgcggagctcggctgcacgacgctggcgcaagcgcgggggcaagagcgccggcctccgagacggttagtgattggacgaagcagggcgcgggggcgcaagcccgggtcctgcaggggcgacgc

SEQ ID NO: 31370 - DNA, 306 bp, Homo sapiens
  chr4:1254365-1254671
  hypo
cgccctacatgcctcttacccaactacgtgtccaactctgctgaaacccgagctaacacagcacaggctgcccgccgctgccctacacgcctctcacccagctagactcgcatccaactctgctgaaccaccagctaacacagcacaggctgcccgccgctgccctacacgcctctcacccagctagactcactgtccaactctgctgaaccaccagctaacacagcacagactgctcgccgctgccctacgcgcttctcacccggctagactcgtgtcaaactccaagcagactggtgagacagc

SEQ ID NO: 31371 - DNA, 71 bp, Homo sapiens
  chr4:1282403-1282474
  hypo
cggagagtggcagacacgatgcgaaccgtgaaaggacgcaaagagtacagagtgcatgcttccatctctat

SEQ ID NO: 31372 - DNA, 167 bp, Homo sapiens
  chr4:1326509-1326676
  hypo
cgcaaacttaaatgtgccaaaatgttgttttttagacatgcaagaaagcacttcagccaagcagaagggagccagctggacgaggtgcgccaggccatgggcatgctggccttcccgcccgacacgcacatctccccgtacaaggtagggcgtgcgtccctggggtc

SEQ ID NO: 31373 - DNA, 83 bp, Homo sapiens
  chr4:141207770-141207853
  hypo
cggcatgtgcagccgtgtgcccgcgccgttcctcacgtgcacatgggtggcttgagcgcataagcatgactgccaatatcacg

SEQ ID NO: 31374 - DNA, 923 bp, Homo sapiens
  chr4:141564347-141565270
  hypo
cgagccaccagggcccgctccgcacctcccaccttcttgctcctcctctccagctccagctctgcgatctcgctcagcagggtgatgccgtgcagaaagctctgctccaagacaaggctctcggcagcttcctgcttctccaaggcctggactccagtagcacctggggagggcagaggcctggcctggggcagctccatggccacctccatgccagccagtgggtcttccaggccgggcaggaactgctcagagcttgcctcttccaggtagcaggtgctgccgggcacaggcacggcctcccggggctccagtctcgggcactctccctccccggcgggcacgtcacagtctgacatttctaggctgggctggggctcgctcagggccgcctgggccaggccttcctccggcgctgcctctgccgcaggaaccgccacaggcacctccactggctcctccttggcctccactagcgtctcgggtgtcagctgcacccccaggtccaatgcggccgtgcagggttctgtccggcccggggaatccacgcatgcttcaggcccctccgcaaagtctgggcactcagagggctcggtgcagccctgcccggtggcactcagcgcctgggcctccaacgggccacctctgcatccgcctgcagggctcggggtagccatggtttccatggcgggcagtggcagcggcaactccagaggcggcagctctgcggggcgctcgtccacatcctccacctccaccttcgcctcctgttcagccagcggctcttcctccgggtcctcccgcagcggctctgggatcttggagggggacaggaggatgagcttgtcttcgggcgagagtgtcaggcgcttggtcccatcagctgggagcagcacatcaggggccaggccatccgcatcggc

SEQ ID NO: 31375 - DNA, 224 bp, Homo sapiens
  chr4:149364661-149364885
  binary
cggtttccctccaaccgccccctcctcgattctcctcccgcccacccaaatgctgcagttactaagcaaaaggatggggttcctaactttgatttctaaggacttttaggcttctcatgtaaggccccgttttaggctccccgctggcccggagtcagcatcagtgacgtatacacctaaatctggtcccccggccctcggcgacccgcagcccggcggcggca

SEQ ID NO: 31376 - DNA, 439 bp, Homo sapiens
  chr4:149365430-149365869
  hyper
tctcagcttcttgcaaaatctaggttagaaccgtgcaggggcagccgccgcgatcactcgcccgccacccagcacccttgccccagggccgccagcgggcaactcgtctcctgcccgcatcccacctccgctcgccaacccgcgccctctgccctgggcgcgcaacctgccttgcccggggccgcccctgcgctctccggaccccctctcgccgctgtcagcgcaaagtgactgtcgctgcactcaccttttctaggacatggtggggaggctggggcgggggaaggggaacggctagactcccgccgccgctgctgccgccgccaccagcaagtccaatattggctgatcggcggtgaggatggagaggatgataatcccggcagtggcagtcgccctgctgacggtgggtagagcaatagtgctgttaccctacaag

SEQ ID NO: 31377 - DNA, 346 bp, Homo sapiens
  chr4:149365911-149366257
  binary
gggcacccgcccgcccccagcggcggcggccgggcctctggcgggcccctctcccggggctgcgcgtccgctcggcgttgacagcggcgtccctgggagccgggaagtccggcaggaggatcccgcgcccgccgctccgcagcgccactctccgcgccccctccccgggccctgggtggccggtgacagctccggcggccgagcgcgtgtgtgagggggcggtcgcagggggagcctgcgcccccctccccgggtcacgccctcacgagcgggaggaggcggcaccgcgtccggccacccgcgggtgggaaacgggcaggggcgccggcagccgccctcccactac

SEQ ID NO: 31378 - DNA, 352 bp, Homo sapiens
  chr4:154216898-154217250
  hypo
gatcctggacaacaagaacggcacctatgagtttttgtacactgtccagaaggaaggggactttaccctgtctctgagactctatgaccagcacatccgaggcagcccgtttaagctgaaagtgatccgatccgctgatgtgtctcccaccacagaaggcgtgaagaggcgcgttaagtccccggggagcggccacgtcaagcagaaagctgtgaaaagacccgcaagcatgtacagcactggaaaacgaaaagagaatcccatcgaagacgatttgatctttcgagtgggtaaggagagggcttctgtgcccgacgcctgagctggcactggttaaggggtaactgggcac

SEQ ID NO: 31379 - DNA, 120 bp, Homo sapiens
  chr4:159093914-159094034
  hyper
cgcagccaagcaagtaacttgtaaaatgaggaatgccatcacccctcgagtgtccatcccacataacttggggttagagcacaagcgttcccaggaactactcaccttaccatcttggcc

SEQ ID NO: 31380 - DNA, 230 bp, Homo sapiens
  chr4:170679064-170679294
  hyper
cggccgcttccgagcgccgccaaccgcttccgggttcaaaagcctccaagccgaatttcagcgccgcccgggctcgccaatttaggggaaaggctccgcccattccccgccccctgagacctggcaccggacgcgttgaggccccgcccactcccgtgctgggcgcgtgcaaggagcgtcttctgtcagcgtagtctgcatctaggctttctggagcatcttccagggtc

SEQ ID NO: 31381 - DNA, 220 bp, Homo sapiens
  chr4:185939454-185939674
  binary
cggcggaacagcctattaaaggcttacttaattactttaatgactctggacaggctttaaaacgcactcggcgctgggacggcgggcttgctgggatttgtaaacaggcgatcatgtgagactcagcggtgggactaaaagaggcgacactgttttgtgagggtcctcgccccccggtgcccgcggccgctgcgcccctgcgctccgcgcccgcgactgc

SEQ ID NO: 31382 - DNA, 346 bp, Homo sapiens
  chr4:188427955-188428301
  hypo
cggccttacccgctcagaagcgcttccgaagtgcttcctccaggctccacagcggccttccccgctcgctcctttgagctcctcctcggtcgcttttgccagcctctgcctccctttctagcgtcctatttcagcacactcattttcgtttcaggcaggtgcgctttccgttcccagagcgcactggaacctctttcccgctggcctcagccttttcttggaatgccctttccagccttttcacgtggaagcaccactcagcttcaaagccacctccttgggaggccttctctgaccgcccagcctcgttcgcgccacgtgtacattctcagtgcagccagtaacc

SEQ ID NO: 31383 - DNA, 482 bp, Homo sapiens
  chr4:189552385-189552867
  hypo
cgttcctacaccggttgacctcaccgtgatgcccaagtgctaattctactccacgttcctgcaccggttgacctcaccgcgatgcccaagtgctaattctactccacgttcctgcaccggttgacctcaccgcgatgcccgaattctacctctactccacgttcctgtacctgttgacctcaccgcgatgcccgaatgctacttctactccgtgttcctgcaccagttgacctcaccgcgatgcccgaatgctacctgtactccacgttcctacaccggttgacctcaccacgatgctggaatgctacctgtactccacgttcctgtaccggttgacctcaccacgatgccggaatgctacctgtactccacattcctgcaccggttgacctcaccgcgatgcccgagtgctacttctactccaagttttgtctccgtgtaaatatcgccatgtccccagaataatgtgtctcaactatttc

SEQ ID NO: 31384 - DNA, 702 bp, Homo sapiens
  chr4:190462487-190463189
  hypo
cgaggcatcatacaacccgacttcaaaatgcaccaagccggaggcatcatataacccgacttcaacatgcaccaagccggaggcatcatataacccgacttcaaaatgcaccaagctgcaggcttcatataacccgacttcaacatgcaccaagctgcaggcatcatacaacccgacttcaaaatgcaccaagccggaggcatcatataacccgacttcaaaatgcaccatgccagaggcatcctatcactcgacttcaaaatgcaccaagccggaggcatcatgtaacccaacttcaacatgcaccaagccggaggcatcatataatccgacttcaaaatgcaccaagccgcaggcatcatacaacccgacggcaacatgcaccaagccgcaggcaccatataacccgacttcaaaatgcaccaagccagaggcatcatataacccgacatcaaaatgcaccaagccgcaggcatcatataacccgacatcaaaatgcaccaagccgcaggcatcatataacccgacgtcaaaatgcaataagccgcaggcaccatataacccgatgtcaaaatgcaccaagccgcaggcatcatacagtccgacttcaaaatgcaccaagccgcaggcatcatacagtccgacttcaaaatgcaccaagccgcaggcatcatacagtccgacttcaaaatgcaccaagcc

SEQ ID NO: 31385 - DNA, 102 bp, Homo sapiens
  chr4:2460372-2460474
  hypo
cgccctgggctggggcgggaccaggcagggaagccggagcagccccactcaccgtggcaggtccgctgtctgggcagatggccaagctgatgctgcagcgtg

SEQ ID NO: 31386 - DNA, 76 bp, Homo sapiens
  chr4:2460503-2460579
  hypo
aggaaggagctggtggagcaggtgatagaggggcagaagaacgccaaggcggcccagacgaagctcgcgaagggcc

SEQ ID NO: 31387 - DNA, 252 bp, Homo sapiens
  chr4:25656879-25657131
  hyper
agcccccttccttttcctcagcttgacggtcccagcctttcccattgcggacctagagcccagactcccagggcagaaagcgccccacagactgataaaggtgaacaatccaggctttgtttccaagggctttatccctgactttccaactggcttttatctgtgtcttcacgtctctgacctcttgagcctcacaggagctagactagaaggttcaagttcttgaggagaaggcaggggcgggagagcccc

SEQ ID NO: 31388 - DNA, 53 bp, Homo sapiens
  chr4:25657493-25657546
  hyper
acctgcggagggagcgctggtgagtaccgccgccggggcaggggcgcttcctc

SEQ ID NO: 31389 - DNA, 105 bp, Homo sapiens
  chr4:3514612-3514717
  hypo
cggcgggctgtccacggaaatgccacggccaagagcccaggtccttcacgctggcctcttccctgccgggctgggctccccaatgccttcagagttcgttgtgcc

SEQ ID NO: 31390 - DNA, 305 bp, Homo sapiens
  chr4:41218387-41218692
  binary
cggtctcttcccgacggagaggaaaacccgcggtggagtccgcggcggcgggggggggggggggggggggggcggggcggcgcgcgcaggcgcagaggccgccaggttgggccgaggaggcgccctgctccacacctgatgcaatcagccttccggaaacgggtcccgctgccgcgctcacccaggaaacacttccgcgccctcctctggccgctgagctcccggggacgggttcccaaactcccccggcccgacttcgccacgggcggtgttctgcgccccgtcggggatacgccggagaagtc

SEQ ID NO: 31391 - DNA, 410 bp, Homo sapiens
  chr4:512569-512979
  hypo
cggcccattgtctacaccgtcggggatcctttttcctaaaacaaaatggggtatgtgttctgacactgaaatacgttttagaacccacagccaggcccgtgcagtccctcggtggcgtccagtctgttggaggctttgtgcccacccggctctctcagtgtagtgggaccggctttttctcacctctggacttttgcacatgctgttcccatcagcttgatgctcttcctgcagttttttgcctggcgaattcctgggtaccgtttacatttcagcgtaaacatcagaccttcctggtccagcgcccactcccaatccaaaatcagttcctccccattaccaaaaatccctcattgataccctctacttttccttcctgggaaacttgtaattacagctgtaatgcagtc

SEQ ID NO: 31392 - DNA, 488 bp, Homo sapiens
  chr4:513008-513496
  hypo
gtgcgtgtctgtgagccctactggatccaagccccagcaggcaaggattgcacctgcttgctcgccatgctgtgtctcccctggcacagcgcctggcacagtgcctggcacgtcgtccacgctccatggatatttgtttcgatgcatgcacaggtgcacccccatagctttgtgactctctgataggcggtggggtgtggacacaggcgtccccccatccagggtggtaggtgtagcaatgaaggatgccagccctggaaccagactgcctgagtttcatttgcagcttttacccactggcactgtggcccaggtgcgtgactcaccctctgtgtctcagttgcctcctctggataacagttctgatgctcatccctgcctcatagggtcattagggaggtgaaacgagcgagccgcctagtgttgctggctactggcacttagtgcagagcacctggtgccggcagcagtggggtgggcctgcaggc

SEQ ID NO: 31393 - DNA, 76 bp, Homo sapiens
  chr4:529368-529444
  hypo
cgcgctgtggcctctccgctgagcagtgaggctggagggctcctacgtcctcccatgactgaaccgtcgctctcgc

SEQ ID NO: 31394 - DNA, 167 bp, Homo sapiens
  chr4:56413698-56413865
  hyper
cggccagaggagggaagcgaaaggaggtcgggatttatttgctcatttggagatttttcccttgcccttttattaaaaatcaagtgacagtgtaatggaagatggagaatgaagcatcagaaataaaccaggaccctaatttgcatggatttcctcgttggaacaac

SEQ ID NO: 31395 - DNA, 864 bp, Homo sapiens
  chr4:57179991-57180855
  hypo
cgcggaaacagaatacacgtccttttctccattcgcacgacagagtcttgcgtggggtgaccgatgcctgagtttagctatccctgaacttgagaatacctgcttccaggtgttcttgagaaattaagagggtcgctggcactgtgaataggaaaaggaacgactgtgggtggagaaagcaaaaggctaattgtgttttcctttccaatgttaggatccacaacatgagcaaggcggccttgagagtcggccctgcctggaccagaacggacacccaggcgaggacaagccaacgtggcacgaagaggaacccaatccgctggattccgaggaagagagaagacgccaagaagactactggcgagaactggaggccaagtgcaagcggcaaaaggcggaagcagccgagaagagacgcctagaggagcagaggctgcaggcgctggagaggaggctttgggaagagaacagaaggcaggagctcttggaggaggagggcgaggggcaggagccgcctctagaggcggaaagggcgccgcgggaagagcagcagcggagcctggaagcgccaggttgggaggacgcggagcggagggagcgtgaggagcgcgagcgcctggaggcggaggaggagcgaaggcgtctgcaggcccaggcccaagcggaggagaggcggcggctggaggaggacgccaggctggaggagcggaggcggcaggaggaggaggaaggaagatgcgcggaggagctcaaaaggcaggaggaggaggaggctgagggatgggaagagctggaacagcaggaggcggaggtgcaggggccgcccgaggcgttggaggagactggggagggccggcggggcgc

SEQ ID NO: 31396 - DNA, 32 bp, Homo sapiens
  chr4:619879-619911
  hypo
cgaggtgggtctgtgcggagcctcagggaggc

SEQ ID NO: 31397 - DNA, 239 bp, Homo sapiens
  chr4:62068395-62068634
  hyper
gacccagcctccggtcccacgtcggagctcagaagcttagggtgccaggcccccagcactataggtgggtgtgtgtgtgtctgtgcgtgtgtgtgtggtgtgtaggggtgggggcgacctcctctaccagccttacttggcggcggagtcagcgtttgagtgtgtgcgcatttttgcgccccagggacggcagagagatatttgcggggatgccggagctgatgctgctggagctgagc

SEQ ID NO: 31398 - DNA, 332 bp, Homo sapiens
  chr4:62068663-62068995
  hyper
taactggaaaatctggtttgaggaggccacgggggcccccgcagggtggcgaggaaaccttgccgtgtccccttcccctggagaggcgcagctcggcgacatgcgtgcggcgcgtgagagtcgctggtgcagcgctcgatgcaccccagaatggccctgatgagaacctcatagggtagtcatctctccagcaggttgaagtaatcgagtccagccagcgtaactcctggtccctggaattctctggccactttcctacctctgatagaaacatgcgctgcttttatttatggccagagatatcatagcagttgggagaactcgaggcttgc

SEQ ID NO: 31399 - DNA, 821 bp, Homo sapiens; identical to SEQ ID NO: 29192
  chr4:6271360-6272181
  binary

SEQ ID NO: 31400 - DNA, 44 bp, Homo sapiens
  chr4:628787-628831
  hypo
gtctgcctccttacctgcctgcccgcgtgttctgtgctgcgcgt

SEQ ID NO: 31401 - DNA, 421 bp, Homo sapiens
  chr4:628950-629371
  hypo
ttctgtgctgcgcgtccacctccttacctgcctgcccgcctgcccgcgtgttctgtgctgcgtgtccacctccttacctgcctgcccgcctgcctgcgtgttctgtgctgcgcgtctgcctccctgcctgcctccctgcccgcctgcccgcgtgttctgtgctgtgcgtccacctccttacctgcctgcctgcctgcccgcgtgttctgtgccacgcgtctgcctccctgcctgcctgcccgtgtgttctgtgctgtgcgtccacctccttacctgcctgcctgcctgcctgcgtgttctgtgccacgcgtctgcctccctgcctgcctgcccgtgtgttctgtgctgtgcgtccacctccttacctgcctgcctgcctgcccgcgtgttctgtgccacgcgtctgcctccctgcctgcct

SEQ ID NO: 31402 - DNA, 164 bp, Homo sapiens
  chr4:6950171-6950335
  hypo
cggctgtatgggtatcccactctttgttctcccatgtgtggaggtttgatttgttcagggtccaatggttacaaataatgcccaccatggtgttctcacggatgtcactggcgtgtgcgtgcctggggggtgggacaggtgggtctcccgtgggtcccactcgc

SEQ ID NO: 31403 - DNA, 82 bp, Homo sapiens
  chr4:8386747-8386829
  hypo
cgcagcagccccccaccgagggcaccatggcctggcccctgccaggtggcatggggtgaccgcattccctccccactgtctc

SEQ ID NO: 31404 - DNA, 167 bp, Homo sapiens
  chr4:8398721-8398888
  hypo
cgagtggctgagaagcgaagagcgatggccacggccagctttaggttaaggatggccaggctcacgatggagacccggcccgaggacaggctccccagggacgctccaaagcgctgcctgacgtcctacgggagggacacagatgataagctcaagcccggctgcgc

SEQ ID NO: 31405 - DNA, 126 bp, Homo sapiens
  chr4:859220-859346
  hypo
cgagtggacgtaggggcaccagcaggcggagcagctcgcaggccaggctgagaacaagcatctgcgcattcccatccaaaagggtttgtcaggaccccactttctgccgccatccccacagcctgc

SEQ ID NO: 31406 - DNA, 320 bp, Homo sapiens
  chr4:94748540-94748860
  hyper
cgcactcccgcgccccaggggcggtgcaggagagcgcccggagccagagccagggcgcgctgggcgcaagctggggcgcgcccagggccaatgagcttctgattggctctttgctgtgaatagactaggccgaggctaataggaccggagggggcgttcacctgggaattggcctcccccccttgccaaggacctccctgattgtatggggcggagtggggtgggggtgggggctggaaaggggaagcccaccctaactaaacggaggggcgggaggaggttaaactgaggaagccacgagcccgcagtaaagagagggc

SEQ ID NO: 31407 - DNA, 240 bp, Homo sapiens
  chr5:110225-110465
  hypo
cgtgcacgcacccacacagtctgcaacacacgtgcacacatccagtctgcaacacgtgcacacaccggccactctgcaacgcacatgcacacatccatacaatctgcaacacatgcacacaccggccactctgcaacacacatgcacacatccacacaatctgcaacacacatgcatacacccacacaatctgcaacacacgtgcacgcacccacacagtctgcaacacgtgcacacacc

SEQ ID NO: 31408 - DNA, 470 bp, Homo sapiens
  chr5:112629778-112630248
  hyper
tgagaggttgtttcttttttaagccactcatttcagactgaaatatcaagccagttcaggtcatttcctgagtagcactacaagttaaaacaagatccagaaaatctactaatcttcaattgcgctgcctccagactgggagcacagggggatagggtgtagggctgtggggaggtcgaggggagggggatttgtggaaaagcaaacgcccgagaaaccctagctcccgacctcagctgtttcttacctcactcagctcggccgaggagtcgtttccatatttcatggcaactccggaattcatgatgcacttttcagagctgggctctcagtcccccaggtctcggagcttaagagttggacttcacaggctcaatatccactgcttggtcccttctgccacattttagtctagacagccattttcacccaggacagttgcgaagcgcaaacggaggatgcaggcactc

SEQ ID NO: 31409 - DNA, 359 bp, Homo sapiens
  chr5:12794972-12795331
  hypo
cgcgtctccctgcggcagcgccgcgctgaggtgccacactgctggttccaacaccgcagccgccaccgccgccgccattttcgtggcggatgagggcccgtggctgcccttcatggctgctgtgccggcgaagaggcattctgacctccagggctgccgcaggcctcaccatgtccttggatgtgtgatgccctacggggacagccaggccgctgtggggccacccccgaaggccactggccactccgacgagcacccggcccagaccaagagccctgcaaacaaccgtcataggaagcggccaggccgcaaccaggctgtcgcagctcagaggcctccagggcggggtctgtttcctc

SEQ ID NO: 31410 - DNA, 187 bp, Homo sapiens
  chr5:132072695-132072882
  hyper
cgctccgctgcctccctgcgcttgctccgaggcgcaaaggcctcaccaggtgtgcagcatccaaagagccccaccgtggccacccccagacgccccgctcagcaggaagggctgcgagccagagcgcatcctccagcacagcgcctttttgataagcggcgcaggccccacgggatgcagcagcgac

SEQ ID NO: 31411 - DNA, 218 bp, Homo sapiens
  chr5:132082800-132083018
  hyper
cgggagtcctggcccaaggcgggcgcagtctccagccgccccacccctggctgggggctctgctcagggagcacggccggcaggggggaggaggcgtgcgctaggcagcagcggggatggagggaagggagggggtccgccacccgcctgtgcgcgcccagtcctgccgcatcctgggtgcgcgccgcccacccgcggggcgagtgcccaggaggcga

SEQ ID NO: 31412 - DNA, 145 bp, Homo sapiens
  chr5:135188298-135188443
  hypo
cgtctacaactccgtggtgtttggggtcttcagtaacacgcagcggttcctcagccagcaccgctgcggggagccagaggccagtcctccccgcacgctgtcagacctgctcctggccagcatggtggccggcgtggtctctgtc

SEQ ID NO: 31413 - DNA, 102 bp, Homo sapiens
  chr5:136983271-136983373
  hypo
cggtccctcgggccagggcaggaagcgagagtctctcttaccctggtgcgtggggccgcagggctaacaccaacaattcatccgatggagcatgtcgaggtc

SEQ ID NO: 31414 - DNA, 248 bp, Homo sapiens
  chr5:139742899-139743147
  hyper
cgccatggttccctcgccggcagagacaagagcagccgctagggggcagggcgccacgagctctggaccgagtcgcagactggttggagatcctcagccaacctggggttcccctcctcctcaggcttccctcgcaacagcgggagatcagaggtcccgccgtcccgcgcctgacctcggctgaggacaggcaccgccatgggccacacgcacacagcccggagttgcagcggaccggcaggtgaggc

SEQ ID NO: 31415 - DNA, 343 bp, Homo sapiens
  chr5:1409813-1410156
  hypo
cgaagccggcgatggtacgtacgttggtgacgcagaacagggacaggaggaaggtcgccaggacgatgaagagcgtgaagagctcacggtgtctgtgcagcagctggaactcatcgatgagcccggtgatcactgactccataccacccatctgcacacagagcacagggtcgggctgcaggctggcggcgctcctgaccgcagcctgggccaagacctacttgtcacccagtggacgcacacccggggatggacacggaacaggggccacatggccgtccagggtgcaggatgcctggtagtgaggacagctgttggcgagggcttctatggcggcacgacc

SEQ ID NO: 31416 - DNA, 259 bp, Homo sapiens
  chr5:14461130-14461389
  hypo
cgctctccgtctccagcaatgacgccagtccacccgcatccgtggcttccctccagccccacatgatcggggcccagagctcgccgggccccaagcggccgggcaacaccctgcgcaagtggctcaccagccccgtgcggcggctcagcagcggcaaggccgacgggcacgtgaagaagctggcgcacaagcacaagaagagccgcgaggtccgcaagagcgccgacgccggctcgcagaaggactccgacgacagtgc

SEQ ID NO: 31417 - DNA, 157 bp, Homo sapiens
  chr5:14492755-14492912
  hypo
cgtctaccaaggagaggtcgttcaaattctggccagcaaccagcagaacatgtttctggtgttccgagccgccactgaccagtgccccgcagctgagggctggattccaggctttgtcctgggccacaccagtgcagtcatcgtggagaacccggac

SEQ ID NO: 31418 - DNA, 87 bp, Homo sapiens
  chr5:148724812-148724899
  binary
cgggcacagctatgatctgctttctttgctgccgaccctgcgcccagcacggagactgtagttactactaggacctcgcctacccgc

SEQ ID NO: 31419 - DNA, 317 bp, Homo sapiens
  chr5:150536746-150537063
  hyper
cgcaggcagccctcccccgacaccacacacaagccattttataagcagctggagggtccaacgctcttgctctcagtcttgggcctcagccacacccttctctgcgggtcctttgactggcgtccagctgaccccaaccccggaccttcaaagtctcttgagcccccccaaattaaggccggcaggaccagcccctggctcagctccggcgcccaggaccctcaaccagaccctctgcagcaacgggactccctcccctccccctagccagggcgccctccgcccgcgcctctccgccccgaccccagatttgctcc

SEQ ID NO: 31420 - DNA, 42 bp, Homo sapiens
  chr5:150911164-150911206
  hypo
cggaacctgccttgctcgttcccgctgaccacgcggtagccg

SEQ ID NO: 31421 - DNA, 254 bp, Homo sapiens
  chr5:1551543-1551797
  hypo
cgtagctgtaggaaagcaaaacaccaaaaaacaggcacagctcatgaacaggagactcgctgagaggagacctaccgggccacggagacagggcacctgccgtgctggagctggctggggtaccgaagctgcaatgggcacccggcctggagctggctggggtaccggagctgcagcgggtgccccgctggggatggatgcacctctctcccctcgactgaggaagggagcaggtctgaccaggcctagagccc

SEQ ID NO: 31422 - DNA, 327 bp, Homo sapiens
  chr5:1553050-1553377
  hypo
cgatgctgacccagcgacacacagctcccttgtgttcccgctggacgctggcccggcggccgtggcctatagagcaggcccctcggtgcatgaagccagcacagccctggaaatcccgtgcaacaaaaagcctctgttccacccagaagagctctgagcagagagggccccgccgaggcctgccgcgacggactcacagatgggcgcctggagagagcgggctttcattaggtcagcccaggggtggggggagcagacagcactgctgggcttggcttgggaaagaggcgccccgaacccggaggaacttccaagagtttacaggac

SEQ ID NO: 31423 - DNA, 135 bp, Homo sapiens
  chr5:158139227-158139362
  hypo
cggcagagccgtatccgttcatgctcgtggtgacggagttatagttggtctgctggggagtggtgctcggcacgtacccgtgtggtgatacgctgcttgagttgcgggtgaaacctgaggggcgggggcaaaacc

SEQ ID NO: 31424 - DNA, 398 bp, Homo sapiens
  chr5:159707402-159707800
  hypo
cgctcagtgaaggatgaacatataagacgtgcaaagatcgtcaaaatgtaaagtgatttggaagcagccaggcgcactgagcgggaggagaccgcacaagcgcggaggaagacgtaggttttcgcttacttgcaagcaggaggcaggagacggccacggtgtagagctgcttggaggtggtgacgttgtagcgatccatgaagtggtccagcaggtagacggccaggtgccgggctgcagggcagagctggcagtggctgctcagcagggtcaggatgtccacgaagaaccggcggctcttcaggagtggggagtgggctcggaaggtgggcagcttcagttcctggaggacaggcggggcggaggggtgacggtcagggctgcctcctgagagtctc

SEQ ID NO: 31425 - DNA, 129 bp, Homo sapiens; identical to SEQ ID NO: 30252
  chr5:168195266-168195395
  hypo

SEQ ID NO: 31426 - DNA, 50 bp, Homo sapiens
  chr5:171724013-171724063
  hypo
cgaatcccacgggcgtacggcttcaggagtctcgaatcccacgggcgtac

SEQ ID NO: 31427 - DNA, 123 bp, Homo sapiens
  chr5:171859485-171859608
  hypo
cgtgcacgttgggtgacgcaaatttttcaccgctctgcacgtgcccatgtccgaaaatgcccacaaaagtgcttcgagtatcgcttttgagttacaaataaattttagcaagtaggcaaattc

SEQ ID NO: 31428 - DNA, 306 bp, Homo sapiens
  chr5:171916875-171917181
  hypo
cgggccagctcagctggggcataggcacttgaggtggccaggccagtcacaagtccaccgtggagtggggtcagtcaatttccctgactgcctcaaggacagtgggcggcaaaagccctgcgcccctgaggcaacaggaacatggagccttctccgtgtgcccgcgaggttggaagatgaagcgggtgtcggatcataggtgaggatggaggctcctgcgtccacacgcaccccacagtcgggctacctgacctggggggagaggtgcaactaccccagtgctttaaatatcaccctgtggtggcc

SEQ ID NO: 31429 - DNA, 217 bp, Homo sapiens
  chr5:17275369-17275586
  hypo
cgacgagaaagccaaggagaaagacaagaaggccgagggcgcggcgacggaagaggaggggaccccgaaggagagtgagccccaggcggccgcagagcccgccgaggccaaggagggcaaggagaagcccgaccaggacgccgagggcaaggccgaggagaaggagggcgagaaggacgcggcggctgccaaggaggaggccccgaaggcggagccc

SEQ ID NO: 31430 - DNA, 380 bp, Homo sapiens
  chr5:17275617-17275997
  hypo
ctgagcccccgaaggcgcccgagcaggagcaggcggcccccggccccgctgcgggcggcgaggcccccaaagctgctgaggccgccgcggccccggccgagagcgcggcccctgccgccggggaggagcccagcaaggaggaaggggaacccaaaaagactgaggcgcccgcagctcctgccgcccaggagaccaaaagtgacggggccccagcttcagactcaaaacccggcagctcggaggctgccccctcttccaaggagacccccgcagccacggaagcgcctagttccacacccaaggcccagggccccgcagcctctgcagaagagcccaagccggtggaggccccggcagctaattccgaccaaaccgtaacc

SEQ ID NO: 31431 - DNA, 337 bp, Homo sapiens
  chr5:17354400-17354737
  hypo
cgcggtcaaagtagtaagacatggacaggtaaacgcaggaggcgtagagctccaggttgatctggcggttgatggcggcctttagtcctggtggtagtcctggcgcacctgtgaggtggacgcggtcgtcatggcggcgactaaggagaggcggctgcgttcgcggtggtgactgcgcagtgctggagcggcggcgggggccttggggcagtccgagggcgcggtgaggaggtgacggagggctggctatgggcagccggccggtgtgggggacgagcgccaggttctgtccaagcactgttgaagcaggaaaccccgacgactctcgtggaagaac

SEQ ID NO: 31432 - DNA, 249 bp, Homo sapiens
  chr5:176560001-176560250
  binary
gagctgctgcctccattttgtttcctgctcagcttggtctgtggtggtggtggtggtggtggtgtgggtttggggtgcggccgggtagggggttcgcctgcggccgcgtctgctcggggcctgaggcctcgaagaccccagcccaagcccccaggtgagccctgcggcaggaggggggttgccttggcctcgggccgaacccagcgggctgagggcaggtgcccagtggatggggagcctgggctgtaa

SEQ ID NO: 31433 - DNA, 290 bp, Homo sapiens
  chr5:176560318-176560608
  binary
cgcgccaggtgccgcctgggttggggttcgagacgcgtagggtgcgggagccgtgtgcggcccgaggccagcgccgtgccccgaggtaggtgaggggatcggaatgccacccacgacgcccgcaggccccgacactccaaggaggcgcgcgaggcccctggggagcccgcctcaggccccgcccgggcagccgggccggcccgtaggccccggccgcgagcgggcgcgcagggggaggggagggggcggcagcggcagctccgctgattgggcggcgctctcacaagccc

SEQ ID NO: 31434 - DNA, 143 bp, Homo sapiens
  chr5:178259527-178259670
  hypo
cgcagccaggcaggcctcagtggcaaacgctccagcctccagcatgcacaagtggtccccgcttctcgtcctctagccggtcaggagcagctcttcctgccggccatccttctaccgctccggccgccctcctacactctgcc

SEQ ID NO: 31435 - DNA, 113 bp, Homo sapiens
  chr5:178580401-178580514
  hypo
cggtcctcacactgtcccgggagctgcccctacaccagcacgcctccccccagacctgggagggtcccggctgcagggctgcacactcaccgccgtgcacatcatgtagccca

SEQ ID NO: 31436 - DNA, 118 bp, Homo sapiens
  chr5:178580543-178580661
  hypo
atggagtagtgcagtcccgggagctggggcagcgccggccagtcgtgggcgaaggggtcatccagcaggcagtcataggagctgtgggggacacacggtgccgcgagcagccttcagc

SEQ ID NO: 31437 - DNA, 422 bp, Homo sapiens
  chr5:179401775-179402197
  hypo
cactggaaggagcagccagccaagagaacgaggccccgaggaagggagagagcaggcacgcagcggcgcggggaggagcggcatggaccgcagcagacggcctctccggcctgcgcacccgggtcagcacgctgagggaattaaacccattgcttcctctgggcagtcaatggtgaagcggtcctctgagagtgaagaacaagcgtgtgagttaaggtgttgaagtagagtgaacacacctgcaggtgctgctgtgccgaatgcggagcgccagccaggcggggaggctctgtcttgccaagtctgttcagagtcccgtgggaagacggtgagggaacagaaccgcttagcaacatgaggtacagaaagccacagcaggtaacaccgactctgggcttcaaagacaataggggcggggaggc

SEQ ID NO: 31438 - DNA, 137 bp, Homo sapiens
  chr5:179546922-179547059
  hypo
cgctcgggacttcagacccctgtgatgcgcagaaccacaccatgtccttccccagccatcctgggctgcagctggctccctggggggctcaggccaggcttcgcccaggctcggccctctcgcctgcagccagcggc

SEQ ID NO: 31439 - DNA, 149 bp, Homo sapiens
  chr5:179564196-179564345
  hypo
cggtagagccctaccgacgcgtgtgcaatagaggcagcccgcaggacccggccaggactgggaaggtggagcggatgtgctgggggaaggaagcccaccagaggcagcaggccctcccggccacagatgggtcctactgaccgggctcc

SEQ ID NO: 31440 - DNA, 185 bp, Homo sapiens
  chr5:1808331-1808516
  hypo
cgtcctttagggggtgtttgagacgcgggcggtgcgatgtgcgccatggctgctctccagagcttttgtgtggcttcccgcttctgcatgctcctcctcctgagcttccctcccaaatacgccatctttatagtggagtgaaggcaatcggattttaaaagaaatcttctggatggataagaacc

SEQ ID NO: 31441 - DNA, 625 bp, Homo sapiens
  chr5:1809065-1809690
  hypo
cggtattctacagtgtcgatgatccagctggtggacttttcccttctgcgttggttttgatgctgtgtcacagaatcacatattttatgttttatctttaatagatgtaatctcagtttgacacaataggactttgactcctaaagatttaaacctacatatctttatgcccaatcatttgatcatcaagaggtcaatggaaagagtgtttcctattttttacattagtgacgggcgagggactcattttacagaggttggacacttcactgtgtatgatgtgccgtgtgcttaacaagagatggcgtgcgggctgctgtgacggttctcccttgattccctcgtgaagtgcagcagcgctcttcagtttttctcacctttccccaggtgaaagcaggtgagaatggagccttgagtctgaacccagagcggggctttgtgttgtggctgggtgtgttcactgccggagcttggccgtgtgaacccggagccgggctctgtgtcgtggctgggtgtgttcactgctggttctttgtattcctgcggttgcactgagctcctggagccagacgtttgctggtgatgggcggtcagggtcacccttgagctgcgcacactaaatgac

SEQ ID NO: 31442 - DNA, 75 bp, Homo sapiens
  chr5:3454429-3454504
  hypo
cacgctcccgctagcacggtgggcgtcacccactaacacacacggcagccctggactcttctttcctggatgtcc

SEQ ID NO: 31443 - DNA, 114 bp, Homo sapiens
  chr5:3740590-3740704
  hypo
cggtgtgaggtgaccgcgtgctgtgctctgcagggccaggcctagaccccgacgtcccagtcccagtctctgtctgcccaagtgggcgggagaatctgggggagggagggagag

SEQ ID NO: 31444 - DNA, 328 bp, Homo sapiens
  chr5:3761240-3761568
  hypo
gaaaagctgtgtggaaaaacccgactgcgactttcaagcttgtgcttcacaacccaggagccgtgcattatgtccatgtgttcagatgcaagatgctcagaccccaggaaaaagggaattcggtgtaaagaaaaaaggactcttagcatggtccagtattaggacagtaacaccctgtgtgtgtgcacgtgccctccctccatctccctggcctttgcgtctctgtgtgggtgcacatgccctccctcctccctccatctccctggcctttgcgtctctgagtgggtgcacatgcgctccctccatctccgtggcctttgcgcctctg

SEQ ID NO: 31445 - DNA, 301 bp, Homo sapiens
  chr5:3761623-3761924
  hypo
gcacatgccctccctcctccctccatctccgtggcctttgcgtctctgtgtgggtgcacatgcgctccctccatctccgtggcctttgcgtctctgtgtgggtgcacatgcgctccctccatctccgtggcctttgcgtctctgtgtgggtgcacatgcgctccctccatctctgtggcctttgcgtctctgagcgggtgcacatgccctccctccatctctgtggcctttgcgtctctgagtgggtgcacatgcgctccctccatctctgtggcctttgcgtctctgagtgggtgcacac

SEQ ID NO: 31446 - DNA, 208 bp, Homo sapiens
  chr5:3932149-3932357
  hypo
cgcccggggaaagttcgtaggcaacattcatttgcacaacgagcgcactttgaaagactccagcgcaggcctgtgttcctggccgcaacaaaacacctgcttgaagcggagacaaaatgccaagctggagagagttcaaaagaacagggtgacaatcacacagtgttgaacaacagcaacggcaacccatcactacagccttttgtcc

SEQ ID NO: 31447 - DNA, 463 bp, Homo sapiens
  chr5:41510373-41510836
  hyper
cggcacgcgctcgcctggcctgagacccaccctggaagacgagtttccctcccgcgggcatcgtggcaagttaccacttagtggcagataaagcagggcggggcaggtggagcgggcgccgagcgcctagcccgcagcccctgcgcgcctacctggaatggctaaattggtgagggggatgctgtgcatgctctccggcagagttgccatccagtcggctaatttcagctcgtttttcccctgagacgaggccatcgtgccagtcggcgtgcagcgcgctggtcccagcactcctcgggcaggctggcaggctgctgccgctaatccaatgtttgctctagccccgctagagtttacactcctctctgcgccacacccacaggatggcgcagacacatgctaattttaataattattcaaaacaccccgtgctcccttagtgcctccgccagactccgctgga

SEQ ID NO: 31448 - DNA, 173 bp, Homo sapiens
  chr5:462216-462389
  hypo
cggtggaggccggcctgcccagccgctgtgttgaacctgaaccctttccttgcagggaatccatagtcagtttaaaaagaaagtatttaaagaatgaagtggaagagggtgtgtctccgagccagcccagcatggacgggattttagacgccatcgcgaaggagggctgcagc

SEQ ID NO: 31449 - DNA, 740 bp, Homo sapiens
  chr5:465064-465804
  hypo
cgctcctcctctgcggtgagatgccagagccgtggcggagcgaggaggagtgggctcagagcctccggggagccaccgggagccccagcctgggtttcaatgagggtgctcctggccgccagagccgtggagcctgccgctgaccgcgcgtgtctccccagaggatgacggccgaggcgcaccggcgcgtggtggtggagtacctgcgggcggtcatgcagaagcgcatttccttccggagcccggaggagcgcaaggagggtgccgagaagatggttagggaggcagagcagctgcgcttcctgttccggaagctggcgtccgtgagtgtcgcgcaggtccgggctggagaaggcctgtcgctccgcggccctgttcagcctccaccccgggactcgggccagtagatgggagtgtgtcgtgtgtttgtcaggcggggggagcctgggtccaggtcctgcctgaccttgtggttggacacgaatgtccacagaggtagacgcgccggccccgccggcttcccgaggccgcccacagctccctgacggacgcttcccagtctgtcctgcgctgcgaggtgctggctgcctcccacggtctcgccctcaccccagacccctggccctgtcactgagctttcagagtagatcctgaggagtcaggtgaagagggaggttcccagtcaggaaggggctcagccagaatccagctgctcccagcgccgcgggacagccgagggc

SEQ ID NO: 31450 - DNA, 201 bp, Homo sapiens
  chr5:520018-520219
  hypo
cctacggctgcgcgaggcactgcagactccagatacccgtctcgctcctgcctgcccttccagccagggttcaccaagatgtggggcggcctgggcctccgccatcacatccctcagcaacacaagctccacttcgagagcctgcccccaccgcccccacccagccccactgtcctggtttccccgtgggcagtcactgcc

SEQ ID NO: 31451 - DNA, 259 bp, Homo sapiens
  chr5:676510-676769
  binary
cgctggcgccgcagaggtgggccccacagccttccacacaggggcatctgacccacggcccggccccttgcaaagccaaggccgcagagggggaaggtgcaggagctctgagatgaaagaggtgatgagtttgcggcaatgtaggaatgaaatacatcggccacaggaggacgcaggtgcaaaccaccgaaataaagccattgccacacaggcggacaggacggggctcagggagaaccgctgcttttctcgggtgcga

SEQ ID NO: 31452 - DNA, 356 bp, Homo sapiens
  chr5:676926-677282
  binary
acacatgcacacatgcgcacacgtgcacacacgacacagaaacgcgcacacacgacgcagaaacatgcacacacgacgcagaaacgcgcacgcgcgcatacacgacgcagaaacgcacgcgcgcacacgacgcagaaacgcgcacacgtgcacacagaaacgcacacacgacgcagaaacgcgcacacgtgcacacgcagaaacgcgcacacgtgcacacacgacgcggaaacgcacacacgtgcacacagaaacgcgcacacgtgcacacgacgcagaaaaagcaaacggcacgatgcggtttcaaggtggtggccggagccgcctccttggtgccctttgccattttgccgccc

SEQ ID NO: 31453 - DNA, 64 bp, Homo sapiens
  chr5:73205673-73205737
  hypo
cggccggcagaggagcctgcccgcggtgctccttccgggtggccccgaggtatggaccttctgc

SEQ ID NO: 31454 - DNA, 164 bp, Homo sapiens
  chr5:73843900-73844064
  binary
cgctcccgcccgccagcttcatgaaggggagatcagcccaggctaacagtgggtggtggtggatcccaagcaccaagaatacagaatgcccttgctgaagaatcaagcaatgagttggagcttatgggaagcaggtgtctaagcaagaaggcaccggtgcagcc

SEQ ID NO: 31455 - DNA, 181 bp, Homo sapiens
  chr5:73932104-73932285
  hypo
cgactgcatgcagccagcactgcccggtggcaagggaaggtcctatttccggcatggagaaggacgtcagtgaagagacgctgctggcgtaaaagattcaggtgagtgaggacgctgtcagcgtaggaggacttgtgaaacagatagatgttaatggagccgctgctggccctggacttgc

SEQ ID NO: 31456 - DNA, 180 bp, Homo sapiens
  chr5:78531507-78531687
  hyper
cgagccccacatagttcagcacaccgttccccgcggcaacacgctacttctgaacgcaggagcgactctccgtccgggctccctccaggagaatggaggcaaatgtacattcgagggtctcaatacctggaattcgaaacgtctcagttcctccgccttagttcctcttttcccgggttc

SEQ ID NO: 31457 - DNA, 1538 bp, Homo sapiens
  chr5:78531956-78533494
  hyper
cgaatggcaacattgtggcgatgctgaggcgcagagtttaggagacgggttcatcagtcaggccggctccgggctttctgcagcagcaccaggggcgggggcggggatcttgacctgggcgagcgaccgggacgcatacagcgccggcctgaccccgcgggacccgcgcctcaccaccggagcgccgcagacgcagctccacggcctcgcgcggggggcggcgggcggccgcgaggcgctgcggcagcgcggagcttgtaaacagatccggccgcaggtgaccatgtgaactacctgctcccgggacgcttattgtccttctctcgatccgcgccacaaaggagctcggcggtcggggcgcggagggacaggcgaacgagccgggagagccggccggcgcactaagatggctgaaggcgcccggcgagggtgagcggggggcgcggcgcagccagcggggagtcctcgggcgggccgggccggcggcccttccccgcggcgagaagccggagccaccatgtcgttcgcgctggaggagacgctcgagtcggactgggtggctgtgcggccccatgtgttcgacgagcgcgagaaacacaaattcgtctttattgtggcctggaacgagattgagggcaagtttgccataacctgccacaaccggacggcccagaggcagaggagcggctcccgggagcaagcgggggcgcgagggggcgccgaggccggcggagctgcgtccgacgggagccgcgggcccggcagcccggcgggcaggggtcggcccgaggccactgcctctgcaactctggttaggagccccgggccccggcggagctcggcctgggcggagggcggctctcctcggagcactcgcagccttctgggggacccgcggctgcggagtcctggcagcaaaggggcggagagtcgtcttaggagcccagtgcgggccaaacccatcccgggtcagaaaacatctgaagccgacgatgcggcgggggcagccgctgcagcagcccggccggcgcccagagaggcccaggtgtcctctgtacggatagtgagcgcctctgggacggtctccgaggagatagaggtgctggaaatggtgaaggaggacgaggcacctctggcgctctcggacgcggagcagccgccgcccgccaccgagctggagtctccggccgaagagtgcagctgggccggactgttttctttccaggacctgcgcgccgtgcaccagcagctgtgctcggtgaactcgcagttggagccgtgcctgccggtgttccccgaggaaccttcgggcatgtggactgtgctgtttgggggcgcccccgagatgaccgagcaggaaatcgacactctgtgttaccagctccaggtctacctgggccacggcctggacacctgcggctggaagatcctctcccaggtgctcttcaccgagaccgatgatcccgaggagtattacgaaagcctcagcgagctgcggcagaagggctacgaagaagtgcttcagcgggccaggaagc

SEQ ID NO: 31458 - DNA, 383 bp, Homo sapiens; identical to SEQ ID NO: 30271
  chr5:9122712-9123095
  hypo

SEQ ID NO: 31459 - DNA, 94 bp, Homo sapiens
  chr6:10420268-10420362
  hyper
gggcacggctggccttagcggatctgactctgccaaccccggggccacttcagcgttagattccacatgaaactgttgctcaataggtgaagac

SEQ ID NO: 31460 - DNA, 36 bp, Homo sapiens
  chr6:105750354-105750390
  hypo
cgggtacggccgctccttccgcggctgctgcttggt

SEQ ID NO: 31461 - DNA, 83 bp, Homo sapiens
  chr6:105750646-105750729
  hypo
gcagcaactctttctccttcccgtgaaggtcccgagacttgatcttagccattgctgcacaggccgcccccgccgcctgctcc

SEQ ID NO: 31462 - DNA, 72 bp, Homo sapiens
  chr6:108882975-108883047
  hyper
cgttgcgtgccctacttcaaggataagggcgacagcaacagctctgccggctggaaggtgcgtacccacccc

SEQ ID NO: 31463 - DNA, 66 bp, Homo sapiens
  chr6:112021634-112021700
  hypo
cgctccttaaacagcgctacaccagcagacgaccacacacacggtggaagatcagacgccacacac

SEQ ID NO: 31464 - DNA, 69 bp, Homo sapiens
  chr6:119030678-119030747
  hyper
cagtaacaacaattggcgtgtgtgtgtgtgtgtgtgtgtgtgagagagagagagagagagagagagagc

SEQ ID NO: 31465 - DNA, 74 bp, Homo sapiens
  chr6:119510833-119510907
  hypo
cgattatatgattcatgacaagtacgggcaatttcagccccgagttcaaggtagtgttgggccatgccttcggg

SEQ ID NO: 31466 - DNA, 70 bp, Homo sapiens
  chr6:119510942-119511012
  hypo
cgaagcaggtcaggtggcccatcttgtgctccaggaggccccctttccactctgcgatataagttagtcc

SEQ ID NO: 31467 - DNA, 517 bp, Homo sapiens
  chr6:128840521-128841038
  hyper
cgagacgctccacttgtctccttttgggttctccggcagaaggcagacatttacagtccgcttccagccccaggccggatccggggagcgcggggccagagccccaggccggatccggggagcgcggggccagcctggcggtggttttgcccgaggagcgggctcccacgcgcgagtcaggcttcctccaccaggcgcccagacctcgatgcccatgaacgctcagagtgggtccttagaaccgcatttcaacacatcttacagggctccgccaacacacacacagaacatgctccaagcagtgcccgagcgcacagggcaagcccgggagcaacccagagctgggggaggagaaaaggggactccgggagggacggggaagtagttagacaatagtcaggggaggttattcccgggacaaaaagcacctggcaaagcgcgccgaggtcagtcccttcgaatctccacatttctgacaatggcttcccagggaatttgtttaaacacccaagtggca

SEQ ID NO: 31468 - DNA, 477 bp, Homo sapiens; identical to SEQ ID NO: 29306
  chr6:128841101-128841578
  hyper

SEQ ID NO: 31469 - DNA, 294 bp, Homo sapiens
  chr6:128841719-128842013
  hyper
ctcggcggaggctgctcctgttagtcaagagttactttgctcggggagggacgggggcggagccgggggtgacgtcgccccgcgggctccgggcgcttctgaggaatgcgggctcgggcgcggcgccgccaccgcctcctgccggagagacgcgcgccagccccggccgcgcgccccgcgccgcctttgttcgcagcctgggccccgccgccagccgctgctcggagggagcgagcgagaaaggggagccggcgcagctcgctgccctgttccagaactcagaatttgagaggc

SEQ ID NO: 31470 - DNA, 429 bp, Homo sapiens
  chr6:128901277-128901706
  hypo
cgatgtcgacactctgcacatgctcctcaaacttggtgatctcctcctccagcaagtctgtccccactttgtcgtcctccaccacacactgaatctgcatcttccggataccatagcccacggacgccagcttggaggccccgctcactagcccatccagctggatagagcgcacacatgcctccagctgggtcatgtccgtcttattgtcccaaggcttgatgtccagcaggatggaggacttggccaccagcgagggattcttggccttcttggcgtacagccgcagccgctcctcccgcagccgccttgcctccttgtcttcctccttattgtcgctgccaacagatcaatgtcatcgtcctcgttatcctctgcttcttggccggggtcgtagtaaggggggcgaggggaggggcgctccacttg

SEQ ID NO: 31471 - DNA, 498 bp, Homo sapiens
  chr6:1313407-1313905
  hyper
cgcggcagctacacgggctggcgcaactccgtgcgccacaacctttcgctcaacgactgcttcgtcaaggtgctgcgcgacccctcgcggccctggggcaaggacaactactggatgctcaaccccaacagcgagtacaccttcgccgacggggtcttccgccgccgccgcaagcgcctcagccaccgcgcgccggtccccgcgcccgggctgcggcccgaggaggccccgggcctccccgccgccccgccgcccgcgcccgccgccccggcctcgccccgcatgcgctcgcccgcccgccaggaggagcgcgccagccccgcgggcaagttctccagctccttcgccatcgacagcatcctgcgcaagcccttccgcagccgccgcctcagggacacggcccccgggacgacgcttcagtggggcgccgcgccctgcccgccgctgcccgcgttccccgcgctcctccccgcggcgccctgcagggccctgctgccg

SEQ ID NO: 31472 - DNA, 144 bp, Homo sapiens
  chr6:13386531-13386675
  hypo
cgtcaggtccaaatcccccttttcatttataagcaagcaaactgatacacctgtgcactagatacacaccgcgtaggtgaaagctgactccaggtagcacctggcctgactgtgaaggaatctcgcgtacttcggaggacatgc

SEQ ID NO: 31473 - DNA, 97 bp, Homo sapiens
  chr6:136980882-136980979
  hypo
cgtgtacagagttttaatttggaagataaaaaagttcgggaggtgaatagtggtgttggctgcgtaacagtgcgaatgttcttaatgccactgaagc

SEQ ID NO: 31474 - DNA, 369 bp, Homo sapiens
  chr6:143247975-143248344
  hyper
cgccgggcgcggcgagccccactttctcccggcaggaaggggggaggccgagagcatttcctgttgtgcagctgagccctgcggagacgtcattgcattcatgctccctcgggtgtcagcggacggggggccaaagttcaagccgcgtccagggcaggcagcgcgcggcggcgcggcggcgcggggcgggcggccagggctcccctctcccgctggcgctcccggcgcctccgtccccggccggcccagcgctgctaccggaggccagccctggggctccgcggggaagagctgctcttcctcccggaggaaaccgagctcgcaagcccagcgctcccagccgcagactgcaggctgccctcctccacc

SEQ ID NO: 31475 - DNA, 462 bp, Homo sapiens
  chr6:150654152-150654614
  hypo
cgcgagttgatagtgcgtgagttgatagtgtgtatgagttgatagtttgtgccaggtgatagtgggtgagttgatagtgtgcacgagttgatagtgtgcacgtgatagtgtgtgcacgagttgacagtgtgtgagttgatagtgtgtcagttgatagcatgtgagttgatagtgtgtgcatgagttgctagtgcacgagttgattgagttgatagtatgcaagttgatagtgtgcacgagttggtattgtgtgcaagttgatagtgtgcacgagttgatagttgcaggttgatagtgtgtgcacgagttaacagtgtgcaagttgatagtgtgtgcatgagttgctagtgcgcgagttgattgagttgatagtgtgcaagttgatagtgtgcacaatttgatattgtgcgcgagttgatagtgtgcacgagttgataatgcgtgcgagttgatagtgtgtgc

SEQ ID NO: 31476 - DNA, 752 bp, Homo sapiens
  chr6:150921277-150922029
  binary
cgccggccccctgcgcgcccctccgcagtggggacggagggccttggggggcgccgagcggtggggacagagggcgccgggggcaccgcgcggtggggacggagggcgctggggggcgccgcgtctcgggggtcggagtcgggtcggggatgctgcccgccgccgccccgcttggggttccgcgcccccaagttcccggtgctcccgcccctcgccccagcggctgcaacatcagcgcgcagaggagtttctgcgagcacccgggagttgtagccaccgcttccccacccccgactcagcaggacagccccagaacgggaccccacagccagtcagctgggtcagctccccagcagcgaagccgggagcccgaggacccggggacgcgcggtgggggcggcggccgagctgctgcggcgctcagggcttgggggcgcccccgttctgcagatgcgcttttcagggggtggggagtcaagagcctgtggctcttccgtcacggggtaaacggtaacacctgggcggccgcgactctgcgagcgttctggcctcggcgggcggcggggaaccgcagtgatgcccgagctcgccccttttgtgtcctcgcggtgagccccgttccgaagccggaagcttgggaacgctctaactgggagaacggcgctcggctggtcaattcattccgctcctcggaaacaatgagctggatccttgacttgaatgtgctggcggagcggggtttgtaagccggc

SEQ ID NO: 31477 - DNA, 139 bp, Homo sapiens
  chr6:1515515-1515654
  hypo
cgttgccacgttcatcccggggctggagctgctgcttcacactgacttacacggtgagcagcggcggcaggggaggaggtggaacccgcggcgagctgctgcttcacactgacttacaccgtgagcagcggcggcaggg

SEQ ID NO: 31478 - DNA, 123 bp, Homo sapiens
  chr6:1515702-1515825
  hypo
cacacactcacgcacttgcacacgctccaaggcccggaaggaagctgaggccggcccgcctcccgccaaagggccgaggaatcccgccacctaacggcaggggcaggggccacagctggcaac

SEQ ID NO: 31479 - DNA, 256 bp, Homo sapiens
  chr6:151687263-151687519
  hypo
cggcttcaggcacttccatggcatctttcccgaggtcagctgcattgctacagagagtcagggggacgcgactttctccctgttggctagatgtgaaaggtactcctgtgtggatctggaggtgttcacgtaagctgctccggagagtgaagcgccgtccacacaggtggcaggcatagtactttggaaagctcccattcctcttcatgatgcttggcttgacgtgggctattgtgagggacgcaggctgctcatc

SEQ ID NO: 31480 - DNA, 96 bp, Homo sapiens
  chr6:152527379-152527475
  hypo
cgagttcggcctgcaaggcggcctcagcgccactgtccgccgagagaaggagttgcttgccagcctccacagtcaggatgtagctgccttgttgcc

SEQ ID NO: 31481 - DNA, 254 bp, Homo sapiens
  chr6:157502185-157502439
  hypo
cgaccgatacctcaccttcatggaagagagaggctctcctgtctcaagtctgcctgccgtgggcaagaagcccctggacctgttccgactctacgtctgcgtcaaagagatcgggggtttggcccaggtaagaatgagtgagggagggggtgaaaaaggaagcattgtggataagttcttacagtggctttctttgaatgtgtggactcattttttttctcacaaaggaaaagctaagcctgtgtgaaagtcgc

SEQ ID NO: 31482 - DNA, 195 bp, Homo sapiens
  chr6:160452681-160452876
  hypo
cgtgggcagaagcatcgattatgagtcaaacagaagagggttgggcctgcagctctgcaacttactaattgtgtgcgacctgtttgtaaacctggcacctagtgcctggcgtgtagcaggtgctcagtgagtatttacggaatgaatggtgctgggaagcagcacggctatgcccggtgctaagcccagtaagtc

SEQ ID NO: 31483 - DNA, 116 bp, Homo sapiens
  chr6:164441373-164441489
  hypo
atattcaagggtacggatgtgtctcagctgggcagggcactcgctaacccccagctggggcgggagcaggggtacctgcggcaccagaggtacgtggggcctggccccggctgcgc

SEQ ID NO: 31484 - DNA, 1300 bp, Homo sapiens
  chr6:167314769-167316069
  hypo
cgggtgaacacacagaggggagagctccgtgtgaacacaaagggaggagaacgcctggtgagcacacacggggagagaacaccgcgcggacccacaagggggagaatgcctggtgaacgtacagcgggaggggagaacgctggtgaacgcacagcggggaaaacgccatgtgaacgcacaaaggaaggagaacgccaggtgaactcatacagggggtaggaacgccagaggaaagcacacagtaaagagaaggccgtgggaacgcgcaggggagagaacgccgggagaacacagagggaggaaaatgccaggtgaacgcacaagggggaaaacgcctggtgaacgcacaaaggagaaagccaggtgaacgcacaagcagcagaacgccaagtgaacgcacgaggggagaatgctgcgccaacacacacgggaaacacaaccgcgcgagcacgcagtggggagaacggcacgcgaacgctcagcaagaagaacgtaagttgaacggacagcggggagaacgccgccctaacacacgcgggaaataacgacgcgtgaacacacagcagggagaacgccgcgtgaaagcacaggggggagaacgccgcgtgaatgcacacacgggaaataacgccgtgtgaacacacagcggggagaacgccgcgtgaacgcacacaggggaaataacgccgcgcgaacacacagggggaagaacgtcacagggacgcacagtggggaaacgccatgtgaacgcacaaagaaagaacgccacgtgaactcgcacacgcggggagaacgccggggaaacgcacacagtaaagagaacgcagtttgaacgcacaggggagagaacgccacgtgaacacacagaagggagaatgcagtgcgaacacacagaagggagaacacctggtgaaggcacagaggggagaacgccgagcgaacgcacagggtggagaatgccatgtgaacgcacaaagaaaggagaacccctggtgaacgcacacaggagaaagaatgccgaggaacgcacagagtaaagagaccgccgtgggaacacacaggggagagaacgccacgtgaacacatggggagaacgccgcgggaacacacagaagggcgaccgcctggtggatgcacagaggggagaacgccaggggaacacacacaggggagaacgctgggcgatcacacagggtggagaacgccgggtaaatacacactggggaaaacgctgtgcaatcgcatagagggaagaacgccgggtgaacacacagggtgcgttcttccatcatgcggctgc

SEQ ID NO: 31485 - DNA, 233 bp, Homo sapiens; identical to SEQ ID NO: 30280
  chr6:168137821-168138054
  hypo

SEQ ID NO: 31486 - DNA, 314 bp, Homo sapiens
  chr6:169641077-169641391
  hypo
cgccaccctccctgccccggtctcctgccatcgaccccctccctgccccaggctcctgccctcgccgccctccctgccccggactcctgcccctgccgccctccctgccctgggctccatctcctggcatcatttacttcatgccctctgggtacgagtgacagtcagcatcactgcaccctggttagccatgtgtatgttgtggggcaccgtggcccggagcacctcattatgttcagtccctttctctaaactgcgagctgcccgtcctgagccccgcaggcatcgctctctcttcctggccgcgctgtgcc

SEQ ID NO: 31487 - DNA, 678 bp, Homo sapiens
  chr6:170454200-170454878
  hypo
aacagcggtgcccttgagcacgtggagaacggcagtgccctttagtacatggagaacagcagtgcccgtgagcacctggagaacagcggtgccctttagtatatggagaacggcggtgcccttgagcatgcagcgaactgcagtgccctttagtacatggagaacggcagtgccctttagtacatggagaatggcagtgcccgtgagcacctggagaacggcggtgcccttgagcacgtggagaacggcagtgccctttagtacgtggagaacggcggtgccctttagtatatggagaacggcggtgcccttgagcatgcagcgaactgcagtgccctttagtacatggagaacggcagtgcccgtgagcacctggagaacggcagtgccctttagtacgtggagaacggcggtgccctttagtacatggagaacagcagtgcccgtgagcacctggagaacggcagtgcccttgagcatgtggagaacggcggtgccctttagtacgtggagaacgacggtgcccttgagcacgtggagaacggcggtgcccgtgagcacctggagaatggcggtgcccttgagcacgtggagaacggcggtgccctttagtacatggagaacggtggtgcccgtgagcacgtggagaacggcagtgcccttgagcactcggagaac

SEQ ID NO: 31488 - DNA, 235 bp, Homo sapiens
  chr6:18368676-18368911
  hypo
cgtcagcggcgtcttcagcgtgatcttccgggtcaggactgaggtcaggtccacctcatcagctatgaagtctatgaatcctgggagaatcgggacgtcgttgtaggtgaggccgtcagcgctggtgaagagctgctgtgggatgagcccgtcctcaggcacgtagccggtgcagcagttgctcagatagtccgccatgctgcgggagaccccgcgaccccacgtaaacacccgc

SEQ ID NO: 31489 - DNA, 177 bp, Homo sapiens
  chr6:21602337-21602514
  hypo
cgccccagctggactaccaccatggaactcagggccgaatacctcagggagaagctgcagcgggacctggcggcggagcatgtggcggtggaggacaacacgaccctcaaccattgcgcctgtagcttctggcggtgtcggccaagttcgaggggaagccgctgcttcagagacacc

SEQ ID NO: 31490 - DNA, 873 bp, Homo sapiens
  chr6:24910930-24911803
  hyper
cggctgcttagcattcaacgctcattcaagtcgaggacacccctccccacacagacctcaccgcgttgtacgcaaaatcagaagcaaaaaaggagaaatgaaaaggtgaacctacctaacgacgacggctccttgtcatgtcaggggcacactcagggttctctggcatataaaagcctccgcaccaatgcaatgcccggagctgcccgcacctccggctttgcagacagcctgagctggctcacttgggtgaaggggaccccgggaggaagtcgggtggacgcgagctgtccccagcgccggctgccctgccgcgtccgctcgcagcagctgcggcgcgcggggtgaagttgcggggctggcgggcgcgagggtggcggagcgcggagctagagcggcggagcgggcggaggggcgggagccgtgaggagggggaggcgcggcgcgggggccggcggcgtcacttgtgctgggaggggagggcgggtggagacagctgcttgacagctacttcagcccaactccaggaggctgcgcttcggtgcctgcttccagctgatcgccggcacgccaggctcctttgcaagagctggcgcggcagctttggagtgacccgtggaatcgcgccggggagcgagcccggtggatccagcgcgctggagggagagggcagaggaaaggagccgaggcaaggaaaggccctttcagctaaccttttgggatctttcatacaagctgggctgtgcattgaaaaaaatgaggcggtggtgtatggggtgggggcggtgtgagggtgaggttggctgcccacggcaagggttgtgctggaaagccccgctgaagagggctgctttgtagggcactctctctacc

SEQ ID NO: 31491 - DNA, 49 bp, Homo sapiens
  chr6:36214794-36214843
  hypo
tcctcctgccccctgcctggtggtttcaccatccacttaccagcccgcc

SEQ ID NO: 31492 - DNA, 87 bp, Homo sapiens
  chr6:3734377-3734464
  hypo
cgtttctccctgttaaatttcgtctcactatgctcgccccttagggtccacgtgggccatgtgttcatacacatcgctgatagagac

SEQ ID NO: 31493 - DNA, 219 bp, Homo sapiens
  chr6:38118812-38119031
  hypo
cgttttgaaagaggcggccagcagactctggggacctcagacgtctgtgctccacatgcgtatcggccgctctagagattgcctgggaagctggagggaatgggagacaccccggtgcagctgcgccctgagttctctgagcctggctcctggctccctgcagccctcccctccttgttcctgacccagagtgactttacctgtaccggctccctgctc

SEQ ID NO: 31494 - DNA, 210 bp, Homo sapiens
  chr6:3880057-3880267
  hypo
cgtgattagtaacaaacaactgtgagcacctcagagatgttcgacgcttgaaaagttgggttctgggggagatccctgggatggaggtgacggtcccgcctctgatcagaggaccgcggctccctggatggatctcatccccacacccggcactccagtttgatcctggcattttataggtgcagaaactgagaagccacgcgactgccc

SEQ ID NO: 31495 - DNA, 291 bp, Homo sapiens
  chr6:40360252-40360543
  hypo
ggcgggccctgcggcggggccccggctggtgcgctgcttggaggcggtggctgggcgccgttggtctgcgagtacacattgctcacggccgctgccatcttgctgggggcctcgtggttgcagaccttgtagcgcaccatgaggatgacgatgaagaccagcagcgtggccacgatgatgcccccgatgaccaggatcatggtgccgcccagaatctggctgtgcatggactggcactgcgggtagtcagccttggtgaagaactgggcgcagcccacgatgttggtggcc

SEQ ID NO: 31496 - DNA, 35 bp, Homo sapiens
  chr6:42145871-42145906
  hyper
cgctgcatctccgagggtccgggtctcccctcagc

SEQ ID NO: 31497 - DNA, 45 bp, Homo sapiens
  chr6:42145975-42146020
  hyper
cggggcccggatgggctcacggcggccgcgcccctcgcccaggac

SEQ ID NO: 31498 - DNA, 63 bp, Homo sapiens
  chr6:42928259-42928322
  hyper
cgagggtcctctcccgccgtgggattgcacagagggctgggtccgcaggctggctaaaaggac

SEQ ID NO: 31499 - DNA, 76 bp, Homo sapiens
  chr6:42928454-42928530
  hyper
cttatgctttaagtgcggagcgggtggctgcggagccaggcgcggcgcaggatggtggacagcgtgtaccggaccc

SEQ ID NO: 31500 - DNA, 236 bp, Homo sapiens
  chr6:43096747-43096983
  hypo
cgtcctcccaggatgcactgcaggggcgccgggcgctgcttcgctgtgaggttgaggctccgggcccggtacatgtgtactggctgctcgatggggcccctgtccaggacacggagcggcgtttcgcccagggcagcagcctgagctttgcagctgtggaccggctgcaggactctggcaccttccagtgtgtggctcgggatgatgtcactggagaagaagcccgcagtgccaac

SEQ ID NO: 31501 - DNA, 177 bp, Homo sapiens
  chr6:44044201-44044378
  binary
cggggcctgaaggctaacttctggccttcctgcttcgggaaatcattccaataaccgggaaaaaagggggcccgaggacagagcccctgccgggccccagggggagtgtcgtcggctcctttgcgtcgccggccggcggcgtggcggggactctggccggcagcctcccgcgccgtc

SEQ ID NO: 31502 - DNA, 97 bp, Homo sapiens
  chr6:44044450-44044547
  binary
gtcgcgggcgccgcggcagggaaatgtgggggcgggccggcgcgccccctcccccccgcctacgctggcccattcataaaacctgcaggcgctgccc

SEQ ID NO: 31503 - DNA, 37 bp, Homo sapiens
  chr6:44094355-44094392
  hyper
cgtccgtctcttacggtggcaaagttcatttatcgtc

SEQ ID NO: 31504 - DNA, 39 bp, Homo sapiens
  chr6:45631098-45631137
  binary
cgccccgcgtctggtcgactggctccccggttgcccttc

SEQ ID NO: 31505 - DNA, 120 bp, Homo sapiens
  chr6:550612-550732
  hypo
cgtttcgtgaataaacggccagaaggaaaacagtgaataagcactggaaactcgcccaggtgagggagggacgaggacgctacattcccctccagtccccgggcctggagtcaccatgac

SEQ ID NO: 31506 - DNA, 31 bp, Homo sapiens
  chr6:64150818-64150849
  hypo
aatgactattgtgccgggcacggtggctcac

SEQ ID NO: 31507 - DNA, 194 bp, Homo sapiens
  chr6:7247353-7247547
  hypo
cgtggccagcaaggcagacaagaggaagaaggtctgcagcgtgtgcaacaagcggttctggtcgctgcaggacctgacccggcacatgcgctcccacacaggtaaccagggcaggccaggtccccggcccaacaagaggaggcgagccgggcacctctcctaggagctcccctgaagcggcgctggaggccacc

SEQ ID NO: 31508 - DNA, 192 bp, Homo sapiens
  chr6:74079530-74079722
  hypo
cgcggagcgcgctcgaggcggctttcgcaagacctcttccagacccaggcgcgaagctcgggctctcttttaccatattcgacccgctccgccccttccggcggcgcctcgcaccgcgtcggggtgagcgggtgcaagcgacgccccggcatagcggcaccattggacacttcctgcgctgcttcaatcgcc

SEQ ID NO: 31509 - DNA, 244 bp, Homo sapiens
  chr7:100167136-100167380
  hyper
cgagcggggcgtggcaggagccagcagggtgcatggaggccccgttccaaagccctctaatcgccagcgccaccaccgctgccacaagtccgatcactggcctcacaccgaggctttctcggttgccccgacgacgtgtccggaccgcagtcagctgatcggtagagacgcccccacgctctctgcccctataaaggctcagtcttggggtcgaggccgcctctcttggacttccctactcaaa

SEQ ID NO: 31510 - DNA, 240 bp, Homo sapiens
  chr7:100167621-100167861
  hyper
acccctgctggcctctccccgtgctcaagacacgagacccagccgtctctgcctcttctgcagccactttattgccttcgcccctgaatgaagcccgcaggcggcggccccggggagagccgggaatggccgccgtgcccctcagccagccgctgccctgggcctgccctgccgacgtgcggttctgcggccacctgcgcgcagacccgccgcgtcccgagtgttccgagagcgagcaga

SEQ ID NO: 31511 - DNA, 145 bp, Homo sapiens
  chr7:100168054-100168199
  hyper
tgccggtgaggcccgagccccgggcttccgggggcctcgggggcttctggctgtggtttctccgtggctcgcccctcccccaggtcgccgaaagttcaaacattaaaggggcaggtttagagttctccgggcacaggcccggccc

SEQ ID NO: 31512 - DNA, 333 bp, Homo sapiens
  chr7:1001822-1002155
  binary
cgatgtgggccgcgaccgtcccggcccgtgcaggaccactgtgggcgaggggctgtgaccgtcccggcccgtgaaggatcaatgtgggcgaggggccgtgaccgtcacggcccgtgcaggatcaatgtgggcgaggggccgtgaccgtcccggcccatgcaggatcaatgtgggcaaggggccgtgaccgtcccggcccgttcaggacagtggcctataacctctgacatggggtcacaggagaatgcggcttctgccttgcccctcgcccctgccccgcctccacatacacagctgggctcccctgcagcctccacgctgcagaggccacgc

SEQ ID NO: 31513 - DNA, 217 bp, Homo sapiens; identical to SEQ ID NO: 30302
  chr7:100405032-100405249
  hypo

SEQ ID NO: 31514 - DNA, 197 bp, Homo sapiens
  chr7:101603073-101603270
  hypo
cggaggatttcaccgcgtacatattctctgtttggacatggtacaacctgtggacccttttaaacatagttacatgtttgactctttatagggtaataactcgattaattttgcaaggctttttagaataccattgttctcttgaaaagaacaggtttgctgttttaacaagactttaatgccatcgagatgcctca

SEQ ID NO: 31515 - DNA, 242 bp, Homo sapiens
  chr7:101603308-101603550
  hypo
aatgaaattgagagagctttttccggcgcctggttggttggggcggcctccgttcggtgcttttttcatcctcgacccagtgaccaactgtgtttgccctgatgtttctttcaattccaccattccgaaatgtctccggaatctgtcgttttagcttttgcagcaaggttcgttgtgtttgtcttgcccgcttcaggtttctctaatgagattcacgtgtaaaggaggattggcaattaatc

SEQ ID NO: 31516 - DNA, 429 bp, Homo sapiens
  chr7:101649223-101649652
  hypo
cgaggagcgagcggccgcgtggatgaggttggccagagaaactggtttgttttggaagccgatggaagatgcgcttggaaggctaaggctgccgaggttgaagtccgtcattctcagtgcagaccctagggaggaagtagcaggaccccagtggggctgcaggcattcagaaagagagctgcctggggtttcccttcagaacctccctccttttaacccgggagtaaagagaaaaagacccgcggggtccactggctcggaagtcggtctctttcagtttggagcctccagttggaaacctgccttttaatggccaggctgatggtctagttactctttgaacagggaagcctcgtcaggctctctgctgaccacgcctcagtgctccctcgaaggacaactctggaatgccagtttttatctcatctc

SEQ ID NO: 31517 - DNA, 177 bp, Homo sapiens
  chr7:1075890-1076067
  hypo
cggacttcgggcggttgtgctgtggccatgtagggttcgggtgctcgtgctgtggccgtgcagggttcgggtgctcgtgctgtggccgtgcagggctcgggtgctcgtggtgtggccgtgcagggctcgggtgctcgtgctgtggccgtgcagggctcgggtgctcgtggtgtggcc

SEQ ID NO: 31518 - DNA, 204 bp, Homo sapiens; identical to SEQ ID NO: 29366
  chr7:123673023-123673227
  hyper

SEQ ID NO: 31519 - DNA, 296 bp, Homo sapiens; identical to SEQ ID NO: 29367
  chr7:123673383-123673679
  hyper

SEQ ID NO: 31520 - DNA, 174 bp, Homo sapiens
  chr7:127670460-127670634
  hypo
cgggtgttcgagggaataccctgcgggacctcggagaggccccggcgcgtgcacaccaccttgctgaactggttactgcacgagcagacggaggggcagttctggggcccggctgaggcggcagcagcgatggctgcacacagaatccacacttgcgccgtgaggtagacgaac

SEQ ID NO: 31521 - DNA, 62 bp, Homo sapiens
  chr7:132418888-132418950
  hypo
cgcccccacctgagcctataaaaaccggataccctagcaaggcagagacagaagctgttgga

SEQ ID NO: 31522 - DNA, 42 bp, Homo sapiens
  chr7:132419066-132419108
  hypo
ctcacaacccgcaggacaaggcagagtttggctggggcaatc

SEQ ID NO: 31523 - DNA, 86 bp, Homo sapiens
  chr7:134918319-134918405
  hypo
cgagctgattactgacgcgagggtcccctccctgacccctcgcgaccctgcgaggtgagtcagccccgcccctccctcttctctct

SEQ ID NO: 31524 - DNA, 132 bp, Homo sapiens
  chr7:134918661-134918793
  hypo
atcctttgaacgctcctctccagaaaggtgcccttgggcatatgagtgtttgtgtagacttgaaagaattcagtgcagcggagcctaacaggtgaacttttagcgcggggttcacaggagccttttgtatcc

SEQ ID NO: 31525 - DNA, 209 bp, Homo sapiens
  chr7:135412177-135412386
  hypo
gcaggagcgggacgcagacgaccagcagcagcttccggactcggagcaggccctgcagcaggcccatcgcgcctctgtcctctccagctcgtccttggaccccgctctgccggcgaaaggcttcctgcctgggcactgctctctatccagaaagacttcttaaacctttcttggcttccgagagtcctccttcgtcttgggggcagaac

SEQ ID NO: 31526 - DNA, 256 bp, Homo sapiens
  chr7:139257804-139258060
  hypo
cgagggcaggacccgggggcccatgctcacggggacctggtggacgatgctggctgggtaggcagtgtgctgcacggtgtggcgcgcagagccttgcgaggccaccaggtgggccacggtgccggtggagcccagggccgccggcgcagtgtaggtgtagaggtggggctgggtggggaggtgggcagcggcagcggctgcagccagatgcgggtgcacagtgccgtggctggggctgttgtgcgggaaggagtac

SEQ ID NO: 31527 - DNA, 176 bp, Homo sapiens
  chr7:139717431-139717607
  hypo
cgggtgttctgggccagccctgaccacacggacctgcaggttcacggctgaggcccggcagcagcaccggcccttcacgtacctgcccttcggggccggcccacggagctgcctcggggtgcgtctagggctgcttgaggtcaagttgacactgctccacgtgctgcacaagttcc

SEQ ID NO: 31528 - DNA, 353 bp, Homo sapiens
  chr7:14028689-14029042
  hyper
cgcaaatctcagctcagtattttatattttgagcatttagctggagatttcctcaggatctggacttctatcaacctagaggggaacaagatggcttttaggcttaaaaaaaaatcatgaatgaagctcttgaatttgcatagctaattaccctccgacagtcccattcacaaaaataaccctccctacaccgcctccttcacctggatccaaagagagccaacagagttcacaatttacatattttcggtagtagcaaaaatccgaacaagaggcgatgtatttatttacactctcgatgtttccctgcgcggtcggtgtaccccgggcagctctgattcgcaaacgtgtgc

SEQ ID NO: 31529 - DNA, 370 bp, Homo sapiens
  chr7:14029071-14029441
  hyper
gctttgcacctaacgggactaaagagacggagacacctctttcatcaggatagtttttgcgacccacaaccatgcaattatctggagagacataaaaagttgttggaaagacccacctgaaggccacgctaggcgaaaggctgcaaaaacttccctccaaatttaataaaaacattaattatagcccagcacttcccccttggaagccgaaagcgcctctgacagagctcaattcggtggtttttcctctacttctcctccaggggcctccaatccaaactgatggatcgctgcctcccattggctccgcgtctctttcacaagatcagatttcgggctgtcaatcaggcggcttgctgccccttcccgc

SEQ ID NO: 31530 - DNA, 158 bp, Homo sapiens
  chr7:148979109-148979267
  hypo
cgagtgcctgcgcttcttccagcagcgcaagagcctgctgctgcaccagcgcctgcacaccggcaatggccagggctggcccgcctgcccctactgcggcaaggccttccgccggccctcggacctcttccggcaccagcgcatccacaccggtgagc

SEQ ID NO: 31531 - DNA, 100 bp, Homo sapiens
  chr7:150069580-150069680
  hypo
cctggtggcgcactcgcgcgtgcactccggcgagcggcccttcgcctgcgaggagtgcggccgccgcttctcccagggcagccatctggcggcgcatcgg

SEQ ID NO: 31532 - DNA, 115 bp, Homo sapiens
  chr7:150069820-150069935
  hypo
ccagaagtccaacctggtgtcgcaccggcgcatccacacgggcgagcggccctacgcctgtcccgactgcgaccgcagcttcagccagaagtccaacctcatcacccaccgcaag

SEQ ID NO: 31533 - DNA, 35 bp, Homo sapiens
  chr7:150102887-150102922
  hyper
cgcgggtgtcgctgcgggagagttaccgtatttgc

SEQ ID NO: 31534 - DNA, 960 bp, Homo sapiens
  chr7:150784079-150785039
  binary
cgccatctacgacctgatcgagcgcatcgaggatttggcgctgcagaaccagatccgggagcacgtcatctccatcgagggtgagcggagccgggggctgcgggagccggggcgcagtggcctctccggcgccggccgagggctccacaggccgtgcctggccatgctctccctgtcgggggtccttgcgcgcttgaggaccaggccacgaggtttgccgatctgtgttgcagaaccggcgggcagcttcgccatatctcgttcggggacactttggggttgggggttttctgctgactgtgttccagggcgcgaaggtggtgtcgcttgggggggccgggaccagatctgtccaggcctggccggggaaggtgggcgcggcagagggcttcagctgcggggaggtggggtcgtgaccggggaggcttcttagccgctgcccgggccctgctccgcagtggggcgggggatcggagcctcgcgttagtggatggcagccttcccgggcccagcgcccgcaggcccggagggtggcgctcgccgcggcgccctctcccgacgcacaccccctacgccgcggcggccaagcgggagcgggccgggcctggcgctgggctgaggctcagcgaccgcgtgggaggcgccggcaggtccatccgcgctttggccgggtcatgagcctgacggggatccgcggctcctcggtctggaggcagctgctgggcagccgggtgctgaccgaccgccagggacaccgcacccggagtcggggaccggaaacccccggccactgcgctgcctagcgcttttttctctgggcccttaggccctggactttcgaccgctgagggcacaggaagtggtggcacgctgctggcagatgcctcgcaagccctggtgtggtgggtgctggaggcacccgcaggcaccccggtggcatggtgaccttcgagcgggcac

SEQ ID NO: 31535 - DNA, 313 bp, Homo sapiens
  chr7:150812868-150813181
  hypo
cgtctggggtcttcggcagtggccgaggaggacaggccggagggggagctctcgggtgcggcccaggaaaggaagaggagactcaccagagtcagagggctctgggctaggccagacacctttcctagttccctgtcggggcagcgcgctcgcctccggttgcccctgtgcatgaggttagggactgctgtggacctggtcgtcataactgctctttgacacaaacttgggacagtgcctctgggagccagggagggaagcagtgctgcccagctagagaggggttcccagagctagcccgagcacccatgtg

SEQ ID NO: 31536 - DNA, 114 bp, Homo sapiens
  chr7:150813210-150813324
  hypo
ggctgtcggagggctctgggtaaagggacttgccagtcaggttctgaggacagactgaagggaagggagcccaggaggcggcctccctgctaaggaggagcttagagaggaggc

SEQ ID NO: 31537 - DNA, 557 bp, Homo sapiens
  chr7:150816833-150817390
  hypo
cggggccccaggacgagggtttgctgccctagtggggcagccctggcaaggtgacagtagatcctgctggcctccaggccaggtgaatgttccccccatatcatctgtaggggctagtggcccctctgctgcccatgagccccggccaggcccccattagcacagggattcccggcacccgcctggtgcccgtcccgcccctgacccggagctgccctcagcagccctctttgtccttaggccacgaatggcggcggcagcgccttcagcgactactcgtcctcagtcccctccacccccagcatcagccagcgggagctgcgcatcgagaccatcgctgcctcctccacccccacacccatccgaaagcagtccaagcggcgctccaacatcttcacggtacgtgactgccctcctcccccgcccagctgcctttgctgcacaggcagggctgagcgccgagctcccagccaggaggggcgtgggcagccccaagtcaggaagacggtacctgcagtctctccctcagatacacacggctcccgagggtccttgcc

SEQ ID NO: 31538 - DNA, 370 bp, Homo sapiens
  chr7:151038589-151038959
  binary
cgggcgggaagtcctggaagactgagcctggggtggcgttggacaccaactcccaggtcctcgccccacacggccacatcctcgcccagccccgcctccgcttagctccgccccgtcgcggctccgccccgcggtaaccacgcccacacaaccgtatccccgcccacagctggcttcgccttggccccgcccacaaccctctttccaagcggcggcggcggcggcggcgcgaaggcgacagcggcggcgggggcggggctggcctcacccggaatgaaaacaaacggcggccgctgccgcatccgggcactctgctggtcgcggcgggagtggcgtggcgcaggtgaggacacggcggccgagtgtcctc

SEQ ID NO: 31539 - DNA, 154 bp, Homo sapiens
  chr7:151802406-151802560
  hypo
cgtgaggggttgattcgagggagaatgattggcgcggcccacgcgacaggtatcacttctcgttagctttgctctacaggtgttggatgacaagggctcgagcctcagcgcctgtcctgattctgcaaagtctatgaagagtagtgtttcaaac

SEQ ID NO: 31540 - DNA, 193 bp, Homo sapiens
  chr7:152562704-152562897
  hypo
cgcagagtcggggccaccgcacctccagaccagaccgcagggttggggccaccgcacctccagaccagatcacagagtcggggccactgcacctccagaccagaccgcagggtcggggccaccgcacctccagaccagaactcagagtcggtgctaccgcagagtcagggccactgcatctccagaccagatc

SEQ ID NO: 31541 - DNA, 172 bp, Homo sapiens
  chr7:155079954-155080126
  hypo
cggggggaccgtggcacccccggcctcagccagaccgtccgctgcacacctgcatggcactgactgaacatgacgtgtccgatcaacacggggccatgcctccgagaacgcgactgcagctctccctgcacctctgtcccatcttcagctacagaaccggagctccatacgc

SEQ ID NO: 31542 - DNA, 78 bp, Homo sapiens
  chr7:155898307-155898385
  hypo
cctgtgagggctccggactttgtgccgttctccgcacccctcaggcccggtggagtgcgtgacccctacgccgggccc

SEQ ID NO: 31543 - DNA, 288 bp, Homo sapiens; identical to SEQ ID NO: 30317
  chr7:155916075-155916363
  hypo

SEQ ID NO: 31544 - DNA, 32 bp, Homo sapiens
  chr7:156734691-156734723
  hypo
cgcgaatgggtgacgaggcgcgattgggtgac

SEQ ID NO: 31545 - DNA, 169 bp, Homo sapiens
  chr7:156782599-156782768
  hypo
cgagggctcctcgtccactgtggcgagtgcagaggacgcggcctgggcagtgcctgcggggagaccgtgctggcctgggcttcccagtgagcggggctcctcaggcttcctgggccctcgtcctcccggactggtggcactgtgtgcctgttggggggtggcaggcagc

SEQ ID NO: 31546 - DNA, 150 bp, Homo sapiens
  chr7:157086147-157086297
  hypo
ggagcagcgctgtgcacgttccactcacctgaacggcatcgtctgagtcgcgtttgataaaattcgtaggaggccactggtctggcctgagctcctgcaggaggcctggcagaacagaccaaaacgcagccactcgtgctagagctccac

SEQ ID NO: 31547 - DNA, 144 bp, Homo sapiens
  chr7:157100035-157100179
  hypo
cgggcgcggcggctcatgcctgtaatcccagcactttgggaggccccgccactctaactaggtgaactctccctcgcccgaggctccaaccagcttccacctcctggtttgtccactccgcttcacggccacacctctgactgc

SEQ ID NO: 31548 - DNA, 650 bp, Homo sapiens
  chr7:157202474-157203124
  hypo
cgctgtgcctgcaggtgtggccgacgacgatgccctcgctgaggagcgcatgcggagaggccagaacgccctgccagcccagcctgccggcctccgcccgccgaagccgccccggcctgcctcgctgctgagacacgcgcctcactgtctctctgaggaggagggcgagcaggaccgacctcgggcacccgggccctgggaccccctcgcgtccgcagcaggtgtgcaaagggaggcagccgtggagcaggcgcagagtgagacttctctgggtgccagaggacagcgaggacacaaaccgcgcctgggctgctgtgttctgacctgagcgggcgtgggcggtcgggcggggcgggaggaggtagcctcgctctgctcctctcccgctcgcggcgccccacgccacggtggctccgggccccccaccgttaaaacggggtccgcgtgtcctgtacgcagcgtgttgctccgcaaaggatgacagagctgccacggcagtgcgaggtgctgcttttaccgtagacgtgccttttcgtagctttcagcgtagagcttgaggcctgtggcttaggccgggtggtctcgtgctggtggggtctgcgtttgcccctgcccctccgtcagcttcaccttctcgtgccttcttctgc

SEQ ID NO: 31549 - DNA, 309 bp, Homo sapiens
  chr7:157336700-157337009
  hypo
cggtggagagagacagagagaggtggagagagacggagagaggtggagagagacggagagaggtggagagagacggagagaggtgaagagaggcggagagaggtggagagagatggagagaggcggagagaggcggagagagacggagagaggtggagagagacggagagaggtggagagagatggagagctacggaaatgaacagtttcaatggcacgggaggccttgggagaagtgggctgcgggcctggagctgatgtgtgagcgtggactgcgctacgcgtgacagaatccgtgtctgtcactcc

SEQ ID NO: 31550 - DNA, 159 bp, Homo sapiens
  chr7:157404210-157404369
  hypo
cgtaccctcccccaaaaagacacactggagtcccagccctgggaacatgaccttatttggaaatagggtctttacagaggtaagcgagcggagggcatttgggcggccctaatgcaatatgactggcgtgctgttaggaagaaggactctgcacaccca

SEQ ID NO: 31551 - DNA, 46 bp, Homo sapiens
  chr7:157404566-157404612
  hypo
gaagacagccgcagtcatgctggggacacgcggagggagagcgccc

SEQ ID NO: 31552 - DNA, 297 bp, Homo sapiens
  chr7:157445780-157446077
  hypo
cgctcttggtgctgagcctgccccccagacggtgcagccggcctctcccacctgctggggctcctcacatctagcttggcctccagacatcaccaacctctgctgtttatttcatcggatcgtggggttcagatgccacgttttgtccaacgtgccccaggagtggctgcatgtcaggaacatgtcgctgggaatctctgtggcttatctgaccatcctgccatcctcaggtgaggggcactgaggtggccggttgggtgtctggcggaaacgaggctttgcgcacagagggctggg

SEQ ID NO: 31553 - DNA, 69 bp, Homo sapiens
  chr7:157446148-157446217
  hypo
cctgcggcaccaacctgcatgtgctttctacagcctgtgtgtgccagggagggtggcggtcagtgcccc

SEQ ID NO: 31554 - DNA, 203 bp, Homo sapiens; identical to SEQ ID NO: 30325
  chr7:157642963-157643166
  hypo

SEQ ID NO: 31555 - DNA, 230 bp, Homo sapiens
  chr7:157653875-157654105
  hypo
cgtgctccatggtgacactgccccacggggtccaaatgctgaattcctgtaccttttacatacgtgaagtctatacaataatggaaccgaagccctctgtggggaatccgtgggaggatgagaggcctggattgcaccggaagcacctccggctggagctcggccaaggagcccgggtcccttcagtctgcgctccctgcggtgggcagtggcttctgtgttttgccgtc

SEQ ID NO: 31556 - DNA, 79 bp, Homo sapiens
  chr7:157703411-157703490
  hypo
gtgtgcgagcgcgcgtgcgcccctgcgatcagcccagcagacagagcacgttcctgtaacgtgttgtgatccactgcgc

SEQ ID NO: 31557 - DNA, 39 bp, Homo sapiens; identical to SEQ ID NO: 30328
  chr7:157934555-157934594
  hypo

SEQ ID NO: 31558 - DNA, 92 bp, Homo sapiens; identical to SEQ ID NO: 30329
  chr7:157934659-157934751
  hypo

SEQ ID NO: 31559 - DNA, 195 bp, Homo sapiens
  chr7:158103405-158103600
  hypo
cggacagagcgcaagtcccacggagggcaagccctgagccggacagagcgcaagtcccacggagggcgagccctgagccggacagagcgcaagtcccacggagggcgagccctgagccggacagagcgcaaatcccacggagggcgagccctgagcctgacagagcgcgagtcacacggagggtgagcaccacgc

SEQ ID NO: 31560 - DNA, 234 bp, Homo sapiens
  chr7:1784457-1784691
  hypo
cagtacgcctcgctcagccgctttggcaacctcacgtacctcaacctcaccaagaacgagatcggctacatcgaggacggcgccttctcgggccagttcaacctgcaggtgctgcagctgggctacaaccggctgcgcaacctcacggagggcatgctgcgcggcctgggcaagctggagtacctgtacctgcaggccaacctcatcgaggtggtcatggccagcagcttctgg

SEQ ID NO: 31561 - DNA, 370 bp, Homo sapiens
  chr7:1784927-1785297
  hypo
gggccagggccgccgcggccaccgcagcatcctcagcaaactgcagtcagtctgcaccgaggactcgtacgcggctgaggtggtcgggcccccacgtccagcatccgggcgctcacagccgggccgctccccgccgcccccgcctccgccggagcccagtgacatgccctgtgccgatgatgagtgcttctccggggacggcaccacgccactggtggccctgcccacgctggccacgcaggccgaggcccgccccctcatcaaggtcaagcagctcactcagaactcggccaccatcaccgtccagctgcccagcccgttccaccggatgtacaccctggagcatttcaacaacagcaaggcctccacc

SEQ ID NO: 31562 - DNA, 392 bp, Homo sapiens; identical to SEQ ID NO: 29396
  chr7:2298049-2298441
  hypo

SEQ ID NO: 31563 - DNA, 134 bp, Homo sapiens
  chr7:23749573-23749707
  hypo
cgtgaacagattaggaaagaccacgaaatcctacgtcacctctaaagtcacagcttgaagccttgcgaaaggaactggccctagaccccaccccggcctataaatcaccagggcgcagcctcagtgcctggggg

SEQ ID NO: 31564 - DNA, 364 bp, Homo sapiens
  chr7:23749829-23750193
  hypo
gggcccttgcggtcgaagctcacgcggtaagccgctgcacgtgtgctacggcgggcggagggccgaaagtccagtatgtgggtccagggtcactcttctagagcttccgcaacggaaagtgtgaggtcagtagtagtttttgtggtacgtgcagtggtggccgcttcaaggactattttcgtcgctgcttgcgttttaagtctccaatcctgggacgaggcccatttcagggttttctgtcaccttctagccgcccgccaccccagaggggtgccagatgccccagtttttgagtgcatgcaggcaggcgaaagtggctcgaaaagacctccggcctgaatgatctccatgaagacgcggtcac

SEQ ID NO: 31565 - DNA, 469 bp, Homo sapiens
  chr7:2472811-2473280
  hypo
cgcgtgatgatcgtgctgagcggaagcctgctgcaccgcggtgcgccctaccgcgacccgctgcgcatcccgcgcgagcacgtgcacaacgccagcgcgcacctgaccttcaacaagttctggcgccgctacgggaagctctcccgccacctcatgaaggtcaagctcaagaagtacaccaagttcctcttcgtgcgcgaccccttcgtgcgcctgatctccgccttccgcagcaagttcgagctggagaacgaggagttctaccgcaagttcgccgtgcccatgctgcggctgtacgccaaccacaccagcctgcccgcctcggcgcgcgaggccttccgcgctggcctcaaggtgtccttcgccaacttcatccagtacctgctggacccgcacacggagaagctggcgcccttcaacgagcactggcggcaggtgtaccgcctctgccacccgtgccagatcgact

SEQ ID NO: 31566 - DNA, 328 bp, Homo sapiens
  chr7:2473779-2474107
  hypo
tgtggtttttctgagcgtgcgggcgccgggaggggatgctgaggctgatggagctgcctccagggctagggccactcaccggaggagggcggggcctgcacttgaagtcaggccgcacctgtctgtttttggaagggtagccgacaaatccttccagagggaaagttctttgtttaagtgttgtacttgaaaaggtcaatcttcagggcttcctgtttgaagtcaagtcagaggtaaaccggtcagttacagaagcaggatttctaggatttctaactccagctgttcccatactgtctagtttaaattatggctgttaaggccgggc

SEQ ID NO: 31567 - DNA, 74 bp, Homo sapiens
  chr7:3211469-3211543
  hypo
cgcggtcgaccgaatttgctgttggcagaggctgcgcgctgccacacaaggctgtgtctattccacacaagccc

SEQ ID NO: 31568 - DNA, 123 bp, Homo sapiens
  chr7:4254687-4254810
  hypo
cgggaccctggcgctcgcctgcctcccctgatggtattggccagaaccctggctcgccgagacactaaccccaggcctgtccgacaagccacatcccgtacccacatacgtcaaaagaagaac

SEQ ID NO: 31569 - DNA, 272 bp, Homo sapiens
  chr7:44153157-44153429
  hypo
cgctctggggcagccggatcgttctccctccgcagccagtggtggtgattactggcgaatcttgaacccgggtgagtaccgcgtgacagcccacgcggagggctacaccccgagcgccaagacctgcaatgttgactatgacatcggggccactcagtgcaacttcatcctggctcgctccaactggaagcgcatccgggagatcatggccatgaacgggaaccggcctatcccacacatagacccatcgcgccctatgaccccccaacagc

SEQ ID NO: 31570 - DNA, 367 bp, Homo sapiens
  chr7:44746549-44746916
  hypo
cgaagtctgagccaagctgttttgaaggctagcctggtgttacttgatacccagagctggccatgtctgctgtgtatttgttacacgtaacgtgcttttcaaagtgtgcctggtctgagcaaatacagggcatcagaggctggtgaaggggaagcatctctaacccttgaaagctgcgtctcctggcagcagtccctggcacagccctgggcccaggagagctctcagccacatacctgagagaaccagcctagccatgggaactctcttgtaggaacccacttccagcgggtgatcccagaagatggccctgcagctcagaacccagaaaatgtcaaaaggcttctcttctgcaccggcaaagtgt

SEQ ID NO: 31571 - DNA, 79 bp, Homo sapiens
  chr7:44746945-44747024
  hypo
cgcgacatggtggggcaggtggccatcacaaggattgagcaggtgagggcaggtggtgccatcagggtgtccccccagc

SEQ ID NO: 31572 - DNA, 47 bp, Homo sapiens
  chr7:45222971-45223018
  hypo
ggtggtgtggcgcagcaaacgcaccgacacgctgctgtgagggtccc

SEQ ID NO: 31573 - DNA, 302 bp, Homo sapiens
  chr7:455133-455435
  hypo
cgggggatgcggcctgcggtgccctccaggctcagcctgggtgacagggccaactcacggggcccgtggcctgcggagtcctccaggctcaccctgggtcacagggccagtttgcagggacagcagcctgcggtgccttccaggctcaccctgggtcacgcggccagttcgcggggcccgtggcctgcagagtcctctaggctcaccctgggtcatgcggccagttcgtggggacagcagcctgaggtgtcctccaggctcaccctgggtcacgcagtcagctcacgggggccgcggcctgc

SEQ ID NO: 31574 - DNA, 133 bp, Homo sapiens
  chr7:4784755-4784888
  hyper
cgggaggtgggagcggggccaggccagaagagctggctgcctgcaaggctgtcccctcccagtgccgccccgcccccgcggtgcctgccttcctaatttggtgtgcattcgcctcgccagtcctcattggccg

SEQ ID NO: 31575 - DNA, 291 bp, Homo sapiens
  chr7:479019-479310
  hypo
cgatggccagcggacaacaacagtgtgggcacagtgatgggcacccccccgtgtccactcggccgggctgcagtgcccagcggcacggtcaagccccatccagatgccactgtggctgtgctgcaggtgtgatggacacgcacaattggctaattgcaagtgctgcagatcacgagatgtggctgggcctcagctgcagctgaagatgaacgccgaggcttcctggagaaggatttctgccccaagactgcaacataaaatcctgcccgggctcccagcctgctcccctgc

SEQ ID NO: 31576 - DNA, 94 bp, Homo sapiens
  chr7:48147036-48147130
  hypo
cggcgtccgcaatatcgagatggagtcctcggtgtttgccgccatgtgcagcgcctgcggcctccaaggtaagcggcacttgatgggcctcggc

SEQ ID NO: 31577 - DNA, 527 bp, Homo sapiens; identical to SEQ ID NO: 30351
  chr7:4917102-4917629
  hypo

SEQ ID NO: 31578 - DNA, 577 bp, Homo sapiens
  chr7:503100-503677
  hypo
agcccagaaaggcgacggggtggcccaaggtcacacccacgccaggcccagcactctgctcttcccgctcacccactcggccgggcctgtgccctcccgcccggccaagtgggggctccaggaagggcagcgagtgccccgcggccccggccccactgcgggcggccggaacacagagggcggtgaggaaggaggcgttccctgccgggtgccctccagcaggattcgcgaacccaggggagcgagcgggaggattttccatgtgaggccggcttcctggggcgaggcccacccggcgccagcgtggagagaggagaggagcaaagcgcctcgacacattctccctcggtgatttaatggccggagcattcgtgcgatatttatgcagtaaatccttccactggggggtttcactgtgtcacgggaggctcctcccagcccgtccccatcccgtcccccccaaaaaaagaatcctgagaaaatctcatttcacagtttcccatcgagccaggtgcacagcagctgcggtgggcatggcgggcgcgggtcctggggaacaccctctgctggcgtccgc

SEQ ID NO: 31579 - DNA, 154 bp, Homo sapiens
  chr7:52736911-52737065
  hypo
gcgaggctttgcatggacagaaccaacggcgagccgcgccctggggactccaggctgccgggatccagtcccgcctccagcgcaggctccaccctggggagctcccgagaggcctgcgcgctcctgccactctccaagcctgcaaggaagaacc

SEQ ID NO: 31580 - DNA, 46 bp, Homo sapiens
  chr7:55223544-55223590
  hypo
cggctcgtgcgtccgagcctgtggggccgacagctatgagatggag

SEQ ID NO: 31581 - DNA, 573 bp, Homo sapiens
  chr7:55553240-55553813
  hypo
cgtttttctatgagaggaggtcggaagtcactgtcgccctgtcctcatcccagagctgcaggccggggacagctgcctcataaccccggctgtcctgtggctgcactgtgacgccacacagggcccacacagggcgcccgcacacgggacgtgcacacagtacattcacagagcacttagtgacagacggcaggttggacgtgttaggcacagggacctcacgtggggctgcagacctcattgcaacaagggacctccagtcttgtttggcccacattttccctcatccgcccctcggaagggccggacgcagccatttcaaatattaatacatttagggagaaaagtgcaatggtagactcgggagacaagggatctgaaggaggctctgcttcccacggggagaggaatgcagccagcgaggcgggcgggggacctgtcagacccagagcttgcgtgagcaaatgtgagggagacccttggtacgtgcagtgtgtccctccagatgcaggcacccatgagtggaccacgacgggccagaggctccggctccacctcagccccatcactggc

SEQ ID NO: 31582 - DNA, 295 bp, Homo sapiens
  chr7:557697-557992
  binary
cgggctccggcccagccgcggccctagcgccgactaagacgcccaaatccagccggcggccgggagaagaagcctccagggaaagcgagggttaaacttccacctcgcgcagctctccgtgccctgcggagaccaccctcacctctggcctcccccactcccctccccgatttttaaggagagtcgggggtcgctggggagcctgaagcactaagttcccacgacgggggctgtggaaagtcattcatcacagcaaagctcccggggatggggatggggatggggatgggggggc

SEQ ID NO: 31583 - DNA, 103 bp, Homo sapiens
  chr7:57247618-57247721
  hypo
cgtcggttgtccaaatcggcagggaagctccagaggccacccagctccttgggctcccgcgacggactctccttggggtacagcatcccgccttgcagtgcca

SEQ ID NO: 31584 - DNA, 158 bp, Homo sapiens
  chr7:57247887-57248045
  hypo
gggcgagtgccaggcctagaggggcgggatgggcctggcgctgcccagtggggcctgtggctggaaccccgggctaggcctttggggaagcgggaccctcactctcagccccagccaagaagggcaaggtcggttccccaccccagcacagtctggac

SEQ ID NO: 31585 - DNA, 54 bp, Homo sapiens
  chr7:63652630-63652684
  hypo
cgccttgggcacctcggcctgcgtcattgcgctctgcctggctgcggccgctgt

SEQ ID NO: 31586 - DNA, 122 bp, Homo sapiens
  chr7:63652839-63652961
  hypo
cagttttgctgcccccgcttcctgaagatcgcagctggagccacctgggcgcagcgtttgatgtggcacctgcagtggccaaagtgacacccaaccgtgaggacgctgcagggagtcggcac

SEQ ID NO: 31587 - DNA, 162 bp, Homo sapiens
  chr7:6694972-6695134
  hypo
cgagccgcctcctcttctctacccacacttgcaccgaggtcaccccggcaccctccgcaccggttcggttttggtctctgcttgtcctctcagtccttggtactttcgtctccctcagccggaggtggcaaactcagacatctacgggcgcccgaggccctc

SEQ ID NO: 31588 - DNA, 182 bp, Homo sapiens
  chr7:70060834-70061016
  hyper
cggcaccgacaccgtccctttcacacggtactgagccgcgggctgcttcggggcggccctccccgccccgtgccttgccgggatggcagagcggatcagaagctgcgcgcgctctgcctgcgcgctttgcctgcgcgctttgccgccgcaacccgcgcagcagccaatccgctggtgcactg

SEQ ID NO: 31589 - DNA, 238 bp, Homo sapiens
  chr7:70061149-70061387
  hyper
cgcgggccggggcggggctggggcgggcggcgcgcagctcctgggccgaggcatccgcgagccgcgggtagatcgctcgcgtctgatcgccgcccgggagctcccgcggagccggctgccaggactcgttccagctccagtgcggggctgcccgggcgtccagaggcggcggacggcgtgccggcaagtttccccggcacctgccagtgcccgcgaacccacctcggaagccagaccc

SEQ ID NO: 31590 - DNA, 252 bp, Homo sapiens
  chr7:716729-716981
  hypo
cgagcaacgggggctgcccacctcctggaggccagggagggaggcagtgatgcccaggcaagtggcgggacctgcccacctcccggaggccgaggagggcggcggtgatgccggggcaggggacgagtctgcctacctcctctcgttgtcatccaggtgagcgaagagcacgttcttggagatggccttggccagcgcagtcatggttttgtagtccttgggaatcacctgaagcggagccaacacatcacc

SEQ ID NO: 31591 - DNA, 122 bp, Homo sapiens
  chr7:76106210-76106332
  hypo
cgtgccttcgtggaaagttttagctgatgtcctcgcctgtatttcccaggctgtttttgcagagttgtgagagttggttcatccgggccatgaggacatgttgggacataccccgtgtgccg

SEQ ID NO: 31592 - DNA, 102 bp, Homo sapiens
  chr7:76106380-76106482
  hypo
taattggcttggaaggcagtcctctgatttgtacctcattgtggttacagaaacttccaattgaagacactgagctgaaccattccgcccgcccgcccgccc

SEQ ID NO: 31593 - DNA, 75 bp, Homo sapiens
  chr7:76631604-76631679
  hypo
gtgcctcctggccatgtactgcaacggcaataaggtgcccccactggcccggggcggaggcgggtggcctgcccc

SEQ ID NO: 31594 - DNA, 90 bp, Homo sapiens
  chr7:778947-779037
  hypo
cgtcgtggcaggtgcggccgtggcaggtgtcgactgcattaaaccctgggctgtctctgctcgagacctgccggcgccatgggtgaagac

SEQ ID NO: 31595 - DNA, 37 bp, Homo sapiens
  chr7:803211-803248
  hypo
cgctgcagagacggcgttggtgtgaacgggatcaggg

SEQ ID NO: 31596 - DNA, 222 bp, Homo sapiens
  chr7:803615-803837
  hypo
gccgtcccgacagctggcgtgccgtgcctggccccactcaggctacacacctgctcccccaggtgctcagcaggtaccagcgccgaccagctgagctgtggttcactgaagcgtgttgttaaaagtacccaatagtcactcttgcctggggagaagcagcattttaaggagcatcgcattgaagactgtgggacgcagctcttccacttggcccgggcacac

SEQ ID NO: 31597 - DNA, 238 bp, Homo sapiens
  chr7:822395-822633
  binary
cgatcttcctggcgtggccgcctcccgtcacgcagcgtcagaaactcggtcttcctgccatggccacctcccatccggcggcatcagaaactcggaccttcctggcgtggccgcgtcccctcacacaacgtcagaaactcgatcttcctggcgtggccacctcccctccggcggcatcagaaactcggatcgtcctggggtggctgctcttgttacgcaacgtcagaaactctcctgc

SEQ ID NO: 31598 - DNA, 493 bp, Homo sapiens
  chr7:86415591-86416084
  hypo
cggctcttccagatccctcagatcagctacgcatccaccagcgccaaactcagtgataagtcgcgctatgattactttgccaggaccgtgccccccgacttctaccaggccaaagccatggctgagatcttgcgcttcttcaactggacctacgtgtccacagtagcctccgagggtgattacggggagacagggatcgaggccttcgagcaggaagcccgcctgcgcaacatctgcatcgctacggcggagaaggtgggccgctccaacatccgcaagtcctacgacagcgtgatccgagaactgttgcagaagcccaacgcgcgcgtcgtggtcctcttcatgcgcagcgacgactcgcgggagctcattgcagccgccagccgcgccaatgcctccttcacctgggtggccagcgacggctggggcgcgcaggagagcatcatcaagggcagcgagcatgtggcctacggcgccatcaccctggagctgg

SEQ ID NO: 31599 - DNA, 37 bp, Homo sapiens
  chr7:86416125-86416162
  hypo
ctcaacccctacaacaaccaccgcaacccctggttcc

SEQ ID NO: 31600 - DNA, 260 bp, Homo sapiens
  chr7:99819908-99820168
  hypo
cggggcgggtctgtgtctcccacctcagactagctccagggcaggtccatgtctcccacctcagactagttctggggcgggtctttgtctccccgctcagactagctctggaacgggtccttgccttcccactcagattagttccggggtgggtccatgtctccccgctcagactagctccagggaaggtctgtgtctcttccctcagatgagctcctggcaaagcctcccccgtcagactaagactcctaggcagagcc

SEQ ID NO: 31601 - DNA, 270 bp, Homo sapiens
  chr8:1150825-1151095
  hypo
cgctttgttttccgttcccacatatcggtttggcatcgaacgatgcgtccgctgctggctcccgtgctcggtttctccacgccgcctccgggcggtgcgcgattcagctccaggagcgtgttgtgcacggcggggcgctgcgctcggccttagggaaagaaggcgcggctgtctccccggaccccaccgttagggacccacacctagaggtgagtgtggcgtgagcggccaggcgggtgccgagatgcccagagaccagcactggggagg

SEQ ID NO: 31602 - DNA, 203 bp, Homo sapiens
  chr8:1151189-1151392
  hypo
gtccatcagggttctcgagagacgcagaaccaggggtgcatgcacgcgtgtgattgtggaggctggcaggtcccaaccacagagccgaagtccccagcatccccgcgcaggtgtgaggccctcagcgaccctggaaccagcaggagctctgctcccgctcaggggccgtggggcagggggctcccccttcctcgggaagggac

SEQ ID NO: 31603 - DNA, 110 bp, Homo sapiens
  chr8:11561282-11561392
  hyper
cgggcaccccgggtgacccagtgccccacacaagatcgagagttgagcccaagaggtcaccttcttctctactggccccgcccctcgcccgccgctgcgggatgaggacc

SEQ ID NO: 31604 - DNA, 140 bp, Homo sapiens
  chr8:11726011-11726151
  binary
cgagttggcgggggtggggtggtggagagggcgccgtcgcttatttcattcattcagaagccgctgcagaggctgggggtggcgaggctgtggaccccacagaacagcctttagaagggccactttgttgttcagagaac

SEQ ID NO: 31605 - DNA, 194 bp, Homo sapiens
  chr8:119123513-119123707
  binary
cgggagagagcggggctgaatatctcgcacccagggcgggcgagcagcggactgtaattttcttgcatgcaacaagacggaggaaaagaaagagagaggggagaaaaaaaaagctcccgatacccaatcaatggcaagacgaagtgattgccttgcctctcggattcctctcggcagcgtggaaaatgagcccc

SEQ ID NO: 31606 - DNA, 308 bp, Homo sapiens
  chr8:124730010-124730318
  hypo
cgaggcgactttctgacggggcgtgtctcagcaggtttggagtgcagatgcacaagtccacaccttacgtaaccacgccacgtgaggcgcattaagtaaccactcagatgcgctcgtgcttggcttggagccactgttgtctgtaaaaggtacaattacgctgctaacgctgtacctctggcttggggctcacgcccagactcgcacccaggctcgcttgcgcccagagaaagagtaaagccatgttgaaactccctgcgattcctcgagtgtttttccagctgcccgccaccccaccgacttttttc

SEQ ID NO: 31607 - DNA, 117 bp, Homo sapiens
  chr8:1326617-1326734
  hypo
cgcacacctgacttcgcctgtccatcctgcacacacctggcctcacctgtctttcctgcgcacacctgacctcacctgtccctgacacacacagctgacttcgcctgtctgtcctgc

SEQ ID NO: 31608 - DNA, 171 bp, Homo sapiens
  chr8:134335659-134335830
  hypo
cgctgttctgccaggtggcccagcccgacgggtgtctccctagcttctccgacagctttgccaccttgcacccacttgcccgcgtgctcagtcacgtcctcctcgtcggccgcgttccccaggcagctgtgtcagcctcccaaaatacaggcaagcctctggcctggggcc

SEQ ID NO: 31609 - DNA, 50 bp, Homo sapiens
  chr8:1379963-1380013
  hypo
cgtgcatgacagggactcttctgatgcctccgtgtcgatggccaccaagc

SEQ ID NO: 31610 - DNA, 51 bp, Homo sapiens
  chr8:1380172-1380223
  hypo
catgccagccagcaccgctacggctgccatccatcggggctgaaccctgcc

SEQ ID NO: 31611 - DNA, 482 bp, Homo sapiens
  chr8:140815079-140815561
  hypo
cgtgtgcatccgtatctgaaggtgcgtgtgtgtgtgctgttgtatgagtgctctgtgtgcatgttgtgtatgtcggtgtgtgttgtgtgcctccatgtgtgaatgtgtatgtgaagatgtgtgctgttgtgtgagtgcattgtgtgcgtgttatgtatgtcagtgtatgttgtgtgtgcatccgtagatgaacgtgtgtgtatgtgaaggtgtctgtgtgccgtcgtgtgactgtgctgcgtgcttgttgtgtatgtcattgtgtgtgcatccatgcgtgaatgtgtatgtgaaggtgtgtctgtgtgccgtcgtgtgagtgtgctgtgtgcgcgttgtgtatgtcattgtgtgtgcatccatgtgtgaatgtgtatgtgaaggtgtatgtctgtgtgctgttgagtgtgtgtgtgtcacaggctctcatcaggctcacagcctctcaggaaggcaacgtccgttggaaactctagagcggc

SEQ ID NO: 31612 - DNA, 321 bp, Homo sapiens
  chr8:140971025-140971346
  hypo
cgccccgaggcaggacagggtgtgcagtcagcttccttagacatgtaaggagtgccttttcctttccacaaggaaaaggggagttgtgtagacaccatgagatgtgaccactgccctcgggaacacatgccagagatgacagcctgacacagagcactgcattccgagtcacacagaggagcactgcattccgagtcacacaggggagccctgcattccgagtcacacaggggagcactgcattccgagtcacacgggggagcactgcattccgagtcacacgggggagcactgcattccgagtcacacgggggaggcctg

SEQ ID NO: 31613 - DNA, 148 bp, Homo sapiens
  chr8:140971375-140971523
  hypo
ttccgagtcacacgggggagccctgcattccgagtcacacgggggagccctgcattccgagtcacacgggggagccctgcattccgagtcacacgggggagccctgcattccgagtcacacgggggagccctgcattccgagtcacac

SEQ ID NO: 31614 - DNA, 90 bp, Homo sapiens
  chr8:140992426-140992516
  hypo
cggttgtgcatggaaaatggacgaggagggaaggccgattctgggaacgcagcctagggaaccatgggcaactcccacagaaaggcgggc

SEQ ID NO: 31615 - DNA, 133 bp, Homo sapiens
  chr8:141107408-141107541
  hypo
cggctcacccgagtccgccatgcgcagccctgccactgtctgcagggtaaggacgcccacctgggttcttgtgccagccacagttgtgccacagtccgtagggtaaggactcccccagagtaaggactcccgc

SEQ ID NO: 31616 - DNA, 156 bp, Homo sapiens
  chr8:141107863-141108019
  hypo
cctgcctgggtcctccatacgcagtcgcagctgtgccgctgctcccagggtcatgacgcctacccaggtccttagtgcgtggctacagacgtgccgcagtcctaccgggaaagatgccagctcatgtcctcaatgagcagctgcagaattgccgcc

SEQ ID NO: 31617 - DNA, 191 bp, Homo sapiens
  chr8:142242748-142242939
  hypo
cgggaacacagacattcagtggctcccaggtgagcgctcaccagctgcaacgggaacacagacattcagtggctcaacacagacattcagtggctcccaggtgagcactcacaagctgcaacgggaacacacacactcagtggctcccaggtgagcgctcgcgagctgcaacgggaacacacgcactcaat

SEQ ID NO: 31618 - DNA, 241 bp, Homo sapiens; identical to SEQ ID NO: 30369
  chr8:143234575-143234816
  hypo

SEQ ID NO: 31619 - DNA, 37 bp, Homo sapiens
  chr8:143334502-143334539
  hypo
cgggtgagagtgcggaggtggacaggctggcgacagc

SEQ ID NO: 31620 - DNA, 302 bp, Homo sapiens
  chr8:143386497-143386799
  hypo
cgggcgagtgagatggccaggtggagaaggcaccacaggacgttctgtgcgatgttccctggacttgggggtttcagtgacagctccccaggagctgtgggcagagggtgccaggcacccatggagacctgcctcggatctgtgccttgggattgatgccacctcctgcatgtggagaaggggaagctcaggaggataggggagggcgcaggggtgggaggggggtgcaaacggggttccgtgtggacgcccaggaaagcggccaggctggggtgcgggctgtgtggacacccaggaaggca

SEQ ID NO: 31621 - DNA, 388 bp, Homo sapiens
  chr8:143386940-143387328
  hypo
tgcaggacaaaagccaggggaggaagagatggcttagacgcccgggtccctccgcggcctcctcctgaaaggctcacaaagcgctcctttattctccccacaaaggcccaatttgggtcttgagctccgaggctgggattagggatttgctggcaaggtgctggggcaagcgcagaggggacggccctgtgatagttttccagctcaagaggcagacagacaaaggcggctttctcctccccacagggctcagggcctgggtccctgttccgacacgtagggaagagacatgctctaacgtgagtgctggagacagggcacacacggtttcccgtgggaagagactccgctctgccaggcattcagaaagcagggacccgaggccggc

SEQ ID NO: 31622 - DNA, 162 bp, Homo sapiens
  chr8:143397305-143397467
  hypo
cgtgcacccaccaagccgcgtgaaggagccattcgcttcacgaggaaactgcctgcacggaccacccaactctgctctcaccccacagaaacgcctctcagaatcgcaaccctccaccatgtggggccttgctcagcacctcacgtaagcgcagcgcctccc

SEQ ID NO: 31623 - DNA, 142 bp, Homo sapiens
  chr8:143436836-143436978
  hypo
cggccgtccctggaatggggagctgggcatcccgcccaaacctctcctcccgtgggctgcagctccagggactcagagcaaatgaccagaggataacgggagctctcctgcccagacactgccagagcgtcctccctgtgtg

SEQ ID NO: 31624 - DNA, 220 bp, Homo sapiens
  chr8:143582357-143582577
  hypo
cgccttggacatggtgagcacgggataaacacttgttgtcgaatgctggtgactgttaccaggctagtgtcagttccagggacagtgacggagctggttctgatgaggcgatggcagtgttggagacgagaatgatgatgtgcttatagtggaggtgacgctggtgaccatgggtgaccggtggtcattgtgatgactgtgaagggacagtaaaggtgac

SEQ ID NO: 31625 - DNA, 242 bp, Homo sapiens; identical to SEQ ID NO: 30371
  chr8:143660391-143660633
  hypo

SEQ ID NO: 31626 - DNA, 423 bp, Homo sapiens
  chr8:144205313-144205736
  hypo
cgcacacatgcatgccctcgtgtgtacacgtgcgcacacacacccttgaacacatatacatcttcacacatgtacacacaccctcacatgtacacacatgcaccctcaaacgtacagatcctcacacatgtacacacaccctcacacatgtacacacaccctcacacatgtacacaccctcacacatgtatacgtacgcacaccccctcaaacgtacacaccctcacacatgtacatgcacacacatgcacacatgcatgccctcgcatgtacaggcacaccctaatacatcctcacacatgtacgcacacaaaccctcacacgtacacacaccctcacatttacacactcaaacgtacacacatcctcacacatgtacacacaccctcgcacatgtatacatatgcacaccctcacacgtac

SEQ ID NO: 31627 - DNA, 112 bp, Homo sapiens
  chr8:144222962-144223074
  hypo
tccgacaacgttcacgcgaccaaagaaatgaactcgagccccaccttctgcagccacagggacctcgaatgctgcggagcttcccacggacacttcgcttctcccagtggcc

SEQ ID NO: 31628 - DNA, 237 bp, Homo sapiens
  chr8:144413516-144413753
  hypo
cggagacaggacgtgtcactctcctgggccaggccctgcatgagcctcttccccgctcccacagtggctcctccctgtggctcctagcaggtgagcagtgtggcctccacctcacgggggaggaaaacaaggcctgcagagggaggcaaccctacctgacctcagaccccatgcccgtgtacccgcccatgccccccacctgcagaggcccgtgtgctgctgagtcacggatcccac

SEQ ID NO: 31629 - DNA, 244 bp, Homo sapiens
  chr8:144413782-144414026
  hypo
ccagctaagtgggaaaggcaacgtgcctctcccaggctctagggcctctccccagatgggtcccttcagagccggtctagaatcttcgggaacctctccatgggaccatttcatttgctaaataaaggacctggctgcttatgagagagccctgcctccgaggagctgggtggaagggggtccagcagtgcagccagtggagaggcaccacagcagggcgcaggaccgccgcccacagaggatc

SEQ ID NO: 31630 - DNA, 48 bp, Homo sapiens
  chr8:144589930-144589978
  hypo
cgccgggcccgccaggagggcagagacagggggaagggcggggcgctg

SEQ ID NO: 31631 - DNA, 220 bp, Homo sapiens
  chr8:144590082-144590302
  hypo
ccagggcacagacatgggtcagggaaggccggcaagggtagggtcagagaggccacccacagtgccagctctgcccaccgcctccgccggagcttgaagaccctccatcgccccgtggataaaaccctcaacccatgtggcacacacatccccagggcgcctggcagccgacgcttcaggagctagccagtgcagcctctgagaggcgggcaccagcccc

SEQ ID NO: 31632 - DNA, 161 bp, Homo sapiens
  chr8:144621169-144621330
  hypo
cgttctgaccctgactgagctggacctgtctctcaaggacatgctgctgcgggacaggaggctggcccccccgggccccgtgcaacggccgcacagcatggtcggcaggagggtctgagggtcccgggggccgattcacgagggagtatttcttgcgccac

SEQ ID NO: 31633 - DNA, 154 bp, Homo sapiens
  chr8:145661380-145661534
  hypo
cgcggtgggccaggccccagccggctctgagcactgcccacaccccggatggctgcctggtaggctgcccggctggtgctggctgtggctgcttccctgttgctggcggggccaggcgtccaggctgccacccgttgtgctgtggccgagcacc

SEQ ID NO: 31634 - DNA, 541 bp, Homo sapiens
  chr8:145813621-145814162
  hypo
cgccccgagggctcctgagcacgcatcctgcgtgagggaaccaggcaggggcctgcaggctgtgcgctgcattgaggctcatggaggcacaaaaccaacggtgatgccagaggctgactgcccggtggggcacatcatgagcctgcacctcctcgaacacttctctgcacacacgtatgttagctaacatgttttcagaggaagagaaatgtgcctcaccctatggggaggtggccctaagcctccctcagcagccaggaagagcagccgtatgcagcagggacagaactgtggggaccgcggagagcggcagactgggtgcgggaggcggggctctcgccaagccatctggagaaactcggcccagggcccgaaggggaaggtaagacccagtagggctggggacccagctggccacctgaagcccacggcctgtctccgtcaaacccagcgagggtcagactcacagccggaggcagcacggcggcacgggggaacacagcaaagcctcagcagcctcagctgggccaccatggccaac

SEQ ID NO: 31635 - DNA, 632 bp, Homo sapiens
  chr8:145845229-145845861
  hypo
cgagcttgtgtgtccgagagagcgtgagcccgtgtgagtgagcctgtacatccctgagagagcgtgtgtgcccgtgtgcgtgtgagcctgtgtccctgagagcatgtgtgcctgtgtgcgtgtgagcctgtgcatctgagagcgtgtgtgcccatgtgtgagcctgtgcgtccctgacagtgtgtgccggtgtttgtgtgcctgtgcgtccctgagagcgtgtctgtgtgtgcccgagtgtgcgttgagcctgtgtgtccctgagcatgtgtgcccgtgtgcgtgtgagcctgtgtgtccctgagagcgtgtgcccatgtgagcttgtgtgtccctgagagagcgtgtgtgcccgtgtgtgagcctgtgtccctgagaaagtgtgtgtgcccgtgtctgttagcctgtgtgtccaagggagcgtgtgtgcccgtgtctgttagcctgtgtgtccaagggagcgtgtgtgcccgtgtctgttagcctgtgtgtccaagggagcgtgtgtgcccgtgtctgttagcctgtgtgtccaagggagcgtgtgtgcccgtgtctgttagcctgtgtgtccaagggagcgtgtgtgcccgtgtctgttagcctgtgtgtccaagggagcgtgtgtgccc

SEQ ID NO: 31636 - DNA, 96 bp, Homo sapiens
  chr8:145854692-145854788
  hypo
cgcaggctctagcgggccgaaggcagagcacggccgtgagacctccagggctccaagagcagacccgcaggctccagcggggctgaggcggagcac

SEQ ID NO: 31637 - DNA, 526 bp, Homo sapiens
  chr8:145910996-145911522
  binary
cggggaccgcagcgccggcccctccgccatcttcttggcccgcgccgcccaccgcccgttgcccgcgctctcaccggccggctgcgcgcgggccgcgccgccacagtccctcatcccggcccgcgcgacgcgcgtgagccagccgccgctccccggcctctctgctgctccgccgctgctgccgcggcagcccgtgctgtcggcgtcctccgccgccgccgccggcccagtgcgcggcggccgcgcgtcctcccgtcaccaagcgcaaccccccgcctccggctccgcccccgcggcggtcactacccgccgccagggggcactgcctcgcgaggccgcatcacgcatgcgctggcgcgcggcatgccgggagccggagtcccgcggagggcgcgcgcggcatgctgggagccgcctggccccgccccgtcgccgcgccagaggcctcccgcgcggacctaccctgtgagttagcggtgtcttcccgtctctttcggtgcagagcagttaccatctgacacgtctc

SEQ ID NO: 31638 - DNA, 45 bp, Homo sapiens
  chr8:21624023-21624068
  hypo
cgagttagcgcggaagcctccagtcgcaggacgccccaaacacac

SEQ ID NO: 31639 - DNA, 429 bp, Homo sapiens
  chr8:22874780-22875209
  hypo
cgagaagcatcggtggccacctgtgtggtacctgaaggaggaagatcattaccagcgggcacggaaggagcgtgagaaggaggactacctccacctcaagcggcagcccaaacggcgttggctcttctggaacagtccatcctccccgtcttcctcggcagcctcctcctcatccccatcttcctcctcggctgtggtctgagatgctgccaccctcttctgaccctgctgctgttgtccccatccgccttcacccctctgctcttccgcatcaccccatccaccttacagggaccagggggcccacgtaaccaggacccagagggtggagctcttcttaccagccaccgtggctcagccagagaggagctgagccctgtggagcagaacgggaaccacctgcagaggtccccagacccaaagcaggac

SEQ ID NO: 31640 - DNA, 672 bp, Homo sapiens
  chr8:24771632-24772304
  hyper
cgaccgctttgccggctacatagagaaggtgcactacctggagcagcagaataaggagattgaggcggagatccaggcgctgcggcagaagcaggcctcgcacgcccagctgggcgacgcgtacgaccaggagatccgcgagctgcgcgccaccctggagatggtgaaccacgagaaggctcaggtgcagctggactcggaccacctggaggaagacatccaccggctcaaggagcgctttgaggaggaggcgcggttgcgcgacgacactgaggcggccatccgcgcgctgcgcaaagacatcgaggaggcgtcgctggtcaaggtggagctggacaagaaggtgcagtcgctgcaggatgaggtggccttcctgcggagcaaccacgaggaggaggtggccgaccttctggcccagatccaggcatcgcacatcacggtggagcgcaaagactacctgaagacagacatctcgacggcgctgaaggaaatccgctcccagctcgaaagccactcagaccagaatatgcaccaggccgaagagtggttcaaatgccgctacgccaagctcaccgaggcggccgagcagaacaaggaggccatccgctccgccaaggaagagatcgccgagtaccggcgccagctgcagtccaagagcatcgagctagagtc

SEQ ID NO: 31641 - DNA, 311 bp, Homo sapiens
  chr8:26148757-26149068
  binary
cgccccagagccccggcgctagtgctcgaggctgggacactgctaggtgcacacagccgcggcctggcgcaggcggtgcggacagagggtatgccatggcgagacgctggcgcggcgcaggccctgccggccgggacacggagggcggggcacaggcgcagcaggaagggggcgtggccaagagccgcccggccgctcccccgcccctccccctccgctctccgccccagcccggcggctccgccccctaggtgacgtcactggccaggccagccggcgccattttgaaagtggagtcgcctgcccctgcc

SEQ ID NO: 31642 - DNA, 320 bp, Homo sapiens
  chr8:27779460-27779780
  hypo
cgccgtgtcgctctgctggcccgtgcggtcccgcagcagggccaccgcctgctcggtctgcaccgcctgcgcctgcagcccccacagcgcgccctccagccgctgcactgcgcccgccagcgccagcaacgagtctgactggttctgcagcgcgtcctgcaccttccacacctgctccgtcaggtccgcttgcagcggagcctgcagcagccgcagctgcaagtcccggaagctctcattcagccggttcacattgcgagtcagggccttcaggtcgtcaggggagctgcgcggcctggacactgcggaggaggaagagg

SEQ ID NO: 31643 - DNA, 84 bp, Homo sapiens
  chr8:29053260-29053344
  hypo
cgggagtggggaggatgagtcggttttgaccgcagtttggaactaccagtctagagccaatctatggaggcggcttgaggccgc

SEQ ID NO: 31644 - DNA, 169 bp, Homo sapiens
  chr8:3509598-3509767
  hypo
cgcttaccaccatcagagcacctaccaccatcagcacgcttaccatcagagcgcttaccaccatcagagcgcttaccaccatcagagcgcttaccaccatcagaacacctaccaccttcagcgggcctaccaccatcagagcgccatcaccaccagagcgcctaccaac

SEQ ID NO: 31645 - DNA, 95 bp, Homo sapiens
  chr8:41478653-41478748
  hypo
cggctttcgccgagccgcagcgggatccctgtgcacccggcgcagcctacccttggtggtctaaacggatgctgctgggtgttgcgacccaggac

SEQ ID NO: 31646 - DNA, 157 bp, Homo sapiens
  chr8:42146058-42146215
  hypo
cgcttggggcctggagacccctcccatgcagcagacagggtgggatttggcctgcagctcgctctgctggtccccactgtgctgtttctgtaggaaacaggtgagcagattgccatcaagcagtgccggcaggagctcagcccccggaaccgagagc

SEQ ID NO: 31647 - DNA, 69 bp, Homo sapiens; identical to SEQ ID NO: 30380
  chr8:49334914-49334983
  hypo

SEQ ID NO: 31648 - DNA, 262 bp, Homo sapiens
  chr8:49747358-49747620
  hypo
cgggtggcccctcatcaggagggatgaggagaggagccgtgggctcgcggaagagcagcgagggacactggcgcacagagcagagaggagcagtgagcaggcggcacccccgggcagggtaaaagggcacgaagaaaagcgaaggtgcgaggggaggaccgactggcagcaagcgtccgggaggggcaggcaaaggctctcctcgaagtgcctttacgcttaggtagaatttccatgcctccctcgcgctccaccctgctgc

SEQ ID NO: 31649 - DNA, 145 bp, Homo sapiens
  chr8:73979624-73979769
  hypo
cgccgaacttttttccaagttccttgacaccgaggattaccaattgcttgccaatggagagtctgatttctgaaacgatatttcgaaagtgttagttacactaaaagcataccgaagaaaggtctaatttacagaattaaaactc

SEQ ID NO: 31650 - DNA, 91 bp, Homo sapiens
  chr8:74674345-74674436
  hypo
cggcggcaaaggtaaaaggccgacgacaacggacttggtccaggtgaacccacctgacaggcgcacgaaaacttcccttgccctccccggc

SEQ ID NO: 31651 - DNA, 159 bp, Homo sapiens
  chr8:798791-798950
  binary
cgtgttccagtgtaggaacgtgccagggtttgttccagtctaggatcttgtgatgtgtgttccagcataggatcgcgcggtgtctgttccagcataggaacgcgcggtgcctgttccagcataggaacgcgcggtgcctgttccagcataggaacgcgc

SEQ ID NO: 31652 - DNA, 377 bp, Homo sapiens; identical to SEQ ID NO: 30393
  chr8:972329-972706
  hypo

SEQ ID NO: 31653 - DNA, 274 bp, Homo sapiens
  chr9:116059825-116060099
  hypo
cgtagtcaccatacccagcagcaaccgaaaaaggtttggtttcttgtctgggaacagcactcaccccacaccccaaaggaactgcttggtccaaaagatggagaatatgagcaacagagtgacactgaggatgacggccatcaggtaggcaaagatgcggaactgagggttgcggaaacactccctcaaagagtggtggctggggatgaggatgggcgtagacacggtggcagaggccgtgtctgggggcggcccagtctggcccccaggctgg

SEQ ID NO: 31654 - DNA, 631 bp, Homo sapiens
  chr9:116060128-116060759
  hypo
ctggcgcaggaagtagcggctcttgggctggtccttgaggcacagctgatggccttccaggatgacatggtggggctccaggcggagcagggcgagcatggcagtgtccgtgggcaagtcagtgacaggctgccctgaggccagcactgtgggctggcgacagagtgggcacagcaggcggcgccgggctggagtcacaaggctgaggtgggccagacattccacgcagaaggagtggcagcaatccagcattttgggggtatggaacgtgttgttgaaggggttccagcagacggggcactcagcctcaagctcccggccctgctgctcagccatcctcagccacacacggggaggcttcgcgggagacgtcctggcagaagggggaaaggagcaaaggaacagccatgaagtcccatccttgtgcttggcctggggcaaagtgttctgtgggtgttgaaaggtgtaatcaccacgttttacttaggttcaaaagcgttttgttcttgatcaccagttcctaacccatcgagttgagtcaaatgctcctacagcctcccctctgtcaaggtgaaggcctgggccacccctaccaagagcccccaagagagccggcattggagcagatgtc

SEQ ID NO: 31655 - DNA, 131 bp, Homo sapiens
  chr9:117880425-117880556
  hyper
aggctgtggccggtgcagccaactttggctggcttatatagcgagctccttcctctgtaatgggacgcctcgcctccagacatcctttcccactttttcagttggcgaattaaaggaacagccctcccagc

SEQ ID NO: 31656 - DNA, 55 bp, Homo sapiens
  chr9:124639413-124639468
  hypo
cgtccctgctgttcggccaaggcgaagtcccctcagtcactagcggattccaaac

SEQ ID NO: 31657 - DNA, 83 bp, Homo sapiens
  chr9:124990438-124990521
  binary
cggattcaggcgcctttcgagggccagtcggagggaaacccggagcaaaaagagagcgagatcggggcgaaacgggaccaaaa

SEQ ID NO: 31658 - DNA, 142 bp, Homo sapiens
  chr9:124991012-124991154
  binary
agtacatgggccggggaacctcgggctcagcgggcgcgcagcgcggagagctgcgccgagggggaccacagccgcagtgggagcagaggctgctgcaggagcaggaggagagccgaggcgccggccccgccgccccgggccc

SEQ ID NO: 31659 - DNA, 120 bp, Homo sapiens
  chr9:130661066-130661186
  hyper
cggctggaacgggtcagaggccatggagtgtgtgcccaggacgtggctcggcacaggcaccagggcgggggtctaggggtgccggcctgttggggagcggcttgctcacgctggggaggc

SEQ ID NO: 31660 - DNA, 138 bp, Homo sapiens
  chr9:131127341-131127479
  hyper
ctgatctcagcttgacacccaattagcacaagaatgggaggaggaagcctgcgagaggcgcctcccagcctcccggggcgcgcgaggggagcaggcgggaagacaaaggacagcaggcaggggggcacccgcgccctc

SEQ ID NO: 31661 - DNA, 166 bp, Homo sapiens
  chr9:132176641-132176807
  hyper
cgtatccccctccccggattgaaccagcaaagagcacaaagcagaaaatacatccttgccgcccgcaggctccctcatcccgcagaaaactctgaaacagtccacacccgtcccaaagttgagagaaacctggacgtttcataaacaaaacccgccctccagcagc

SEQ ID NO: 31662 - DNA, 610 bp, Homo sapiens
  chr9:132230776-132231386
  hypo
cgtgtaggtgtgtgcacagtgtacaactgtgtgcaagtgtgtacagtgtttctgcatgtgtgcagagtgtacctgtgtgtgtgcgtgtggacagtgtgcaccggcgtgacactgtgtcgaatgtgtgtgcacagtgtacctgtgtgtgtgcatgtggacagtgtgcaccggcgtgacactgtgtctagtgtgcaccgtgtacctgtgtgtgtgtgtgtggacagtgtgcaccgtgtacctgtgtgtgtgtgtggacagtgtgcaccggcgtgacactgtgtcgaatgtgtgtgcacagtgtacctgtgtgtgtgcatgtggacagtgtgcaccggcgtgacactgtgtctagtgtgcacagtgtacctgtgtgtgcatgtggacagtgtgcacagtgtacctgtgtgtgtgtgtgtggacagtgtgcaccagcgtgacactgtgtcaaatgtgtgtgcacagtgtacctgtgtgtgtgcatgtggacagtgtgcaccggcgtgacactgtgtctagtgtgcacagtgtacgtgtgtgtgtgtgtggacagtgtgcaccgtgtacctgtgtgtgtgtgtgtggacagtgtgcaccggcgtgacactgtgtc

SEQ ID NO: 31663 - DNA, 502 bp, Homo sapiens
  chr9:132244794-132245296
  hyper
cgtgccggggcgcacggttttgctccgcgggcctctctcgctccctcgcgccggctttttccctttttctctttcctttttttctttcctggagcggagcccggcgccaggagtctggaaccagcttgacaggcttttgagttatggaggggggagggggagaggcgggcggcggggagggggaagggagggcgccgccgcggcgtgggggcggggccggctccccggtttggagactcgccccgactttggggtccgccagcggcggccgggcggagggcgggggaccgcaatcgtggggggagtcaccccgcggggcccggcgggcgaaacgggccgggcttcagagccgcagtaaatgaggcccggggcgggcgggggtggacacggcctcggggccacggcctcccccgccgagcaaggcattcctttccgctgaactgggcgcccgggcccgcgccgcgccctgcacgcctcgcgcccggcgatcgggcccagggcg

SEQ ID NO: 31664 - DNA, 728 bp, Homo sapiens
  chr9:132245345-132246073
  binary
cttcccaggagctcggctccccgggatggaagggactgatacccagttaatgggcgtggagcctgagcccctgagggtcgtcgctaacgggggtcgctcagcagggccggcctccgctgcctgcccggggtgtctaatcacctctccgatcctttgcccggatctgagcttcgtcattcacgcccctcctccctggcgactttgggcctggtgacagtcccccgaccctcgcagagccaggggcacagtaggcgccttagccactggcagaatttcaccggcgctctgcccgacgcccccagccccagggccgggcgtgggtggaagtgtctggaagggtgggttcaccagggctgggcacgtcagcggccccgtacagagaatccggtgcctggggtctctggagggggtactcagagtatccgaggaggagactcctggatgctaacagagcccccagttaggagcagtccgcgagacagttggtaacagtgctggccttgcccgggcgccggaaggttccgtgaggcccagcaagtcctgacttggcacagggcccagcacacggtaagcgctcggtacttggtcactgttgcttgattttaccatttcggaggggctcatctacgcctagcaaagcccccctcccggtgacccaaggggagctccagaatgttgagcggctgagcggcctggctcctcctctcgaccccatcgagccaagtgtc

SEQ ID NO: 31665 - DNA, 125 bp, Homo sapiens
  chr9:13323322-13323447
  hypo
gtcctgctctccaccagctccttcgtcggactcagtctggatcttctcaacgcccagctcctggctccgagtcagggctctctggatgcacggtaacaccctcctcttctgggtaccctccctcc

SEQ ID NO: 31666 - DNA, 344 bp, Homo sapiens
  chr9:133366650-133366994
  hypo
gattttagttacaaagtgagagagtcattaagacgtggcggaggagagagcacctggccgggctgctccggggcctccacggaggctgatcccaccgtggccgcggccacggctgccacttatcctgccatcttgctgctaggctctgagctgggcacctgatggggtattatctaatattagctgcgcagaggtgaggaaacggaggcccccaggtgaagacactcacccaggctctcctggctggtgatgggcagctttgagccggggacaggccagctgtagcggccaagttcccagttactccaacagattccaggatgctcgtgatcaaggggcacggc

SEQ ID NO: 31667 - DNA, 1351 bp, Homo sapiens
  chr9:133710055-133711406
  binary
cgtctgttcgcagcctgacctcatatcctggtctggatgtgcggcctcaccggggtgtcgtgcgcacgtgtggttgtcctgtgggtgccagctctgacttcctccccagacacccactgcctcagccttaatcacaggacgcgcgttgagtagaaatgagaccagttagtattggtaactgcagaggaatatgcattttcaccagcgttctcgggtcagagggtttgcctggcaccgcgtactgggaaactcgccaaaagcggtgcaggttggagacgccccaggccgcggtggagttgcgcgcggcttctaaagtggagtggagcaggcctgcaccctccccgccggggctgggacggcgcttccaggcggagaaagacctccgcgggccgcgcgcggccttccccctgcgaggatcgccattggcccgggttggctttggaaagcggcggtggctttgggccgggctcggcctcgggaacgccaggggcccctgggtgcggacgggcgcggccaggagggggttaaggcgcaggcggcggcggggcgggggcgggcctggcgggcgccctctccgggccctttgttaacaggcgcgtcccggccaggcggagacgcggccgcggccatgggcgggcgcgggcgcgcggggcggcggtgagggcggctggcggggccgggggcgccgggggggcgcgcgggccgagccgggcctgagccgggcccgcggaccgagctgggagaggggttccggcccccgacgtgctggcgcgggaaaatgttggagatctgcctgaagctggtgggctgcaaatccaagaaggggctgtcctcgtcctccagctgttatctggaaggtaagcccgggccgcacgggttgggctgagtagccgcgcgccctcccgctgctgctgggcccttcctaggcctcgccgcccgcgcgctcccgcctgcgccctccccgggtcttgtcttttttttctttcttccctcttctcttctcttctcttcagttctcttatattctgtctctctttctttctctctgtgtctgtctcttttctcttctcttgtctctctctttttctctctctctgtctctttctctttctcgcgatggcccctaggcgccgccggcggagcgtggcccccagccccggcaccagccccggtagagccacgccggatggtgacggcggcgtccggggccccacagtgcgggctcccccgaaaaagtttgagaaagccaactcgccaggccttaacatccctgggatcccacgttgtggaatttccaccgttaattgggactgtgtgttaaaaagatcgacccgtgtttgtgaaaacatgc

SEQ ID NO: 31668 - DNA, 81 bp, Homo sapiens
  chr9:133738154-133738235
  hypo
cgtctcctccgagagccgcttcaacaccctggccgagttggttcatcatcattcaacggtggccgacgggctcatcaccac

SEQ ID NO: 31669 - DNA, 85 bp, Homo sapiens
  chr9:133945101-133945186
  hypo
cgagaacggcacatgcgtgtgcaggcctggcttcgagggctacaaatgtgaccgctgccacgacaacttcttcctcacggcagac

SEQ ID NO: 31670 - DNA, 222 bp, Homo sapiens
  chr9:135945862-135946084
  hypo
cgcctacctgttttcccatccctctcggatgcccgtctaccccaaatgggtgggggccgaccatgcagatgacattcagtacgttttcgggaagcccttcgccacccccacgggctaccggccccaagacaggacagtctctaaggccatgatcgcctactggaccaactttgccaaaacagggtaagacgtgggttgagtgcagggcggagggccacagcc

SEQ ID NO: 31671 - DNA, 58 bp, Homo sapiens
  chr9:136603465-136603523
  hyper
cggaactccaggcctcccccgccccccaccctcgctgccagccccatgtctccgccca

SEQ ID NO: 31672 - DNA, 106 bp, Homo sapiens
  chr9:136698796-136698902
  hypo
cggtcccgatggggccctggtgctgtggccaggcttgggcagcgcctgggtggagcagaggcctctcagagagaggaatgaggtggacacggagaagagcagaggc

SEQ ID NO: 31673 - DNA, 335 bp, Homo sapiens; identical to SEQ ID NO: 30435
  chr9:138143914-138144249
  hypo

SEQ ID NO: 31674 - DNA, 172 bp, Homo sapiens; identical to SEQ ID NO: 30436
  chr9:138247974-138248146
  hypo

SEQ ID NO: 31675 - DNA, 275 bp, Homo sapiens
  chr9:138660497-138660772
  hypo
cgaggtggaccgcacggctgcagtgagtgaggctgaggccctgcccaggcgggaggggcaccgtggggccggggagcgggggtccctgagggaagagacctgccccaggctgccggtgccgcccagcagcccacagaggccagcccgtctgcactgaccaaccacccaccccgccaggaccaccagaccatcctgcgcgcctgggccgtgaaggacttcgcccccaactgccccctctacgtccagatcctcaaacctgaaaacaagtttcacgt

SEQ ID NO: 31676 - DNA, 90 bp, Homo sapiens
  chr9:138774525-138774615
  hypo
cgccagtgtgcaaaagcacgggtctccaccacctcgccgcacaccgtgttcacaccatccatgcaccaggtgcgccacacgagagcccac

SEQ ID NO: 31677 - DNA, 357 bp, Homo sapiens
  chr9:139401232-139401589
  binary
cgggcgtcgcagggattggacaggcactcgttgacatccccctcacagcgctcacccacgaagcccggcgggcaggtgcagctgtagccgcccacctggtccacgcaggtgccgttgttaaagcacttggggctccgggacacggggtcaacggggggattgcagtcgtccacgttgatctcacagtgcacacctgcggggccaggtttcgtcagtggcccaagcccgccacaccccggccctgccgtgccgcgtgtccgtcccggaagacgagcgctcaggtctggggctgcacggacactcgggagaggcaggtgtcaagggtgccgtggagacgcccttcccactgggaccccc

SEQ ID NO: 31678 - DNA, 107 bp, Homo sapiens
  chr9:139793021-139793128
  hypo
cgattctgcttctctgagtcttgaccgcaggtcagtggggacccggcccctcaccatcgcctgctactgatcaccattggtttggttttgtctcgaggactgttctg

SEQ ID NO: 31679 - DNA, 53 bp, Homo sapiens
  chr9:139793190-139793243
  hypo
tcatggctgcagctagcgtgaccccccctggctccctggagttgctacagccc

SEQ ID NO: 31680 - DNA, 126 bp, Homo sapiens
  chr9:139909050-139909176
  hypo
cgcccccagacaccaggcaggagtgacagcgcaggcccgagctggggccttgtgggtggggtgggctgagcaagtggtccaggcccctcaccggcctcactgttctccagcgactgatcctcctcc

SEQ ID NO: 31681 - DNA, 241 bp, Homo sapiens
  chr9:140379693-140379934
  hypo
cggagcgactgaaaggaatgtgaggctcagagtaaaccagacaaacgctgcaggtgaggcctcatcggagtaaaccagacaaacgctgcaggtaaggcctcactggagtaaaccagacaaacgctgcaggtgaggcctcatcggagtaaaccagacaaacgctgcaggtgaggcctcatcggagtaaaccagacaaacgctgcaggtgaggcctcattggagtaaaccagacacactctcc

SEQ ID NO: 31682 - DNA, 105 bp, Homo sapiens
  chr9:140379963-140380068
  hypo
atactctccaggtgaggccttatcctctgaaccaatcgtcgcagggctttccaccactcactccaggaacagtaaacaacacacgggctagacatcaataggccc

SEQ ID NO: 31683 - DNA, 320 bp, Homo sapiens
  chr9:140382238-140382558
  hypo
cgagaggccgtcccatccagcctccacctgcctgtcaggggcatctcaggagcctgggccaccaccacaacctggcacgccctgcgaggtgtccccagcatcaccttcaccgcacgcacttcagcccctcactgcagctgagccttggccacacgggaggagcgggggactcaggcccagatgatgtgtctccgcctctaggcgctgagtggaaggcaggtggcttctataatcaggaggaaataactcccagatagcaaacaaacaatgcacacacacaccaaagtgctgctgagcacagaaagacggagaaccgcctc

SEQ ID NO: 31684 - DNA, 78 bp, Homo sapiens
  chr9:140382625-140382703
  hypo
gtctgatgtctcgtcccgagcttcggcccgaacgcggctctcgcggtctgatgtctcgtcccgagcttcggcccgaac

SEQ ID NO: 31685 - DNA, 150 bp, Homo sapiens
  chr9:140392858-140393008
  hypo
cctgccccacggcacagcactgcccaccacgtgcccagtggccagcagctgttggggagcccagagagccccctcctggcaggcccgcgagtgccccttggacacgggccctgtgtcaggctgcggtcctggcaggggactgcacatgcc

SEQ ID NO: 31686 - DNA, 189 bp, Homo sapiens
  chr9:140703858-140704047
  binary
cggcggccctgcgccctcggagggaggcggggcagagctcaaatggaagcagagcctgcggggtggagaccgcacccctgcaggggtctgccttgggccccgagcctcctcagccgccgcagcaaagcggtcagtcaggcggggcttggtttatggcatctgggaagatcgctgaccattcccgagggg

SEQ ID NO: 31687 - DNA, 327 bp, Homo sapiens
  chr9:140704131-140704458
  binary
gcaatcctgcctctgaggatgcatccttgagaaataatgtagaaaatgaaaagcactaaaatatttgctggcattgtattccagaaatataccaacagacataaaccaagtgttcagtaaaggaaaggtccggaagctgagtgactgtgggggaagggtccggaggcggttccgatgccgccctgtgtggaccgtcggtgatgggtccggaggcggttccgatgccgccctgtgtggaccgtcggtgatgggtccggaggtggttccgatgccgccctgtgtggaccgtcggtgatgggtccggaggcggttccgatgctgcccctc

SEQ ID NO: 31688 - DNA, 90 bp, Homo sapiens
  chr9:140704673-140704763
  hypo
cggttccgatgccgccccgcgtggaccgtcggtgatgggtccggaggcggttccgatgccgccctgcgtgaaaggcgctcctcgcacggc

SEQ ID NO: 31689 - DNA, 480 bp, Homo sapiens
  chr9:140708213-140708693
  hypo
cgacccaaagcagtggcaggcatctttgtgccttttttgtaacctcacactcaggggccccggtgtggcttcgtgctgggggcacaggcgagaggagcccttgcgaggcctgcaggacgacctggatccctgcacctcccagcccccggagagatgggtccagcacatgccagctttcccagcctccgagtgcatgcagcctggtgccctcactgcttgcgccttctcgagcactttccttgtggctctgcttgtgggcagctccctcctcttcccaggccgggcactgcccaggcccccccccccccccgccccccgccccacaaggtgtgtcaggctctgtgttcttgcctttcccatcgagcatctggccacaaatgcagccgccgcccagcccttcacccaccccacgtcacccactgccgcgtcgctgccctgcctgccccctgtccctctgtcagggtcctcagccagagctcc

SEQ ID NO: 31690 - DNA, 216 bp, Homo sapiens
  chr9:140708771-140708987
  hypo
aagcacttaccagaatcagggttaacagaactggaagacgtagttgtgactgggaggggaaatggaaggcctgtgcctgcacgtctgaccccccggcgcctctcttctcagtactgcgtgtgcatcgacgactgctcctccagcaactgcatgtgcggccagctcagcatgcgctgctggtacgacaaggtgagggcggcctcgtgtgcgtgggct

SEQ ID NO: 31691 - DNA, 194 bp, Homo sapiens
  chr9:14232126-14232320
  hypo
cgagggaaggagcgacaccatggctaggtaagaatgaaatgggttcatggatgttaggaagaaaaaaacgtatgccatggtgggcaagtcaatagtgtttgtgccttttctgcatggctgctttttctcatacaagagccacttctggacaataatgagaccccgtaaagcatctgcttagggattacgacccc

SEQ ID NO: 31692 - DNA, 1382 bp, Homo sapiens
  chr9:14314414-14315796
  binary
cgatctcctgaaaaattccaaacgataaatcccgctctcccgctcggctccaaactcctctcttttctgctctaggctcttttttttccctccctctcttgctttctttcgttgcaaaacttggaagttgaaaaattcaccggttccaccctctggaccccgctcgagctctctccaaatcagacttaaggattgttttattatttaattacacaatcatcgctttactcctcctcctgcaaacgcgcattccttttgcaccagcctctccacaccccccgcccccccaccttcctcctcctcctccttctccttctctccccccacctctccctcatttgttaaaggtatcctaccggtgctacagaaccatgactttttttttttttccaaaatagctcttctttccgctgccctccccacaccagcacacacatacacacccccgaaaacccgccctggaagaggtatttcggtgctcgctgcggactcttttaagccgcgggaacatccgagtgggagaagcaccgaaaccgtctgagcccgagaaaggaacgagtggaaaattccctcacacccaggccgcccccaggccggggctggggcgcggacactcgcacccggggcgggctcagtccgcggagcctgcggctgccgggaaaagggggaggccgagcaggcggggacctgagcgaacttgggctcaagtagttggggcgcgccggcgtggaccaggggggtgcggcgcccagcccccgacggccccgcccggagcccgggttcgcggatagggagggggtgcgggttcgtcccgggtctgcccaccaggggcccgcacccgaggcagtcgcggcgcgcggcgcttcgccgcggtttgccgccctccccgggggtgccccgtgcacgtggcctcgctctgagcgggaggaccgggccgagccgccgccgccgcctcttgctccctccacctcctccccgcgcccggcttcgctctcctcctcctcctcctgcagccccgctggctggctcccaatccccaccccccggggcccggggcgccggcggaaagcgtctccctacccgcccgggtgcaggcggggcggggccgcggcgcgcccggggctgcggggcgggccggcgggcgcgcgcgcgccgctgcagccctccagaggctgcgggccctgagccgctcggcgcccgcgccggctccccaccgcggcgctgccccgcccccaccccgtcgcccgtgcaggctccgagtgaatgaacttgattccagggattttgaagaaggcggttcgccttgcaccctttctgcaccccccgcccacatacacacaccgccccccaaatccagttttctgcttggggtggatggggac

SEQ ID NO: 31693 - DNA, 440 bp, Homo sapiens
  chr9:2047360-2047800
  hypo
cgcagccggccccggggcagccctcgcccgtcctccagctgcagcagaagcagagccgcatcagccccatccagaaaccgcaaggcctggaccccgtggaaattctgcaagagcgggaatacaggtaacgcaccccgccagcaaggggccccctgcggtgtgctagcacctgccgcccaagccgaggggggtgaggcgcctgcctccttggttggccaaactgtgattttcacccgtgcggtcggaaaactttcatccactcctggggccttcccggtgctgaggggaggcaccggggttttgaagatcaaaagccgacggggacttcctgtggacccgagagagtgatcatctcacactgcgactgtggaatacactgtccgtgtttgtgcttgtgcggttcggtgatgacggaggggctgggacgctgagtgtgttgc

SEQ ID NO: 31694 - DNA, 360 bp, Homo sapiens; identical to SEQ ID NO: 30453
  chr9:37950454-37950814
  hypo

SEQ ID NO: 31695 - DNA, 205 bp, Homo sapiens
  chr9:6997072-6997277
  hypo
cggtgcctgcgtttacaaagtagtgatggtagcagcacctgccgcatggaggaattgttttgagggttaaaaaagtgtttggcacataatgactgtttgttgttgctgttgtaaggagagggggaaagtgacagctgattggtaagggggagccaagttgtggccgttgaggagaaattttccaggaccagaatgggcgcagagc

SEQ ID NO: 31696 - DNA, 112 bp, Homo sapiens
  chr9:75271069-75271181
  hypo
cggctccgtgggtgtttttccggtatccttaaaagccatcactgctgcgcggcttcctgacctacttgttccggcaagagtgaacagtggtgagtcaggagcaggtgcgggc

SEQ ID NO: 31697 - DNA, 77 bp, Homo sapiens
  chr9:78557022-78557099
  hypo
cgggcatgcgccaaagcgtagcgcactcgttgcctgcccggagcagctgctaccaactgaggccggctgtcctcagg

SEQ ID NO: 31698 - DNA, 219 bp, Homo sapiens
  chr9:95820744-95820963
  hyper
cgcgtgcaacgccccggagtagcaacactttccgctcagccggctgccttggcccgctgggtatttggtctccccaagggcccccgcccacagcccccggccggacctcggccccagtccaacgtgtgggcgtggtctgtaagttgcatggaaccgcccctgggcgggcgtggagggcggggcctccccgcccctcacccaggcccaggcccaggcccc

SEQ ID NO: 31699 - DNA, 215 bp, Homo sapiens
  chr9:95821006-95821221
  hyper
cgcctcggagcgcgcaggatgcgctgggcggccgccaccctccgtggcaaggcgaggccccgggggcgggccggggtcaccacgcctgccccagggaaccgcacaggtgagggctggggccgagtggccgcgtgcggggctctgcgcccatttcacagacgggaaagccgaggggagggggtcgcggggccgcacagccgtgggtgggggccaca

SEQ ID NO: 31700 - DNA, 429 bp, Homo sapiens
  chr9:97767434-97767863
  binary
cgcagccgctgcagagggagcgtcgcgccggggcggagtgcgggcttgcgcggcaagtgcgcgccgaggtgagtgcgggcggcgcggtccctgcgccccggtggcgccggcgcgagaccgcggctggcgagaggccctggctctgcgctgcggcgcgcgggtgcggggactacccgccaggctccggctcgggcgcggggagcggccgtgacgaaggtcgcggcccctgcggtgaggcgcccggcgagttccgcgggcgggcgcgggtggcctcccgaggtgcggggaagaccaggtcgcgaggccgggggtctctgctttctcgcgctgggggatggccgtcaggaccctgtcgccttctttgaaatgctgtggtttttgaacctcaggtcacgaaatggattggagtgaaccggagaccccgaaaac

SEQ ID NO: 31701 - DNA, 124 bp, Homo sapiens
  chr9:97808146-97808270
  hypo
cgctgccggcccctgcggaatggagagtggtgttcggggatttgctttggaaatgccttgggaaggcgccgccacctccactttgaacaacggtaggaacgcagggtaggtgctcaggtggcac

SEQ ID NO: 31702 - DNA, 1264 bp, Homo sapiens
  chr9:98272643-98273907
  binary
cgcggatcgcgaggattcgtcccgacaccgcgtccagtgtcaccaaggcatcccggggattcgcttcccgcggagggggaaaacacgcgaccctttgaggtggattctggagccagacacgtctacacaactaggctttttatttaaaaaaatttttgttttcggaaagtggaatgtgtttttcttacgtttccaagttattacgttcctccctgcggtaggaacccgacccgcaaacccttgatttgcttcactttatttttttttttaaacggggttgaactgcagagggactggcagtagcgagaagtctagtgaagtcgtgaaatggggcggtgtggctttaagatgcgcacggtgtatgttcattgaaaaaaaaagaagaaagaaaggaaaggaaagaaagaaacccagatggagggaaagggggaggagcagggagaaggcggagctccggtggccacgtgaccccgcgccaggaggcccggtgcgcgcgcgcgcccggctcccggactccccgcgcccgcgcggccggggcagagtaggtagggaggcggatgcgccgggccggctccgggcctccagcgcggtctcccgagagcccaggcgaggcgcgcgcccagccggcgcggacggacgtgccggacgcgccgtagtacattcctgaaggcggaccggcccccttacgctgcccaatgcccgcgccgcctccccgcgaccggccaatggtcgcgctcacgagtccctgcccattcagcggccccgcgctggctgcccgggcgcgctgggggctgcggcggggcgcgccggccaccggggcggtccacgcggctcccgcagggggcccgtccgccggctctccccgcccccttccttcctccccggcggtttcccctccccgcttccttccttcggcctgcgccttctccttcctccctcgccccgctccctccctcaatctcccctcccccaccagcctggccaccttccctccagcctctcctcctccccggcttcagggggaggcccttcccccgaccccctaacccgcaaaccgtatgcggtgccggggtcagggcgggatgtcccgaggaagagagggagacggggtggaggtgtttgggggcgttcgcgggatccggagggggacctgagcaccgggccagcgcggaaattcaaaactcagaccgcttaaggagcacgtgattttgtgagtgcctcagggaagggctgcggaaactcggaaagcaggcgggcagcatgc

SEQ ID NO: 31703 - DNA, 117 bp, Homo sapiens
  chrX:15755988-15756105
  hyper
cgagggaaagtcactttttagataaggctctgaagccccaggtctagtttcaatccactaatgcggccagcggcgagcaggaggagggaggattggtccggcgggggcggggccaga

SEQ ID NO: 31704 - DNA, 300 bp, Homo sapiens
  chrX:15756366-15756666
  hyper
tggggcgtaacagggcacgagggggcgtagcttcgatggccggacgtgcaggctgcggatccccgtaggcgagcgagcggctaggttcgtgatctggagagacgctcaggtaaggacgggtggccgagaggagtggggggcgaccagggacaggccgatccagacagggccgtgattcttcccacgactctccgctctggcgcaccgggttccggagctaggagagctgttgatcctgcgagtattgtctgggtcccggcagggcgcccgggagtactgagtggggcctaatggggtgtc

SEQ ID NO: 31705 - DNA, 218 bp, Homo sapiens
  chrY:15863192-15863410
  hyper
cgccttaggaaacaaagcgtgtggaactaaaggaaggtaggacgcccctggcggtcctgaggcctctttggtcctgctaaagagagcacccctgctggcaggcgtgggcctgctcacacctggacggagaggggaggtaggaggggcaggaagcggttggtgcggacggggaggcgactgcgtggggtcttccgacatcacccttcagctgagtgtcc

SEQ ID NO: 31706 - DNA, 461 bp, Homo sapiens
  chrY:15863654-15864115
  hyper
cgccctcgcatccgatcggcagccatggtgcccgaggtgcccggcgcggtcctgaccctctgcctctggctggaggcctcggagggctgcctggcggccggccccggagcagctgctgctcagctgctggacgagtcgctgtctgccgggagcgtcctgcgcgcccgctgcgcctccaggtgcctaagcttgccaatcatacgcatctctgccttcttccagcacttccaggttagtggagactcccgcccgccccgggttctttctggtgctgcggccgcggcgggagtgcacccgggcgcgagagtgcacccgggcgcgcgccgaccagcctaggcgcgaaaagttttcggccagcgcagcgagctgacctggcttctcctgggcgtggatcttacagtcggggtgcttaaatcgtgttttccagcctcctcccggctcccgatacgaaaaagaagccc

SEQ ID NO: 31707 - DNA, 74 bp, Homo sapiens
  chrY:16635744-16635818
  hyper
cgcgctggaaaccccgcgtgaagatgaaatgactgtagctccgtgctgctcctccaaactcgggagcggtatcc

SEQ ID NO: 31708 - DNA, 1082 bp, Homo sapiens
  chrY:16636060-16637142
  binary
ggtatcaggtgatccggagccctagtcggtgcccactaagaacaccccttctcccatcgggggttcggaggagtgttaagcctgcgggtctgccagtccctaaggtagggatgggggaggggtctgaggaatccgttccaataggcacaccatccccacagccctagaaaaggcaaccaccacccgctccttcctcccgcaccatcccatctcaaggctctctgctgacccgggccgatttcatctggtctcttctcccccgcttcccacctcccaattcccgcgcagctcggctccgttccctcccactcccctaggcggaactgaaagcgaagatcagccaagagcacagtcggaggcggcagagacggtggcgggtgagctaggggctgtgagacgaagcagggagagagtgaacttcagccccgtcccctccccactgccacggctggggcaacccaacccgcgcctgaagcggcttggcttgacctgcggaagcgcgggccgggatggcgtggggagagggaggtaggtgccactgggctgcagatgacgagtgggttgggggcttgctgtgggacaagaggttcaggttccggcctgcgccttccactccgcggtggcgctctctgcctgcggttttccaggaggccgatctaccccagggacactctcatccttcaggcggtctcctggacgccctttcctccccttgcctcccagcctgacctggctctttcgcccctcggagaaccggtaggttggggtccctcggcgggggtctagtgagccgagtcgcgagctttgcgcccccggtatctaggccccgtgccgcgcgcaaatccgggcccaggcgtacagttctggagcctagtcgccgccagacacagggccctttgtacccggaggagcgggagcgggagcgggggcgtcagggcaacccttgcaccccagaggcctgcctaggaccaccctgggaacaaatgtctcgctcggaaaacgaggtgaacccggaggatgtcctacgcatcatacccctccccttcttgagaaggctttttctttttttctttttttttccc

SEQ ID NO: 31709 - DNA, 208 bp, Homo sapiens
  chrY:21205113-21205321
  hypo
tcctcgcagcctccactggaacaatagtttcccttgttgaggctgctaccctggaagcgaggagaggcggggacgaaggaggagccgagtgtccatcttgcgcatctggcctcccgcatctaggcacatgtttaagatgcttacacagcaggtgccatgctaactgctggcagaaggaatcccgccttcttgcatgcaggcactcgcc

SEQ ID NO: 31710 - DNA, 122 bp, Homo sapiens
  chrY:22918582-22918704
  hypo
gcagttgttacagctgaagataaagacattttactgttaactgagacgagtttctctgaaaaagtttggtgtctttttcaggcccggggccccaagaagcacttgaagcgtgttgcagcgcc

SEQ ID NO: 31711 - DNA, 97 bp, Homo sapiens
  NW_001838014.1_249000-295694:3973-4070
  hypo
cgtgtggatcccacagacagacacccttgggtggccccgaggacgcgggagaaagtcccccttcccagaccggtctcgatctcatgggatcaagtta

SEQ ID NO: 31712 - DNA, 522 bp, Homo sapiens
  AC241851.2_88-34049:15074-15596
  hyper
cggcgccgcggctttttgcggctttttgccgccgcgggtttttcctgccgcggcttcttgcccccaccgcccgggctttttgcgccgcggctttttgctgctatttgtccctgccaccgcggcgttttgcccccgcagccgcggctccttgccccctacgcggcttcctgcctccgccaccgtggctttttatcaccccagccgctttttgaaccccccgccgcgggtttttgccgccgcggcttcttgcccccctcgccgcggctttttacccccacagcggcggctttctgcccctgcctctgagggtttttgcggctttatgtccccgctgtcgtggctttttgccgccgcggcttttggccccctccgccgcggctttttgcggcttttggcacccaacgccgcggctttttggggcttttggtccccgccaccggggcttttttcccccaccgccgcaggtttttcccgcccctgctttttgcccccgccaccgcggcttcttacccccgccaccgc

SEQ ID NO: 31713 - DNA, 986 bp, Homo sapiens
  chr1:10057121-10058107
  hyper
cgcgcggtgggcagagccaggagcaccgggctgaggcggccgggagcgcagcggcttctaggggtgagtgggacccacgcggccccacctgctcctcccgcgcgcggccccacccccctgccccgccccgcctggtttataggtcccggcccgagcctccggccgcccgccgggtttgtcccgcgatccccgaccatgcccgccgacctcagcggtacttggaccctgctcagcagcgacaacttcgagggctacatgctggccctaggtaaggcggaggggaggcggcggcggcgcgaggctcgccgtgggtctcgggatcaggcgaaggcggccgggccgggcctgtaggtacgtcctctgtccgtgcctccgccctgctgcgcccaccgtcgcccagtcgcccccgagtccgctggtccttggcgcctccgtccatcgggcgcgggaccccagtccttcagtcccccagtccgtcctttcccgcgcccacccgcccccctgtccccacggccgtctctccacgccctctgttcccccggccgtcggtcccccacccgtccgtccctgagtgcccgcgtccagccccacgtccgtctctacccgcacgcggcacacctgcggagactgcagactcggggtccggccggggaggggggtccggccggggagggggcgcccgggaccgaagcctctgcccggccaccctccccgcagccgccttccgtgcaggccccggggccccgggcgcgctcccgcagcgaagtcccagcagcctcggcgcacccggagcgggtcggggatgcagaatcctggagccagcggacgacccttcaggtccgggcacccgcgggagtgcagagcctggttcggcccggggcgtgccccgaccgccgcctcccacgagggctgggtgcccgcggcgttcttgctcccgggggccccgcgctgtgcttcccgccctcatcgcggtgccaacggtgcgc

SEQ ID NO: 31714 - DNA, 857 bp, Homo sapiens
  chr1:110008905-110009762
  hyper
cggcgctgggcagtttgcaatccaggaaaatagggaaggataaacctgaagcctgtgcgtccaggtgcgcctggctagggtttccgacggccgcggtgtctcggtggggaccggtcccggaggcttcggcgaggaggacccggagtcccccccgccccgcggcggaactaaccacggaggcctctggtccctttaaggtgcccggcgagcggagaaagggagcagagggggcgggaggagggttcgggagcgcacgccacgtgacccggcggccaagttcgctgcgagtttgacagaagtttgaatccgagtcgggggctttctgctgccggcggggcaccgcggcggccgcagcctctgagagcacgaacagcagcgcccccgcgtcccagccagccagccagccagactggactccggcccaccgacggccgctcgcgctccggccccgctcgcctgctctgccccggacctgcagctccccgctcccccgccgtgtccgccgcctcccggccagagagccaagccaccacgccgcgcccagcgctcgccgcgccagcatgtcctcgaccgagagcgccggccgcacggcggacaagtcgccgcgccagcaggtagtccctgcgcgcccaggactctcacccgcccctctccacctagatgtcgggctgcacacttatcccacccctggaccgcgtgtgagtggggcaaggggaccagcgccttcccagggttccccaccgccctgaccccccggccggctgtgtctccgcaggtggaccgcctactcgtggggctgcgctggcggcggctggaggagccgctgggcttcatcaaagttctccagtgggtgagtc

SEQ ID NO: 31715 - DNA, 820 bp, Homo sapiens
  chr1:112532952-112533772
  hyper
cggagtgtaccgacgcgggtgtgagcgcgtgtgccagcgagggtgggcacgggggtgagcgtggcaaggtgagctgggtttgggggtgggggaggagcagggagtacggcgtgagcgtaagttcgggggcgtgtgtggctggggacccacggagaggtggcagggagggccggcgtgtgcgcgcgtggggtatgtgtgcacctagctgtgtgtctatttctcgctgactgtccacagggcagcagcacctgcttgagaccaagcccggcgacctggcaaggtggggccccctaccgcgcaatctttgcggctggcccccggctctcagctccgagtgcagaggctgaagaggtacccgggggacacactgcctctaaccccacctatgagccgctctcctctcggaggacgaaggcaccatcagaaggtcgagattcgccctcctctcccgccacgtctacccactacctagaccgggagtctggacttgggagcgtgaactctcacccgagccggtccccttacaactggagcccgcccagcccctcagtccctccctgaagcccatgggtccccactgctccgtgcctcgtcgacccaggatggggagtgggaaggtcagcatgtgcccacagggccaggtgtccggcccagattcccaccctcagggcggcggcgcgcaaagggcgcagtccccgccgctgggcggacccgcggctccggctttcccggtgtctccagcctcggtgcccggaatcctggatctcggcctggcgctccggaagcgaggcagctccgtgccccagcagggacggggaac

SEQ ID NO: 31716 - DNA, 1489 bp, Homo sapiens
  chr1:113932580-113934069
  binary
cggaacctcggccggctcaggactccgcacgttgtcttccaatctaagcacaccggcccctctctgcgccccgcacaggctcagaggctccgcccgcgtctccgcctaactcgccggccacgcccccacttcggggagctcggtccctctcggattcgagttttcctcggctccagccgccgcgcagagggcctctcccggccctgcgacctacagccccttccactcccctgcccctcctctgcgccctccctcactctccaaacttcttttttccaccctctctaaacttcagtcattctagtgcccgcctcctccactcgcaccgaccaaccagtggtccccattctcgttggcggtccgcctcctgcccgccgggggccaatccctggcgcgagagtccagggccggggctcgttcccaagcgcccagcctgtgacggcagcgcgccgggcgccgcgcggcgggagggggcggggctctggatgagggatgggcgagggccgggggaagggaaaagggaggaggaggaggttgcggctggtttgaaagcggcagtttcctggcagcttgggcaggcgttggtctccgcgctacagctccgcagcggccacgatcgatcccgcgacgggtctacgcgcgcttctgcgcgccccccacggatttttcccgttcccggctcttcccccttcacctccccgcccccccgcctcagcctttcccgccgctcgggcgctgagcccagggaccagccggcggcagtgaccccgcccgaagccccttctggaacctcctggggacaattcccttttcctttcttcagcctaacccgcggtggccctcgcggagtccggtcagccccggggagcgcagccgggaggggcgtccaaggggcgtctcgcgtctgggaacggccgggcccccagcgggctgtggtcgcggggtgggggccggagcggcgaggccccccttaccgggctgcgcgggccgcccagggcccccgggctgagacggggccggagcggcgccccggccgcccgcgcggggtctcccccatggtgcagcggggttcgggatgtcgaagacgctgaagaagaagaagcactggctcagcaaggtgcaggagtgcgccgtgtcctgggccgggcccccgggcgacttcggcgcggagatccgcggtggcgcggagcgtggcgagttcccctacctggggcggctccgcgaggagcccggcgggggcacctgctgcgtcgtctcgggcaaggcgcccagcccaggcgatgtgctgctggaggtaaacgggacgcctgtcagcgggctcaccaaccgggacaccctggctgtcatccgccacttccgcgagcccatccgtctcaagactgtgaaaccaggtacgccggccctgcgtatctgtctcggggtgttggggagaggggcttcagggtgggcgtcctgggagcggcggcacctccccaccgcgtattgtccc

SEQ ID NO: 31717 - DNA, 834 bp, Homo sapiens
  chr1:115880380-115881214
  binary
cgctctgcgctccccccgcggtgctggccgccactcctcccgccctggcgcgccagctgccggcgcatccctctccgcgcccattcgctctccctcacttgcgcgttatccacttctagccctcgagctagaccctggcatggccgtgggcttctgcaggcgccagggctgctccctggactgcaggccatcctgggactagggactccacgaccagaactaacgctgttccctcggtccgactcgtcctcccgcgagggtcccgcgcccccacacccactcgggacatttctcagggctgctcttcggcctgcgggagcctcgggggtaaccagagagctcgccagaccggtatccttgcaaactctcccgcgaagcccagccacccctgcccgcgcccgcgctgcgcccctctcgggatcggctcggggcagcctgactcaccgctgcgctcccctccggctcccagcgctctctgctgtgccggagcgccgagctgctctcacacaggcttcttgaattcttagcccctcctcccgtactcctgagtcacacgctccaaatcctggcccccatccctcccctccccaccaccagccccgcacctgctgtggctgggctgtggtgcccggctggagggggtcctggggactacagacggatcgctcctggagggctggccagacccagccagagaaggactttaaaccttcagaggtcaaagggaaacccactggggtctgaggggccgcgcgcgcaaagccgggagggggagtttctggggcaccggcaggggtcgttgggccgactggctggggctgggcggagttgctc

SEQ ID NO: 31718 - DNA, 1132 bp, Homo sapiens; identical to SEQ ID NO: 28140
  chr1:116184428-116185560
  binary

SEQ ID NO: 31719 - DNA, 670 bp, Homo sapiens
  chr1:116370923-116371593
  hyper
cgtggccgcgatcccacctgcggcgtccgcgtccgcccgctctccctgaggtctgcaccctgagaggaggggcgagcgagccaacttggggcagggatcaccgtgtccacaggcgcccactggtgtggcgtcctgagagtgcgtgcgtgagcgagcgagcggcttatcctagactgaagacccagggaaacagatctgtgtggaggatgtttctgttttcagcagaacagacgcagcccccgagtcagtgccgtcagaagacacgtcagtcaattcagtggaaaacacttccagtgtgaggcgttcgccggcgccccttagacgcggccgggtctgaggcgcctgccgagcgaggtggcgcggcccgggagctgtggtcgaagcccctgggcctggcgtgtaggctgcgcgggcggcggcgggctgggggcggggctctccgccctccgcgcgggtccgcctggcccctcccccgcccaccccgcgcccgtcccgcctcccccaccttctcccagaggaggtgacagacgggcctgtaatttggttccattcgctcgactggagcaacacctgcccccctcccctgggacgcgagggtctcatcccaaaccagacaagaagccaaagacaaatcccagcccacatgcagatccgacgcggaaaggagcgc

SEQ ID NO: 31720 - DNA, 996 bp, Homo sapiens
  chr1:116381152-116382148
  binary
cgataggatctggcccgagggcgcgagccctgcgcctcgccctggcgcgggagccggcggggacgcggttgacccaggccgcatactagactggacacctcgacttgcagacggccacagcgggcctgtggccctgggcctggggaacaaccgcaggcctgtggggtcgcgactgggtttttgtgcctcttccggccaaatgccaaccgcgctattcctcctccctcccttcgtccccttcccggacaaacgagcgatttcgaacaacgaatacatctgggttttcacgggggcggggagacgcggggtgcacttctcgccccgagggcctccggcgaagcaacccggcagccgcggcgcccgagggcctggcgctggtctggggctgcgccgggggcgcctggctctggggtgcggccggtcaggaatccccatcctggagcgcaggcggagagccagtggctgggggcgggaaggcttcttggacccctcgcgcttctccgaaatcgtaaagaaatgactaaacaaacgtgggggagcctttaaaaagaaaattgactccgatgccctcgcaggctcccggagcaccatctgtcacgcagacagccacacacataggggacctagggacacggcgacgtgggatcagacaatgcgcccggcagtctggcgaccaccttgcgggaaaatgccggcagccgggccgctgagggaggagaggatgcagagggaagggaagagaagggaagggcccggggcggggcaggcggggactagcgggtgcagcgcgtgttgtcccggcgggagctgcatctctgccggcaaagttcgggcgctcccggaaccggagctcggcaggctgcagctgtccccgggtggcctggccaagtccgggcatgtcggtgcttagccttcctctaacttaactgtgccctcttggaaacgccacctggccaggcttctctggggcgcctggagcactggcccggactgtgc

SEQ ID NO: 31721 - DNA, 778 bp, Homo sapiens
  chr1:117452644-117453422
  hyper
cggagccaggggcgcacgtacgccccagcgctgggatttatcggctcgcgaggagagcggagcaggcgcgcggcccaggcggaggagcgccgactctggagcagccggagctggaagaggaggaggaggagaggcggcggggaaggaggaggagggggagagtcgctcccgccgggcgagcatggggcgcctggcctcgaggccgctgctgctggcgctcctgtcgttgggtgagtgtgcgcggggctcagcggggcacacggggactggcgaggccctggagggctcggcggggcgcggctgcagcgcgcggcctggggcgccgagggtgcccgggctgctcccgggaaacccggccggggtgcgcgggttgttcggcccggcggggagcggccgcggggccgcccggagcctggcgcgaatccgctcgggccccgcgcgcggggtgcaagtggccgctccgccaggccgagcctcgcccccaacatgtgccggggggagtggcccggggccgtctttcccccaggtctccctacctgttggccgccgggagcccggctcaccttgaactcccggcccggaaggtgctgcggtcccggcccgggtcctcggctcgagagcggaaatgtgagcctttgatatgccccgccatagccgccgccggccgggtcgctcttcacccaacccgcgcggagttgcctttccagggaagcgagagaatcctccaacttccttccacgaaggtcacagggtggcccggagcgttacaatggaaatc

SEQ ID NO: 31722 - DNA, 899 bp, Homo sapiens
  chr1:14218926-14219825
  hyper
cgagatgatgcagcctctctggagttagcatcttcatgattagcaggtggaatagcaaaataaacccagcactggcagaaatagctgttggaatcatgcaaaaagtacccctctcctccttttccagagaagcggccccttttggtttggagcaggggacagatccttcatacacagtagggttgggtcggctaagatgaagtactcagatctctgtatcaccggagcgccctaggggatgtgtggcattttctccttttctcttcttggtctctggattttatcgcaggcagtcgggtctcccgtgcctggcacttccttggctgtgggcaggaagaggttacagcagccctggagcctgctgggctgagttagcacttccctccgcatccagaatatctcccaggaactgccccctttgcatcgccgcaccggggtggcggcgcgggctgggggccgctgcagcaggtctcagtccctccctgctgccacgcgaggagtggggagcggcagggcctaggcgtcccgagtggaggatgagccggagacgcctgcgggtccggagctgcaccgcgcccgtgcggcccgcgccgcccgcctcccgcgctctccctttggcagcagccggacgcctggcgcgtgcaggacctggggccgcggcgctcgcgcggggacgcgggagcccagggtcggcgctgcaggcagcggggcggcgccagcaaggccagctccccggggaccctggggcagcctcgcgccctgcctgcctccctggactgagacgccgcggggcctgggcagcgctctgccggcagctggtgctggaacacagccggggctgagctgctcccggggaccctgccccttccaggtgaccccaggagaagcagccccgggcc

SEQ ID NO: 31723 - DNA, 1047 bp, Homo sapiens
  chr1:15250613-15251660
  hyper
cgcgggactgagagccgttcccacgtgagaggctccgcggccgaattcctcgcgtgcagcaggcgcggaccgcccggcgtccggccggactgagagccctggtccggcgcgcgccgccggccgggcgggaggcgggggcgggctcggctgcgccccgatgcggcggcgacctccgggtctgtgagcccggcgcgcgccgtcggagcccctcgcgcagccgctggtagcgtccccccgggcacccggcatgcgggcggccgactcgggctcgtgggagcgcgtccgccagctcgcggcgcagggcgagccggcgccttcctgcggggcgggggccgggcccgcgcggcccccgggacccgcagcctgcgagcagtgcgtggacgcggcggggcccggcgatcggccccgcgccggggttccccgggtccgagcggatggcgactgcagccagcccggtaggtgcgcgcggggcggggcggggcgggcggcgcggacacaggcccaggagccgccggggccgggcgcgcgagggcgctcggagccgggatcgggaagccgctggtggcaaagttctcgcagcgcgcggagccccgagccccgggcgggtgcagcgggaggcgtgcgggacgcagagtgagttcctcggcgtggggaccggggctcgggggctgcaccggggggccaggaccgcgcttgccggagccaggcgatcccgcggcgcctggagacccagctccgggctggaccccgcgtctgctgggggaagcgtgggaaaggggccagccctgcgcgaagttggttcggccccctgggaccgcacctgtgagccatgtggcggcccccgcggagtgccgaggggagcccccttcaccgccgcccctccgaggcgaaattgatgcctcgcatttgctaggagcggagagattgctgcgtttctcatacacttgaactccgagtaatgcagaaagagaaattgcagaggtggagacacaaacgcagtgatctaattgcgtttggttggcgaatccgccccaagtggagaacagc

SEQ ID NO: 31724 - DNA, 1899 bp, Homo sapiens
  chr1:15478897-15480796
  hyper
cgtggacaccatatgtacccatgaattccgcctttggaagtgaacttgattgcagcctattttcgtctggaggcggtggattcccggtaggaggcgccttcagtcctcggctcgatcctgtgacgccagccagctgcctatcggcttctcagtgtttgaacttcaaagggctggacgctcacccaagaaggggaccccggcctgacctctctcggaattcaaaaaaatctaaggctcagagagggaatgggagctggctcttccctctgtgtttagcatccacgttttttggcggtctggctgaaaccagcccaccctagttcgggcgccagagcaacgcagttccgagggcagatctccaaggggcggaggcagagccgcgggtgagaggcttccgcgccgacttcgggtttgcactccccggagccagaactccgtggcggctccgggcctccgtggatccgagcagagactggctgcccgcctgccactcgcaggctgggaaaacgccagccggtgcctcgccgggaaagttctcggcaaagctggggatgagccctcagcagggcaggctcccggtgcagcgcgcccccatccattgcccgcgcgcaagaacccggaatgggccccacctgggccgggactcgggcgtgcgatcccgagggcgccctggggaccacgcatcgggtggggaccctggccgagggcgtgagctgactcagtttttaaaaactcgcttcctccttccctacttgtgccggtcactcacctcgctgggaaccagcccagggcagaagggggagagggaggcggtggcctccccaggaaggaggagaggtgagtatcccgccaggtaaaggcggggcggctggcggagctgtgcctcggcgtctgcgcctggtgtgggaggaaagcgggtctcccagctccacttaaacccctaaaacctgggacttctagcttgagacattccccgaccaccacccgtcacacacacgcgcgtgcgcgcacacacgcatgcacaccgattctctgggccctagggaggaggggggatcagggctctattttctcccgaccccctcttatccaactcggctggcaagggttggggagaacttaggcccagcccccggcacacgctcagcgcgctccagcggcatacgctggggagtgggtgcccgcctcgctcagctgcgatccctcgcctcgggcccgggggtggtgccgagggccgggagggagggtcggccggtgggcggtgcttctccgggctggaggccgctcctggccggcaccgccctccgcctcccgcggtccctccctcccgcacgccggcgctcccaggccgcgcttcctgcgtccccaacccggtccctgagagggcagtgcgccctctccaccactgcgttccctcggctaagaatcccccgaaccccagccccgcgatcgcggcgcccaccgaggaggccgcccgggtggggcgcgggggtcgcgaagcccgcagtcccggaccgcccagccgagacggagccggacccgccgcctcccgggtgagtctcagccgccgcgccttgcgcccgctgcttcccgcggcgcgctgtcggttccccacagggccgtgtaagggggccgaggcccgtttgggtctcctgtccgtccgtctgtccgccgagcgcttcccgcctggggtcgaccaccgggaggactccgcaccccgcaccctctgcggccgcgccccgccggcgcgggacgctcccgcctcccgggcaccgcgcctggccagctggcctcggctggggaaggcagctggccttgggggccccctgttggcgggaacaggtgctatccgcccggcgggcttcgaacccttggcttcgccagaagcgctttcagcgc

SEQ ID NO: 31725 - DNA, 507 bp, Homo sapiens
  chr1:15573595-15574102
  hyper
cgtggggcctggagcattcagcaggcggtaacccagtgggcgttccctgcacggtgccacgccccctctgccgcgcaggccacgccctcatctattaggctggaccccgcggcgcctggcggcgttgccatggcaacgcgcgtacacaggccggccgggcgggcggggtgccgggtgcgagctggagactccgcgggagcgcggccgggaggcttcgccccggagctggcccgacgcctcccgagctggcagggctctcggcggaggtcggagcgtgggcttcctcctcccgccaggtgagtgcggcgcgggaaggggtggcgggccgagaccggggaccggaaggggcggcccagcgaggactagccctggcaggaggaggggtggctccccggccccatcctcctggatccaggctccggtccccaggagcaccccagtagctaccccaacaccagcccctcctttccagatgcaggccccaccccgcccgcggaggaagccccc

SEQ ID NO: 31726 - DNA, 812 bp, Homo sapiens
  chr1:156646447-156647259
  hyper
cgacgtctccatgtgtgccacgcgctcctggtagccgcgcactgccccgcgccacgcctcgcccagtcgccttgccagctcctctacctccggggccggcgcgggaggcccgcggggcggcgcggggcagcggggggcacaggcagcctgcgcgttcaggccgacgcgctcctcctcgtgcgccacgcgtagagcctctagctcgcgctccagctctgccacctggctactcagccaggcccgggcgcatttctctgcctcgacggcgcgccggttgcgggctacctcctccgtcgtccgctcccgggccagccgcagctgctggcatcggcctgccacgccctccagctcttcagccaggttgtcgcgcgccacctcggccgcgtgcttctcccgccagcgttggtcaacgagggcccgcagggccgccagctcgtcgtcggcatgcgcccgccaggaggtgtccgcggattgtgcccggagccccccgagctccgcgctgagcagctcattctgctcctccagcgccttgacccgggccaggtaggcctccaggcgccgattgagctcccacatctgaaacgactcctcccccatgcagccctccatcctgctcgtctgacccactgaggatggacagacgcggggcaccgggagaagggagcggctcgcagagcttttaggacggaagagaaaagagaccgacggggacaatgacggggcggggcggggtgggagtagcctgagcgactgagagtcgggagtgggagcgaggctattcatactcccgccaggcgggcgggaagaggggc

SEQ ID NO: 31727 - DNA, 903 bp, Homo sapiens; identical to SEQ ID NO: 28155
  chr1:162039148-162040051
  binary

SEQ ID NO: 31728 - DNA, 1064 bp, Homo sapiens
  chr1:165204389-165205453
  binary
cgtatagggggcgatgcagtcgatggtatctgtagcacagtacccagaagacccgggagctaggaccaaaccaggagtcagctcagtccaaaggaaatcagggttcaggtagcgacggtgtccgtgcgtttcttcactagtgcatgtgcgaggagggctggaggcatgagcgaaagagggaaggcaatctcggtctccaaaaaatccaggggactctccctttcagcacaagcgctcacacgtgcgctcgcgcggacacacacacacacactcacactcacacacaaataaatccccagcacctgcctcggaaagccctctctcgcaggctggcccgaaggcgcggctccgccagcggagagcctttggatttaccgtggcattacttttaattaactctgcggcgcggcgcggggagcgcagggtgggccctaatcccgggcccgcctgacgtcacctgggaacgcgcggcggcgcggggcggcgcggacccgggacgacctcgccgcgacctggcctcgcctccgcccgcgcggggctttgctccgcgggaattaaaggaaggagaaatgttagtacacttttaattggaaaccgagttcttctttcagagcggcttgtttactcaggattgggcattagaactcaggggaggctctaattgaagtgacggctttggagattatggggaacatatggccctaccgccgggctctttatctgcattttctcataaaactgccgtccgtgtgtgtttctgcgcctggcctcttgcatttctaaggggcctttgaagacagggccgaatgcgcgcgggggcttcaggcactttgcgctccacggcgggtcccgcagcccggcccgagccggccctggaagcttcgccctggactagactggcaccgacgccgcccccagcctgagcgctgagagggaaaacgagagctagaaaggaaagaaatcggactggtgactgcctggcaggggtgtaattcaaactgttgtgagcagacggcaggagggagttgccaaggtaacgggtgattcccacccgccgccctttc

SEQ ID NO: 31729 - DNA, 794 bp, Homo sapiens
  chr1:170633373-170634167
  hyper
cgggcacgttctggagcggcaaccggcgctgggcggccgcttggacagcccgggcaacctcgacaccctgcaggcgaaaaagaacttctccgtcagtcacctgctagacctggaggaagccggggacatggtggcggcacaggcggatgagaacgtgggcgaggctggccggagcctgctggagtcgccgggactcaccagcggcagcgacaccccgcagcaggacagtgagtgaggggcgcatgcccacgggggtgtgtgcccgggacagagggcggggacccgtgtagggcagctagagcccgtccgcggccagaaagacaaggtcctgggaccaggagaggtgatggcagacttcaaaggaagggccagtcacaggggaaaccagatgagaaaagcgggtctcggccgagggcatagccaaggaggacgctggagagaggctccaaggtccggggacactccgaggccctgcggtctcaggcagggactctgtccgcggcggactctctttacttcggctaggcaccggctcggttcatcccgcacgcggggcggcggggctgggctgggaaaaggtcttagcggggtgcaaactcagagagccagcgctgtttgggaaagcagcaggttaaagatgctgagtcgggttggaagggcttctctcgggcagcgtatgacggcttgagggagggcaccaggcacagggagcaggacttggcgctgctcaggctgcactctccacgcgggcaccgtaaggccgggcgcgaccgggaggccccgagagaacgccc

SEQ ID NO: 31730 - DNA, 1426 bp, Homo sapiens
  chr1:178062419-178063845
  binary
cgcggacagggcgcagggcgcagaccctgtgcatatcccagaatcccggacccactgccactccactctgggaaggaagaaggcgctcccccttgggtgactgtaagataaagcagcttcttcgatctctttgtccaataagaaagaaacgttggcccataaagaaagaaagaaacaaataaataggaaaggtgtgagaaggaagggaagctcctttcttttctgtttaaatttcccgcacccttttacctccccgccttctcaaacggtctttactttgagcagcagagacccggaccgctcaatacccggctatccctgggagggtacttggaaagtaggcgggacaggccggatgaataattcggtgtccgacttttcctgcctgcggcgcagtccctccccggcttcgttactcgagtgcacacgcggccgggctctcggccctcgattgcttcagcctatcaccctgggatgccgcctgccgctgccgccgccgccgccgccgccaccgccaccgccaccgccaccgccaccgccgtggctgccgggtttgtgggatccgccgcggagcaggagccagagctgtggccggagctgtggcctgagagtcagggggcgggcaggctcattccagaagtgggggccgaggacaggcgggctagaacccggggccaccgccccctacccctcctcaggctgagggaacgggcactcggagcttctgaggcggcggcggcgggagccggtcagagggggcggcccctggcggcgacgcccccaagcccagccctgcccggccccgctccatccccagccagagcctggtctgaccgcgagagacgccggcggggctgaagaaggcggctccgaggaggtgggagggcgagcctcccctcccgggttcttctgcgtcctctcccgggagggacccacacacacctgagcccggacccacccttggtcggggccacgctggatcctcctcccggcctgggtcccgcccgccgactgcaggtgggctgcatcgcccgagcctcgggcagtgggcgacggggaaggaggtgagaggtgtccgcgccggctgccgctcgggtccctgccctcgctgcgcgctctcctcctccccttaccgcaggcagggcgcggagccgcgcgccagcccgccccgaagccgccgcctcgtccccctcccgcctcggggcaccatggagctctctccgtcgtccggaggagccgcggaggcgctgtcctggccggagatgttcccggcgctggagtccgactcgccgctgcccccggaggacctggacgcggttgtcccagtcagtggagccgtcgccggtggcatgttggatcggatccttctggagtccgtgtgccagcaacagagctgggtccgggtgtacggtaaggaccacaggcc

SEQ ID NO: 31731 - DNA, 995 bp, Homo sapiens
  chr1:179712201-179713196
  hyper
cgcgtttacatttcttaggcaaaaaggcagcggagctaagcaggggtgtttggaaggcgcccgttgcgctgtttgactgcgtggcttcacttggcccgcgtgcatcagcctctctggcgggggattctccccggactccggccagcgccaatcaggtcgcgcggtacctgcccccagccctggccacctggaggggcgatgaggctccacgcccggagcagggcagtcctcggagcgccggggaggccgcggagcctcacgtgtgccgccccagccgctggcgcccggaaggacgcgctgcgaccccgtgggagccgaacgcgggagtcgctgcccgagcggagctgctcagccgcggtaacgggtcggggcctcatcgtgcaggggagcgagcggaggggcggggcggggcgcgggcgggctgaggagccgccgggctcgggctccgcgcggggatgtgtctggccaccgcgtactttcgagggcgcctcaacacccgggtaagcgcgccccggctgcctccctctgcccaccgcgccgccttcagcgtagcagttccccactgggtctgggtctgcgccctggctctccctctccgcgccaggggcctctcgctccgaggggcgcggcgactcgggggcatctccggcctcgtggccagaccgcgggtggcggtgctcgcgcctcggggccggacttgccgggtccctgcccccgggccgtgccgaaggcgctctactcagcgtgtctgcagcgacccgcttctctgcgctttcagccgggccggacctcacgcggacgccgctgctgctgctgcgcctcgcgcccgccgccacccggggagcatgaggccggggcaggggacccgggtagggtgggggccgaccggcggggtctgctgggccaatgcgccgccgtcggtcagtgagtccggattcgtgccggcaactgtgggcagccttgagaccggggctcggtttgctggtgatttttcc

SEQ ID NO: 31732 - DNA, 982 bp, Homo sapiens
  chr1:18969363-18970345
  hyper
cggggaaggagtccagtgagagcgcagggggaactaccagcatgggaaggggaggggcctggaggaggaagagacggggtcgagggcaaaggggaggcgggggccaaaggaaagggtgtggggaggggatgcgaagggagggggtcggctgcacttggaacttcaacctcctgggagaggaaaagcgtctgcgggtcgctacagcctcgggaggggtgaagggaagttgtgtgcgccccaagtccagctcaaaagaggccccgagggcattctagggcgccttgggcacgcgtgccaggcccccggtttggcagccgagctgagcgagggtggattgcgaggggcactggggccgccgcggagctctgcgtgtcggctgccagtgaattggccgatttccccagtctgagggtcagcgaacggacctttccatggcttggtcgccctggtcctggaggtgcgctgggcccgagctccggtggagaccaagggaggggtggggagaggcagcggagacagagagccacagaggaggagagagctagaaaattcagagtgagaaagtctgagcgcagcagaagagaatcttgcgcacagtttgaggacgctggaaaatgcggaggcgccgagggaggcgccgagcagcaggaagaaagacaaagagatgcagaatcaccgagagactggccctgggacaggcggatcaggagagccagcgggacctagagacagcccgcgggagagcacgggccgagagggcgagtgctcaaagccgggcagcggctaggggaagataggaggcgggcgagccgcggccgcccttttgatccttcgtggcttcgccttatcagaagcgctttcggtgacatccgcacaaaggcagttcatcatattacagcacgtcccggcggctcgctgcgatcctgccgcttaattagaggcgagcgagctgggccggcagggcgggagggaggccgacccc

SEQ ID NO: 31733 - DNA, 826 bp, Homo sapiens
  chr1:19043067-19043893
  binary
cgcgccccatttcccttcgccccctgtgccaccacccccttgctcaccgtctccctgatcgcgtcataaccctgagaatacctccagcctgggtcctctctccacccactccattctctcaaaccctcatttccctctttgcctgcctcctcccatagctggcctcgcctctacccattctcttccccctaatctctctcattctcctctcctctctcattccgcacccaacaaacacctcttccccctccatcttcagcccctgcgcgccccccttgcccttgccctctcccccacccccgtgtcccctttccgaattcctccgctgctggtgggctccgaggcagggaccgggcgcgggctcccgaggccgggcggacccaagtccagggcgggggttggggcggcggccggagcggggatcgggtctggggggatccgcgcggccgcccctccccgcgctccgccgccgccgccgtcgccgccgcgcctttgatccatggcccgaggccgcctgacagtggaaaatgcggggagacaaaaccactcagtcaaagtgattcccaacaactgtctccccgagataaggacgccctcgggctcggcggcctgcttaattcccgctgcccgggcctgggatcccgagcagccgcgcgcctggccgccccccggactgcggagccgccgctcgctcgtccagtcttggtcgcggggcctcggccgtctcgggacggggcaggcggcgaagggacgggcagccggtaagcaagacccttgctgcctgctggagagagaggctccctcgggagcgccccgttccccaccc

SEQ ID NO: 31734 - DNA, 498 bp, Homo sapiens
  chr1:201252452-201252950
  hyper
cgagcaggaaggcgcccagcgtcccacacaggggactcgcagccctgcccccaagagcgctggctccgcagcagcagtgccctgcagctccgcgtctgagcagcagcagcgcgcggcccggtggagtgggtggtgcagggcaggggtggtatatcctgtctgacggagggcgggcctcgccagtgccagagagggacgaaccagggtggaagcgccaggagcagctgcagggagccctcacgcggaccacgcactctatggccgtagggagccgctgagagcgagaagagcacgctcctgcccgcccgctgcaccgcacctcgcctcgcctctctgctctcctaggccccggccgcgcgccacccgcctcccgccaccatgaaccactcgccgctcaagaccgccttggcgtacgaatgcttccaggaccaggacaactccacgttggctttgccgtcggaccaaaagatgaaaacaggcacgtctggcaggcagcgc

SEQ ID NO: 31735 - DNA, 504 bp, Homo sapiens
  chr1:201368376-201368880
  hyper
cggctccctccggcgctcacctggacagcgcggaccagtccttcctgctgacagccatgctgcaggagccccgcgtggccgcccgcgccccgccggccgccgcctcacctggcgcccctccccttccagcccaggtgggatcacatggccgcttatctcacccccgcgcgccccggccgcgctccgatttgccgacccgggaatggcctctgggatgtgggcgtcccagacaaagccgcattgattgcagcccaggccggcccggccgcgaggccgcaagcactgggtggaccgtcggacggatcgcgggaccgaacgacggacgcccggggccggcgtggggctggtcggctgcccggggcgagggcgggagacttcctgctcagaaccagtccgaccagcttggcgctgggacgcctccccgcgctgtgccgcggcccggggtgccgaggagctgggctgggggcggggacccctgccgggaacccgacttagcccggagac

SEQ ID NO: 31736 - DNA, 630 bp, Homo sapiens
  chr1:203096865-203097495
  hyper
cgccgggggcgacagagccgcaggcgcccgagtcgagtcccagccagctaccatccctctggagcttaccggccggccttggcttccccaggaatccctggagctagcggctgctgaaggcgtcgaggtgtgggggcacttggacagaacagtcaggcagccgggagctctgccagctttggtgaccttgggtaagtctgagtctcggttcacccctggggctccccaatgggggtgcaggagagggttgaaagaagagaccggaatgcccccttggggcaggccatgggcaaggttccccgacagagctggaacgggaccagaggactgctaagatccaggcaccagacgggtctcaagtgggtgggcgcagggcaggtgcgggcacgctggggaatagggagaaacgccccagccttgtcctgggctccgtccccagacccacgtctgccaccccagtcccaggtgcgaaacaggggcgctacctctttaaaagcgtccggggctgagtctctgccgtaccatgtgattgcttgaaaggccgggctgggagcgctgcggcgggagccggaggactatgagctgccgcgcgttgtccagagcccagcccagccctaccgcgcgcggccc

SEQ ID NO: 31737 - DNA, 791 bp, Homo sapiens
  chr1:204042250-204043041
  hyper
cgcagcagcgagccgcgagcgcccttctccagtcccggcttggaactgaactgtgtgagcacgggtcctggaacccgggcccagaaccggcgagcccaggtctgagcccagagctcagcggtcagcctcgtaggccctgactcggaatcgagccgaggcgctgaggttggagccggagagcgtgagagccgaagagcagggagggcgggccggctgcgcgtccgacgagtcgcagagcaggaccgcggaaggcagggagacggccgcaagcccagggcagagggcagagggcagagagcggcctggctcggcggagagggcgccgcccggccggaaccaagctcgccgcccgggacggcgggccccgtggggcgcggacccagggtggccgtgggtccgcagcgactccccggccgacggcggggggcgtgccccctcccagcccagcctccccaacccggcccgcccgccgcgtcgcgggggcatgtgagcgggaagcctaggctgccagccgcgaggaccgcacggaggaggagcaggagcgcggagccgcgagccccgagccccgagcccggcgcctggctgagtagtaagtgcacccctccccgccatgatcgcgccgtcgcgcccatttccccagctctctgaagtttgacacttgcgcccctacgtttctgggcacccaccggctctcttccctgcgagtttccaccctgtgcaaagtttttcgaggagagacggaccctcacctacccccaacaacgctgggcagtggcggctcctccctggcc

SEQ ID NO: 31738 - DNA, 887 bp, Homo sapiens
  chr1:204653955-204654842
  hyper
cgcacagactcgcgagctccaaggaggagaaagtccccaggctctggagcgcttccagcctgccagtccgcccgtgtcacgccctccctaacctcactgccacctctcggctcctccacatctccagggccccactctacccagcaacagtttgggggaggttctggcctctccaggcgaaggcccaggcgccctctccctggccgcttctgggcattctccagccctccgtccctctgcccctcggccgcctccctctcccaagtctccggctcccccgcaggcgtctcggcggaaggcagcggccggccctcctctggcccccacccgggtcaggcggagctgcggtgccggggcaggagccaggagccctgaggcggctgctccggccgctcccgccgcgtacgcctcggccacgccagcgacctcggtgtccacgattccccggcggcggcggcgctgcccaggtcagccccgaagctgcacactcaccccgtgggcgccgggcaccgtctgccgtctgctgcccgcgcggccgcgctccgctcgccttccgcccggggccgggctggggacgctggtccgcgccctcccgccgcgcgcgccgtctgcacaggccggggaggctcggcgggcgccctccccaacgtggagttatcctgggagcggctccagggcccagccggtgagggcgatggcagaatcccaatccgtccccaccccctctccgcgccctgggcgcgtcgcggccggaggctggcgggcgagagccaggcgctccttgagagcgccgcgcgttcgcaggtgcccggagcaggccctcgcggcgcccggcaccccctccacgcgcgcccctcttcccggcttcgcgctcgccctcctcactc

SEQ ID NO: 31739 - DNA, 966 bp, Homo sapiens
  chr1:20810336-20811302
  hyper
cgcggtgaaacagctccatcctccgtccctgccaggggtcccttccctgctttcctctgaaccacccaccaccctctatcctccagcctgcgtcccagctccattctgagaaaaggaaacagagggcgccaacccagccgctcctgctgcagccagggcgcgcactggcccgcgtcctccccgcaccaggcgcactaatttagacagaaatgtctggagctgggataggagagggagccaaagtctttgggtctcgggaccccaggtaagtcccgagcgcagctccggtgggcaaggctaggtgcggagatgagcggaaccaggaggggacgccaaaaccggttcccacgacgcgcagcgggtgggggttagggcctggcctgggcgggcgccccctcctgcgcgccctctcccagccgctggccgactgactcggccgccccgcgctccccgctgccgcagaggtcagagcctcccttcgctgcctgccagggacacatgccgtaacctcggcctctcttaccgtctcgacttagcctcgcctttctcagtccctccatcgtccctcggcgcgacggccggcagccgatcgaggtctctgtctctccctgtctaaggtgtcggtcgcccttattgtttcggcggcttctgcgtcctccccaaacgcgcgtcctcggctctgtctctcccgcttcagctcccctctcgggagctttgtctcggtctctgccaccctcggtctcccgcgtaccccctcccctccatccctgcgtctcagtctctctctgcagccgtcggtccccctcattgtccccgcgtctctggagctcctctcggagcctctctgcgtctccgcctctctggggcttttccagctctcgcgcggatcgcccaggcctggcaaaccccctcccaagccaagtaacaatgaaaagcccgtgcgacccgaacaccctagccttcccc

SEQ ID NO: 31740 - DNA, 1158 bp, Homo sapiens
  chr1:210110997-210112155
  binary
cggagatctgagacgagtatgtggctgattcgggcaaaacaaaacaaaataaaaccaaacgaaaccaaaacagacttactattaccaaatctgagagtcagtgggtgggaatccttttcaaccaaggagacctgtccatggtcctgaccacatcatttgccactcgcctccttcatggacaccgtttgctccaagtaccggacgggagggcgcccggcgccaggaagcttgggcttgggcccccacacgagctcggcgcgcttcgggcgggtctcgggcgcgggcccgtggctctccgggccgggcacctgtttcgaatcgaggcgcgaggcgcggtggggcggtggggtggggtggggtaggttggggtgggggcggggtggcgtcacgtgccagcggcggccccgggaaggttccatttcttccgcggcccgcactcgcggcgctcggggcccctccctcgccccgcccgcggcgcccctcgcggccgcacagccgggcgactccgggccgggccccgcccctctcgctggcggactcagcgcgtcctccgccagccctcgcgtctgctgcccccgccatccagttggtgcggtccatggcgagcgcatcatggcgattgaaggtaagtggaggctgacagcggggagcgaggaccgggaccacccagctggcggggggctcggaggtgcgccggcaggccgaggcgctgacggggccgcctcctgtggtctggagccggctgaagacgcgcgggggtcctggccgcgtctcgggaggcgggtgggcggagcggcgccgctgggacgccgggcccgactggctcgctcgccccggccttcgtggttttgccggcctcccggcggccgcacgcggggcaaagcgggctggcgggcaggtacagcgtccgggccgccgcctcctgccggccgcgcggagtggaggtcggggtgaggccctgcagaccccacgggacgggctgggaggagcgaggggccacggggggctcaggctgccctttcttttctttccccggccgcggcaaaccatccttccgcaatacccaccttcctgccaaactgagagtccagttttttgtcccattcctaacccttccctgtgcccgctcgggctgatgctgggttacactctctgccc

SEQ ID NO: 31741 - DNA, 1585 bp, Homo sapiens
  chr1:214724215-214725800
  hyper
cgttcccaaaacgcagaagggaatggagagaggggaccagggtgtgggtttaaccacaaactccccagactgcgctcaccttccagctcgctcccgggaccagctttgcgcctcaccgcgggcagctcccaccgcgagataacacccctgcggcccggccaccccgcgccccaggctgccctgccaggcgtcccggggcgccaatcgcaagttggcgttgccagcgtctgcccaagtcatctgcagggcgcccggagcgccaaggcggcctccaacctcgggcccaactcccggcttggacggggcttacctgcttacatggcccccgtggcgccccggagtcccgcgcggaaaggctgtccttcgcggcggcggagccgattccccacggaattgattccagtgactggcggaggaggggcgaagggaaggagccgcaggaggcgaaaggggagggaggtttccgccgcgatcccggcgcgagagtccgagcagaggcgcaccgggggagaaaaggagaaaaacctaagcacggggctgtcccgcccgaggaggccggggaggatggctcagctgggaggggaaggagcgccagtggccacttgatgtctgtctagggctccccgaggacctgagccaggagagcaggcggctgagcccggagaagcacagcaacctgcccccgagtctgcgcccgctgcgctcactccgccgagaaaaagttggaaagaactttgaggggccgggagagccagagcggcaggaaatgcgagcggccgggagaggagggaggaaggggccgtgcgagtgggaggggacggagcaggcgccggcggccacggctcccccaccccagagccgggctccgcggccctgggggccgggaggcggagggagcgctgggcgcgcggccgggggcggggaggaatgcggcccgggagggcgcgcgccgggggcgccgcgggcgcgcgctgaaacgtggagccccagctcccgagctcccgagctggaggcgcgccgtccttggggacgtcacagcgctggaatccgaggaatgccgggctgcaggagctccttctgcaggcccggagaagtcgcacacttttaatggggtagttttggaaaatgttttaaaaggtgggggccgaggacggaggaccggatgaaactccctggagtaagagacgtggaagtggagagagcaaggcgaccgcagccaccccaaccctgggctgctcccgccgttggggagaaagaggcaaggcaaggaagagcccacctagacttccgaggaccgcagagacggggcggcggcaggaacttgctcaccccgacctacattcagaatagtccaccttatattggggaaccctccaagcaggacgtttcatgcagccaccccacaggggaaaacagaccaggagaaagtaaggtggcctcaccaagtaggcaatctcagagatctctccctagaatctctgggtactggacccggtgtcttagccttctctccctgccccctcccgccccgtaggaatgataaaaagcagcctgtgtgctgagagttggaaaatgtcgttttccc

SEQ ID NO: 31742 - DNA, 934 bp, Homo sapiens
  chr1:215256051-215256985
  hyper
cgaagaggagggagttccgaaaggagggaaacgagccggcaaggggcgacaggagcgagccgggaagggagagcagcggagggctgcagagctgcgggcgcccggaccgtgccacacaccccccgcggggcacggagggcattgcggggggagacacacaaagacatgcgaagaggggctgaacgaggctcgcgcacaaagacgccggggcgcacggcagctggggctgcacccaccgcccccgcgccgcgccgtgccggggccgggccagcgagcagcccggggctgagcgcgtggcggcggcggcggcggcggcggcggcgggcaggcgcgggacccgggtcgcccgcgctctccgggtgacccgggcccggcagcaggcgcgcgcgggggcggcggcgcccaagcccaacttggcctccgcctcgccctctgcccagcccgccggtgtcccctccttcccgcgatttcgtttcttctcacgctcccccccccgccccctcccgcgtccagccccgctctccccaccttgtaaaacaaagccggggaaaatgcctgcccgtgcagctcggagcgcgcagcccgtctctgaataagaagtgagtacaatggcgtgtttgtaaaaaaaagcttcaagtccgtctttttcaaaaaacattttgaatgctgcatgcctcatgcttcccagcgcctcgcgggagagacccggctatagagcaggaggtgagaccccccctccggtacccccacccctctggccgcacgctctcctgccccagccttttctgggaggactgcaaatgccccctctcagcaagcggccgtttcccatcttcgcttcgcgtccaaagtgttgggtcataatctggatttggaggcaaacccttgccagatcctctccacgccgcttctcccccctctcccgccggtgccc

SEQ ID NO: 31743 - DNA, 592 bp, Homo sapiens; identical to SEQ ID NO: 28181
  chr1:216774207-216774799
  binary

SEQ ID NO: 31744 - DNA, 989 bp, Homo sapiens
  chr1:217307874-217308863
  hyper
cgaggttattttcagtcacaactttctccacaccccgtacccccaaaagtgtacctcagctcaggcgggaaagggcactttgacccgccgtgcgcgagtttccagccagccgctgcgcgcctgagagaaagagcgcctggctgcggctccgagcgcacagctcttccccgcgtgtttggcgcggctacgtttctcttgctccgggctgaggctcgaggaacctcgccagcctgctgtggtcccgtccccttgacgtttgatttctaaaaccgcatagtctgcggctctggcatttagaaaaagaggacaaggtcaaggcctgtggaccgaccgccgcgatccgcttgcacctttgctctcacagcaagcgagtcctggccgcagccgctggaaaaaggtgccgcagcgcccagtttacctggaattcagggacctgaccctgactctatttccggctagtcccagcctctccttcctctcctttccccgctttccgcccagggcggttctgagattttgattaagagagatctgtccccgcaccgcagagggatggtgccaaatggccaggcttcctgggcactgcgtcctcattcccaggtcagagctactgcgaaaggaaaggtctccatctggacgcacctcgtcccctcccccagcgcgcggggcagccctctagggccagctcgggcacgcgcttttccccctcctcaccccctgctccgcccagccccgtacagttttattctttatgaaacacacacgcccaccccgcctcccacgtaaaggccagtcttgactcattttgcgcccagatgcaaactcagctggaagttgagggtagggccaaagaggtgaggggagggtaagagatacagcgaaatagagaatgagaagggagaaatcaaagggggaggagggacaagagaaagcgtgtggagctggaggttgaaggggcagaggcggaggccaaggactgagcaaggggc

SEQ ID NO: 31745 - DNA, 714 bp, Homo sapiens
  chr1:220863507-220864221
  hyper
cgcgccgtagtctgcacagtttggccggcaggtgggatgaagggcggggctggcggagcgcgcccgccgcctggtaggccagttcggagcggagccaacgctatcccgggccccacggccagggggcgctgcggcccccccaatcccccgccccgtccgggctggggcggaggagcgggcggggaccaaaggttggtgtctttgcgctcggaccttcgccagaggggccgggacatcatgacggtgggagccaggctccgaagcaaggcggagagcagcctcctgcgccgcgggccccgagggcgagggcgaaccgagggggacgaggaggcggccgccatcctggagcacctggagtacgcggacgaggcggaggcggcggccgagagcgggacgagcgcggcggacgagcggggcccggggacccggggcgcgcggagggtgcacttcgccctcctgcccgagcgctacgagccactggaggagccggcgccgagcgagcagcccaggaagaggtaccggaggaagctgaagaagtacggcaaggtaggggccctgcgccaccactgcccggggggcgcgggtgtggtgtcccgcgggggagcgggagccgggtccttaccatcgactcacccagtttctccgggctgcacctgcgacccctccgcccccgctcccattccctcgccggagggaagccgcgagttgcgagtc

SEQ ID NO: 31746 - DNA, 807 bp, Homo sapiens
  chr1:220921368-220922175
  binary
cgacctgccagaaaaagtcgttcccaaatgtttgtaaatcctccgttgggcaacccgccttcacgttctgcggtgatcttgtcgagcgactaagcgtgcagtattagcagagaagggggtggcagagtgctggcgctgaaggtcatgttgcatgggtaactgtcgtgttgtaggggcggggaagagggaggagacactgaccaccccagaggccgccccattagctcgcttgctttgggcggcgtcgctcccacggcgcccagggtacccccgccgctgtctgcctgtcttcctccattaccgcgcaggcttggtcaccgcattaaggcattcccgctctccgcggaactgctctgccgtctcggcggtgaaagtgtgagagggtccgtagttgggtcaactttgactcctctcgcctgcccggatccttaagggcctcctcgtcctcccggtctccggtcgctgccgggtctgtgcgccggtccgcgcccgccctcgctctgccatgggcgcttccagctcctccgcgctggcccgcctcggcctcccagcccggccctggcccaggtggctcggggtcgccgcgctaggactggccgccgtggccctggggactgtcgcctggcgccgcgcatggcccaggcggcgccggcggctgcagcaggtgggcaccgtggcgaagctctggatctacccggtgaaatcctgcaaaggggtgccggtgagcgaggctgagtgcacggccatggggctgcgcagcggcaacctgcgggacaggtacagcacagcgcgggcgcggggcagcgc

SEQ ID NO: 31747 - DNA, 597 bp, Homo sapiens
  chr1:225117220-225117817
  binary
cgtcggtgtcacatcgggggccgccgcgtacccgcggtggaatctcgcaagagccagggcccctcctcacctgcccggcacccaggatcccttgcgccgcgttcgggaccccacccccattgtggcctcttcgccagggcgcaggcgtggctcttggtcaggcggttacggccaggaggcgtcggagcctggcgtggtagggctgtgctgcgcggtccttcccattcaccctagtctggcgctcgccggcgtgggcgggccggaccttcgccgcttccaggaagggccacaacggccgtcggaccacggcgcggcgggtaaggtcgtcagcgtcttcctgtcagcggtcggcagagcctcggcgggcgggcggcgcgtggggcagccggtgtcgcactgggagggctgcgtgggcgcggagggcctgggcgctccccacccagctgctgtgggagcgcctccgagtccccgcgcggaaccctcaccaggcagatgctggcgcatccaccaggcgccggcgccgccacgccggtagccccgaccgcaggagctctcaacgcgaggttcttcttagttgctctccctcaggcaggccgc

SEQ ID NO: 31748 - DNA, 998 bp, Homo sapiens
  chr1:227505256-227506254
  hyper
cgtgcaacgtaatcctgaaacgaatccggttgcatcattaatgaataaagtccgatttgcatcagcaattcacttcccgggaagaagaaaaacagaaaagggaggaaaaaaacagaatgcatagaagggggagggaaaaccaaaaatgttgctgcaaatcctcccaaccaccacttggataatgcatcagcggcaatttctccagcgggaaagggagggggcgaggtccctgaagcagcccctcggctcggagcacgccaagtcttgcccggaggcggcttttcgtttctcctcccgaggtccttctttctttaaggctttgcagtcagtcctattttcaacggattccggtgaaaactcttcattttcctcccggcttcaccctagggcctgaccggcggcgcggccgggggtggaaggcgggctgcgggcggcactggcaccgggctccggagaagcggctacttggccgcccgagcccactccatgtcggtggtcgctcgtgggccgagccgcgccgcgccgcgccgggcagagagcccggtctccccgacacccgcaccgggccgccgcgccggaggctcccgacgccccaggcgggggggtgcttctctgaattcaaaggacacaagcagcagcagctgcggcggcggcgcgggcggctctggcagctacttctcccccttcttcacacccctgggctaagggcatctttccacagcgaggagggaggcggcccggcgcaggaggaggggtcgcttccgcggctgaggagactagaggctgcggcagcccggctcccaaccactcccttcctctcccttccagccctcccccgccttccctctcctctcgcgctcgcgccctgggctcagcgaggctcctccagtcccgccgcacagaggcggaggcttgcggacgagtctggatccaatatggcggcctggccccccggccccggcacacgcgcgcgcacacgccctccactccccgccccc

SEQ ID NO: 31749 - DNA, 753 bp, Homo sapiens
  chr1:228645155-228645908
  binary
cgtcttcttgggcagcagtacggcctggatgttgggcaggacgccaccctgcgcgatggtcacgcggcccagcagcttgttgagctcctcgtcgttgcggatggccagctgcaggtggcgcgggatgatgcgcgtcttcttgttgtcgcgcgccgcgttgccggcaagctccaggatctcggcagtcaagtactcgagcaccgcggccagatagaccggggcgccggcgcccacgcgctccgaatagttgcccttgcggagcaaccggtgcacgcggcccacggggaactgcagccccgcgcgcgacgagcgcgacttagccttggcgcgcgccttgccaccctgcttaccacgaccggacatttccgagtcaaggaaaaaagacaacggcaaccgaaaagcgagactaaaaacaagagggcagtgaaggccagcgagcccttatgtatggtacagaggtaggctagaccgcggcgttcgattggatggctatggtagccaatcagaaaaagaacctggcactcctaatttgcgtattcctttcccagcgatgacgtagaacaacgtttgatccaatcagaagtgagcaaatcctgagccttcatttgaatacaaaacgtacaaatagagttactccgagcgccgcgcgtttctgtttggagagactcagccatcatgccagacccgtccaaatcggctcctgcgcccaagaagggttctaaaaaggctgtcaccaaggcacagaagaaggac

SEQ ID NO: 31750 - DNA, 321 bp, Homo sapiens
  chr1:228646213-228646534
  hyper
cgttcctcggcgtcctgaacccaaaggctcttttcagagccacccacacgatcaagaaagggtttcgaacacggtgaagggttatgtaacctaatgtgtctccatgcaccctagcggttgccgggtgcggccgaatctgagccgtgtgtgtgtgtgtgtgtgtgtgtgtgtgcgcgcgcgcgccggcacagaacgagaaaaactgctcgttacagaaatcggggtagaaactgctcaggtgatgtagctcagtaatgttgggaggcgatcaaggaccccctctccatcccctccctccgcgcagagctattaactcacgac

SEQ ID NO: 31751 - DNA, 584 bp, Homo sapiens
  chr1:228646850-228647434
  binary
cgcacctggccccaaatgtcttttataagcaagtggtgcattcctggatgttgagcgcttgcgcccggttcaggaccgggtccaaatgaggttggcgtgcgccgtgcaggtgaggagtgcgggtcacctccccccaaaagaccctgtgccaacctccccaaccctacccgccccccatgggcgaggccagacgtggcgcaagaccacgggctctgaggccatgggtgttgtcactttcccctggcggtggtgcctggctctgcatttgcttaagacttttccatccctgcctggaccagacagacatgtttagatttaagcaatgaacattccgggaggatattttcctggcaggataccgcgatggcaggatgtttgataccgaatcgaagcacggcgtcaaagcagcgtcctgcgcgggggagccggatgtaataagcgaccccagctgccggtaactttaacccttatgggagtgggggtgggggaaggggttaatttaggaggaaaagaattccctttttctgagcaaatgtagctgcctccctctttagccacattattttctgcgaggcgttagcaac

SEQ ID NO: 31752 - DNA, 104 bp, Homo sapiens
  chr1:228651978-228652082
  hyper
cgccgggcagcagcaggcgcacggccgtctgcacttcgcgggacgtgatggtggagcgcttgtttgtagtgcgccaggcgggaggcctcgctggcgatgcgctc

SEQ ID NO: 31753 - DNA, 1547 bp, Homo sapiens
  chr1:228870708-228872255
  binary
cgatcagctgcagttagacttaaggaaaaaagctgtctgttaattcaatctcattcgcaggacaggcctccaggacacttcatttttccccctgggtggagccgtggccagccgggggctccacggagtgaataggaggcggctcaggcttcctggctcgcgtgggcgccagaaagcggaacctcccgggccagtcgcgcggtggtcaccctcttgggagctggggaggaggctgcggaggctggcccggctccttcgggcgtcgcttcccggaccgggtgcgcggggtcccccggaacgtgtgttccaggtcctcccgcgccagtgttcgcagtccccgcctggtcgcggcggcgcctcgggcgcgggtgcaggcgcgcggcgcgcaggcggggggcgctgtggtcttggcgcggggaccgagccgctcggccagacccgcctcttttccctccccgccagcccgcccgcctgcccgccccccacgcgtcgtgtcgccgggaagccgggcggagacagagcgcttgggatccacggcgctcggaccgctgtcctccaacagcgcagggcagagcggctggcgccgccggagcgcggagccacgaccctccctggccgcctttgtctactggccgtgcggcccggaaccgccactctccagggccggggacgcgcccgcagctgtcggtgacagctcctccctaccgcaaccctccggggcggaggggcggtcgggccgggccctgctagcccgcgaccgcaagcccgcgctcgcggatcgatgcccccgcagcagggggaccccgcgttccccgaccgctgcgaggcgcctccggtgccgccgcgtcgggagcgcggtggacgcgggggacgcgggcctggggagccggggggccgggggcgtgcggggggtgccgaggggcgcggcgtcaagtgcgtgctggtcggcgacggcgcggtgggcaagacgagcctggtggtgagctacaccaccaacggctaccccaccgagtacatccctactgccttcgacaacttctccggtgagctggccggggggccggggccgggggcgcgtggccgcggtccacccaggggaaggaaggtggcgcgagggtcgcgaggttcccaagggggctgcagggccccgggcgcggctccagctgggaagccggacaaatgaggagtgcaggacgtttcctgagtctcagggaccgggcaagcgcggagctaacacgaaaggaccacggcggagtgggcttggagagaggagggcggagcggcagtcagagccttgccaaaaaaaaaaaaaaaaaaaatctcacaatttaagcaacagataagtaggagtgaaacaggttgagttcagggtgcccggtcagtttgttgcatagagcaaagtttcctgagggcgacgtcgctggcgccgctgcagagtttcaatcagaaggtgacgcgcaggtgcctttacctgagcgtcgctcctttgcttttaggcggctcagctcacaaggggcgtctccgctttaaagagccgcggagacgcc

SEQ ID NO: 31754 - DNA, 1399 bp, Homo sapiens
  chr1:230561192-230562591
  hyper
cgatcaccgctcctgcagcctcatttgtttccggagagacacccacaagccagcccacggagagtctggactcgcccgccccagcacccacgcctcccccgcgcccggttccagcgccgcccccgacatccacccgcgggcagccccttaccgccggtatcctcgaagcgcgggggcgggcggtcccgcagcgctgcgctccagcccgcgccggcctcgtcctcctccggctcctgtgcgtccggggcgcggggcggtggcggggcggcccctgggggtcccgggggctcgcgctcgtcgtccgaggaggcggccgaggaggagcgcgaggcggccgaggtgctgtagaaggggttcccgccgctgtccgggccggactcgccgaacacgtcgtccgagatgtgcaggctctcgtagcgcgcgcgggcagcctcgagcagcgccggcgccctcctccgcgcgcccccgccgccctcggccatggccccggccgccgcccgcgcgcccgcccccacagtgcctcccagccgcacacgccgggccctgggcccgcgccgcggcccgccgccccccaccagcgcagcccgcagcacagcgcccgccgccccgtgcccggccggcccgccgtcttggccgcctcgggcccagcgcccggggaagcgccctcggagctcgggcgccgcaggctgcgggccgcggcgggaggcgagccgcgcgcggggctggcaggggcgacccagagcgggcgggacgcagaggctgcggccgagaccaggcgccgccgccgccaccgccgccaccaccgccaccaccgccgccgctgcgtctcctcggcgcccgccgcctccctgcccgccctctccacggcctccggcgctcggctgccgaccttcccgggcgcgagccgccagaggcgggccctgccgcccctcacctcccgcccgccggccaatggggagcccggcccggacagccgcgggggagctgggcgggcccggcgcggggaacgcccccaccctcctccgcggggcggggcggggcgcgcggccggggctggcggttagggggagggccgccggcggcagtgccggtctcctcctacagggacgcgcagcccgggaccgccacgcgcagcgcgggagggggagggcgggaccggggaacaggaggggagggggacccgggtgcttccagcggtccgggcccgcggacggagtgcgggccgatcccgctcactgtccccttccgcagtccgcgtgcagctccagggagctgtccgccccggtggttctgaaccaggcgccgccgaaacgctccaggtaggcggcgggcccgaggtcaccacacccgcggcggcggctgctgccgaggtttcctgggggtcactgccagctgcgcc

SEQ ID NO: 31755 - DNA, 966 bp, Homo sapiens
  chr1:232765040-232766006
  binary
cgggaagacccggagaggcccaggagctggcaaagtgggaagaaaggtcgcggtgagtgagaagagcgctcgccggaggctcccggtcttacaaagagggatccgtcccggtgagggcgcgcgctccgggcgcaccccctctagaaggggaattagccccgcagcaagttcggcgtcagctggccaggcgcgccggggaagctgcgtcgggcaaccgcgagcccttccagagagcgttagtcagagcgaagttctgggcacctggagaagaccctcctcagtgcctgtgtcgccgagacgggaataacctttcagccgatcgataacttggagagaacaggcggcggcggctcctcttccagccggggatcgggagcgcgggcgcatctgcgtctacaagccggaccctgcgccgcgaccctcgcacccccgcgcccctcgcacccctcgccgccgtcagccccccaaagcgccccgaagggcatccccttccccttcgggacagtccccgcctggccgcaggcatcccgaaccgaccctcgccacgctgcccgtcggattccccgacacgaaccttcgcaacgccgtccgccggaacctgctacagcctgtgcgcgccgggcggcgcgtacccgggctgccgcctcgccgcccgccgctgcccggggctgcccatcggcccggactctccccgcgccgggctccggcggaggcggcccggacccgctggctgcggctggagctctcggcctgcgctcgggcggccggcgggggcgcggtgctcctcctccgtcctcctcctcctctcgctccgccagctcctcccgggctcccagtctgccgcgccggctcccgatgccaccgcccgcccgcccagcggcaccgccccccgcccgctctgcgggctcccattggtcgctgcctgcaggccccctcggccccgccccacgattgggcgcggacgcc

SEQ ID NO: 31756 - DNA, 1283 bp, Homo sapiens
  chr1:233749409-233750692
  binary
cgcgcgcgaacacacacacacacacacgcacacgccgcgcgcggtcagctagagtttggctactggacccaggaagggagggagcgggaggagctggtggctgtcgggtcggggtctgggcgccaccgagcgcccgccccacctctggagtgcgcagaaggcggtgcgtcccgggccccggcagcccagcccaggcgctctggccaagtttgcgcgcggtctccgctgactctcgggttacctgagccggcaaccacgtcagcgccacatcatctgggctttttatattgcaaggaaacaggaaaagaaggaagaaaaacatcgcccgagagagccaatcgcaggaagacggcgctgcccggaggagcggggcgggcgggcgcgcgggggagcgggcggcgggcgggagccaggcccgggcgggggcgggggcggcggggccagaagaggcggcgggccgcgctccggccggtctgcggcgttggccttggcggcggcggtggagaagatgctgcagtccctggccggcagctcgtgcgtgcgcctggtggagcggcaccgctcggcctggtgcttcggcttcctggtgctgggctacttgctctacctggtcttcggcgcagtggtcttctcctcggtggagctgccctatgaggacctgctgcgccaggagctgcgcaagctgaagcgacgcttcttggaggagcacgagtgcctgtctgagcagcagctggagcagttcctgggccgggtgctggaggccagcaactacggcgtgtcggtgctcagcaacgcctcgggcaactggaactgggacttcacctccgcgctcttcttcgccagcaccgtgctctccaccacaggtagggtatcctgcgcgccccctggccgccccggccacctcgcccacaacccacacaccccggccccggcgccccgggcccctctaaccctcccaccccaccccccacctttcgccatcccggctcctccagcccgcctcccctcactgtcctcccgaccctccgaccttccccttactggcgtccccggcctctgcctgggtgactcgggagggcaagccctgcggagccggaagccagagaggtgactccagacgtgacttggttgttgccgtccgtaactctggggaagtggtccctaacttcggcctgggtggctgcaggtgcttcctccccttgagttcttttttcgcaacccactaagccaaactgtcgggtttgaatgtgtagcagcacctggccgccgtgcggcaaggcagc

SEQ ID NO: 31757 - DNA, 1348 bp, Homo sapiens
  chr1:234040262-234041610
  binary
cggcagggtttgagtcaaaagagaagggtggaggagcgcgtccggtgccccaaggcttccaggcggagcgcgggcgcgaggtgcgggctccggggcggagcgcacgcccgggaggcgggaagtgggcagcagcgcccccgcctggcccctgtgcgccccgacccgacgcctccccgcccgaccaggtgcctcgagagcgcacagctgggagggctctcccggtcgcggcgagactcacgcctgcggtgtgctagggcggcggcgacggtgacgggcgtggggcgcggcgctgcctcggctgccgggtcgttgcggcgagcgcgcgggccggcctggagtcaccgggctgaaccgccgcgcctgcatcgtgccgcacgccgcggaggcgctcgggtacagaccgcgcgggcgcgcacaaagcggcccggggcggccggcgcggcgcagaccctcggtgggcagcgcactccagtcttcccaggctagcggctgcagggagctccggcccgcggcccctccgcctcaagtctgggagctgccggtcccactctgtctttgcctatggggattcgagagtttcccagcggcgcacccaggggcaagagcattgccgtgtgagtagcgccccgggcgtgggtgagcgagccggcgggcgggaggccggagcgccggggtagccctttgcagctgggacactgggcagtctgaggctcggggaagggcggcgcgcgcggtggagctgctcgggaagtttcagtcattctttccctcgccactcgccccaacccgcactgccccgagacgcccaggatagggcactggggacagctgcccggggaagtgggtgagtggcggcgggaagggaggagcgcgggctctgccgcggcgctcgcccccggagggccccggccgcgctcttgctctcgccctgggatctgctcctcacgaatcccctcctctctgtccatgctccccctgcccacccacctgcccgtggcgcctgcgaccgcagtggcatgaggaggtcaccggacgtcagcccccggagactgtccgacatcagcccccagctccggcagctcaagtacttggtggtggacgaggcgattaaggaggatctgaaatggtcgcgctccgtggaggatctcaccagcgggccggtggggctcacgtccatcgaggagcggatcctgcgcatcactggctactatggctaccagccctgggcagcgagctgcaaaagtaagaccccctcacgtcatgtttcccgttcactggtccatcttcttaccattgtcacagcagcctcggggagcgcacgcagtgaggcgtccagccaccccctccc

SEQ ID NO: 31758 - DNA, 1370 bp, Homo sapiens
  chr1:236227467-236228837
  hyper
cggccagtcacggggaggatccagggagctgtaggtcatctggtcccgctcctcgtttggggcctccgtggtgacaatgcctggccacaggaaatgggatcactgggagccctgtgtttcccgctctggactctggactctgaaacgagcccaactggaaagcagcatcactgccaagacacatccggagtccacacacaaatacaggaggctgccggcgaaactctcccgcagccacaagagtcccggggcccgcgcgcagactgcgatccagctccggctcttgccctgcggaggctccgcgcgagaacctggctccacccgggaccggccaggtcctagccccgaagggactggacagccgagggacgcggactgacctccctgcggcgatgcagcccacagccgccggggaggaagctccgcggggtccatgggtgccggggtcacggcccggggcgcgcggagccacccagaccccgcgacccgctcttcggatagcagggaccgggtcgggaagaccttcgcggaccctgcagaggcgggagaccctgcgccgtgcccggtgccccggcggccagcgggtccgggtccccgcctgctacgcccaagtccgtccggctccacgggcgcccccggcccgccgcgccctgcagcccctcgcccgccctcccggggctcactcacgtagactgcgtcgatgtcggatctgtcgtagaagcggagcgccccactcagctccagggcaggagagacgaagtcatccccgtcctccagctccaggtccccctgtccggggccgaagggaaagagctcctggcggctcaggcagcccacaggccccgccagcagcagcggcagcagcagcgcccgcgtccacgcagcccggatccggctgctcgaggccaacatgttcccgaactgcggtcccgcaaacccggtcccgcggccaggacagaggaaggcggggatgtaaccggacgcccctggcagccccctctcctcccgcctcccggcgttcccaccccgggaaataggggaggggagcggaggggagagcggagggccccgccccgtccagcgggcgcgccgcggggcagcccaatggccgcgagggggagggcgaggggcgaagccgaacctcccgccttgggcgccggtgcctgcgattctcgaaaccagcccgactcccagcgaacggcgcctccgggagggggagcagagcgcgggacccgcaccgtggtcctctgattagggttgggtcgtggagagccggcgacgtggaaacgctccggattcaggaacggcgcccaccccattgccgctcggccgcgtccggggtccaattcgcttgaccctggtaggaagac

SEQ ID NO: 31759 - DNA, 838 bp, Homo sapiens
  chr1:236849472-236850310
  binary
cgcgatcacccacccgggacaccgacggaccccgcgccgctaaccagccgctctcagagcgtgggtggcaggcgtggctctgctcggggccggccgctcccctcacgttcccggaggcctcggcggaaggcgtgcaggcggcctctgggcggcggctgcaggggagacagtggaggggcccggcgcccttgtccgcccgcacgtgctcggggcggggcggctggggcccgacgggcggggccgggggcggtggcggcgggggcgtggccgggcggccacgtgacgggcggcgcggctattaagccgcgcggcagctgctcgcagccggagctggtgcttcgcccgagacccagcgcccaggcgtgtcgccccgagaggagccgcgcgaaggtcaccccgcgcccgccgcccgccgcccgccgcctccgtgggtccgtttgccagtcagcccgtgcgtccgagcccctcgcgccccgccgcagccccggccaaccgagcgccatgaaccagatagagcccggcgtgcagtacaactacgtgtacgacgaggatgagtacatgatccaggaggaggagtgggaccgcgacctgctcctggacccagcctgggagaagcagcagaggaaggtcagcaggggcccgcgggccgcccgcgcgtggtggggccgggtcccccgcggggctcccgtgcgcgtggccgcgtggcctggcgactggcgagagggcgctttgtggaggtgctgtgctgtcctgtgccctcgcagccccgggggccccttaggaaagaggacacgtccggggacaggcaggacactgggcgtcgtgtgtgtgcgcgcgc

SEQ ID NO: 31760 - DNA, 779 bp, Homo sapiens
  chr1:237205156-237205935
  binary
cgtgcgatccgaagtgccgtggaagttagtgccctagcccagtccaggaggaaggggcgtcgtgccggcggttttaagctcggaaggggcaggggaatgagcccagggaccccagcggggcgcaggtaggaggctgtgcgctcgccgggtgcgctccggccccgattcccagcgcagccagtaagtggcgctgggcctcgggtttggcggcccggaggagcgggctgcggattacctgcagcagcggggagccgccgagctcctccccgcccgcccccacaccccacccccaccgctgcactaaccccggctcagctggctccgcgcacttgctcggaggagccggggccgagcggaccgccggctgcaggcagcgagcgcggctgggctgcggggctgcttccccgcgtcctccgggcccgggccgccctcctcccgcacagtgcggagcagggaggccccgcgcctcgaccacccgcgcccgagcgtccgcgcctcctcctccgctctgcaggcggggaccgcccggcgctcggcacccggcagcgcggccccctccagcccccggctcccggcagcagaagcagaaggcagcgccaggggccgccgccgccgccgagctccgcggggctcgggagccggccccggcgaggaggcgcggaaccatggccgatgggggcgagggcgaagacgagatccagttcctgcgaactgtaagcgccgtgcgtcgcgtgtgctgtcaggggaagggggcgtcagggcatccactagcggggtcc

SEQ ID NO: 31761 - DNA, 848 bp, Homo sapiens
  chr1:240254834-240255682
  binary
cgatggcacctctaaactggaattgggcttcagtttttctccgtgtaaaaatttcttcttttttatttaacttttctcttggcaggtccagcagctttgaagatcagagtgcatcttccagctgacgatctcttcggtcggggacaatgcattcgattcgcacggtggagattaaagtccccgagatagaggaaacgtttttcgcgcccaggttcagcgaggagccgcgcgggggcagagggggcggcggcggcgggcggggagccaggcccgagctgcgttctgcgcagccattggtgggcgccgcgctctgcactgagcatgttcgcgccccgccggcccctagccgcagccgcagccgcagcgacggcagccacgggagccgccgcgcattatgcaaagcggcggcagatgcgagcggggccagccgggcgcgcgtcggcctcccctcccagcggctccccccgccgccgcctgactctcccgggagactccctaggcccggacctggggccgaggagggccgggatggcctgagtgcccgcggcgcggcggcgcagcagcgggattgcaccatggggaaccaggatgggaagctgaagaggagcgcaggtgatgctttgcacgaaggcggcggtggcgccgaggatgcgctggggcccagggatgtggaagccacaaagaaggggagcgggggcaagaaggcgctaggcaagcacggcaaggggggagggggcggcggcggcggcggggagtcgggcaagaagaagagcaagtccgactccagagcctcggtgttttccaacctgcggatcaggaagaatctgtccaaggggaaaggcgccggc

SEQ ID NO: 31762 - DNA, 848 bp, Homo sapiens
  chr1:240256182-240257030
  hyper
cggggctggggaggccccgggcagtccggacaccgagcaggcgctgtccgcgctctccgacctgcccgagagcctggccgccgagccccgggagccccagcaaccgccgtcccccggcggcctcccggtctccgaggcgcccagtctcccggcagcgcaacccgcggccaaagactcgccctcctccacggctttcccatttcccgaggccgggccgggggaggaagcggccggagcccccgtgcgaggggctggggacacggatgaggagggtgaggaggatgcttttgaggatgcgccccggggctctccgggggaggagtgggccccggaggtgggagaggacgccccgcagaggctgggggaagagccggaggaggaggcgcaaggacctgacgcccccgcggccgcttccctgcccggcagccccgcgcctagccagcgctgtttcaagccctacccgctcatcaccccctgctacatcaagaccaccacccggcagctcagctcgcccaatcactccccgtctcagtcccctaatcagagccccaggatcaagaggcggccggaaccctccctgagccgagggtccagaactgccctggcctccgtagccgccccggccaagaagcaccgggccgacggcggccttgcggccggcctgagccgctcggctgactggacggaggagctaggcgcccgcacgccccgggtgggaggctccgcgcacctgctggagcgcggggtggcgagtgacagcggcggtggggtgtccccagcactggccgccaaggcgtctggggcccccgcggctgcggatggcttccagaacgtgttcacaggtgagc

SEQ ID NO: 31763 - DNA, 752 bp, Homo sapiens
  chr1:26372112-26372864
  hyper
cggccccaggccccccgcgggcaggggtcagaatctgggctgcgccccaagggagagacggtccttgggccacagcccattatcttcgttccctcacctcaccccacccctcctgcatggtcccagctcaagccgcagccaaaaccaaccactgctaggatggcaaatgcggaggtgcgtcggctgccgccaaaattcccgcccgtccccaggctctcgccttaccggattgccggcctggcgtccaacagatgctgcttctccttggcctccatgcagtcccgcgccgagtcccggcagccgcgcagccgccccgccgagtgcgccctgaaagttgcgcgcgggactccgggtggcgctcacccacctgccccgagggccccgcgaggtgcgctcactccggcccggctcctgcggcccctgagctcccccggctcccgctgcggctgcagctccggctctggctccgcgtgccaagcgctcccgtgtctcgggtcagccgctgcgccccgcggccgccggctttatccggccctcgccaacccgtgtgaagctgccgtcggcgcgtcgtgtgcaaaagcccgcggggaagggggggcggtcgccggctgcaaaaggcccggctgtggccccgcacacctgtgcctgcgcccatggggcccgcggagcccacctgccggccgcgagaagtttgccagccttcgcccggcgcggcgccgggtgttgctgagtgaggacggggtgacgcctgc

SEQ ID NO: 31764 - DNA, 847 bp, Homo sapiens
  chr1:33896040-33896887
  binary
cgctgtcacgccgcggctggggagcgggcgccccggtcaggcccgacgcccgggtctcaccgcactctgcgggacaagcggagcaggcgcaggccgcgcaagaccacgggctgccgcggcgcgggcctctccgcaggaggggggtcggtccccggagaaagcgagtcactgacgggaccttggcccgttcccgttccggttcccgttcccggcaagcctcggccccaggctctccgcagccctcctcgctgcgcgttcccggcccgggggcgccgcgctctgccggtcgccggccgggactgcgggctcccagcgcgggccccacgccgcggaccaggggtcaggccgcctgccgcccgcctgtccgtgcccatggcaatgccccgccccgcgcggcccgtcccggccgagcgctccggcccgaccgtgacagctgggtgcccaaagggttaagccggcagcgcggcggccggtgtcccccgcgcgctgcccgtcagccgcgagctggccccagcgcgcacgcgcccgcccgttacctgcggtcgcctccgcgctcctcctccacctggccgctctctcccgggggccgcccctcagcccgccccctcggctcggcgccgcgcaccctgctggctgctcggacgctgcccgcggaggaggggcgagggcgctattaccatatattagcataccagcgcgcgtcacgtggccgctccagccaatggtcaccctagaagggcggggattgggcggaacacgccttagtgctgctcccagcctgaaccggtggccatggcaacgggcgggtgggcgggggagtggggaggtgccggagcccggtgccccc

SEQ ID NO: 31765 - DNA, 1459 bp, Homo sapiens
  chr1:34629584-34631043
  binary
cgcgaagttccgggactctccgcacccgctagatctgccccttcccggactcggtcgtcgggagctggtcccgccgcccgcgccgccgctgccgctgccgcagccgaggcgctcggctgcagcagggcgcgggaaagggcactttggcgcggagtgagcaccgaggggaatgtggcagcgcgaagcctggcggcggcactccctcccccgcctcgggctacaacccccaccccctccttcccatccctcaacaccctccagcccccacctgcaccctcctgcaaggaatgcgcgggacccccaccgtgggcacgcgtccacctgaaccccctcctagctccgagcgccgagggaggggtagcatttgaggagggggatggcggccgcagtctgcagtcggttccagagggggcaccggtttcaattggagaaaatgggcgggggcagggaagggcagaccttgcagacgcagaaatggggagggggcgcacggttcctctccagcccccaggaccagcgtgcctggcagaatcaggagccgggggagtagggctcccggaaagtttatcgggaaaaagcctagcaccgtgggggctgggaggctggagaaactgaagccacagaccaggtgccccgcaaccccgggcggggatgtctgtctcccaggcccccacaccggccgcatccgtccaagttgcggctggggttggggcagcagtgagggtgagggtggaggtgaggacgtggctgagggtggggtgggagacggaggcagggatgagaatgagagtaggcaactgggagggtgggagattcaggcagggatagaggcggggggagggactgggaccgggtcgaggatgggtgggctcggggctcgggtggggcgcgcggcggccgctggctcctcggcgcggctggactcacccgcggcggccgagacgctgagcaacccacagcccagcaacagcagcagaggcggcggcgttggcggcggcgggcggccccagcggctcccggcgcccggcacaagcgccgaaatcccggtttcgccgcgagccctccccgcggggcagccgcagcgccccagctcccgtccccgcgagcgcggcatggcgcggccggcagcgccgagggagaggctccgctcgccgccgaggagaaaggaggtcaggagagctctggagcttttttctgctcggaaaaaatcccggtacgcgggagccctgagcttctgcggctggaatgaaccaagtgtccgcccggccggggagaggcgcgctgcgctctcggaaatgactcgctccaatcccgcttcgcggggttcgcgccggggggcgggagggggtgaattatccccggattaatcactccggagccgcttctccgccgctccaaatgctgggggtggaggcgcagctaaggataaaatattggggggcgggggttcctcttcagc

SEQ ID NO: 31766 - DNA, 471 bp, Homo sapiens
  chr1:34632117-34632588
  hyper
cggagcgttggcatctgtgtggccaagggggcagtggccggcgggcggtggggcctgagaatttccggggaagggtgtggagagggactgtagggatggcgagccaggctgggggtggctggcgacccaggttggccggctgtcagcgtggccaggaatttccatccaaggaagggtgtgaagaggggctgtggagttgacgatatgaattggggggcgggggcagggctggaggagtggaggcttgtccctactccccatgaaaaacttcctccccagagccacgctttcgcagcctcctagatgccactcttcctccctccccccaccccaagttgttccggtttccctgcatgagctcatcccacagctggggagccagcccggtggccctgggcgggcgaatctcctcagaatcgcgggcctggtccccacccccaacacgcttgtatgcccgcccctcccgacgcc

SEQ ID NO: 31767 - DNA, 652 bp, Homo sapiens
  chr1:35246876-35247528
  hyper
cggcctccctggaggccgaggtcgacggcccgtcgcaccgggagggggggctcccaggggtgccccacgcacggtcaaggtcccgcgccaagcggggaccgggctgggccggaagcgggcacggtactcgcggcaaactagcgtgggcgagtcctgattgcagtcggacctgccgccgcggcacttaacagtttgcagagtgcttcccgcccctgatctcattggagccttcggacagcccagcccatggccaccgatgcccccatttcacgcctgaggaagcggaggctcagacgggccaccagcccctccggaggctggcccgggagcgcctggcagcgtcgggtctaggagccggctccctcctgctccctcctccgcgccgcccggggtgtgcccgccgtctgtgtgcaccactgctgagcccagctccggcgccctcgcctctgctgtgggccccggggacgcggggtcaggccaccgcgttggccaggccgctgcaggtaagtgctggacggggcggggcgaggctgggcgggaccctcaggggcgccaagcgctcctggcgaccccctgcggcagggctggggcttgagcctgccagtgcgctgggatggggcgcgaagcgggggtgcggggagcccgccacccc

SEQ ID NO: 31768 - DNA, 933 bp, Homo sapiens
  chr1:37499775-37500708
  binary
cgcgggcgcgcagcagccccgaaggcgccgcctggcccagccgcccggctcccgagcgccgctgcaagtggggggcgccccgcggcgccgcgcacatcttactggggggccgccccgccggcgcccgccccgcctggctgccgcccacgggctgcccgcgagcgaggctcctgggctccgcccggactccgctcggactcggctccggctccgactcgcgtcggctcggctcccgcgcgggctcccacctgccccggctgccgggctctggcgggcgggctgcacgcgtctccggccgctcctcctccagccgccgccgatgctatcgcccgggctcgcacaaagccccggagtggagttgcacgcgcgcacactctccctcccagccccctcccctgcgccctgcctcccgcctcccgcgccgcccgccgcccgcgctccctccgcgcactcccccgcgcacacacacttcacactcacacttgccgaggcgcacactcgcgcgctcacacctgcgcggggggcggggaaggggaccctggccccattgtagggggacgcccggagaacgaggactctcctcgcttcccagacgtccccacccgccccgccggccccagtcccttctactgcgagggcacggagcccgggagccaggcgtggagcgcgagagctggcaccgcgagctgggagacggcggcagcccagcggccggaccagctggaggagacgcgcccgccgggagcagcgagaccgggagcccgccgtctgcggagcctggcctcgcggctcccacgcggcgggcgctggctggacggcggtggcagcgggagactgacccgggaaccggcttccctccccaaccccattcctcctggcagcagagttggggctgggggttcggagaggcagaattcaaagcgaattgtctac

SEQ ID NO: 31769 - DNA, 698 bp, Homo sapiens
  chr1:40157617-40158315
  hyper
cgtcccccctccccacgcatccactcccctcacgccgtggggcagagaggagggtgctggttgcgcgcggagagcgcggtatgggtggcgaagtcccagcctctacctagccccgcgctagtcgtgggttccctccagccacccctctggcccttcattccggtccctccccagacgggccctcctcctttctcatggacccccaagaggcctctcgcgttctcccccgaaggacccctatgcctagccatggatcctccattccccaccctcccgttttcccgtcccgcagacggagccggtccccagccgccgccagtctccggcctcggatgttgacacaaacccgaggcggtttacactgagcgggtctggaagctttcagggccccggcaacacctcctccccgcacttgggggtctccccacagcccgggccggccgcctgggctgcactggcgtctgagagctcctgacacaaggctgtgggaaggaacccttttaagccaaactgggggcaaaaggggagccagacatccccgggctgggccacgtgcggggcagggacttctaaggatctgtcgaaagtcggggcggacggctggggattggcctaatcggagcgcggacgctgaagagcagcggtgagaggcggggcttctgtccgcgcggcgaaggtagaggtgggctgggcggggc

SEQ ID NO: 31770 - DNA, 561 bp, Homo sapiens; identical to SEQ ID NO: 28210
  chr1:48175235-48175796
  hyper

SEQ ID NO: 31771 - DNA, 1010 bp, Homo sapiens
  chr1:48462164-48463174
  binary
cgccccttctcgctcctggctgggagctggagccgggacaggcaggagcgaaggaagggcgcccgaggctgcgcccggggggtggaggtggagcgggcgggctaaggtgggtgcggaagcaggacccaaaccatggtcccacgggactagaatacccaggcaggcgggagagtggccgggcaggcgctcgctcaccgatccgggcggccggcactgtcctccgtccgggggctgcgggcgggcgcgagcggtggcgaggagggcggcgagcagcggccccgccagggcggcgtgcatcctgccagggcccgcggggcgcgggggaccctcctgggcggcgcccctcagcggggcggggagcccccagttgggcacggagtttcctctggagcacggggctccagccgcaggatgctgggcgccctctggggcgtggctgactgtccctgtcggacctgggggtttctctggggccgggctccgtctgttggaagagggagaccctctagggctgggcccctcccccgggcgctcaacctcgctggccgagcccccgggtgctgagggcgtgttggggtccgggggcgcgcggggtcccggagctgcgtcgcggtccaggggcgcgcggggttcctggggcagaaccgagaacccggggtgcgcaagggtcccggggttatgctgggcacccggggcacgcaagggtcccaggggtgcgcggcgctccaggaggcgcgcagtgggacaagtgcggcggaaggcgcggcaggggtggggggcggctctggggcgaccggctgcccccgagcccggctcagaggggcggcgggcggccgcgcggccgctgcccgggctccgccatgctgctccgcggccgggagggagggagagaggagggcgggagagcggcgcggagccgggccgggctgggggctggggccgctggggcgggggaggggaggacctggcgcggggggcgggggggcgaggggccggggccgcgccgggcc

SEQ ID NO: 31772 - DNA, 38 bp, Homo sapiens; identical to SEQ ID NO: 28212
  chr1:48463421-48463459
  binary

SEQ ID NO: 31773 - DNA, 836 bp, Homo sapiens; identical to SEQ ID NO: 28213
  chr1:48937304-48938140
  hyper

SEQ ID NO: 31774 - DNA, 838 bp, Homo sapiens
  chr1:50880863-50881701
  hyper
cgctgctgctgctgttgtgcaggaggggtggggcggggaagctccccaccagtcggagctacccgcggcggcccgggttcgcatcctcccactgctcagaccgagtcggctccagcttgctttgggaagcattcaggaataaacgtggacagtagcggtcaggaaggagattcccgtttccccttctcccaggaggaaaagaggtaacgctgccgccactgccctctctttccagggtgggaacgccgcccgagaccggggtaccccacactcctccctagcgctgatcccagcggagctcaggccgcagtcccctcctgccggctgcggaagctcccagaagcggagactcaatcgcccccctgcccctgctaccaggccagagtctggagtacagatactggctccctggggcctgggtgtgcgaccccaggccggtcattgcaggtctctgcgcctccctgttcctgactgtgcaatgggcagcgggtcaggggcgcaccgtgggcgcagtacgttcccaggcgccaagggctgtgactgaccgacctgggcttccaccgcggggcctgggccatggagacgctccgggcccaggaacgggggacctcgggtgccccactacctcactcctagaacgcccaccgctcacgaagccttcctgagctctacccgaaggtgctgacagcctggagctgaggccaaggcgcttgggggcacgctgcttctccctgggcctcctatgttcacggaaggagagtttccgcaaacctctcactctcggccagcagaccccgcttcatgagaggaggagacccactaggggcggtggagaggc

SEQ ID NO: 31775 - DNA, 549 bp, Homo sapiens
  chr1:55505060-55505609
  hyper
cgcgtaatctgacgctgtttggggagggcgaggccgaaacctgatcctccagtccgggggttccgttaatgtttaatcagataggatcgtccgatggggctctggtggcgtgatctgcgcgccccaggcgtcaagcacccacaccctagaaggtttccgcagcgacgtcgaggcgctcatggttgcaggcgggcgccgccgttcagttcagggtctgagcctggaggagtgagccaggcagtgagactggctcgggcgggccgggacgcgtcgttgcagcagcggctcccagctcccagccaggattccgcgcgccccttcacgcgccctgctcctgaacttcagctcctgcacagtcctccccaccgcaaggctcaaggcgccgccggcgtggaccgcgcacggcctctaggtctcctcgccaggacagcaacctctcccctggccctcatgggcaccgtcagctccaggcggtcctggtggccgctgccactgctgctgctgctgctgctgctcctgggtcccgcgggcgcccgtgcgcaggaggac

SEQ ID NO: 31776 - DNA, 983 bp, Homo sapiens
  chr1:57110528-57111511
  binary
cgctcccgacatgcgaggcccgtctcttcttccagtttgacttccaagtctttccattccctaggatcgggccccagtctcaccccctattttcacccccttcggttttcctcagaaagggcctcctgcctccctcggcaccctcgcctacccccctcgcagcacctgtcgcctccgcccctcactcggaccccgcgcatctggcgcagcccctcccgcactcccgcccagcgccccgcgtccccggcccccgctgtcgctgcttcgggttccgccgcaggagcctctcactcccgggagcgggcgcctcgcgctccctccctcggccccgccccgcccgccgctcgcccgttgcttcccacctgggcccgaagcgcccagcgccctctcccgggaccccgcgcccgccccgcgcccctcgcggctcggggtccgccccctcgcccgcagggcccgctgcactgtgggtaggcggcggcggcggcggctacgcggagcggcaggcggtggagcgaggccgcgcgcgccgaagatggctgagaagcagaagcacgacgggcgggtgaagatcggacactacgtgctgggcgacacgctgggcgtcggcaccttcggcaaagtgaagagttgagtacgcgctccggaccgctgtgcggggctgcctgacttgcgggaggccgaggggagaggcgggagccccgggcctccggcgggcgcggggctcggcggcaggtggagcggtcccgggtcgcgcggagctggggccccgggagggtggcgcgcaccgcctcgcctggcaccggcgcccgggccccacagggtccagggaagagggcgggggtgtgagctgaggatgggcgtcctgggttccaggttccgcgcccatctgcctttctggaggtcggagcaaggcacttctgtgttctctggacctcagtgtcctcctctgcaaaatcgggagaactggactcgttctgcgaggc

SEQ ID NO: 31777 - DNA, 765 bp, Homo sapiens
  chr1:62784150-62784915
  binary
cgccctcggcggcgtctagagcactcggagctgccccattgcctccgcccaaggtcgcggcccaaagggagccctggaaagttcagccaggggccgaggagtgccagggttggcactacggggagacttttgcgacaggagagagactaagagctcgattccaggtagcagtgggagcccgcggcaaagaacgcccagtcccgcaggctgcatcccagaccgcagcgcctagctcggaaaagctgggcgggggctgcaccacctgagtcgcaaggacagcacggcctccccctcctcaccagtgttctccacccccagaattggggcgcggagagccaatctgggctggaaagggagcggcgcccacctttgggcagcccgagcagccccgctccttttctgtcgcagaccccaggctgggaggcgggggcgccaggtcggcccaagctgccgcagccactgctttaaagggagccggggacgcggcgctggggactgggcgaggcgggtggcagaggcaagaggagagtggtcgagcgccggggccaacactcgggtcgcgcagggcgggtgttgaacaccccagcagacgcactgcgggggactggggtcgcagagtcccttaccttggcgagctgcggaagtcctgcgcgaggcggcccgcggtgcacggggccggggcagctaggcgcacaccccggcttcggagcgcacgcaacctccgggtgcactgtccgcgtcccaggcgcgcaccccggggctggc

SEQ ID NO: 31778 - DNA, 995 bp, Homo sapiens
  chr1:63788576-63789571
  binary
cgggccccaagccacctgcggccccctcccctctccctgccccccatctttcgggggcactcaaaccctcttcccctgagctccgtggcagcccccgaacaccctcatcgcccgctgccccctccccgccgccgctaccaaccccgaggagggatgaccctctccggcggcggcagcgccagcgacatgtccggccagacggtgctgacggccgaggacgtggacatcgatgtggtgggcgagggcgacgacgggctggaagagaaggacagcgacgcaggttgcgatagccccgcggggccgccggagctgcgcctggacgaggcggacgaggtgcccccggcggcaccccatcacggacagcctcagccgccccaccagcagcccctgacattgcccaaggaggcggccggagccggggccggaccggggggcgacgtgggcgcgccggaggcggacggctgcaagggcggtgttggcggcgaggagggcggcgcgagcggcggcgggcctggcgcgggcagcggttcggcgggaggcctggccccgagcaagcccaagaacagcctagtgaagccgccttactcgtacatcgcgctcatcaccatggccatcctgcagagcccgcagaagaagctgaccctgagcggcatctgcgagttcatcagcaaccgcttcccctactacagggagaagttccccgcctggcagaacagcatccgccacaacctctcactcaacgactgcttcgtcaagatcccccgcgagccgggcaacccgggcaagggcaactactggaccctggacccgcagtccgaggacatgttcgacaacggcagcttcctgcggcgccggaaacgcttcaagcgccaccagcaggagcacctgcgcgagcagacggcgctcatgatgcagagcttcggcgcttacagcctggcggcggcggccggcgccgcgggaccctacggccgcccctacggcctgcaccctgcggc

SEQ ID NO: 31779 - DNA, 923 bp, Homo sapiens
  chr1:65774849-65775772
  hyper
cgcaggccgagatacctcgcccctttcttctctgtcacacgcgtgcgaacacaccctcccaacccacgtcgtagtagtcccctcccccgaccaccccgccccgtttcccttcaacccccctcctcacgaacctcccctcccttcctacctccctttccttccctccccgcgggccagcggctttggcgctgccctgctgcgcggcggggcgacgcggcgacacctataggattgcttccgggcactcctcagccaggaggtgctggcctggggcccggagctcggcagggccgggcggctccgcggcgttggcccagaggacgcgcgcccccgcccggccgcgtctccttccctccctccctcctcccggcgccccgagccgagctcagcccagggcggcggcttcgcctcgcccggcgaagcttctctccggtggccgctccttcttttccctcctctttgcgtcatgtcgggcacttaatttttttttttttttaattccttcttcagccctttccaccttccatctcccttttcgcttcccaggttgattattttctcttttctccgggcttgcccatgagcctcctcgggagctaccggaaaaagaccagcaacgatggttatgaatctttgcagctggtggacagtaacggggacttaagtgcgggaagcggcggggttggcggcaagcagagagtgaacgccggggcagcggcgcggagtcccgcccgacagcctccggaccgcgccagcaccatggacagctcaggtagcgctgcccgaggggagtgcagcgctgagccccgcgcggcctccggagcctcccagtcgcccggcccgaggcccccccgtggtcccccagccccggtttgcgagagagccgggctggaggcgaaggcttctaataccacctgggtgtc

SEQ ID NO: 31780 - DNA, 858 bp, Homo sapiens
  chr1:68298456-68299314
  hyper
cgcccagcggattccaaggctgcgctcccgccggctggtcccgggaggtagaaagtaggcagaggggcgtggcgtccctgtcgcccccacatgccagccctcctccaacgcctgacaccaccacaagccacggctgggaacactgggggcctcccaacccggcgcggggcgcacggccgcaggctggcgaggaggcaagcgagctcaaggggagacctttccttccacccccagccctagccccagccacagccgtgggggcggcttcccgcaacctcgggcggccgcccgtcgagggcgcgcgcgccgtttctgcctctgggtctcggtgtcccttggccccttcctccccctccccccggtctccggcgcccagcgcccagaccagtccccgccctccagcaggacactcttccctccttccttccttcctccgctccctccctccatctcgcttcccagcacccgggactcggaggcggcccccgaactcgctggccgacgccccgcgccgcgccccgaccccgcggggacccgactcaccacccgcgcccgccgcttggtactcacccgcctgccggtgcgctgccccgccgtcgccgccgggactcggtctctaagggctcctggagacggctccgacctctcctcctcctcctcctcttgctcctccgggcgccggctccgcctcgctggggtgggcggggcggcggcggccccgggctccttcctccgcgccgggccctgcctcccgcccggacgccctggctgtgctgtcccgggccggggagcccgcgttgtggccccgcaggaggaggggcgaggcctggcctgtggaagctcggtggacgtctggtc

SEQ ID NO: 31781 - DNA, 1248 bp, Homo sapiens
  chr1:8085554-8086802
  binary
cggcattaccatcgtcgctgtgagattaggcagagggagcggggctgaccgccagagaaccggtaccaaccaccgcaagcaatcgccgagcctcccaccccagctttcaagacaggatttacgggtacacggtgtgaacaagacaacgcaaccccctttttacaaataaaaaaaaaatcaaacaagcccccaggcccgaagacgctcatccccgccgggcaaccccgcgagcgcaggctgcgggacgaggaccttcatgctcgccgctcccgaacccccgtccgctcctgcggtcccggtgctgcggggacgtatcccgggcgctcgggtgcatggccccggccagccgaggggccgcgcgacgaccacagccggcgtggagaaggcggcgggcgccggcacttcgcggcgtccccaggcccgggctgcgccgccggggagggtcccgctctccacacctcaatggggagaagcccgcgagcgaccggccggcctctccctccatcccagagactccgcgtcgcggcgaccctccccgcgccctccacgcccccgccctcgcgtcggggagccgcctggatcccggcgcccggcgcggggccccctgagggaacggagcgctgcgtggccctccccaccccctcagcgcgccaggccccttaccccggaggagcggcggctgccccgcggcgccctcccgcgcatgtccgtcccggctggctcagcgccgcgggctcaggggcccggacatcgcgcaggcgcctcttgctggctcgcgctcccgctagcactctgcctcgcaccggaccgccgtcgccgcggctgccgccgccgcctctatatatagcataggccgccgggccgtgaggtcgccgcgtcccgccccgcctcctcccgcagccaatcagggcgcgcgccgcttaaaggggcgatgccgtggccgaggcgttgcgccgggcccaccgtggcgtatcgcggcgctgcagggagccggctttgtctcccggagaggcgtctccgggctgaccgcggccgcagctccgctcctctgcctgagccgtgcggcagccctgggagcctctcaacgccgagctttcctcagaagcccgcggcgacccgggcctcggccgctgttcctgcccgaactgagggcacatcgcgcttcgcgcgggatttcccataaattcaggctccgggcaagattgtgtgttttttcctctccgcgggccgccgctggccgtgtgggcc

SEQ ID NO: 31782 - DNA, 959 bp, Homo sapiens
  chr1:82266277-82267236
  hyper
cgagccgctggtcatccccctgcgctcagcctcggagcgccgcgcttcgcggcgctctcccaaatactcttcacccactccagaaataaaataaatgtttttaaagtgcatgtgtgtggacaggatggagagcgcgcgccggcggagcgcgcggaggacccagcgcgcagtgagtggagtttgggggtgggctaggggttagcggttgaatgggtgtgttaatggggggagctggaggcagagctcggggacctgggggtagggggagcgcgaaccgactgggaggggagagaaggggaggggcgcgagctggcgcaggccgcctccggggcgcgttccacggccgtgcgcgcgcgtccctcgccgccaccgccgcccggacagccctgcggccgccccgccggcggagccggggccggcctggtcctcgggcggctgcttggccaccgccaccgccgtccgaagggctcgagcccgtaagtatcccctttcgctcctcctccccgccgcttgggcgcacagccgcagcagctgctcaaatggagtggaaaacggccattgggcgacaatgagttatagattatctgctccacgttttgtacttagctgcctgtaatcttcttttgagtttgcccgagccccttgctggaaaactcaggagggagagatttgtcctttgacgctgtacacgctagtatgtttatatgattagcccaactggcggggagggcggatttgggggaaggaggaggaggaggctggaggtgactccagttcagacctcgcggagagtctgtgtcaggacttcgcattcccccgtctctctctctctccctctcgctccctctcactctctctccgctcacacacacgcagaggtgctggggcgaaatcgggagcttaccagagaattccttgggattgttggggggcatctcccctccgctgctgtgtgtggc

SEQ ID NO: 31783 - DNA, 966 bp, Homo sapiens
  chr1:82267247-82268213
  hyper
cggctactccttgcttccccgagcccgagtctgcgccgccagccttccttggggcagcggccaccgctcagccccggccgggagatccgaaatgtgaggaggggtcgccgccgcctcccgccccaggccgcagggtcggcgcgagggatgctattccggccgggcgctcggggggctgaggggcttcgcctgacaaactgagttggcctcgcgcccccggcgccctcccgcccgtcgcttcgaagggactcccaagtctgcgcacctctgtcaggcttttgcttccaccacccctttcgctctgattcccgatttttttttcctaagggagcgtgcggtctgggggtgtgtgcgtgtgtgtgaaagacctctctcgaagagcggcgtgtgggaaactgcgggaaaatgttgacttaaccccaggagccgcccggcgctggctgctcggctggaggcggcggcggccgagcaggaggacgcgccgagctgcggcgccgtgtccggccggggagctgcggcgctgcctcccgcgcggactcggcggccgaggacccgctcgcggccggcctcggccctctccggccggggtagccgctgccctccgcgcctgtccccgcgcggcccccacgccagacggccctccctcggggcgcgctcgcagacggaggtaagagccgcaggagcgaacaatgtgcctctgtgcccagcttcggagacctgtttgctttgcgcctccagtccgggggtggatgctggaggcgcagggagccgcgggttaatggggctcggctgttgctgttcggctggcccagggggagacccgcgctcgctcgggctgctcgctccctccccccaatctcctcttggaaatcgatccgcagaactctcagtccggtccagccggcttctccttttctcgtggagccattgtaacgctctccaggcatcagtctagttgccgggggc

SEQ ID NO: 31784 - DNA, 763 bp, Homo sapiens
  chr1:85358571-85359334
  binary
cgccaggcaaccccgaaaagccgcaggctagagccctgcaggcgccgctgcgccccggcctccccacgacgcacgccctggtgactgcggctcggggtaccctccctgcgcccggaccctcactcaccgctcacgttcacccgcgccgccgagcccgggagcgggggcccctgcggctgccgcatgccctcggggtcgagcgcgacggggcgaccgggcgccgggctccagccgggcgcggagaagcagcggaggacgcggcgggcgggcggagcgcctcctctccagcgacccctgcgacgcgtccagagccaaaggaaagtttggcggtgcgagggagggacctagggacagcggcccctccctgccccgccccgccccgccgggtgcgttcgacgttcccactggagagcgtccccaacctgcaaggccgcgagctgcgctcaaaggggcccgtgcgagccgcgggagggcagcgctcttgcagacgcgttcctgcctgggatcgtccccaggtgggtggtcggccggccccgagagggaaaagcgcccactaaaggaccgctagtacccacaagcctcacggagccatacctcggagctccgtattagaacgcagtccctctgcccctctgtcctcagagatttgtttgaagtggctgcgggaagtgcagcccacacccaccacccccgtgggaggcaggctctactccaagcccgacctaacgctggaaacctcaaccccaaagctacccgagggtgc

SEQ ID NO: 31785 - DNA, 1325 bp, Homo sapiens
  chr1:91184657-91185982
  hyper
cgtgtcaacctaattagcagagtaattataaggtgctaatgaatgattcaaagttctttgagttacattttactccaaattaccattttaagaaccctatgaatctgcgaggcgggcatcgcttccgtggctaggtctggaatgatgttcgagtggcctttaatgtctccaaaggctgggccgaaatctggagtttagttgcagttctggaggtcactttctgggccacagcttttatctgttgaggacgaagggaggggtgtcagggaggcaaatgacctcctgggacaagctcttgcctttcggtcggaactgcttctgtgtgagccctgggtccggaagcgggtagctgggcgactcatcctgcctgcgttttcctagggaaatcggtgtgtttgacccagaaaaaaaaaaaaaaaaaaaaaaaaaaacagcactacttggagggtgggttgagctgtttctcatcgtctcagtggcatttttcctagggctgttccgagagaacagcggggattgaagggacggaggcaaggagatgcacaatccgggcagctctcgctcttctcggaaggcgaagggagtttggcggagaagacggggttggtgagccgaggcggggactccggacgtgctccatcccggcaggggccgacagtggccagaggggtgcggggaggccctcgggaacgggtgactgggccccgccgggtggggtcgggccactgtaggctggagcggggttggatcaaatgcctttggcgcgggaactgagtgctggcccgggagaccctccggagagctcgcgggctcggcctcggcctcggcctcggccttcggccgcggttaccgaaacacagacggtagacttgtggaggtggcttatccgaggccgcagggcccgacgctgcacagcttcgcagcctaaatatcctgcgcctctgtcacagttgaccgctgtggggaggacaggaagggctctagggctgcccgagactgcaggctgaccctacctactctaccctcttcaaatatcgattagggttcttcccattccaacatcatcatccaccaacttcccgaatatggtgcgttttctcctagccctgggaggttccaactcgaactcccctcgctgcatattcagggtgggaagtagggagggggagaaaacaaatttaaaatccagaactgacggcactgcacaaatcaattattctcgaccttgataaataattcatttaagcctgtttttgttttgttccgacgcctaaaatgactcaagagctcaaaaggctgatcgcacagcttgtgttgggcggttc

SEQ ID NO: 31786 - DNA, 71 bp, Homo sapiens
  chr1:935085-935156
  hyper
cgtccaggatgagggttttgagctgagcgaggctctcgttaatacgcgctcggcgccgcttctccatgacc

SEQ ID NO: 31787 - DNA, 1080 bp, Homo sapiens
  chr1:94702434-94703514
  binary
cgggaatagaatccaggcaagaacacagacccatagtgatcaggagcacggattccggagcaaaagcgcctgggtttaggtcctgacgctgccaaccactagtctgtgtgcttgggcaggtttttaacctcggtttccccgtgtgaaccgagtcgaacaatcatggagtgttctgaacattaaaagagttaaaatgtgcaaaggcttcagaacagcaggcggacccgttgtacgcgctgtgtgctaactttaattacgatcgtcaccgtctgctcccggccaccgctggcgtcctccccagctcgtccgcgcctccctcgccgggcgcgcccctagccccggccggacccttcccgtggactccagtcctggctcgaggacacccgtccctagcgcagcctgccaccgcttccactcggggccgccccgcgggcctcccggaccctggacggcaattcgcgggcgctcgcgcgggcaaccccagcccggagccacgaccgccgcggccggagcaagcgccacctcctcacactcaccacggcgctccatctcgcgtgccggacgcggacgcccgccccacacctacggccgccgccaccgccgagggctggagctcgctgcccccatcccccacggcctgcggacgcccggccaaatctcagccgcagccgcagccgcagccacagccacaggcaccaccaccactgcagccgccaccgcccctgcagctaccgccacggccgcaccgcccgcccgccagccccgccccctggagcccagcccattggcccgcgctcccgggggcggggccggcgaccgcggcaggtacgggaggcaactagctcgcgcgcagaacgcgaccgtcagttgcgcgcggccggacgctgtcccagcatcacgggctgcgtcggctgcccttttggcttgcaggggacaggcagagcgactcagagaaaagtcacctgaggactagatgcggctaatggccagatgagcagctacatttcttatgagacacttctgtggatcgcctttttcctccctcttccaggggttagggcctggggaagggcgccacac

SEQ ID NO: 31788 - DNA, 283 bp, Homo sapiens; identical to SEQ ID NO: 28238
  chr1:94713022-94713305
  hyper

SEQ ID NO: 31789 - DNA, 657 bp, Homo sapiens; identical to SEQ ID NO: 28239
  chr1:95285602-95286259
  hyper

SEQ ID NO: 31790 - DNA, 1124 bp, Homo sapiens
  chr1:99126872-99127996
  binary
cgggtgccttccagcctcgctgtggatcccgcgaagtggacggttcgcttcgtggcttcttcccagaccccgccactgcggaaaccgtcactcggtggcccccgactgggtcaatgcgaggacgcccacctcctacctttgagtctctcctcttctccagggtacagccaaccctttctccaacgtagccggagtccgagagtcccagttccgcccctccagcccgccccaggccaggtggggatgcgcccggcccgggccagcgctggtcccggcagttccgcgtctgcgcagcgggcgaggggctggagcggggccggccggggaggtgcaggagacgtgggagccaatgggcacgctcgggggagccgggctggcggcggcggtggcggccggctgggcgcgcactctcgggatggagggcgagcgccgggcatcgcaggcgccctcctcgggcctcccggccgggggcgccaacggggagagcccggggggcggcgccccctttccgggcagcagtggctcttccgccctgctgcaggcggaggtgctggatctggacgaggacgaggacgacctggaggtgttcagcaaggtgagggcggcggcggcgagtcccgggaaacttccaaggcaactccgggcgttgccagcattgcgccgacggctgcctctggcgcgcttgccctcccggggcggtggctctgagctggggacgagtgaggtcccccgggctgctggaccccgcctgccagctctggccgcacccggggccgcgtcgcctcggggcctcaaaccgcagccgctccctcctccgcactttgaccttccgttcggcggggctgtggcttagtggagtctgcaaagttgtgatttgttttccctttctgcttctctgacacagacatcttcctcgcggcagctcccgaacctgggaggctggtggctcaaaaccgctcccgccagctgcttttcgggcgaggccagccctgaactctgggagagcagccaagtttagagaaattattcttaatttagtgttgttgcttgtggatttgagacttgggtgagtctcgggtcttgtgggaataggttctaggaaatctccctgaacaggagaaaac

SEQ ID NO: 31791 - DNA, 787 bp, Homo sapiens
  chr10:100992012-100992799
  hyper
cgaacacacagacacacgaacacacagatacacaaacacagcgggtgcttgcttccgctccccaaataaagaatggtaatcaagtttctcaccatcctcatagtttttgagatagtaatccgggcccgggcccccgcggcttttcgccgggttcctcaggttctggaactgcaggaagtcggtccttttgcccccgaagcgcagaaaggcgggcgaaagtccccgggccagggtcaccaagcgcttggagctgcagaggaagagaataagagaggaaaggttcccaggacaggacgagagcgcgtggggcacggagaagggccctcttcctactccctgagggcgacctggccggggctagaggctctgtgcctgccccagccggcagtccacgctggcccttggccgctgccctgcgccccagcccgccctcaccgcccggctctgggggctgtgcctcccgcttccagacgcccgcagcggccccctcccgcagacacccagatcctgatctcctaaaggctacagatagtgtttgttcatagagtgtttgtatggggtgggtgtacgtgctacgagcacggcgctaaagcgcagttgcccggcttctgccactgccaggaaagcgctccgggcggagacgcgctaggcgcgcctacctctggcttccgaccgttgccaaaaacttgtatgctgaaagccggcattgcctccgcagccccaggggccccacaaacctccgtgcaggaggtgaaacctgccttgtttctctcagaccaggcccggc

SEQ ID NO: 31792 - DNA, 872 bp, Homo sapiens
  chr10:102414425-102415297
  hyper
cgaggctctcagctgcgcagcgactcccctccggttcccatgttgtcgaggcatgctgggagtacaagttccgagcgcacggccaggtgaacgcgccgccgccgccgtcgccgcgcgactccccaccccccctagccccctcccgcgggtcccgactggcccaccccggcgggactggtgacgccggcgcggcctgcgcctcccggaaacccaggcagatagcccgggtggaagcggcccggccctggggtcaccatcgcccctcaccccggggttcgacggcggccctggacgtccccgggcccccgtcttcctcctgggccttctctctagtccctggcagctgggagcggccctcccgcccctgcactccttcctgtcgcgctgtggttctgccctctggttgtcgctcccctagccctcccctctttctctctgcagtgtttcttggggctgttgtctttctgtctgtcactctgcgtctcggtctctctggagtccttctgcctctgtcgccctcccccgcctcgctgtgtctccgtgcgggtgcccctgcagctccctggctcgcccggcctgcgtccgtcggtctgtctgcctctcgcggtctcctcggctcccccctccccctctctcccctctcccctctcccggcgctggcggccaccgcactgcagcgcggcaccagcagtctatgacaaaaacattatccttctgctgctaaacaatccaataaacctctccacagggagaaagttaacctcttgtctcttcggctgatgccttcccgcccacgtgactgctgccacagtaaattcaaatcattagtctcctcaccccatcaaaaaacttctattagtaatggagacctc

SEQ ID NO: 31793 - DNA, 794 bp, Homo sapiens
  chr10:102483746-102484540
  binary
cggggcggggaggaagggacgaggggagggggctcgatgggggaattgccgggcgggcgctcgggcgctccgagctgcgcggctccccggggagaccgcagacactttgcggagatgttactccggagttggagacgatgataaatatgataatttgtataaaatctgaatgggtcttgttttcagggagaatgccttggatgatgaatgggcccggctttcagatagatggctgataaaaagtgtattggattgttgagagcgattttaattctcattctgtacctgcagatgccgcggccgccgcgcccggcctcctcctccctcctgcccactgcgcggggcggacgccggcccggccggcctcggcggctcaggaggcttctgaaatgactctaattacagagttattaattttaagaggagggtgagcggggggtttatgattattaatcgagcgcccgagctcggcgggcggggcttggcgggccgcgggctagcggcgctcggagtgcggaggacgcgcggggccccggggcggctccaagcccggcgggctccgcggcggcggcgaccaggctcgcttcccacttgggctgcgggcggcatggtccctctgcgcccatccggctctcctcacccctgccagtctccgacccggccgtccaacgtccctccctggccggctcgcctgcgcagccgagcatcaggctccgcgccggggtaggcgagcaggtccccagccccaggcccgcagctgtaggccggtgaggaacagctctgctagagaaagc

SEQ ID NO: 31794 - DNA, 955 bp, Homo sapiens
  chr10:102489761-102490716
  hyper
cggcgcgccccgcgccctgaagttcaacttggaatccaggtccgcgcgggaccccgcctagcgccccaagcgcacaggctgagcgccccgccctggcctcctgggcctgcggcctcagcgcgagagccctggcccccttcccgccgcgggtcgcggtcgggaaagcgcgccctgcaagggggttttgtagataaacaaaagcgtttgctcttctggttttcttttattttctttattcgcctgtcccttccttcttaatctccctcttcgctcttgtttctttaacttatttcccttcctcattttccctttcttttcgttcgcttttccttgtcactctccttcttgttctcttctgtctctttctgtatctccctcttccattttggccccttctctgcctctgggtttccctttcccgggcccctcactcttcctgggctaggattgcgccgtctccctgcatcatttttcctggctccgctgcctctttctcactttttcgttctcccggcggccaccgtctggcgggcttgggtccggctcccccgccgccgcagtgatttattcgcttcacccggcggaatcaggtgctgaaccgagccccggaacgagagaacagatttctcccaggaaaggttttgtgaactaaacgatgctaattacggggtgggggatgcgtcgcccgggaaggggaggcgcgcggggccgagcgcggcctgggaggggagagaccggggctggccgaggccctcccggggcgcctcccctgcacctctcgccctggctttcgcctttccctgggaactttcccgtctgagttaactattaaccaccggcgagaggcaattttcttcggaatttcagcgatttccttttcgcagtggactcagattagcacgcaaacagtgagatgctcggcttgagtctacgcgcgggcgaagatgcctctgtc

SEQ ID NO: 31795 - DNA, 412 bp, Homo sapiens
  chr10:102498738-102499150
  hyper
cgagggcctaatccgtcgcgcgcgcgcacgcggacacacacacacacacacacacacacacacacacacggcccccatagccaccgcaactctcagcagcagccctagccccgacccgaggccccaagacggcgggccaggaacccctgggacgtcctggctccaggctggacgtaggcggaggtggcaggagtggacaaacccaggcgggtcccacgacgcccctttcctcgggtctctccttgtttcagccagccgctctcgcccctggtcccctctcccctgcgttcgggtcctttgtctccagccacctcgcagcctgtccccgcctcggcggccctgccctttgggcctcccagtctctctggcgggtccccctgccttaccagctcccggctgtggcgcgctctcc

SEQ ID NO: 31796 - DNA, 753 bp, Homo sapiens
  chr10:102988184-102988937
  binary
cgaagcgcgcagggcacagggcgcgaggcgctgggtgcaggggaacccagcagctgcgcctaccttcggctgcctgcagaacgctgacctccagccccttaaacgtcttgctggcgagctcctccagcgcgcacagcggcgaggtctgcgagagcagcgcgcggcccgccaggggcaagccgccctgcgcgtgcttgtccgcggcggccagcaggtgcgccgccccgcacagcgagtaacttctccgcacagacggcttgttgaggatgtcctcgatgctgaacggcgtcagtggcttgttggagttggcaggcggaggcaggtggtccagcgggctgcgccgccgctcctcccccggcgccgccttgccgtcctccttggaagtcatctcggccttgttcggggtcccggccggggcggctcgggccgcggggacccagcccgcgggcagctcgggcgccggacggcgcgggcaggcagcggcgggtggaaaggaggccgcactgggcagggcgcgggccgggcgcggggccgattagcgcggcggctgaggaggggagaacagcgcggggccccgggaagagggcgctgacgcgggcgccgctgctgctggggcttccagcaatccggggccggagccggggcgcgctgcgcggggctccagtttcgccaaccccggtgctatttaaaggtgtcaggtggctcggcagtggctcctggccccgggtcctggcggccgcagttggaagagcc

SEQ ID NO: 31797 - DNA, 1451 bp, Homo sapiens
  chr10:11059337-11060788
  binary
cgtgcagagacaggtttgtcttccttagggcactgcgataagtccctaaatgtcacttgggtcatagatctgatctttattttgcctaaacctcctatatcctttcggtgatcgcccttagttcctgcccgggcaagcacaccacaccgaggagcatcgaagcgaaccctcgggctgctcgcctcccgcggctgggctctgggagcgcggctcgggtatggaagtggagcgggctttggcgcctgggtggccctaaacctactccgagcggccacggcggcctcttgccagggacccccgggcgggggagcagagccaggcggggagcgggtttgccttcgggggcccaggggaccctgagaagtctggccgtgcccgggcggtgagcgcggaggcggcccgccctgtgtccccgcggggcggagccgggttcggggccgcgctctgggccggcgggcccgcaggggttaagcggcggcgggcgccccgcgagctccgcccccgcccgccgcacctggcgctcggcagccggccgccccggcgctggatttcggaggggattggcggagcgcgaggagagaatgtgacaagtgccggctcggcggccgccgggggaggccgcgcgcacctgtccctgcccgtctcgcgccgcccgcggccgctcggacgcgcgcagagccgccccccgccgctgccgccgcgtgcgcccgcgaacatgacttctgccttcaagctggatttcctcccggacatgatggtcgagggccgcctgctcgttcctgacagaatgtgagtggcgccgcgtcccgaggccgggcgagcgggcgtcctcctcccagagtcggcggcgcgaaggggacgggcgtcgcccgcagctcccgggcgcgactcggccgcttcggatccgtcgcctccctcggccttcggaggccggcacgggacgcgggaggagggagcgggtgcggacgagcagcgccggcggtgcagggcgcggggcttcccggagggacgagcggagcgcggcgtcccggggaccgggcggggtccgcgagtccgggtgaggaccagcgggccgagcgcggcgtcccgggtccccgcggggtgagtgggggacgggcggggtccaccgaccggcgcgaggacccgcgagcagggtgagcggggcgcggcgtcccggggtccgggcggggtccatgagtccaagtgggaccggcgagccgggcgcggagtcccggggtccggtggggcgggcggggaccgggcggggtctgggggtccgggtgaggactgagcggagcgcggcgtgacggggaccgggcggggaccggcgagcgggcacggggtccgggcggggtgcgcgcgtgcgagtgtgcacgcttgtgtcatttgaaatgcggggctgacggagctctggtggccggggggaaagagctcttcttaccaaattaccc

SEQ ID NO: 31798 - DNA, 942 bp, Homo sapiens
  chr10:114711931-114712873
  binary
cgcgcagagcccggggccctggagaggctccttggctttctcttttgggcgactatgtatttagctttctagtggagattgctggctctcggccctccttcccccttcccctggaaggtcacacttcccagattggtcccaccgcaaacttgggggctctgaggcgtccttttctttggcaacccgcagggccgcgagcgccctgggcgccgtggcgggctccgctgcccggcgcactggctgcgggctctcccgggccgcgcagggcagcagggctgagtggggcggggaggcccctgcggcccggattcttggtttgtgtgcagccggaatggactcctccaagcggacttgtgtatttctagggaattttggcgccttgggatgtatggcggggtcggcgctcgccagcttccgtgtaggcccgtcgtgggccccaggggggccagagaccagggtgtgcgggctcaaggaggtgcgggggccgagggaggctggggcgcctctccttcaagggagtgggccgccgatcgccggccacccaactttgggggccccagggcagcgcggggtgccgggctcggggggcgcttcctgcagggtcggtcccgcgcccaaccctgacatttgttaatacggctcatcccctcccccaccggcctgtgccccctgccctcaccctgaaccccctcctcctcatccctccctccctcttctaagaagcctggattacgaatccctggacgcaagacgcatttgtgcccggcttcccggtattgtcattttacaccttctccagtttggtcccctaccccttatttacacacacgacttttgttttttctttttcggtaactctagatagcaatttgaaataatgcacccactgttcagcagccatggattcggtgctaatggccgagggcttgccggacgggagtc

SEQ ID NO: 31799 - DNA, 997 bp, Homo sapiens
  chr10:116163447-116164444
  hyper
cgtccggcgcacccgggacggcccgcccaccggggtttggcggagatcctggcccccgccaaacccaaagctcgcccagctgcgcactgagctaagccctcgggtccggacgcctccaggagctccacctgccgggcactccattcggcccccgaccctcgcatccctcctttcttggtgtgggggagcaaagaagggcttggagagaaacgatgacccgaacggcaggacgtttggggaggccccacctagcccggggagggtctgcgcgcccactccactgcccaagcgctttgccgggagcaggaagcccctagcccggcgggcgcccgggagaaaggactcaacagcccgaccctttgcccccagcagctcagcacggttcccaccttcttcggggcttcctcggccccaggcatctttcctgtgcggcgggactgagggtggagtggggtgccgggctcaccctctctcctgcaacaggtgagaagccccgccacgccccccactgacgaccccctccttccgcgcccgggaggatcaaagggctcgggccgcagcagccacctaggagcccacccgcccagtccgcggcgccgctgtcgccccctcttaggcccaggtccgggctgggtgggggcagtgggctctgcttatcccgagtcctggcaagacgagtcctagccctgccctccgcgtcgctgggcgaaagggagtgggtgtgcgccgcgcgaggaacccgcgccctcacctttgtaccgctccatcggggccacggagtgcgctcctcgcggctcggcttctgcgctgctctcccggcgctcggctcagcgcccaggccgccgcgctggcccctccccgtgaggtcacgctcgcggccggacctcctggcggggccgccgcgcccagggtcctcggacctggcccccgccagggctcgcccccagcgcccctgtcccagcgcccctgtcccagcgccggagaactccggcccgcc

SEQ ID NO: 31800 - DNA, 916 bp, Homo sapiens; identical to SEQ ID NO: 28254
  chr10:116527415-116528331
  binary

SEQ ID NO: 31801 - DNA, 767 bp, Homo sapiens
  chr10:118893719-118894486
  hyper
cgcggccggggcgcctgcgtgcaatccccccggcccggcgggcccgggacctggagcaccgcccacagccggcgggtgcggggatgcagcgcccgctgggcccggggcggcggcggcggctgcggcggccgagcctgcagcggcgcccgcgcccagggccggcaagctgggcccgcgcagcgctgagccgagagcgcccgtggcgcaaggcggcagcagcgcaggcaggccgggcggcgacaacaggcggccctgctccagcagccgtagcacgctgcacgtggccgcggtctccgacaccaccgagcgtagctccgagtccttgccctggtccttcttctgcttggtgcgccggttctggaaccagaccttcacctgcgcgccggggtgcggggagagttggagagaggggcagggaagaccagcgtcaaaggaagcgagctcccggggcgcgcggctccggggctctccccaagtcccagccctatccgcagccccacccagcagccggaggggtccgggccggggcgctgctgggggagctggcgccgccacgagggggacacagctgctccaccgggctgcgcttccgggtcagggaagcaggcccaggcaggcgccgcttacacagaacaaagtaataaaatgcccacggcaggaactcgaaggaagaccggaaagggtttcactggcttccgcgctaccccgcagcggtgtttggggctcacagatgtgtgaatcagtgcagtcccaaagccggaatttcc

SEQ ID NO: 31802 - DNA, 1440 bp, Homo sapiens
  chr10:118896192-118897632
  binary
cgccagaaccctcccgtccccctccacctccttggcccgagctggatttggggacacagtccccagaagcgtgcagttttggggatggggggcggggtgcggagcgcgaccacaaccaggtagcaaagacactgtgtggagggcaaggggcctaactccataccgctgaccgaaggagggaccacactttgtctttttgtagagtcctccagacaggggagagaaaaaaatccaatcaattccacataggcggacgtttcttccggcctgggggggcctcggctgagccttccgggtcccctgtagcctgagggtacccttgtcgccccgcccgggtcctgcgggccccagctctgggcttgccgaccagaccgtgatccagacgtccccacccccaccctcgagtctccttccctccggagtccgcgcggcggaaggaggagggactgagtcggggccggccgggcccggagatctgctgctggctggggcggcgccgggccggggcccggcctcgcagcctccgccgccggggctaagtgcacgccgcgccatccgagagcggcagagcagagcaccaaagcggcaaccgcggctccgtaaccaagcccagctgcctctcccggcggcagcggtcgggcaccgatcgcggccgtggggtcctcggcccagtgcactaactggcagggccgtagcccgcgatcggcagctgttctccggggctcgcgttcccccttgggtgcgctcagccctccagagcgcgggagtcccctggccggctcccggcaggtcgtccggcccttggagcgcgcacacctcctcccggagttttctgctcctttcccgggtcggaggccgcagcccgatgcccggccgcacccgcgcagcccctcatctccccccgcagcccggtcagcggggcccctccgggcgtggagggccgaggcccctggagagcgcaccggagagtcccaggcgcttgtccccagccggactcggggcggggagggccaacaactttctcccaagtcccagccggcactccttcccaccggcctgtgtcggcggcagcgcgcagctccggccccggagtcgaccccaaagaacgcgcctggcagccctgcccatccctacctcggaccaggatccggcggcagtaatccgggtccgctgcggaattggatttacttttgttacaatcctcagcagcgcccgacgctgagaaggcgccctgcggctccttgaggaaggcggctgggaggttcccctccgcgcccttgctctcccgactctccttgtgcgcgttcttcgagacccgggcagcctcggcgtccgagtggcatcgaacgtccattttgtctggtttcccgaacataggcaagaacaacaacaaaaacagaaaggaaaaaaaaagcaaaaaaaaaaaaaaggggggggggc

SEQ ID NO: 31803 - DNA, 835 bp, Homo sapiens
  chr10:119000780-119001615
  binary
cgggcccgggggaggcagggaggcagggaggcccccagagctacgcgggcggggctgcggggaccccggggcagccggggcgcagggcgcagggcgcaaggtgcacggggccgagcgtgcagtttgggaggtggcacagttgggggcggcggggatcagggcagcgtcctgggggttctaggttgggtctccagattgggtccccgacggcgctcgcgggcgctctttccagggagcgcgggctctcgtggggacgcgctcgaggcaggtgagccgaggctggggcgcccgggggtgtccccggatgccggtgcgcgcggctccctgacccgcccttccgcggcctgggggacgggagaatggggggtccacggccgccttgggtcctcaccgcgcaccgcgcccgcagcggagccccggagccatggccctgagcgagctggcgctggtccgctggctgcaggagagccgccgctcgcggaagctcatcctgttcatcgtgttcctggcgctgctgctggacaacatgctgctcactgtcgtgggtacgtgcggacagggcacccctgccccggcaccccagccccagcgccccttccccggcactccacttacccctgcgcggtcccggagctccgccaaggcccgggaaagttggagaactcgctttgcaaaaaagacatcccctccaggctgccgcgccggggctaggaggagccgcgttgtgtggcttcgctttcctgatgctcgggtcaaaaactgtgacatccgataagacccagaacttatgtttccccctgataatttcccgcatcctcttgcctgctttcactgc

SEQ ID NO: 31804 - DNA, 1371 bp, Homo sapiens
  chr10:119302490-119303861
  binary
cgcctgcaaattcttctggaaggattttcccccctctcttcaggttgggcgcgtttggtgcaagattctcgggatcctcggctttgcctctccctctccctcccccctcctttcctttttcctttcctttcctttctttcttcctttccttccccccacccccacccccaccccaaacaaacgagtccccaattctcgtccgtcctcgccgcgggcagcgggcggcggaggcagcgtgcggcggtcgccaggagctgggagcccagggcgcccgctcctcggcgcagcatgttccagccggcgcccaagcgctgcttcaccatcgagtcgctggtggccaaggacagtcccctgcccgcctcgcgctccgaggaccccatccgtcccgcggcactcagctacgctaactccagccccataaatccgttcctcaacggcttccactcggccgccgccgccgccgccggtaggggcgtctactccaacccggacttggtgttcgccgaggcggtctcgcacccgcccaaccccgccgtgccagtgcacccggtgccgccgccgcacgccctggccgcccaccccctaccctcctcgcactcgccacaccccctattcgcctcgcagcagcgggatccgtccaccttctacccctggctcatccaccgctaccgatatctgggtcatcgcttccaaggtacgtgccacgtcgcggaactgcagcgcgccgctcccgccgcatccttcactgcccccggcctgctccgggtgggcgcttggcaaggcctgggcggaggttcctccggctcgcgggccagcgcgccctgttgggaaactaggcggcgcggggccgggcgtggtgtcgatccccagtctccgaagctacgactggtttggagtgatggcctgcgggccgcttgaccctttgggaaggggtgcgaacggagaagttgtcccccagtgcgctcgaatcagagcaggctgggctgtgcgtgcccggcgccgcggagcccagagcccgcgggatccccaggctcctggtaccctcggcaatgcccccaaccgtcctggctccgaggggcgcggacaggactcggccgccaggcttgctttcgactgcgttcgaccctgttcaccacccactttgcgccccttcagtccagacccgcggcttcttagtcttccaccctcttctggaggcgagaggatcctcgcgccccgggagaaaagtatgggatttgttttttctttcctgcttttcggaggcctggggaggggcgggaacccgtgcgggaggaaagctccagggcttggcgctctcgccgcgacctgcttaattggggcgccgagcagccacagcgggaaggcaggttc

SEQ ID NO: 31805 - DNA, 872 bp, Homo sapiens
  chr10:122216127-122216999
  binary
cgaagcccgcgagtgatctctggggaacttcctagaaaaaagaaagaatttcaggttcgaacggtgtagggagggccgaacacgggagcaaggttggccagggctgccctgagccctggagaatccccagagcgatcgtccactacatgcccacgtgcgtgcgtgtgccagggagcgagagcccggacagcgggagtcggaggcaggaccaggagctgcagaggggccgcgggcagagccccagcgagcgcgctgccctggcgcggagcccaggggccgcccactggcgggggaggcggggagcgcgcagggaggcggcggcggcggtggggcttccccgggcttcccctccccggtccgcgggtgcccggcgcgggcccaggaggcggaggcggctcctggggagagggatccgggagtccctgaggcggccccggctccgcactaggaggcggggtccgcagtatcgccagcggccggcgcggcttcccggagccccggagcccgaggcgcgaggtttaggctgagccctccccggcgcctgcccccgcccggcgcccgcctccgcccccgcccgcggcctggagcgcgcctccctcgcctcccagggtctggcgagccggcgccggccgagctgcgggagccgcggagagcaccagctgacgccgcgggagctgctccggccgcaccatgcgggagctggccattgagatcggggtgcgagccctgctcttcggagtcttcgtgtaagtagtggcgcaccgcgggcagggcgcactgacgcgggggaacaaccgaccaagcctctctgtgccctaacttagtttgcgcagccgcttcccactggggcctgggttcgaggtcccttcccc

SEQ ID NO: 31806 - DNA, 496 bp, Homo sapiens
  chr10:122738894-122739390
  hyper
cgggcttctcaaactactgcgcacacaagtcgcctagggaccgaattaacgtgcagccctgatgcagccgcctgagacccgcctttgcagcagcctgccaggaggtgcggatgctgccggcgcctggaccgcgcgttgagcagtgcaggtgaacagctcgcctaacgcacaagccacgcccacaccctttctacacgctttctcgttcacttctcattgcaactccttccgccgcgtggacaggttcagcactctcggagtcgatgtcattattcgccatcgacgcgaacctcggcaaagagacgggtcttaccggtctccgaatgttctcaggccctaagcgcgcagccccgcacccgggtgcagccggcgcggtcccacgtgtccctaccgcgagccgctccccgcgtccctgctgccgccgcgcgcttaactctgcctgcccgcccgccccgccccgcccggccgttcctgcgcagccctgggtcggcctcgc

SEQ ID NO: 31807 - DNA, 1320 bp, Homo sapiens
  chr10:123356997-123358317
  hyper
cggccccaccccagcggccccctcccgaaaaaggggtctccgcagggcctggatggtacggaagttcccaggacacacggatggggcacctcggagatgaccccgggaaccggcctgcggggctgtgccacgggcaggcgaaccttccgcccgtctgctctggggtcggagaaacgcgcccagtcagcgggaatgcgcccgccagggtttgacagggaggggggcgtcaacgccagaagcagatgtcagcatctggatgggggtagcagaggcagaacttccagaacgccggccgtcagcacgcacccacctcccccatcacctatgcagccacagagggaggacacggagcgtcctccacaatgctagtccttccgcgccccccgcccggaggacggtgcacccggcgtcccgggctcccgtggcgcccacgtccccggctggcgaagctccccgaggcgtcttgcgcggcgattaccttgaatggcaacgctcctccgcgacctgtgttgtccccgcgccccgcgtgggtcgggatggagaaagcgacgagcccggggttgcggggagcaactccaaacgcagaagagtggtccttgggtcttcgccggcgccaagcctcccgggcttcacgcgtaccccaggctgcggaggagcgcgggcatgacgcccgcgggctgccctcggatttggggaacgagaggaagaaaggactcaggcttggcgttgcctccaccaaactttgctcgcgagttgcgaaggctcagagcgcgcaggcaagctgcggcctcggggcccccggggctcgcggccggcccccgccagcccggagagcagtcgccgcgccgggccaggtacgccgcatgcagccccgcggcgcccgagctttgtggcggccgcgcgcgctccctcgcccgctccgcacccgccgcccgcccgctcggctctccaccgcgctctcctccagccgccgcccgcgccgccgccgccgcccccgcctcctcgcggcgggtcacgcccccactgaaacccgagccgtttcctggacggcggcgccctctctgccaatcagcgccgcgcgcccgggccgccccgagtcccgcgcggctcccgacgcctccgagcagccggagacaccggcccgggaggcgagggctcggccgcgatgcggccgtagggatgcagcgacagcctccgaataaggcctggtcccgcgccccgcgccacctcctccctcctccccgggcgagcgaggctggccaacggctcgctgagcgactgcgttacgttgttttatgtcaagttagaaaacaaatgacc

SEQ ID NO: 31808 - DNA, 959 bp, Homo sapiens
  chr10:123922619-123923578
  hyper
cgcagctctccctggtacagacttcagctgcctccaggacccggggcctgaaggaggcagaagccggcggtggaaaagggcgcacgtctctcccagcgtcgctcccgctgcccgctgcccactgcagcctatttacctgttcctccagccatccccttagtcctgggccgggagagaccatttcctccttcctggagggatgagccaacagggctgagccccctactctctcggtggtcagcccgcccgaccaccacgcccctcctttctagggccccagctcccgggccgcggctcgtttgcatttcaaagctacacaatgcgggcggtcccggcgaggcgggaggggccggggcagagggagggtcttcgcctccccacccccagccccgtttccggagcccgcgatggagctttgtgaagatgcaggcgttggggctgctcggcgatgatgacatcatcgtgtcacacacaggagccggctgccggggggtttaagagaagagcctttcggaccacaccggcgctcacgctcatacccgcacgccccgggcagagccgcgcacgccggccacactcgggcgcgcgccggccacactcgcgcgcacacatacgcggcgctcgccccccggcccccggctcgggccgcgagtcgcagctccctgccgccgctcccgccgccacggatgcccgcagctgctcccctctgcagtgcagcaaccccggccgccggccggctcgccccggctcccggctgcaggaatcgcgccaggacgctggccccgctcgcggctagcttgcacgccagggcacagcgaggatgggagggtcgcagtccctgcagccagccccagccagcgacctgaacctggaggcttccgaggcaatgtaagtgctccgcccgggccgccccgagtctcccggggaggaggagaggatgcccgggctttgttagtgtc

SEQ ID NO: 31809 - DNA, 927 bp, Homo sapiens
  chr10:124133662-124134589
  binary
cgttgctgaaagaatttcgactaacccttctttaagtctctcttaccctcctgtactattaacaccattgtaagtaggcagtggagctacatttgcagggagagagaagagcgaaaaattggcgcgcagagctgtaaagcgtttttctccaggtcacaccgcagcctgtaaatttgtgacacttggaccgattatgggacagcttgcaaacaaattatctgcaaactaacgaagcctatttttaaagatccctgttcctcgcagctctaggcgatgacatcagagaacccggagttctacctccgagccaagcccagtggtggtcaaaaactacgaataccaggaagcaccgcggcgcggcggcccagagctccgcgcgcaggcctccccggcgcgccgaggccgccgccgctggaaccaggaagacgccagaaactcggcccgccacgccgcagggacccgcgcggggcctgccgggactcgtagtctctgcgggctgggagcgcccgctccggaatctcagccgccgtctgagggctgaggcagcgtggggacgcgtgcgcagtgcgcgggctggccgtcgcggacgccgctccgggcagccgagcctctgtgggagccggggccgcggcggcgcgggtgctccgggccgaggccgcggtaaagtttagcttgaagaacgcggccgcgctggagcaggggtggtggacggggccaggcgcgaggtggcggcggctgcggggctgccgggctgctggagcgcggttcccgctgtggcgagcggggaggcgtccgcagaggggcggtgggtgctggtgagtgcggagccggcgccccctctgcgcacgtccgcgccacgcgccacagcacctggaggccgccgggccggctcacctgccctggcttggggcagcgggagggggcggc

SEQ ID NO: 31810 - DNA, 1366 bp, Homo sapiens
  chr10:124220873-124222239
  hyper
cgctgccccgcccgcgccccgccagcaccgccgtgcccgggcgcgcccgccctgccccctccgcgggcggtcccggtccagccgcccgccctccctcccgccatccggccagcccccatcccgggcgccgtgcccgtccccaaggcggctcgtcaccgctgcgaggccaatgggctgggccgcgcggccgcgcgcactcgcacccgctgcccccgaggccctcctgcactctccccggcgccgctctccggccctcgccctgtccgccgccaccgccgccgccgccagagtcgccatgcagatcccgcgcgccgctcttctcccgctgctgctgctgctgctggcggcgcccgcctcggcgcagctgtcccgggccggccgctcggcgcctttggccgccgggtgcccagaccgctgcgagccggcgcgctgcccgccgcagccggagcactgcgagggcggccgggcccgggacgcgtgcggctgctgcgaggtgtgcggcgcgcccgagggcgccgcgtgcggcctgcaggagggcccgtgcggcgaggggctgcagtgcgtggtgcccttcggggtgccagcctcggccacggtgcggcggcgcgcgcaggccggcctctgtgtgtgcgccagcagcgagccggtgtgcggcagcgacgccaacacctacgccaacctgtgccagctgcgcgccgccagccgccgctccgagaggctgcaccggccgccggtcatcgtcctgcagcgcggagcctgcggccaaggtactccgccgcgctcctgggcagctccccactctctccatcccagctcggacctgcttctgcgggactggtgggcaggttgaggggcagcgaagcgttgtggggtggccagggcaactctcggggacaggcaggtgggccccggggtggcggatttccgcgggctgcctcggaaccgagcttcgcgcccagcccggggccggttctgcgcccagacgatgccagtacgcccggcctgcactctggggctcgagacgccgggcgaccggccatggagtgccctgagggcaaccacacagcgcggggaccccaggacaaataagaggaatgggggcataaaggaaggagagaagttcaggactgggaattggcgcctcgcagagcggcttcaggaccacaagaagtcatttcggttgctttttcttctatttacgtcctccgtcccctttaaaattcactgctttgatcacgggaccgctcagtgaaaactgtatgtaactcttttggaaaggaacagtgtttgccggcccgccccggagtttctccaaaaagtctaccccgagcagggaacggtttggcaccgctctcgtttcggcggc

SEQ ID NO: 31811 - DNA, 1489 bp, Homo sapiens
  chr10:124894818-124896307
  binary
cggcgggaagcgggtccctgcgccgcaggggggagaggcaggcgcggtctccgggctcgcggccgttagtgcgcttcggccaagggcgccgcctgctccgcgtccctcgctcgcctcctgcgctcgcaggagcgctccgagtgcctctttagcgggagccaatatccttttgtgctaataggcttgtcctcatttgctgcctaattggactatataaagccaataacgggcgggctcttatagcccgaagccaaagcgccaaaatccgagggaaggcgaggagggggcggtggcggaggcggctgcggggccggggctcggctgagccttcgcctgcctaatcccatttgccattgtacgcgcccaatcgccgtatactccccgcatttaacttggatgacattttgatttcatcattagcatccggcgccggattgacgcagcctcgagccggggactgctcttgctgcctcctccgcgggagccgcagccgcagccgagccgcctcgatccctcggtgccgcggcagggccgctccccgcccctccgcacccctccctcatgcgagcccgcccgtctgggtcctcactccgccctcccgccgttggatttgcgcccggggcggcccccgactttgcgccccgtagttgagttccgtttatggtctgatttccggcctctcgcctgctcgccccgccgcccgcctgtcccgctccctccctcccggggacccggaggagaggggaccatgccggaacccgggccggacgctgccggcaccgccagcgcacagccccaaccgccgccgccccccccacccgctcccaaggagtccccgttctccatcaagaacctgctcaacggagaccaccaccggccgccccctaagcctcagccgcccccacggacgctcttcgcgccagcctcggctgccgccgccgccgccgctgccgctgccgcggcggccaagggggccctggagggcgccgcgggcttcgcgctctcgcaggtgggcgacctggctttccctcgctttgagatcccggcgcagaggtttgccctgcccgcgcactacctggagcgctccccagcctggtggtacccctacaccctgacccccgccggcggccacctcccgcgacctgaaggtaccgacctctctttgaactttcgttgtccccctgcgcgcccgccccgtccccgccccgcgctgcttccctccgcagttctgggaccccagcacccgcaaaccctctgctcggtcagtttttttcggcccctagcctgccctcgcgctgggttgcgctgcccgttaatccaatcccacttggtgagaaaagaagtggaattggagccccgggcacggtgcttcccgggaaaagtggcctcgggcgtgaatagggaggcttcggacggccggggcttgggacacggcctggaaggagggggtgattccaatgcgcctaagccgaaagggaaccgttctgcc

SEQ ID NO: 31812 - DNA, 992 bp, Homo sapiens
  chr10:128076009-128077001
  hyper
cgactgacagctagggagtgacctggaagccaggaagaggggcagagaggaaactaaagaagtaggtaagagagtcagtttatgaaaatagagcctgctgtggagagcagcaggcacacctgcggaggagggggctgcctcacctgcggggccgctgcgcgcccccctaagtgtgttagcgggggaggcggggctggaaaggaaacctggtgaagggctggcccggagcctggggtggggatattcactgcgggatagggccagcaagaggacccgacacgcatcgtcccgagtgacacgtgtaaatgtcaagatacagagacatctgcaaatgtcacccaagagggtgaggacgggggagcggtcccgaggctgtgccctccggggcaggtactggctcctgtggggctgcgggccaagtgtcgcccttccccaaggaattggcacctggggggggggggtcggtctcgccgcgctggaagcgcaagccccggggctccggagatgcgccggggcgcgtcgcccctcggggcagccctggacctcggcgcgcccaggcgcagcgtgcggtgccctcggcggggcgggcagcgagccgccctagttcggcgacttacctcgggcctcgcagggcgcgagcagagcaccggccagggcgagcaggagggcgcgggcgggggacacgggcagcgggcgcgctgccatcgtcgccggccttcagtgcagcagctctcgggcccggcggcgagcgctgcaccatcccacgcgggcgccgagccggggccgggcgtcgcgaccggagggatttcctgcctcggcgagtcagctccggagccctcgcgcagcgcccgcgccgccgctgagctcttctagcctttcatttttaaaaaagtttccccccgtgtgtgtgcgtgcgtgcgcgcgcgcgcgccgttctggcacaagccagccttgaccgttgcaataaatgagcaaactgtccgagttggccc

SEQ ID NO: 31813 - DNA, 775 bp, Homo sapiens; identical to SEQ ID NO: 28268
  chr10:128593891-128594666
  hyper

SEQ ID NO: 31814 - DNA, 193 bp, Homo sapiens
  chr10:129948000-129948193
  hyper
cgcaggcccagactccaccgtcagctgccgccgacggagcccacagaggaggctcgggcgcccgcgccccctgcgcagcggcccctccgcagcggccccagcccgcgtccccgcagcgccccttccgaagcgccccctccgaagcgcccacagcccgcgttcccgcccgcaccccagcccgcgccccctgccc

SEQ ID NO: 31815 - DNA, 889 bp, Homo sapiens
  chr10:131757446-131758335
  binary
cgcgatggcttctccctcccctgcctcccagcctcctcccccgggcgcccgccaggcctgcgaggggccttcggctgcagggaaggcgccgactgggctcgggccgcggggagggcagggcgagggaggccggggccggggcgcaaggagcgagagcccgctggcaccgaccccggaacccggggctcccgggccccttcggcattccgcgccgccgccaggccgcgtcctcaggccattgtctacaacgagttccaatctgcatgttgggagaggccgatcagaacgccccgaggctaaagaagcagggaaggatggtcgcggcgcaggagcagtttgccaagggccgagggccgcgcccgccctgccctgcgcgctcccccggctctagcaagtctggcgccccgcggcttcccgcggcttcccgcgttccaaacccaggcgcccgcggggagcaggccgccctggaccggccgccgtcccgagctcccggggcctccctgagtggtgggcagcgacctggcctctgcacgctgcgggcggcctgggagcccaggcgggaggcccaggagcagcaaccgcacgtgggccgcggcgtcgccagcgccccgcaggagtgccggggccccagggcgcccgagcccgcgcggccacgtgctcctcgccggatgatatttggaaagaaagtgctaatggccaatctggtgtttattttgaaactgctaacagtgatttttctcgggtaaaaaggcagtctctgcgcgcacgctcgggtgggttttgagcagaggctccgccagatggtgcgaagccctaggtgcgctcacggccgcgctcagcccggctccgccgctgggaacccgagctggggatcgggagccgcccgccc

SEQ ID NO: 31816 - DNA, 954 bp, Homo sapiens
  chr10:131761022-131761976
  hyper
cggttaatcatgtgaagtgccatcgacttattgatcgtttatgttttgttttccttctatgccatgagaagatttcgtgtttacatccatgtcattttaatctcaaatctttatgtcctttcaccagcgcagaaaaggagagccagccgctgcaggggcggcgagcacgcagcaggcacttaccgttgctgtacaataactggagtttatagtggatgccgttgttggttttctcgttgtttggctcctgaaagtaacgataaataattgcatttagtgcgatcggtgtcaggcgcggccaccacgctcggtccccctccgcgaccgaggctctcggcctcacacatggcaggattcctagctcgaagcagcgcggtgatgtcactttcctgctggaagcccagcgttctcctcgccccgagtaagtccgagggcgcagagaagttgcccagccctcggcggtcccgggcggccgcacgtggcggcggcggggtggcctggcggagccgagcccgccgcctaggggggcactcgaacccccgcgcaccggcaccgcctgcctcccgcttctagaaagagagagggtgtgatcgtgtgtttgcacttactttctctttctccacaaagtccacaaaagcggtcctttcaatctccaccggctgcccctgcctatcgtagagcgccagcacgaagtggaagaaattggatttccggaggttggaaggcggctgcttctcgaagtgcgcccgcgccagccccacgccgctgcgggaggaaagagacagcggcccggtgaggagcgcggcgccggccggcggagggggccgggccgggccggggccggggccagggcgcgcgggggcggccggtacgtacctctgggcggccgtgttggcgtccaccacgcccgccgtgtgcatccacgagcgcaccgggttcatgccgctgcccagc

SEQ ID NO: 31817 - DNA, 1461 bp, Homo sapiens
  chr10:131761993-131763454
  binary
cgtccccccgcgcggaatattctcctgaatcccaaacatgaaaactgctggcggcggccgcagctcccggccgaaagcgtttcctcgagcagcggcgctcggggcttggcggcaggcggctgccctggccgccctcgccctgctcggcgcctgcggtccggccccgccgccggcttcagcccgtcccgggcaggcgcgacatacaccagcggccgggcgctccggacggccaggggcgcggaggcggctccaccggcggcggcggcgcttcgaaggagcaggacgcggtggccgcggcggcgcttgttgttgttgttgtttgcaggcgcgctcaacgtggtgtcatcctagccaggcggcgtccgcggctgcaggacactgcgggatcgcccgcttctggcgcggcccgcctgctccaaagacaaataaacggggcagtgagtgctgcggcgcagtcccgggcgcaggcggggcgcggcggggcctggagcggcgcgcgcagcggacggaggcgcacaaaactcagccctctctccccgaggaatggaccctttcccgggagccaaaactcgaagcccccgggagcggcgctgtcagagggtgacgtcggggggcggtgcctgcgccatatatgggagcggccgcccctcgccgcgcccctcgccgccgccgccgccgcgctcgccgactgactgcctgacggcgccgcgagccggcccgagccccgcgagccccgcgagccccgccgccgccgagcgccaccgagcgccgccgccgccccccgccacgcaccgcggctcctcgcgtccagccgcggccaaggaagttactactcgcccaaataaatcttgaaaagaaacaaacgcagccactgcacaattgcagtttggccccttaatacctccctgcaaaacctgccacacagtcgaacacgatgggcggggcggggggctgtaaaatgctgaggcgccccaagttgcccagatgcatgcaataaatgcaaggggctgcagcttgtcctggggccgcccgaaggagaagtgggaagaggcaggtcgaccgcagggagggcgccggagggaggagcgggcaacggactgggaggaggggtgcccagggctccccggccaaggctggacgcgcagctcagcctgatttctaagcagacctaaggctgctgcagggccggccggtcccggtctgagccccgccaggtaccccaagcttcctaccccggcggaggccgccgagtgccgggcagggaatcacgtcggaggcagggtctgccagatgctccctctcccccggtggccgcggcagaccccggcccctggcctgttcttacgcacagcgagtgacaaagaaggctccggtctctccgggccgacgggaagcgcgcccggcctctccggcgacccggagccgggtgtctggctgcgcgacctgcgcggtggccagacc

SEQ ID NO: 31818 - DNA, 1616 bp, Homo sapiens
  chr10:131768700-131770316
  binary
cgcgcacaaaagtttgccaataaaattctagtttgaaaccgcggtttgccaacacgagtaaaggaagttggggtggtggagagctacagtgggcacggacggaaagggtggccacggtcaccgatgtactaatgtcctcctcctcggctacccgatctcactccttcacagcaccttaacagagtgtatacacccgttctggtgcgcaaaagtggggcgatgggtgccggcggccgggccggggagtccgtccgggtaattaactcagctccggcgactgcgacgatgaggccgggagggaaggaagagcataccgctcttggacagaaatgtgtcaagctctcctcccttccagcctgcataaaccctttcgcgcacattcgcgcgacttctaagggatccaagccagcggactgggtccagcagcgcgcggcggcgggacgcacccctcctctccccccaggaaggcgggtgcacgccggggctggaagggggagggtgcacctctggctacaaattcggccgcgaagagattctttaccaactctaagggtttgctgaatgtacagaccagaatgagtcccgttaaaaggaagctattcccacattaaacatgtgtgttttccatactaatggagtcacttaaagctgttgctaatttaactttttaaaaaggccacactgtggaaatttgcattttctttaggacattgaaatgaagagaaaactgctgggcggcaaggcggcccagggcatagctaggggccatgtagaaataaaaacagataaagaaaagaagaaagaaagaaaccggcttctcttctagactattaataagcaatttgtcccgctgaaatttacattgcaaagcggagggcgccggcagccgtggcggcgggcctggcgcgggctccgggggtgcgtcggcgcgggggcggggggggtcctccggccatccgggccgccctcgggggcgatccaccggcggctttgaactcggtgtccttgccgccgtgccgccgaccctcgcccgcacacgcgcgcatctgcacgccagggccccgcctgggctgcgcacccggaggccgggactggcgctgcgctagcgccacccgggctgagctgcagccttttgtggggggggcgggaatccctccgctcccagtgacgccttggactcgcggacccccatccgccccaaacgactgcccaggccttaaattaaaaatggcaacaataagcttaatttttttttcctccttagccgcgccgccccggtccaagtctaccgcaagcgtggagccccgagcgccgcgcccccgccggctctcccgcccgcgcgccgcccgacggagccgcggatcccgggcctagcgtggggccagggcgccatctacgggcgccgcgcggctccgggcggccgccgcctcctccctctcagcgtccagagcccgctcctcctcccgccgccgccgccctcgccccgcgccgcctgccacttatcacaattacccgacgctcccgtgccattttgcttatgaaacactgattgctagttatgcggacttttaagcactatattaaaactttcgaaatgaaggcgctctcctgcctgc

SEQ ID NO: 31819 - DNA, 966 bp, Homo sapiens
  chr10:133109139-133110105
  binary
cgatttccagcttgctttcaagtctggcagagactgtgaaagtcctaacttctccgcgatgtcagccacggcccgcggcggtcacggagccacttcagcacctcgcgatggacagtgacccccggcgtggcgcgagttccctgcggtccccacgcgggcctgggcggcgggtccctccacggctccgtccagacacccggaggcacctgccaaagctgcggaggtggacgaccgggcgtccaagcacgaactttctcgccgaggcacggctgccgggctccgtcctgagggtttggggcggcgaggaccgccggggaggagggcgcgcgagccggaggccagagccgggccgggcagggcgcgcccaggagcaggggagacggcgacccgggccgaggcgggacggggacacgttacctgcccgtggagcgcggggaaggggtgcgcggcggcggcggcggcggagtctggcgcagagggcagcggcagcagcgggagcaccggctcgctcggggccggccagccggggagaccggggagcagcggggccgcgggcggcggggccgaggcgagcagcaccgggggaaccacgacccccgcgctgagccggagcagcccggccgagcccggcaccatccagacccagggcggcggcggcggcggctctgcgtccatcggccagaggagaggctgccgccgccggggctgctgctgctgcagctgccgccgccgccgctggaacctggcgcccgcctgcatcctacatccccgcgctgacggcggcggcgggggcggcgggcgcccgagatgctgggccggcggcggcgcggctccggagcgaactcacttggctccgcggcgcggccgctcgctccgcccctgccccgcgcgggaagctcctcctcctcccgcccgcgccgccgccgcccccggacccggcccccgccccggtccccgcccgcccgc

SEQ ID NO: 31820 - DNA, 956 bp, Homo sapiens
  chr10:133110114-133111070
  binary
cgccggaccccgccccgccctcgcgctccccggccctggccggggtctcctccccgctgcgcccctggacccgggcggccgcggaggacgtgggtgggagagggccgagggcgcgcccggctgggctcccgccgatgccggccccctggtggcctctggccctctgggacccagcgcaccgcgagggaggctccgggctccgcactcaagggcaagcggaagccgaggtggcggcgccggagccaggcatgtcccgctgcccagcgcggggctgagggcgcagacggggaccgcgcgagccgctctctacctggcctcctcggagtccagggcgcggagggtactgggctgcggatccggcgcaggcggccccggacgctgctaggcgcgggcggatttctgttgcacaaatgggccaaacaggttcgtaaggcccccgcgggtcccctggcccggaagttgagccgcgggtgcctggtctgaagttccgcgccccacagtggcccgcgggcctcggcggctcctgccctacgccctccaaggcaccaggcaggtggccccagggcctttgcccacgacaccccctgggtggggcaggaccacccctctgtgaattcgtcctggatgcccccaggcacagtctgtactcctccctcccccagcacacgcggcctctgacgctgcacgccgagcttcctgggacccaggacgaaccgggctccaaggaccctcgctccgcccggaccacacgcaggcagcgccggccgagccgagcctgggtccgcactggccacgcgcagccaccgccagacggcgctagccctcccccgctgtagaccctgcttcggaggccgccagcctcctccccatcccgggtccacagcttcagtgcagcccctggcgacgcgcgctgacagctgggcagagacttccgtgcgctgtaaaccccttaggtc

SEQ ID NO: 31821 - DNA, 993 bp, Homo sapiens
  chr10:133999531-134000524
  binary
cgcggcgcgcggagacccctcaacggccgcagcaagtccccgagggcagcccggcgtggcccaggcccgggacccccagcaggtagtggccgcgggacagaggccgtgggcccgggctcggactccccgagaccctcgcacccggaggacgccgggcgtggggctcccccgctcccccctgcggggtcctccctatccgtaaaggtcctgagccttctgggtcctgcgaccaccccccacccccgcgaggtcccgcccaccaccgcgtcccggtccctggggagcgcgtgcgcctccttctgtctctctctctctctctctctgtcctattcgggcccctcctgccctccgtctctcgcggccagcgtggaacagcctcgcggggtcacagcctggcgctcggaccctggcccgggtcatctgcgaaggagccggctttggccaaggtgccttcctggacgggtgtggttcccagagcgtcgcggcccggggttgactggctcggaatcccggggccttgggcgcctcgcgtctcctgggacctgggttccgcgctggagggcagcgggggcgcgggcggggcctggcaggacgtggccggactctctccctcgcctccccggggtgcaaaccccgcgcacatcagctggagcaggttgaaatccccacccagcgctcgtccgcgggtctgcgcgggggcccggggtgcagagatcagaccctgcagcggttccagcgctgggggggctttaaagcgaaggagtggctgagggcgggggcggggctgatgggcggggtgaggcggggctcgggctggggcgggccctatcgggggcggggcctgccgggggcggagccggggtgggggcggggcccagcgggggcgggaccggaacggagccgtgcggccccgcgcgctcgcagtctgtctcccgccgtccccacgcacgcgtcccggctcacgcgtccccccgcccgcccgcccgcccgccc

SEQ ID NO: 31822 - DNA, 1487 bp, Homo sapiens
  chr10:134599745-134601232
  hyper
cggcgccccccccccgcccgcgcgcccccgccggccgcgcactccatgaagggcccattagcgcggcaggtgcctcccgggctgtaaattcgccccgatttatctccccggggacgaaataaatccagcttggatgggagtgtagttaggcaaaggttttcatgcgaaatcaggaaaaaatacgagaacgtattttattaacggaaagaatgcagatttgaggacccgcccgcgcgctcggagcgccccactcggggaagagtcccggcccgcgtcccagtcgcgactgctccgccgcccgtggctggggtgggtgtgagcggcagcggacgccggcggggaacgcgctccgggcaggtcggggccacaggagggcggaggacgcgggcctcgagtccacggaatccacgggcctcacggccgggcgaggctcgcacggagctgcctctggtttcgccgacacgcggccggcgcggtggaggagtgaggcaggcgggagcggggcggggaggcgggtcccgggaccacacgcgcggctcggcacttccccgtcatcggcctccaggtctcccgctgggggtcccccaggatgtgacctgggcccacgacttcgcccacgggccgcctctcgcgaatccccggccgggagaacagagaccaggacggcctcagcgcggaagccctgtccagggcccgaacgtgggtgcgggctgggggcgcagcggcagaaacgcggccttagacgcgcgcggggggccggtgtcccccccgcccccacggcaccgggagccgctcgctcatccatcccgcagaccgggcggtgagatgactccgagccccgcgcacggcggccgcgagcaaacgctccgacgtctgtggtgacgtctcgtattgatttagggacacggggcggctgtggctgtggcccacggctcgtggggagcccgagtctgtgcgcagggaacgccgctgcgtggcctctctcgggcctgtgccgcggaggaaggcggcgcccggggttcggggccggggtctcacgtccgccccctcgcccccctccagcgtccgttttcgttttgtgcaggtcgaggcggggacttggcgccgtcggccgctcctggatggcggcttggaaaagccacctgcggccaaactccggggcagtggtgcggccgccgggtgtgtgcgcgctcggggctgccccggcggcttccggctccactgaggtgcagccccgcgttcacggggggttcgcttcccccgtcgactccgcactcgattcgactgggattgggattcgattgggcgcggccgccccaccggtgatcggcccccgcggagcctggcccgggaacccccagcgcccgtccggccccgagacccgccccggcctgtcctgcgccccgctccctcggaggagacacgaggaagggccctcccgggtcgggttcgggcccctcccagcaccccaaggcgacggcgcccgc

SEQ ID NO: 31823 - DNA, 1300 bp, Homo sapiens
  chr10:134601242-134602542
  binary
cgggctctgagctgagacgcgggaactgcggggccggggggggcgggcagggggagttgggggcgggggctgctgtcgccctgggatcccccactctgcgcggccgggcagaccctgggcgggccgggaggggtgcgggtcgcccgaactgaggcccaggaggcgcgcgcgggcggaacggcgggaggaagccgcgctcgggacaggctctggctcttctcacagcctggaggggcggggcagggggcgtcgctagcgctgttttatggctgaggaaacatggacctggaggcgctgcgctgcggcccgataaaccctgggtctgtctgcgccccccggtcctccctgggctgccgagggaacgcgtggggtcgcgggtggggctggcgtgtcactggctgcggagcgcgcggctctccagggctcaggggcgcgggatgaggggccagggtgagttgggggcgcagaggagccgggtaagggggggtccctctcccacgttcttgtaagccgtggaagtcttggcgcgctccgcaggtgccgcgtcctacccggctccccggcctgcgccccacgcgctttcccgccctcctcctcgcggagctgcgcgtgggtccggtggcttcacctcctacgcttcccggcgcccactccgggccccgtcccctctccggcccccgcccgcaccttttctcctgcgtcccccggtgccgccctctcggaaaccaccgaggcaactccccctcctcccgggaaggtccgagcgcctccgaccgcgatgtctttgcctgggctccgccgcccggcggccccgctgcctggagaggtccgcgatgccacctcctggcccgcgagcagatgtcccgcgaggaaggctgccggcatcggcgccgacgctccgcgctggaaaaccgagagcgcggggtttggcagaggccattcaagtttgttttactcgttcagcctgtatttgtggggctcctaccgcgcccgggctgtccggggggtgcaccgtgaacgcagcgggctccggcccgggcgcgggcgggtcagagcagcaaacgcgctcccccggcacccccgcggcgtctgcaggggagcgggcgacggggaggacggcgggggtgtcggcccggaaggagagccggcctaggccccggtgtccccgcgctgggggctgaggggcgacgggggaactccacagagggaaggagcctgcgttcgccttcggccgcccaggccatagagttcacaaactctgatttatcactgaggtgacttgtcccgcgcagccctaggc

SEQ ID NO: 31824 - DNA, 1198 bp, Homo sapiens
  chr10:134901198-134902396
  hyper
cgtgcagtccgcccggcggcgttttcgggcgagggtctggtgctggggagcgagcgcggagcgaggtgtctctttaaatacgctctgcagtgtgacggcggccgcccggctggaagagccatccccaccctgcggcaggagcccgcccgccgccatcgcccgccccggtccccatggttacgcgcctgcctccggccccgggtccccgctgtcgccgcgggaggtgcgcgcagaggcggcggcgctgctggccgggctgggccgctcgtgcgcggggctgtgactcaccggccggcgccgcagccccgcaatctgttgataactcggtcccagctcggccgctgccctcgcgaatggagagcgggtccccggcggggggagcgcagcgcgtctgtctccgggagcgcggcccggccgccccggcagccgcttcggccacagcaggtgggaaggacgcgcgggtctgggcggcgggagggacgcgcggggccgcggctcggcagaaaagctcgcgccccgaggtgacactggccgcgaggaaagcagctccgagtaactttcggctccgctggggcgggaggcgccacggataatccagggcccccgccccgcgcgcccggcccggagctcgagccacatccaggcagagcaggcgccgcggccgggctggggcgggcgggtcactcggtgccggttcccggtgcaaaccccccggcgcgcctctggctttgtgcagcccgagatggttgagtttggctccggagccgggagtggggcgcagattgatttttaaatatggagaaggagacgcatctgccgctggcgcgttcggtccgagccccccaccggtccccaccggcaccgcctccgccagccccaggcgcagcccccaggccgcccgcggaggggagggagcgacaggggccgcggctgctccctggcggggtcggggctgcgagctgccctccgcggggaccctccgcccgccccgctgaccgccgctgtcttcacagatgggagcagctcccggactgcgcccgccccgccgcggtcaccctgaggccaggggcccgggagcgcgacctcctggccgccgtctgggactttgaccttccagaggccatggaggctggcggggagcagggcgccacctgatcgcctccccctggacgcctcctccagcggcgctcacgcttcc

SEQ ID NO: 31825 - DNA, 741 bp, Homo sapiens
  chr10:134973438-134974179
  hyper
cggcccagcgaccgccccgccccccaccccgggccccgccccccaccccgggccccgcccggccctgcccaacgccgctgcagaggccaccccgggactgcggcagccccgcccggcagcagcgggggtgggacgggggcggcgggagccggcgagggggtctgcccgtccgagctttcctgggcgccggctccgcccctcgacccttggggcccaggtggggcgcagaccccgtggctccccgcggaggccacacgcctggctccgcccccggtgcctcccccaggaaggagcgacgttccctaggcgccgggtccggacagcgccgcgcagcccccgcgcaccccgcgccccccgcgccccccgggcccgccccgtatccctgaccgcgtcccctggagacactgcggcagcggcgggcgggcgggggcgggcgagggccgggcgcgtctccatggagccagggcgcgcgtagccgagcccagcccagcccagccggaggccccgggggcggtgcgcggcgcggccgcaggatgcaggccatggacccggccgcggcggatctttacgaggaggacggcaaagacctggacttctacgacttcgagccgctgcccaccctccccgaggacgaggtgagcccccggccccactggggggccccttccgccgccgaggggtccgcggagagcgcccggggggaggacccgggaggggctgtgagctcccgcctccccaggc

SEQ ID NO: 31826 - DNA, 1686 bp, Homo sapiens
  chr10:135043103-135044789
  binary
cggcgccgtgcggcaaggaggaagagcatttaataggaagagaatttcctcctcccagggatgctggctgcagacgcgctgcagatggaagaagttcagattttaaaagctacttctgcgagcgcgtgaattccgacacccattcccgcggctggcgtggcttctcctcggacccatcccctggcctggcgactccccctgggacccgggtcggtcctccggacccctcgcgtgcaggtgctgagcccgggcgggggcggcgggggcgggggcagcactgggggccggacaagggggcgccagcgccttccggagcgggaggggctccgcacacacctcgacgggggcgggggtaggctcggcacaggctaaaaacgagcggagccgccggggcttaggcatcgcggcacctccgttgaacgggtctaagaacagaactcctgaggaccctccgtttccaaccgaagccagtctttgctctgcgtcttcccggccgcagcgccaggaccgaccccttaggacccggcgggcggggcggggcgcgcggggcggggcggggatggtgggagggtcgcgtagacccggctgggacggagggacggcggcgcgggatgctcagaacgcgtgtgggcggcccgggcggcgtctggccctctccccatcctcgcgcgccgcgccccagccccgggatgctgctccggccccgcaggccgcccccgctcgcgccccccgcgccgccctcgcccgccagccccgaccccgagccgcggacacccggagacgccccggggaccccgccccggaggcccgcctcgcccagcgcgctgggggaactcgggttgccggtgtccccgggctcggcgcagcgcacgccctggagcgcccgggagacggagctgctgctggggacgctgctgcaaccggccgtgtggcgcgcgctgctcctggaccgccgccaggccctgcccacctaccgccgcgtgtcggccgcgctggcccagcagcaggtgcgccgcacccccgcgcagtgccgccgccgctacaagttccttaaagacaagtttcgcgaggcgcacggccagccgcccgggcccttcgacgagcagatccggaagctcatggggctgctgggcgacaacgggcgcaaacggcctcgccgccgctccccggggtccgggcgcccccagcgcgcccgccgcccggtccccaacgcgcacgcgccggctcccagcgaaccaggtaggcgggggactggggggccaggtggggccgaggactgcggaggaaccgggggctgccgagggctgcgggggaggggcgggcgcgccccgcgaaaatccgcccgaccgcctgctccgcgttcccagacgccaccccgctgcccaccgcccgcgaccgcgacgcggaccccacctggacgctccgcttcagcccgtccccaccgaagtctgcggacgcctcccccgcccccggctccccgccagctcccgccccgaccgccctcgccacctgcatccccgaggaccgcgcgcccgtccgcggccccgggtccccgccgccacccccggcccgcgaagaccccgactcgccgcccggccgccccgaggactgcgcgccccctccggccgcgcccccgtcgctgaacaccgccctgctgcagaccctggggcacctgggcgacatcgc

SEQ ID NO: 31827 - DNA, 961 bp, Homo sapiens
  chr10:20104635-20105596
  hyper
cgaaggggcgagctgtggttaaccctttcgtgcccagggagaccccgccagggtcggggcggggcgcgatcgccccccgcagtcgggcgcgaaggcggcccgggagccaggtgggtgtggggcgcagttggcggagctgcccagggcgtgcgagcaggctgcgaggatggcgccccggcggcgcggaggtaccgccccgcgctcccccgatagctccccggcctgtcccctctccccgcgctctggggcagccggctgcctggggcgcacggggctggagtggccctctccctccccttcgctaggctcccccggcttaatctgttggccgcgactcctcagccagccccgaggaaagtgcagccattggacaggtctgtgcgggctgccggtttcagggaggaaggtgggagaagcctggaggagcgaaggggagggcggagggaggagggaggagggtgcggcggcagatctggcaaattgcgagctgccttccctcctcaaagtgtggagaaggagcgcgggggagcgtggcgacggcagcgcctcctccgccaccaaactcctggggctccgcgggggcttggggccacctcctcctgagcccggaggaaccctctcccgataggttccagcgtgactccctcccactccacccttttcctttcttcttcctcttttttttttttttttttaaacacatttttttcctggcttcggacctcagactgctgcagccctaaccttcccagggctcagctctttggagctgcccattcctccggctgcgagaaaggacgcgcgccctgcgtcgggcgaagaaaagaagcaaaacttgtcgggagggtttcgtcatcaacctccttcccgcaaacctaaacctcctgccggggccatccctagacagaggaaagttcctgcagagccgaccagccctagtggatctggggcaggcagcggc

SEQ ID NO: 31828 - DNA, 790 bp, Homo sapiens
  chr10:20106155-20106945
  hyper
cgcagctgaagacctctctggcactctcgtgctccctaccctctccccccaacatcacctatctgcccttgggaaacttattgcagttgcttttcggctaaacttaggcttcccaaatggggaaagagggttatcaagagaaggacgccggggactaggggttttcttgaggctttcgggcttacttcacctgggcggcagggggtggtactgtctccccaaagtagcccagggagggcttcagtgtgagagcaaagcttcttccgtggatacatctcctaggacctggcatctccaggctgtgtgctctccggctcctcctccttcctcgctgctggttaaactaagcgtgtgtggtatggggtgggtgggggacgttgtgaaagccagggattgcaggtctcccctctgcacgagaaaattccctgtggcagcaccttccttcccctggcgatccccactagctccgtctagtgacctgggccaagcgggcgctggaaggggggcggggtaaatgcggccggcgcagaggtggggagcaggtgggaaaggtggaggcgggctcgcctctggagacctacccctgctcccattgtcctccgcctgccagcttcacagacaggcctgaacgcgcagagagttccttggagtgccctgattttgtccccgagagggcccccaacctccgcatcctcttagtggctgtcctggcaggtgcgcgtcctgcggggagttgcgccccgggggctatcgccgagcgggagctgcctcctggaaccctgcccaccgc

SEQ ID NO: 31829 - DNA, 993 bp, Homo sapiens
  chr10:21462298-21463291
  hyper
cgcgggcggatctgtggggcggggggcgggggtattgtggaacacgagtggaggtggagggggcgcggctcgccgaagtgcccccctgggtgcccagcctggtccctccggggtccggggctgcgcaccgccgtgcgccctccgcagaggctctgccgatgtcgcaccgccccgcaccgcgacaaaagcccttcccggttccaacatcacaatcgccaagcgtggtctctgacactcccgctggcgtcttcgttcgcgcgccctccccccgtgccaaggcacacgcacacgcaccgacccactcattgctttccatcccaggtgccaaaacttctcgaagcaggtgcagcccctcgcccggcaggtccaggctggcccggcgccccctcgctcaccttatccaggcagttgactttctcggtgggatacacgacttttccgcaacgggcgcactgggggttcatgatcgcggttcccgggggcggcggcggcggcggctgctggctcccaggagccgctgtgacatcccccggcgagccccgcaccgcctcctggcaggcgggagggctgcgggcggcgggcgccgggtagggagtcggcgccgggccacgggtgagtgcacggggagggcgacggggcctggcgcctggggccggccgcgctctcgggctcgcaggcgctgggtctcggctccggctccggctccgcgccgctggctctgcgtcgctcgcactccaggtacgggtgactcacacagtcactcgcgcccgcccctcgcgctcactcgctcccccgcctcgccgccgccgccgcgcaggccaaacccaccggcgcgcccggaccgaagtggcagggaacgtgcacgtcgggcaccctgggagggagggcgcagcgggggagggggcgggcagagacccggaaagctccgcagaccgccgtgggtgcgactgtgcggcctggggagtgagcctcgcgccaccgccgctgcaggcc

SEQ ID NO: 31830 - DNA, 969 bp, Homo sapiens
  chr10:23480189-23481158
  hyper
cgagaaagaaaaaaacaagtcattcagggatggtccctgtggccagtcggaaaggtgagagactcgggctttgaaaacgattcacattctgccctttaacttcaatgccttccctccggactgcgccggagcagacgattcaatggactccttttgtatccagtttattgctcagaatccctagggtctagatttgctctcagaagaaacgcgccccgctgagctgctctgggggctgcccctcccgtctccccattcctttctccgggccggggagggcaggggaggcagccactgagccgatgtcgctggggacccgcaccaggcaccacagccaggctccagagcggagtcccataggtgcgctcccagcccccgtgttgcgtctggaacgcagtgggagtgggcccggatcaccttccaatgacacccgcatatactctgcaaactgtgcaaaagcccttgaaaagtccagagatgggacagaagcccccagcagaacccaggccggagccccgcgcacctcggataagggggtggcggaatgcacccacctggtccctgagggcagcacccttagattgcccaggctgccgcggaggaggacgatcgccgcgcgggctccgctctcgccgtctgggccaccggcgcgcacccctaggaacttctctggccgcgtgtagacgcggcgcgcggctgccccagtcccagggcggaaggagccggcgctgctcagcgcgcgcgggtacgcagcgggcaccgcgggacgcaggtgcccctggagccgcacgcggggcaggtacagaatccagtatgcagaggcagaggagagggaagagagcggtgcgaggagccccgggccgcgcgaccccgccttttcctcgccccaggagctcccaaagggagcaaaacgccccccacccccgcccaccgccgcgcctccgggccccctcgccgccggcacaccgc

SEQ ID NO: 31831 - DNA, 1000 bp, Homo sapiens
  chr10:23481173-23482173
  hyper
cgcgatgggtccctggcacgcgcctatggatgttgttataagaatcctcgcgtgccggccctcagctccaggaagtccgccacagccctccccagcgcagcgcgagcgcgggccagagcgcagcggccgcgggcactccagggaggcccgggggcgggcagcccggcggccgcctagctgcccccagccagggccccgggagggaggggctcggacgggccttagaaactcaccaagaactaacacgcgcagcccggcagtcccgctgcccactgcggcggcgagcatggacgcggtgttgctggagcacttccccgggggcctagacgcctttccttcttcgtacttcgacgaggacgacttcttcaccgaccagtcttcacgggaccccctggaggacggcgatgagctgctggcggacgagcaggccgaggtggagttccttagccaccagctccacgagtactgctaccgcgacggggcgtgcctgctgctgcagcccgcgcccccggccgccccgctagcgctcgccccgccgtcctcggggggcctcggtgagccagacgacggcggcggcggcggctactgctgcgagacgggggcgcccccaggcggcttcccctactcgcccggctcgccgccctcgtgcctggcctacccgtgcgccggggcggcagtactgtctcccggggcgcggctgcgcggcctgagcggagcggcggctgcggcggcgcggcgccggcggcgggtgcgctccgaggcggagctgcagcagctgcggcaggcggccaacgtgcgcgagcggcggcgcatgcagtccatcaacgacgccttcgaggggctgcgctcgcacatccccacgctgccctacgagaagcgcctctccaaggtggacacgctgcgcctggccatcggctacatcaacttcctcagcgagctcgtgcaggccgacctgcccttgcgcggcggtggcgcgggcggctgcggggggccgggcggc

SEQ ID NO: 31832 - DNA, 987 bp, Homo sapiens
  chr10:23488658-23489645
  hyper
cggcacctgttccaaacaacctgttgcgctgacatcgctttggagaggcgccggcgctttgctggtggaggcgggttgtgtggaggccccaagccttcaggaaatagtttagggttccgttgtggtgagaggcaccccctccccgcttcctgtggcatgtggggtgtttcacctctgcctgtgtcccaggaacccaaggcgtcctgggcacctctgcacctcgcccactctagggacttctcatgtagagctcggcagtttgggtggattagacaaagatgaggattagagacacaccgccggctaattaaatgggctcttctcctctcctcgtcccctccccgcaacccgcagccagataggactcttcggttccctacccccactcctaggccctatgtaagtgcggatggagaaagctagttacattagcccttctgtcttagaggtaccggcacctcggggcattctcgctcttaaagatgcgttttctgaattatttctagttttacaatttctcttcggtgactgcacaggatcccttctagctcttttcctgttggagtcgctggacgtctcccaaacagctagttagtcgcctatctctggagcgcaggccttcggaattggattcagggtatgagtctagctaggggatgtttctagaagttttataaaatccatttgggcaagcgttggcattcggattttaaaaatatagacgtgcactggcattgggcaactcaaaaaaaaatgtgtctcctggcgcttgtcagtgacatgctaattacaaattttaaaacaagccacttctaagcgaaggacgcctggctgcaaccccacaactcacaccggtgcatataataaaatattagggttcaacagttggcatatgtggcaatagcaaatgtgacacctcgaagcgattatctggaagtttttccgtacttttgaaaatacacttgccgcctcatttctctgatggcc

SEQ ID NO: 31833 - DNA, 1470 bp, Homo sapiens
  chr10:23982690-23984160
  binary
cgaaccttcgtttggctctctcgcagaaagtctcttctatttttggcccccaagacaatttcagagaaccagtaaagttgggtgacaacgtggatcgctttctagtgtaaggtcccggggaatggcaaaactcaaatgtagcctcactgatgagctcaaggaactctgcttggagttgtcacccctacgactgacctcagacccaggacccaagggcggggccctcttgcatctggaatccagcctcggccttgacccctttcgcttgttcggagtgctttcgcccagcttctggcggaggttcacgcagggaggggactcaggtggaaaaggctggcccctttgatctctttgcaggaacttagtagacaggggccccgggctggagatttgcttcgagtaggctagaggcgcccttggcgcaccgaagctggctgccttgctggaacctgccgcgggggtggaggttgaaaggactctgagctcttcttccccaagccgaactccctcctacaggagcgtggaaaccaactctcccacaccgtctatcccactcttcccccctaaacctctagcgcagctttttaaaggcatcctgtgcagcctccaactttggggaaagagaatgcccaactcccgctctccaactacccgtactgccttcttccttttcctgcggtcgcctccaaactctgcttccctggtatccccgccccgacctggaagcgagcgcccccggctgctcgcggcagcccctcggcgcccgtttgcagggagcgagctctggctcctcacaggatccagacgcggttcccatccgtccccagccctgcagggcacacgcgcgcgtgcacacgcacgcgcttacactccagctcacactcgcgcgtcctcactccctgcaccccaccctccgcgccgctcctccgcggggtggggggtggtgggggtgacgtcaggactgcagtccagaagagagcggctggagagggctgcgcgcttctcgccaagcaagcgggaggcgcactggggccgccgccgttcccgcgctcctccctctcctctgcacccactgtcacgctacccgcccgcgggggagcctcgagagcctccaggtgaattgaaagtcgtttccgggggaggacggagagggtgctgcagtcctggcatgccctgaaactgcaagtcgggcagaaacgacccggcggaggagcagggcgcgcagcgccctgcgcagcatccccgggctgccagaagaggccaccactcggctggcagccgcgagcggcggccgaacctcggccccagactcgggcccccggcacgctcgcccgggagataccccttccccctcttgcgcatttcgcagctgcgctggtgtggggcatgagagcgaggtggctccaggtctccgcggagcagctgccagtgggagagcgaggagaggcgagggggcggcagcctcggccc

SEQ ID NO: 31834 - DNA, 982 bp, Homo sapiens
  chr10:25463760-25464742
  binary
cggccttcgctactccggacagacgaacgtcttaaaggacgtcttcgctcctcgggagtcgcggctgcgctcgcggtgcgggtctgggcgcgcgccccgcgcctccgggcgaagcggtcgaggaggagccagtgccgggaggcgggaacgacctgcggcgggtgagactatggagcagcgtcttcggcggccgcggcggcagcagcagcagcagcttctgaacgcgcctcaatgagagcggcggtggcggcagccgggccgagagacggactcgggctgactccagccgctgggagcgcgaggccatgtaacccgctcggctccaggctgcgaggtgcgtaatccccagccggcccctcgcgcagcgggcacggccagcgctgccacaggtgacttgatttctgcgacggtagcttagccacccggggccaatctcgaaacattcttattttcaagtcctttggactgggtgccatctggagaagggggaagactcctcgaaaaagtctgactgttgagaaactgacgatccaaatttaaaaagtgattcccccccctcccgttccctcctcttctctctgggaggcagatgggagccatggcttaccccttactcctctgcctcctgcttgctcagctgggattgggagctgttggcgccagccgcgacccccaaggacggccggattcccctcgagagaggaccccgaaggggaagccgcacgcccagcagccgggtcgagcctctgcctcggactcctcggctccctggagccgctccaccgatggcaccatcttggcgcagaaactcgccgaggaggtgcccatggacgtggcctcttacctctacaccggggactcccaccagctgaagcgagccaactgctccggccgctacgagttggcgggcctgccggggaagtggccagccctggccagcgcgcacccctccttgcaccgggcgctggacacactgacacac

SEQ ID NO: 31835 - DNA, 905 bp, Homo sapiens
  chr10:25464759-25465664
  hyper
cgtgatgctgcagagcaataagtcgcgggagcagaacttgcaggacgacctggattggtaccaggcgctggtgtggagccttctggagggcgagcccagcatctcccgggcggccatcaccttcagcaccgattcgctgtccgcaccggccccacaggtcttcctccaggccacgcgcgaggagagccgcatcctgctccaagacctgtcctcctccgcaccccacctggccaacgccactctggagaccgagtggttccacggcctccggcgcaagtggaggccccacttacaccgccgcggccccaatcaggggccccggggcctgggccacagctggcggcgcaaggacgggctcggcggggacaagagccacttcaagtggtctccgccttatctggagtgcgagaacgggagttacaagcccgggtggctggttactctttcctctgccatctacgggttgcagcctaacctggtcccggaattcaggtagggagggccggggggcaggggggaaggcaaaagcgaagctttccttccggtcttgtgggtgggtgcacgtgtgaggaaggaacccttggctgtgacgcgaacgcttctcaccctcagagtagagacccgggctgagggacaccccacgcgggcgcgggtgcttgggggcaagaagcgccccacgcccgtcagcttccggcgctcggcgaaagccattcattctctcggaccagtttccccgcactgggcgagggacaggcagcccttggcaggacggagacacccccgctgctctgtgcttccctccaattgtccggagagcagggaggggcgttccccaccggggggcgatgcgacaacttggcgagcgccgggtgtgtccgcggagtggcaagcctcagatgagaggc

SEQ ID NO: 31836 - DNA, 995 bp, Homo sapiens
  chr10:26505033-26506028
  binary
cgcagtgacctcagcacctgcttggaggaaaacggcgcgggaaccccgcttccttcccctcagctggagccagacctcaaacaaaaccccaatcgatgcacacagaaaactcctctgggccacgcttcccgcctcgccgaggtctccccagtctgcccctcgctgacgctggcgcgcagcggctgtggcagcacccgggacagcggccgcccgcacttcccgcctctggctcgcccgaggacgcgctggcacgcctcccaccccctcactctgactccagctggcgtgcatggtctgcctcgcatcctcacgactcagctccctccctctctcgtgtttttttcctccgccgccccctcattcatccccactgggctccctttccctcaaatgctctggggctctccgcgctttcctgagtccgggctccgaggacccttaggtagtcccggtctcttttaaagctccccggcttccaaagggttgccacgtccctaaaccctgtctccagctcgcatacacacacgcacagacacgcacgttttctgttcctgcgtgacacccgccctcgccgctcggccccgccggtccccgcgcggtgccctcctcccgccacacgggcacgcacgcgcgcgcagggccaagcccgaggcagctcgcccgcagctcgcactcgcaggcgacctgctccagtctccaaagccgatggcatctccgggctctggcttttggtctttcgggtcggaagatggctctggggattccgagaatcccggcacaggtaggaaggagaacgggggcctgcggcgggcgagttttgcggtggtctggggtttgcggaactacggagaagacgaaggaggtttttccacctgcaacaggaaacttcttcgggcgcttctccctgcttttgggctaagtccttgacggcccaagagctcaagacctctacagcctcttgtaccctgggaagacgcccaaatagtctcaggccc

SEQ ID NO: 31837 - DNA, 924 bp, Homo sapiens
  chr10:28030467-28031391
  hyper
cgacgcgtttgcccgcccggacgctccacgccccggccaagcccgggccccgcatccaaactgcgcattcctgccttgcgcccctgctttgcgcgcgcccagagtgtttgggagaggcaggaagtgggagccacacagtttctggatggggagatcatttcgataggtttatcttgaatagggggataccttgaacccaataccccaaggttagaggtttagaagacgaaggtcaagtgatttgaagaatactgctattccagtcgcgtatctgggcagcggggctaactgctacccttccctcacccgctggcgccgcaccctcgagtggccctggcctggcaggcctggcagggtatgcggctggctctcgaaacttccctcggggatctcttgtctgctcccagaggctttccgtcgcttgtggtcaggggaaaggtcgccgactggacatagggaataaagcaaaggagcattgccgccccggctctctttaagctatttcctttgatcttttaggaaaagggggaaactttctaaaggagttggtggtttgtggaggaaagctgcagaacccaaaaacaccgtcgggccgtttcccgactaagggagggttaaaagtacggcaagctctgtcccatcatgtaaggtaaaaagacctcaggaaaagcacattcaaagggggaggaggcagaggcagccaggagcctggagcgtggcctggggcgctgcgctccctcacgggtccgggaggtgtcgcgcgcggccgccagcgagcccagccgctccccgaggcttgcgcgcctgcgccggagcctcctgggtttctgcctctttaaacactttgaaatgcaattccacccgaaacgactggtagtaacattttgacgaaaccgaatctctgttttactaagcagcgacgcc

SEQ ID NO: 31838 - DNA, 2472 bp, Homo sapiens
  chr10:28031900-28034372
  binary
cgaggggcagctcctggcgcccttagtctccaccaagctctttggagctgccccgacgaattgatccctcatgttttaagataggagccccttaacatgagaatgcgcgagccctggaggggcagacctgcactcccagggaactccgggccctttcccgtccacccgcccgcgttgccacgggaccccgtcacagctcaccacccccacccctccgggccgcaggcgggcagggcccccaggggagtgcgcatacccggtcctccggtgtctcaggccgaggttgtccttgaggggcgggccgtcgggaatgcccacctcggggcgggcgtgaggactgtccaggacaccgctgtagggccggccaccccgctcccgctccgaggcgcctccgtcctcaaacagcaccgcaccgctgagcttgttgaagacgatggtgttcatggtgtcggttggtagggacgcgcggcgcggccgcagagcctcggggctgggccgccgggagctccgcagcggggctcggcttctaggagaggaaggtgcatctcgttacttactggctgagagtgctcagacccctgcaggttcagggccttgaacttggccgggtcgccgggctgcggagccgaggggaggagcggcgccgccgcaactggcagggaccctgcggctctccccagttggctacacgcccccgcccctgcaggttccccggacaggtacctgccctcttccttgcctgggcgatcgatccccccaatcccttcactccccagaactacaaccgggaatcattcacccgcagaggcaaaggaaacgaattcccaaacgagcctctgggtttcagtttgaatctgggagaggcatactccggactgcggagcgcgaccggcgtgaggccgcgcgtggttcttcaatcacagcagaagactaaagcctctaggaaccccaactcggggcgtcaggaggggttggatggaagggaagatttggggtaatgtgccaaccgtatccacaagaccccccagctcatgagtcccaggccataccgggatttgggggattttcgtgttttctagatcgtggatggtttggttgaaacccccgcatcttctgtccgccaaggtcccccggggtgaggttgggttcaaggacaggaaaaagttaagtggcgtcaggacgaaagcaccacttctcccccttctctcccagaatcttcctatcatcccccaacgcgccccgggaagtgcatggtcctaaggtccaaggcgccaggacccaggtccccagagccctcaatcagtgccattctcttccgcagcgcgggtgtcagccgcgagctcgtagcccctcgacacccgcctctctctggggtctccggggaccctttcagaggctgtaaaggtgtcagaagcccaaggcaggaggcagcttggtcggcgcacctcccgggccactgctgccactgtcggggagagccagcagctcacctctggggtcgcggaggccctgagcctctgcctgccgcgcaccggcgtcaggagcaagtccgcgcggccgcggagccgcagagttacagccccaaggcgcgcggcggacttcgcccgccccatctcctcgcctcgcgcctcgggacagctcccgtttcctccgagcggcctcagcttcgctgccagcgccccctttgcccgtccagccgcggcatgggctgctactccactaacacacgcgcgcgcgcatacacacacacacacacacacacacacacacacaccctttgcctcgccaagcgcccacactcgccaacgcccccgccccgcccttcggccaccgcagcagaggccacgcgtgacatttaggaccacgcgtgaccaccgcgatcaaacgacggctacggtctgtgttcgtagggaagtgaagtcagacctctgctggatgtcgtgtgtcccctaggactgcgtcctcccgcgcagacaggtacgtgcctggggtgtgcacatagcctcggtgataagtgtcaaagagaattttcgtgcttgcagcccctgttctacagtcaagactcgcgttggtgttttcttttaaaatcatgcccttagggatgtgtgttcatgctgctttatttgtacaagacacccttccccggcccggccttctccgagccaccccagcgcgtcctcctagatgcgacgacgtgtttttcctagcgaagtcatcacgaggttagccacctcggacacttccccggcagccccaagcccacgcagagatcgcagacacagacacccggcgcgctgtaggtctgcaggcagcaggctcagaggcaagcgatggcaaaggtccgagcgctgtcctgtcgcaaggggtccgggggcgtgtgaaccacacttgctgaccctcccaggactcccgcgcgcggccacccgcgcctcttctcaaatcacttaccccgattcactccagactgtggcc

SEQ ID NO: 31839 - DNA, 2153 bp, Homo sapiens
  chr10:30024003-30026156
  binary
cgccttctggagctccactcggggtgccagggactgctggctgtcacccggggactaaaccactcccttcggggagcccgcacgcgcgcagaaacgtgggcagctggggtggcctggcgcaccacgcatcgggttcaaacccgcgcgggccctgcggaggcgccggtctgggaccccgggctggggcgcgggagccaccgcagctccggccacttgcggctggtgtcgggaaaggaaccgggcgatgtcgtagttctgatcactggcgcgccactccccgggccacccgcctccccgccatgctctcagcgtaacgggcagccgcgctaacttcccgaaactccgcggagagaaaccctgccccggcccgctcctccccgaggcgcgctccggggacggaagtgggtgggagccgcggccgcgccgcgcctttgttacggctcggggaccccgcgggccgagcgcagcgccccgtcgcagcggcccgggcacccgccggcctccacccccgggaggcgcccccgttcccgcttcggtccccggcagggcctcccgcagccagagcgagactgacccgcgcctcccgccccggagcagagcgcagcggcgcgtcctggcgtctgccggccccggctccgcgcgcccctcggccaccgcgcggagggactttgctcacctacccggctcttccacacctcccggtggcaggatcgccgcttcccgccgacagcggctcggcggccccgacttctcagcagcgccgcggccacgccccgcctcgttcccaccgcgcggggagcgggtccccgctcgggatgattcacttcgctccttacctggaggctcgcgcgtccccaccccttgcgacccgcgcggcggccgggagctggcgccctctgctgggccaccaggcgggagcaccctcggactgggcaaggatcgggcggagagggtggggacacagaggggggccaagcacaagcacccctgcctctctcaacgcgggcaccccttcccaaaacaggggccagtgcgcggggaccacgctgggacgactctcgggggaagcaccagagctgtccccacgccccaggacacgaactcgcgcccggagccgaccccctccacggccagcgggtccagccgcgtcctcggaggtggcccaaggaaaccgcgatgaatcggcataagcacgtcctatcttaaaacaccggaaaggcagattttactttgtttggaaactaagtttgtgtcctgtgtctcagtagctctcagggtggtggcagtcacgcccccccggtcccagggctgggaagatgcttgggctagcccccgctgcagccccggagatgcggggctttaggatcccaggggctggaggccagggccgccctatcgctctcccggccgggggtgtggctgtccaactcgctctgtcgcccgagtgaactcttccagcaggttggcctctcaggctgtcccctgaggacctgagcgaaactctggaggggaccaggaagaagggagagaggacatctccgagaccttcccgggggtgcgcccacactcacgcgcccacactcgcgtccccaccttcccccccgtctcacctccgcgcgctcctgcagagcccgactgcgcccgccctcctcgcccacctgccgggcccgggccgggggtgcacactagcgcggggccttggtggtgcggcaccgtcccctgcccaagctggctctcgaggaggtgtgggccccgggaaagtcggccagggccactgtcgccgtcgccgccggagcagagccagtggcgagctcgtcagggcggaccgggcgcctccgtccccgagagccggcgcgcgagtcccggccagcgggcaggcgcccggtattaattgtagggcccccgggtgtcggccgccaggcgctctgagtggctcggaccgcgcgccaggccggcggggccggcgccacccaccccctcggcgcgcgcccggcccagggacgcgcccacgcgcacgcgcccagcggctcagggctccctggctctcaccggctctgctgcccggaggcagccgcttaccctggagccctgagaggcccctttgagtctccagaccttccagggataaataaaatctggcgacctgtgccaac

SEQ ID NO: 31840 - DNA, 870 bp, Homo sapiens
  chr10:30347839-30348709
  hyper
cggagcgggagcggggccgcggcgggagccccccaccgtcccgggcagtccagacggccggggcagcgtgggaactgggacctcggggacccagcgcggcggctgtcagctctggggtgaggtccgcgagatctgggcgcgagggcgcgggaggggttggtggacacaggctggggagggcgacttcgagaggggagtgagtgaccccggccccccaggccctccgcgcgccgaggggcgacgcgagcgctaacgccagccgcggcccgcggtgcccgccccgggacccccgcgctccgagcggggcacctgaggggaggggacgcccctcccgggctggcaggcgccctccaccccgaggctgccgggctaggcaccgcgcggggggcccaggcggggctgcgactgggggtgcagacatcccccaccgccagggtggctggaaccggagcgacgtcccagctggagaagttggggggagtgcgggaggctgcgggtgaggcccgcgaagcgccgtgggagcggccctaatggacggtgggagccaggagggttagacgccgggacttaccgagcggctccctcatgccgcctcgcgccgccaccgccgccgctccggccggccggggaccagcgcgacccgccccgcctgcagccgccgaggccgagcatgcccggagaaccgccgtccgccccgcccaccgcccgggcccgccccgcccaccgcccggggctgcctcctctgcgctgagggcggtatccaggccacgagcttcctaggcttttggggtccgcctgcgtgggtcgcgcagaaggcacaagtgagctgaccaccattccctcttttcttgtcacttgggtttgggccac

SEQ ID NO: 31841 - DNA, 777 bp, Homo sapiens
  chr10:33623029-33623806
  hyper
cgtcaggagggagcccaaagacctgaaatcctcctgctctaaaccgcctgatctcatttcttcttctctcctcccagataaaagtttccttcgcccgggagtcggttgttcccggctgatcccgggaagccccgcctgagccccggtccggggcgggcagctgggagccggggcgccgctgtcacccgcgcctctgcctgtcacttaccgttgcgaaaagcgccggccggggcgaggacgagggcgagcacggcgcagaggagcggcagccccctctccattctcccttctccgggtccgcaggcagacgcgggagaacgaggacgtggggggaaatgcagcaaagaggagaatctaagcgatccgaagagccccaactccgcctagagctgtacaatcctcagcccgtcttggagaaaagaaagcagcgaggcaatgcctggatccgagaggaacgcttctctttttgtgtctcaagtcgcctgcatcctgtcatttagctccggcttcctctcccttttcccacacttgttcctcttccaggagccactgcccgggccatgtctcaaaaaaaaaaaaaaaaaaaaaaaaggccgggggggggctgtgggtgggagggggaggagggaggtagggcaacacacaccaaagccaatttccaggaagaaaaaaaaaaaatccggcttgtttctggacccgttggagccgcggagctggcgcccaggggaggtccgggtgtctgcgggaaggaggggaacgagcaatgaaaagatgagc

SEQ ID NO: 31842 - DNA, 1472 bp, Homo sapiens
  chr10:33623838-33625310
  hyper
cgcctcccctcctgcggcctccccccactccggagcccttccctcgcttcctcccgcccctctccccgcttgggctcgcctgtaattgcctgacaggagactgggaggaacaactttccctccgagtgctctccccgtccgtctgtctgtctttcccagagaccctgcagggatctccgcgggaaggaaggcgctgggagtctgcgccccggtcgcgtgggtgcgggcgtcggaggaaggggcgcggaggtcagtgccagccgcagggtctggccagcccacctcgcgtgctcgctctgcacccctagagggagagctgggcagctcctgcaggcgcagatcccgccgccgcgcagtgcggagcgcccgggaggtggcggctgcttctcgcaacttcaaatcccggggcccgcgccctcggcggcgaggaacgcagggtcaccccctgccactcctcatcgcgccatcctgagacctgtggcggggagcagcggggcacccctggacgcccctgcccagagctggagggcgaggaggggaaagccgggctggagtgggagccgcaccgcgaagccgggcgaggggcagcagtgtcgctgtggtgtgaagcgaagacagaccgcctgggcgggcgaggccgggctgcagccccacgcggcctccctggcccgcatcagggcgcgcggctgggtgccctctgcgcgccgcggaggcttcattgtttcccgagatttggtgcccgttcctctggggcagagggaacaccggagggtgggaggtgctgcgccttccaagcaggggggcaatcgccgcccgaccccgcccaaccttgtctgggagcccaggtgctagggaggggtgtggaaatcaggggtcgggcggcccccgtttctctgtgcatcccgagggagggaaagagtggcgggggaggggtgctcttcgctgcgccctctcagtgtccgctcccggccacagacaacgtgcacgccggccctggagctcctgccacccccacttcccacagcggctcgtgcccccagcccgctggatgccccccaggcccgtccccgagggttttccgagaagtgctgcaggaagcgtttgtagatgcgaaaagcaaggacatttctgggaagaaacaggttgcggtcaccgatcaggccccggagaagggtcagtgcccacggggcacctcccagggagtttgtgggtaaggtgaaaaggtcacacgcctcctggggattggcgtctacacacacagccaaagtacagcctgattcctacctggcacaaatagctggccaaagggaggtaggaatgctggcaaggagactctggtcaaaggttttggcggaagaaaaaggggcgggcagggagaaagcccaaggcgcgcgggccccaggccaggactgcgcgctcgcgactcgggctgggagcagtgacgtgcgcccctcggggtgcaggccgttccc

SEQ ID NO: 31843 - DNA, 794 bp, Homo sapiens
  chr10:33625332-33626126
  hyper
cggagcccgcactcgccactctcttgccccgggtcaagcctgtcttctcctccccacgcgcctcgggattcccagtcgccaagttggaaactcggcccccccgagcgcctctttcctctgccagtttcctccttcttctcagctgtcggacccctgggaggcgcggggtgggaagtgggcaccgaagggctgggagttaaatgcctaagttgagcggaaggagcactgtcgaagccatgggcagccctgcgcccgggcaggcgggcaggcgggaggcgaggcgggggcgccgaccgcgcccagcgcagaccccgggggagtgagcgccgcagaggcagcctgggctctcggctactacccgcgcgcggtcgccgcctccccaggtgcagccccgccagtcccagcccccggctgcgccgggcgagcggcatcatcagatttagggtgacccggagcgacctcggtccaggctcggagggagaggcgcctctcaggacctggcaggttgacagggaaggggaaccgggagggagcggcggccggggcggcctggagtctcggaggcccgcctgcgtcctggggggacccgacctccgcgctcgctccggagcgcccgtttggatagctctgagcctcggcggggtgagcgagggggcacacgagggagacttgagctgtgttgtttttagaaaactgccgccaatctctcttcccctttccctgctgagtgtgcattttccagcctagacccgccaggccagcaaataaagccaccggatcgtgcactccggagc

SEQ ID NO: 31844 - DNA, 1781 bp, Homo sapiens
  chr10:35102985-35104766
  binary
cggccccgcagcccagccacatggaaccagcccgggataggtaggagctgaggtcctcgcaggaaaacttttcattccgcgactcttccaaggttgtgctttccagagcccagcaagtgggatcagctcagtaaatgctcgcaagcgagtgccaagtgccagcggtggccctcccgggaacgcctccccgaccccaagccggcgactccccaaaccctgcagcccccggacgcgacgggccgcccctgccggcccctaccagcaggggacatggaggaaaagccccccgccgctgttccgcccccgcccgagtaagggagaggaggcagaaggctcgcaacccgcctctgtcggaagggcagtcacgaaactctcctcacaccaaaagttcccagtccccggcctgtgcccccggggcctgggagccgggaaaggcctggggctggatttcccggcctgcgccccccgcgcgctggctcggggcttggctgggtctgcagactccggggaggcgcccagggccggcctatgcgccgctgcccggctcgccccgcgctaccgaggccggagctcccgggcggagggtgagggcgggggccgcgggacccggctgggtgtcccagaggctgcgccccggcccgcgcagagaactttggcgcccgcagtccggggcggggggcgcccgcgaggcccgaccggccgcactttccctttccccgcctccctgcgcctctcctcccccttccaggaagcgccatattgatcccggcgccgtccccgccgccgccccctccccgcccgcgcccccggcccctcaccttggcgatggccttccggtagcgggtcaccgcctgctggatgaggctgaaaactttcatgtggccgtccccgcacggcacgaccacccgggtccgtccgaagcacacggtcactttcatgccgccgccgccgcgggcgggcccgcgcccctcgccgagcgcagccggagcagccgaggccgggaccgaggacgctgggcgcggaggagccgctggggactcgggcgcgcgggcggctaggggcgcgggcaggcggcggcgacgccggggggccgctcagctcgcatgcccggcccggccgccctcgcctcgcctcgcttcgcccggggcttgcctcgcctctccccgccgcggcgcccgcagcctccggccacctgttcggcgtcgcggcgcgctcgccggcggctgcccggggctgtgtggcgctggcgctcgctcggggccgctgggggaggggacggcgggaggggaggggaggggaggggaggggagggggaggagcagggcagggcacacaacaccgcgcacatgcggcagggggaggcgcggccggctacccgcgcggggcggagcgcaggaccgcagctcgcgcccccgccaccgccctcgggggccgacctccttccctccttccctccctccctccctccctccgggggcgcgggacccctcgccccagtgccagcacgggcaggcggccgtctgcccccaccagccctggcccaggcgccccccagcccccttcaccccgcccgcccagcaccctgcagggctgcgtcgcccctcctcggggacgccccttccacgcctccagaagtctccacggagccccccttcccctttctttgtcacttttaatcccattcctcgaactggagggttttgggtgcaggcgctcccggggaaagcagtttgtgctcagtgcggtgagtcccctcctcaccgccccggaggctccagccc

SEQ ID NO: 31845 - DNA, 1314 bp, Homo sapiens
  chr10:35929085-35930399
  binary
cgccaggaaccatgtgagcgacaagatcacccaccagatggagctggccatgccgaagaagtagaccagcaagaagaccacggtgcacagcgcggggccggtggtctcgtagcgcacgtgctgctccaccgcgcccagctcctcgtactcgccgcgcccgcccgggccgcccgcgcccgcgcccgccgcgcccgcgcccgccgccgcgccgcccgcgcccccagcgccccccgcgcccggcgcgccaccgctgcacgccaccttctcgtggcccgccaccaggcgcactaggtagcccaccgacacgaagaggtagcaggccgagaggaagataatgggccgctccgggtacttgaagcgctccatgtcgataaggaaggtggagacggtggcgaaggtggacacgaagcagagcaccgaccacaggccgatccagaagacggtgaaggcgcgctcgtcctggctgaaaaaggggttgtggcagggcagcgcgcagttagcgatctggcctgtcttgacgcggttgtagagcgggtggcgctcgctggacacgctcaccataggcgcgcggcactggcacccgggctcgcagggagccgcgccgccgccagggggccgcgccttcccgccaccgccgccgccgcgagctgggggcgccgccgcgtccccgccgccaccgcccctgccgccgccgcggtgcgggggcctggcccccggcgggcggccgtggccgctgcccgaaggcggctgctcgccgggcggcggcggcggcaggcggcgcggcgggctgggcgcggcggtggttaggtcggtgcggttgtagtccatgcacagcgtgtcagggttgccttgctcgggcagccggtcgcagcgcatgcggtcgggccaggcgaagccgtactggcgcatgagcggcgcgcagccggccttggcgcgctcgcacaccgagcggcagggcggcagcggcttcttgtagtcctctaggcagatgggcgtgtacatgctgcacaggaagaacttgagatcgggcgagcactggatctccaccagcggccagaactggtgcacctccaggcccgcctcgtcttgcgtgtcgtggttgaactgattgggcatgtaggtgtagttgtagccgatgcccttacacagcggcacggtgatctcttggcatgccagctccttggccgaggcggccgcagcgccgctagagcgctgcagcagcgccaaggcggccagcagcgaggtcacttccaacaggtaaccccactccatgctgtgcgcctcggcccggtgccctcgccctccaggcggcgc

SEQ ID NO: 31846 - DNA, 929 bp, Homo sapiens
  chr10:43248552-43249481
  hyper
cgaggccgcaggtcaccgcgcgggccccgtgcctactggcccggcagtcctgcgggtcagctcaggggagtgctctggagagccctgagcccacctcctgcgccccgcccaacctcgggtccccaggcccagcctctgacacgccgctcccagcgcggccacgccacagctccgggctgcgctcccccaggcaaaggcgccgccggcgcgtccagcgcggcctcctcctccaggcggcgcttgtgagtcaatggaaaagtccttggcgaactgagcagccgcctagtatatctctgaagcctcctgcggagacttcacggcttgtcccaggagcttctacaacagcctggcattgagagtagagttgtaatattttccgccagtttttcccagcccggccccgaagcgtctgatcttaaagtccacgtatcagactccggggggcgtccctgcaagagcgccaggtccccgacacccaccagggaatgaatctgcgcccaggtccccgacacccgccagggaatgaatctccgtcccaggagaagggcgtggcgaggggagaagcaacaaccacaggacccgtgacagtggccaagccttagaggccccgcatgcctgccaggcgcccgagcccacgcagtccaggtttccccatccgggcgggaaccagctgtttcccctgcacgggcgagggcgctggggtcacctccgccgacgccaggcgtgagctccagaacccgctcccaaccgcccggtcccgtgagcgcggggagcctggctctcgcctgacaataaagaaatcatcacggacagaaggaaagaggagcgaggctgggaagggagcggctttaatccggggtccgcccccttcaattctccagcgcagcggccccgaaagtggggtggggacggggattgaggctgagctc

SEQ ID NO: 31847 - DNA, 1348 bp, Homo sapiens
  chr10:43571939-43573287
  binary
cgcctcctgcctccggccccagcagaggccgcgctcccactgcgcctctcgcctctgagaaatggcgcagcaagcgctccgcggagagcctggaggcggggcgcccttctctgagtccgcggggtcgcaccccgagccagtcggccagacctgcatcccgcgtagcatccctgccctctctgtgcagcggaaagggcaaaaggcagggactgcaagcgggcgcgcaccgggtaggaagagcggctctgcgtaggtgcgcggacccgggctcctgggttccatccccgccgcgcacctcggggtccgcacccggctcctgccgggcccttttcggccgcaccccgctcccgcaccccgctcctccccaagccccacccggcccaagccgcgcgtcccgcactgagctcctacacgcgccgcgccccggccgcaccccgcgcagccagagcaagcactggagccccgccccttcccgcaccccacccgcctccggccccgcctggcccacccctggaccgcccccgccccgccccgcccctacccgctcctccggcgcagccggcgcttacctcgcttcagtcccgcgaccgaagcagggcgcgcagcagcgctgagtgccccggaacgtgcgtcgcgcccccagtgtccgtcgcgtccgccgcgccccgggcggggatggggcggccagactgagcgccgcacccgccatccagacccgccggccctagccgcagtccctccagccgtggccccagcgcgcacgggcgatggcgaaggcgacgtccggtgccgcggggctgcgtctgctgttgctgctgctgctgccgctgctaggcaaaggtgagttctgccggccgccggctcccgcaggggccagggcgaagttggcgccgagcagcggagcgggcgcgttcagaagcgcctttctgtttgccgtgggcagcgggctgtgcggtcgccggccacccggcctcggctgggagcgcagtggctgcggcgggcggcgggcgaagggcaggacgcctcgggccgggcgcctcgggccggggctgggcgggtctcgggcgggagcggagcgcgggccgggccgcgggggtcggtgctcagaaccctagccatagccgcaggtctcaatctggccgcgccctgcgccaaagccgcgtcctggagcaaacgggacagccgtttcggggccgacctggcggacgggtcagggagccccgaaagcccgcgattcgtgcggagagttctgtttcggcaggagacggctccgtcctggtttccttttcccgctcagcgtccgtgcgttcctcccccagctctgccgtcctggccagccgagggattc

SEQ ID NO: 31848 - DNA, 133 bp, Homo sapiens; identical to SEQ ID NO: 28300
  chr10:43725410-43725543
  hyper

SEQ ID NO: 31849 - DNA, 1077 bp, Homo sapiens
  chr10:43761675-43762752
  hyper
cgttcctggggccggcaaggcctggggcaaagagagcgtggtccttcaaatgacccttgcccagcagggagagggagacacctggcatggccctggacctctcccccaaatgcagagctcaagccccaattcctcgccaaacagcaagggcgtgagataccacggcggggcccagaatgcagaagagcaaatggaaacttccaactgcgcagccctgagctcctccgattccccagcccccacccccacgccaggccccgggcagcgaacctgcccgcagtgcccacgcccgcccgccgcgtgcgctcctgccacgcccggcccggcccggcccggcccgccaggtgccctgaaggggcggagggtgcagggggtcctggcgccgtccagcccggggcggagttctcagcaactccgcgcgccgggatcccggccgccctccccgcgcgcgtcccccgccccgcgcccggagcccgcgccccggccccacgacggccgcgccgggagggaccccgggcccgcgcacgccgcgccctgcccgcgccggcgaccggagggcacggccccaggcgcgggcgggggccccgaggcactgagggtccgcggccgctgcctacctcggtccgggccagcgtcgctcccgcgccgccctcgcgccgcagtcgggccccgagcagcgcgcggccggcgccggcggcggctcatgctcggcgcccgggcccgcggcacccgcccacccgcggccgcccccgcgctgcgccagctgcgggcagagcagctccctccgcagccggcgccggggagcgcgagcgagcgagcgaacgagcgagcgcggagcgagcgccgagcgggcacggagcgggcgcgagagcgcggggagcgggggagcgggcgggcgcgggacgcggagggaggagggtgcggggcaaaggtgcagggggaggtagggcgcgggacggggctcgagcagagggcactgggacagggcgggcgccgggagagggcggccaggctttcatttaaaaaggataaggcatcacgcctgtaatcccagcactttgggaggccgagacgggc

SEQ ID NO: 31850 - DNA, 997 bp, Homo sapiens
  chr10:44185124-44186121
  hyper
cggcgaggtccactgggccagaccctggcccgaggtggccccggagctgtgagcgggaggaagagggaagggcggagtctggagccctcacgccttccgccttgtgcgcggtgcaggctgccgagagcccggccgggcaagcctttccgccgtggtcagtgactcgtttgcacaaggactttttagggaagagagaagccaggccttcgctgtgggcctagcccctcaaaccgcaagctctcccccttggggtcctcgtcgtgaacgcccttctcgtctcccgccgggctcactctttcgcattttgctgcgaaagtttactggaaataggtccattcactggtcgattcagagggacactagaaacgcgatgcccatatctaacacatcctggccttttgaagagggataaaaaataatacccactagagccccgtgcctccggagagtggggcttcgcatttgcgcgtccgaggcccggcagggagagcttctgggtcctgggggcgcgcacatccggcgcgcgctgtgtcggggagcggcgctctgggctgggccggcagagggcgctgcggggcggccgtggaacaagcaggggagagcgtcaggggacccagcacagcctgcctgctgcgccctgctgccggccgcgccctcctccgtgctgcgttctcctgctcgacgctgcgtcctcatccaacactggcaccgcgcgctccttccagggtcggaggcccacagacccctcacgttcgcttctgtcaggagtagcggcagaatttcgataatttatgtctttgatggagactgggaaggtagcctggccgctgcgcaggagagctgcgcggggtccaggaggggagcgcggagtgggagcagtcgactcgggctgcgcagtgcgtgtcggctgtcacgggacaccggtgaggaccctgcacccagagtcgggggtccaggctgttgctggaacaggaggcagctcggtgtccacggttcc

SEQ ID NO: 31851 - DNA, 938 bp, Homo sapiens
  chr10:44879650-44880588
  hyper
cgtgtgaggctcggagggtccctgggcctctctcaggtgaacccgagaagagacaggaagacagcggctggacgcgcgcccaggtccgcgtcgctgcggaccgcggagctgtgcagaagcgcggcctggcgggtggcacaagcccgacagctgcgccgcgcagcccgcccgcgcctggccaagagccccgcgagggtgtggggagaggatcggcttcgcagggagcggaggctgcgcggctgcatcggacctcacagcctcaagtcgcggcatgaggcgaactttgcaaagcgcgctctcgccatgcaccgcccgacctccagcactgtgcgcagcaggacctcggagcccattcgcctgtggaaaccgagcccgcagcgggaaggcagtgggtggagggtgggcaggcaggggtctggggtccgcggctccccaccctcgcgccttcccgcgccagtcccgaacgctctcttggggcgttcctgcccagttgtcccggctgacctcgctctgcagccagcttgaggtcaggcggtcgctctctgcaggtcacaaaccctcggcgcaaaagtagggctttgaacgcgacaccgcaccagagcgcccagctaagcgagctgcctccacccccactgtgtcgggcggcgcaaactgcgggcgcaggcagaggagccgcggctctgcgccgggcgggagccgaagcccagagcctcgccagggcctccccgccgagcgcacttaccgtcgctgaggcagagcgcggtcagcacgaggaccagcacgaccacgaccttggcgttcatggcgcgggcgggcgggcgggcgggcggacgagcgcgggtcgggggccggacgccgagcgggcaatgcggctgacggagagtgaaagtgcggcggtgggaggcgcgcgccgggcgctttagaggggagagccaggc

SEQ ID NO: 31852 - DNA, 1493 bp, Homo sapiens
  chr10:50817510-50819003
  binary
cggcggcggggagagaagaggcggagctgggggaccagaccgctaaaggagaaagggggattccaggcaaggggaatgtggccaggcagtgcgggagggcggcagcggccaggctaatattcgcgaccccgactggggcgcggcaacttctgccctcagtccccacaagctcccggccgcgattcgcggccgagaaattctgcggaggggccggtgggtcagagccaggccaggcagttgctgagccttcccctcccctcctggcgggagtgtgtgtgcaaggggccagggggcggagtcggagaaagggttgggggtgtccgtgtccagcgctcctccggacgcggctccacaatccagctgcgagaacagatggacgcagcggcggctcacctcgggggcttcctgctcgctgtgcgccgaggtccaggctgaagcggagatcgcaagcctctggctcccgcctctcccaaggggcctcgaggaaccggctgccgcgcccccttccccaagaggagaagagcgggcgctgaccccgcgagtcctagaaccgcgggcggggggcaggcagggggcggggggcagagggccagctaccggcgcggaacgcccatcccaggggctggttcaagacttccacaccgagagcccttcctgggcctccagccctggagcatctggagagcggacccctgcccggccacgccccgcccccggcccccgccccgccgacgtcgcattagcatgagcgacgtaagtggcccgggcaccactcgggggctgggactcgccgcgtcacagccccgagtggaagggaaaaaaaaagaggaggcggcggaggaggcaagagccgacgcgaggggaggggagcgcagcggcggggctaacgggcgggcaagcgggcgggcggcaacagcatgtccctcggccagcgcgggcggcctcttagcgcggcgggggctgctctgggcgcgccccgggcgaagtgcgcccagtctccggccccggcccctcggcgcgcccgacttcccggccgcccctgagcccagcagccgcgggtcccgggatcggctaagagtagctgcaacgcctcgccggacggagtcctttcctttcccgggacgctgggccatgagctccgcggccacctgaggcacaggggagtctgctcggccaggacagcctccccgaagtcccgtgccctcgcctctgcactgcgggacgccagcgctcggccctggcggaggcgtcctcggaagagcatcggggtgggggcatggaatccgcggaacctgcgggccaggcccgggcggcggccaccaagctgtcggaggctgtgggcgcggcgctgcaggagccccggcggcagaggcgcctggtgcttgttatcgtgtgcgtggcgctgttactggacaacatgctgtacatggtcatcgtgcccatagtgcccgactacatcgcccacatgcgcgggggcggcgagggccccaccc

SEQ ID NO: 31853 - DNA, 422 bp, Homo sapiens
  chr10:62761026-62761448
  hyper
cgcgtccccatgagcctgcggatgtggggactgcgggtgggcagagagaccccccataatcccgcccaccctggcgcggctcctcccgggcgcgctcccgccccgccacgccccgcgacgcccgcgctacctggggacgctggaagctcccgcggcggctctgggtcccgccgggcggccgaggctggcgcgggctttgtaaagccgccgggacagcgccgaccccgccccgccccgccgaccccgccctctcccacctcggccgcctcccccgcctgcatcccgggccacagtccccgttccgccacctcgctcccggcccggcagccgccgccctgcggggcggggaccacgggtccctccacatcctcgcggcctgccggacagtcctgcgggcggggccccaacgcctaggcggtccc

SEQ ID NO: 31854 - DNA, 891 bp, Homo sapiens
  chr10:71332340-71333231
  binary
cgccggcggctccagcgcgtacaagctgtggtccgctatgcgcagcgtttgagtcagcgcccagatgtagttgtgggcgaagcgcagcgtctcgatcttggtgagcttcgcgtcgtctgggaaggtgggcaggacaccgcgcagggcgtccagtgccgagttgaggttgtgcattcgattgcgctcgcggtcgttggccttctttcgccgactccgtcgctgcttgctcagtgccaactcgctcttaggccggctgcgtcccccgcgccgtgcccggagcttcctcggggcccctcggcagcctccctcttccgcctctgcgcagttcccccgtgtgcgagtggggctgggcggggcggacgtggggcaggtcacttcgtcttccgaggctctggggaaggaccgctccgtctcacgggtcacttggacagtgggcgcacccgagggttgaggcgtcatcctacggcggggtcagagggaagggtaagtttgagtccgtcactgggcgcagtccgcgattccgaggctaggtgggaaaaaacaaaaacagccatcctcccagcccccgctgggtcagaggatccctctttcccctgcccgtccctcggaggcctccaaatattacctttctaccggcgcaaaagaatagagagcgatgagcagcgagggccgtggggagctcagcgggcttctggtcgccaagttcagctgagctgcaggcgcccccgcctgggagttgccccagccccaaaggagaaaagaagagagaatggggtccgaggcctctgtcacgctctctctcgaggcgcggcggtgagaccgcagggatttcctgagcagcaagtcgtgtgccccttggcacgctttatctgcttcgcccgggccaggagc

SEQ ID NO: 31855 - DNA, 387 bp, Homo sapiens
  chr10:71389862-71390249
  hyper
cgccccatctccccgacccccagcaccccgcgccgcccccaaccctgggccgggcaggtgcaattcctcaggcggcctacagagggcgatgtgcgccgccactgggccgcgcccctccggcgcgcgcttcctgtgaggtcaggtgggaggaaaccgcctggagccgccgggagtggacgccgccgaggcccggagtcgcgcctgcaggtgagtcgccgcgccggggagggagcgcatccctcgctgcagcccgggccgggacttggagccggtgtcgggctccagaggctggggctggcggccggggcagcgtccctcccgcccccggcccggaatgtcaggtgcgccgcgggccgggcgcgcgggtggcccaccgggcgggggcgc

SEQ ID NO: 31856 - DNA, 1567 bp, Homo sapiens
  chr10:71812318-71813885
  hyper
cgcgaccatagcgcgtttgtgcccagttctggggaaagcctcatgttagcgagtggccctcggctcgtctcgcagatcggccaagtacgcggaggccgcgcggtttcaccattaatactcctgaaggacaatagctcatcaagccccaccgaaagccccggacccgtcgcggagcctgggctggcgggggatgaggctgagcaactcctcctagaggtggttatgtggagaaggagcaatcccttctccctcctcctcctccccccgctactatccgcggcccagagaactgccgcttgccgccattgacacgcacagatagaacccaaagaaaggcaaagagtcctgcccggcaccggcgccgcgtgggccaaacctgcgcccgtggaggggcgcgcagagggcaccgggcgccgggagcaggcggcgcagcaccaggtgagcccgccatggcgatggcattattgtttagggtgctccggggtctggaaacaaaacgcgccgccggggcagtgcaggggccggagagaaccacctctgcctctcccccgagcccctgcgggcgcaccctcgatagccgacccaccctctgcaaaaacaaattcttaaatccagctgcccaacttgcttccttgggcgataaagggggggctgctaaagaagtggtcaaattcctgcggccagcgaggggccgggggcgtcgagggtactgagaggggaaggaggagggatgcgaggttcagcagcgggccccaggcgaggctggacccggaggaagcggaggtctcctgggaatgcggagtttcgggcgcaggagcgggaggacggaggcgcccggccgccgatgggcacggggcgatgggtggggggctgcgcagggcccgagggagcccggggagggccgctcgggggcctctgaaggtgcccgggcagggcgccggcggctccaggctgacaatggagggggcgcggagcagccgggcggaggttagggacccgagtccgggggcgggccgcgccggggaaggtcaggtcggggacgccgggtggcggggcgagggctgggggttgctgcgcggacacccgggcgccgcgggcgggcgtgcgccccggggccggcgcggaagagggcgcgaggccgggcactccccttcggttccctttccggggcgcccggtgccgacgcgcgctgcgctttcaccgggaaatggcggcccggccgtggctcgcctgggcagtctggctcccgctttgcgcgggaaaaaataataataataaaaatatcgaaaaagggaataaaagtaaactggctgcggcgcaggaaagggctctgccgggcgccggacgccgtgcgtatcgctcgcggggcgcggcggttggggaccagccctgcctcccccggctcccagcctccagccccggcgcacctcagccccagcccggccagccccccggatcgcccgtgggtgtcctcccccgcctttccttgggggggcgccctcagttcttgccctctttgttccttacaacaatggccaaaggggcattggttccccaagggccaaac

SEQ ID NO: 31857 - DNA, 898 bp, Homo sapiens
  chr10:73156639-73157537
  hyper
cgggggccgagcggggcgggggaagcaagggaaagttgatcgcggacttgagcggcggcggcggctcgggagagagggacgcgggctgcaggcgcgatgcttggctagaggacgcgtccgacggcggccggacgctgaggtggtcggggctagtcagcccggcctgggcatggagcgcggggtggcagagcctctggacgtttggggcgcgcccagtccgagcccccggcgcgcctgaagttgcgagcggcgagcggcgagcggcgagcggcccgcggagacccaggagctgccggcacgccgcggatgagccttcgcgccggcgggaagacgcggcggtggccagggccagagcaggcggcccgcgggggccgatccggcggagagcagagcccgaggcgaggcgaggcgcggcgccgctgcacacacgcacacggtacccggagccacgcaccgcctcttccctcctcgcttccctctccttcccctcgccgttcgcccgccgcgcggcggggaagttggtggtgaccgcggctgccgaaccacttgttcccagcgcggccatcgcccgtggcgggcgctcgcggcatccttcggtcccaggcccctggccctagcctcgcgccccgctccgagctccccgacgcgcggcaactttgattcctgggaactcgaattccattcgcgttggccttgggaggacaggcatcccatcccccatccccggtcctgggaccgcgaacatttgggggctttgctctcggcgctacggagagggtccaggtctggggtggagagattttcgagagtggagcgcgttgggatccaatcccctccccttctgagccctgggtccccatttggacagtggggatggggtggggcgcacccctactgc

SEQ ID NO: 31858 - DNA, 1391 bp, Homo sapiens
  chr10:734738-736129
  hyper
cgagaggaccaggacggcaaggccggagcccggcccggggggaggttgacgattccgcccagccctccccgcgcagcgcccgcgaacaatgggggtgggatcccccgggccgcgccaggaccgctgcacggcctgagccaccagagatcgaacccggggtccaacgacaagtttcgcattgaaatctggccgggcgttccaggccgaacccgccagcgaggaggtggcgcgcaccgcgctgctgcaccaaggacgccgcggctccagcgcagagcgcacgggaaggccgatcccgccgggcccgctgcatcctgcgtccccgcgcggcgcccaggccccacagacacccccagggcgcggggggatcgcggccccacaaacatcccagggcgcgggggatcgcggccccacaaacacccccagagcgcgaggggatcccaggccccacagacacccccagggcgcggggaatcgcggccccacaaacgtccccagagcgcgggggatcgcggcctcacaaacgtccctagggcgcggggtctgggggtccgggggacgcgcacgctccgggctggggtcgcacctccccctccgggcccggcccccgccccgccgcaggccccgcgcccccagccctccgcgcgcggccctccccggtgacagcgcggcccggcccggggcgggggcccggttaccttccgacagctccagctccagctcggccaggcgcgcccgcacctccaggggcagcgccatgccctccaggctgcggtccgccatgctccgcgggcgccgcgccccgcacggcctcctctttgttcgcaggcggaggtctcggcggctcctcgcgcccggcggaaccgcaccgaggaggaggcggcggcgcgggcgcgggaggcgggcggcgggcgcgcagggacctccctcccctcggcgcctcctcagcgcggccccgccacggccgcctcgcgcgcccccgcgccccacggtccccggcccgccccgcgcgcgctcggcccctccccgcaggcgctgcggacccggacccggccctgctgctctcggccccggcccggcgggagcgtctctgcgcgcgcgcgtcacggggccgcgggggcagggcgcgcgcgcgcggggcgcgaggacgcgcaggagcgggagcgcgcgggggggcgcgcggccgcgtcggcgaagcgcgcgctcccgggggcgcgctcgggggcgggttgggggctcggggcccgcggggcggggcggggcggggcggtcttgtctgtcctgggctctgcgcgtccagcggagcctgcgggcccggccccagagcctggtccacccggctccctgcgaaaatcacgtcctggagccgcagcttgacgtctgcgcgaaaactc

SEQ ID NO: 31859 - DNA, 708 bp, Homo sapiens
  chr10:7708278-7708986
  hyper
cggtaggtagtcgctaaatgggaaagtcgtgttctcccggttttcaggtgggaaaagctgaggctcccaggagtctagaactcctctcatattgcctttctccctggatcaactgggaatgatgataacagcagactgccccccacgcgtgataaggaaaaaaccttgtaattataataacttttggagctacctcagaaattaacaacgacgaacagaaatctgcgcaatcaacaggagccaagaagaaaaactcggctccgcaggacaagtcccgggcacagttctgcaggaagcctcaggccagatcaggcaccgcggctcacacagaggtgacgcacgagtgacccacagagagggacccctgggcctctggtgggggcctgggagacggtcgaagggggcccgggcagaagctccgcggccgggccggcggagggaagggggcggccgcgcccgggacccggctcccctcggctccacttacctgctccgaagagtggccccagctctgcgcctcttcctgcgaccccacacacagggacagccccaggcacagccccagcagcaggagcatggcggggcgagggcgcgggacgctcggggacccggcgggacacgctttgcagcgcccagggctccagccactgcgggacgctctcggggccgcccaccccgcggtcccagcccggaccccgcccaccccac

SEQ ID NO: 31860 - DNA, 4230 bp, Homo sapiens
  chr10:77159582-77163812
  binary
cgccgccgcagctaatccggccgtgtgccagccccgtgggtcccccttcggccgaggcgcccccggtgcccttgccaccgccgcccacgtcggtgtctttcttgtcgtccttgccctccggggcacccccggccgaggacagcatacctcccggcgagcaggccgaggcgctggagctcgggctgcctgtcctgggcgtgaatggctggcaggtggcgctcggtacccggaatcccgacttctccgacgaaacacccccgccgccgcccccgccaccgccaccgcctccaccgccgcctcccggctccttcttatccgagccgggtttggagtacggcttgaaactcgacttgtcctccacgccgatgtcgctcagcttcagggggcccgatttggtgtccttgtcgcccgcagcaccgccgccggcaccgcccgcgccgcccccgttggaggcaaccgaggagagtttggaggagggcgaggggtcgggcttcccgatctgcgaacatgtttgcgccaacagcgccagcgggctcttcttggcatcgagctgcggggtcagacgatggggggggagcgtcacacagagaaagaagtggaaaccctttagaatcctggcttctggggttcaaatgcctctccgcaacagcccacgaagatcctcccagccccaaggcgcaattctaggcggcaccccctcttcaacacccactcacaaacattctcgccgttgggaaaggcagcagattgctccccccgcccaaccaccacccccagcagcatctttcctgccctctctgagcgctaactagatttttaaagagcaaaatgttttggttttcggttcctagacccagaactgtaccccctccccacaaacactccttaattcttcagagtaagggctcgggcggctggcgcctcagaggctgtgtgcacacactggcttctgcggatacgaaggacggcgactttggaaccgtatttcagacctccgcctgccttcggtgccgagtgaaggggcctgggtcggggtaggggctttcatatcgaaaggagaaacaagtattggcagccttgctccctagcatgcacgccccattccacttcctcccccttttccgccctagttttgaggtacggaagcagtagcctcttcccccattcgggagctgaatcactccgacccccccacctccgcccagatcccgagaaaaagaaagccctagggtggcagccagggtagtggtcccagtgcgatccagagagagggtccttacctcgatggggctgaccggcgtggaaggcaggggctgcaggtactcggggtgcaaaatgtggccagttcgtgccgtcagcatcttcagcaccttgattggcaggcggttggcctggcgcagggggtcagaggggggcacggcgtgcacaaaaggcttggtgctgccggccggggacgagcctgggccggggccggagctatttccagagagcgcgctggtccaggcagggtctgcaccgccgcctccgcctccgccgccgccgccgccgctgtgcttactgcttcttagggcagaaagcgagggcgctgtgctcatgacccacccgcgcgcatgggagcagcgggggggagggctccgggaggcgcggggcgggctcggggctgcgcgctcgccccgggagcaggagcagcgggaggaggaggagctggcgcggcggccacgggcgcccagcgcgccttctcggcgcctggagccagacgcgagtaatcctgggtggcccgcagcggagccgtggccgggctagaggagccggctggactgcgggagtgccgggcggctcgcggtgtccgcctcgggctgctcccctgcgctgcgttctcgcggccccgcgccggcgctgcgctctgcgatgcgagccgctgcgtgtccagccggggctctggcgaggaaactcacttcaaaagcagctgcaccaagggggagattaaagcctttgccgccttccaatcaaatgggagcccgaggtgattggagggtcaaggggatgtgacgcgtcccgcgccgccgccgccgccgctgccaggactctcagtgccggttttaatgggcagctccctcttcgccgcccccctgtgtgtcccctccctcgatttcgctgggaggacgagatggacatttattctacgtttgccatccgccgcctccctcttttttcctcctcgtcgttcttcctttccccagctcgaaaataaactgaaaccttcttttgaaggggggtgcgcgtgaggaacagactgcggggggtgtccagaaggagcaccggtgggagtgtggacaccggccggactgtcaactccaggggcgaagggaacctgcacacccagtgttttttccttcgcagtaatcgagatcccgcgcggcgcagcgcagccaccagggtaagaaggcaaggtggggagccggagctggaagaagcccgcccgcccgctctaatttcctcagattccgcggcggagaaaccagaagctagatgggcagtcgcagcggcggcggctcaacaccgcgaggagcgctgggctctccgcccttcccggccacgtgacgcccggggacgcgtagattggggcagcagcgggggtcacatgtttcctctgtttcaccctcagtctgtcccccaaccccccattcttactctcccaccctgttttcctccctcccccccttctttgggcatctccacccctccatcaattgtcaatgttcctcgaccgcaatcaatcagttatttgtcagctcttgtcaatcctcccgtgatttatgtcagcttttgttgctgattacaaggcgggtgcgacttgaagggaaaaagagagagggagagagagacggagaggaaggaggagattgagagggaactggaggaggggaaaagaggagcggcctcctgggatgggggtggggtgggggctctaagaaaaagaatgaaagaggcgcacggtgtcaggaaaatgaatagcgagagtaaagtgcgcaggtgcgcccagggcgccgagaggggcgcgcaggcctggagtgtgcgcctgccctctcggtgtcggagagacgcccttccacctctgggagcctcggtctgttggggtcgcggagttcgggcgcggctccgggtacccgagaccagcggcggcaacttctaacacgggagatttcccgccaccccaccccgccgccgcgagtcctcgcggggcgtgttgcgtgcggaggtcaggctgccaccctctgtagttccctaaccccaaactcggagacttctaagagccacaccaccaaggaacttctagtcctggaggtcaatggtggggcaaacctcgcctcaattctttgaccccctcgggtcgtaagcagggctaagaggctgcgaagaagaggcctggccatgggtgtatgggggaagaaacatctcaggctcactcatgccccctccccgaccttctcccacctgccgccatccccgcaggctggggagccagggtaactcggggctgctctctcgaatttattggaacgccgagtcggaatgagctgcgctaggagagccgagggaaggagcgagagagggagggggcggctgcctgtgggaacgcgggttcttccagggaagcggagcgggactgccgcgttcccctcgatttgcaccgtcactcgggttgtttgggaagaaaaggggaggcgctgtgcgtgccaccgggtacctggacctggatgcccagtgtgtatgcatgcctgtggcgctgcgtgagttatcggggctctgatagcgtccggagcgggttcgagggtctcctccaggaactcgcagaaattagagggggtggggaggaggacacacccccttcctcggaacgacttagaagactttgaatctcccctcctccgcttttccgccccggctcttcttttgttgtcaagtccttttgataaatggtggggctgggagctctgggagtcgggagccagtctgtgcccgcgtggggggcgggggccgagcctggagacccggtttcgaccggcgcgcacctggggctgagccgggtgcgcgcgggggtcgggtctggaactgcccttggtatgctcgccctctcctcttggcccatctcactcccctcccccacctgactcccctccccggcttctttctctgtctcccactccgcacgggtaccgagaactttcc

SEQ ID NO: 31861 - DNA, 797 bp, Homo sapiens
  chr10:77168785-77169582
  hyper
cgcgctcgggaggggaggctgtcaaaacccagtcatcgcggggactggatgggggacaattctccgacgccgcggcctggacccgcccccacccaaccggcgcaccacctcccaggcaccacggagcctgcgcaagctgcggggccgtaaaggaaccggcccccaatctccggggcttcagtcccgcccctctctccccccagtgccctgcagcgctcccagggtccgtgtctgccctccccaagcccccactgtcaatacaatccctgttaaaaaaaaaaaatctttttagagccaggcacgtgccgtcggcctctcccctgcccgcctggcccaggaggcgcccacacctgcgccctcacttgccgagacttttacctgtgcagtccccggcggcgcctgcagccgcgcaggtaaccgagaaatggaagggagggctggggagtgagaaggacagagagcaccgcccgacacaaccagacgcgcggacccggggcctcctctctggaccggtgctggggccctggtagaaccagctccgggagccgaaattgagccatgaagagtgggccgagggaggggcgaggggaacgggcctcaggagggaggggcgggcccggcggcacttccgttgggggtggggctgcgggctgccgcgccggtcccgcccctccgccgcgcgggcccgcccgctccaggccaggctccgcccccaccgactcggagctggatctcaggccacggcgcccccccagtcgcgcccccaaccccggaggcctcgggctgaaccgggtttc

SEQ ID NO: 31862 - DNA, 706 bp, Homo sapiens
  chr10:77190985-77191691
  hyper
cgttcagccaagaggcccctcctcgctgcagttgaggtccattatgtaacccagcttgcgaaatgcaggaaaggcccggctggctacagcccggctaacggctcagaaagggcgcccctgataggaatacccccacctcaggcgtggcccagacaaacgcgataaagctgtgggcatggagttttgggcattgggacatccgggggagggaggggcgcgggcagtcggggtcaggccgccgtcggggcgcggggcgctgcgggccacctgttgcagcgggcggccagggctcacctgcgcggagaccgggccgaggggcggcggcggcgagcggcggagctgaggtccccgaggctagcccgcgcctccggcttccgccgggtcagctgactgcccagtgcggaactgtgcgcccgccgcgctcccctgccgcgctccccgctgctgccgccgcgcccccgcgctccgtcccgcgcgcccgcagcgtcctggccgccatggccgggctcgtggtgcgtggaactcaagtaagtcccggccagccccgcctccgcccggggcgcagtccgcgtggggagggacagcggggcacagaggctccccagggcctagacacccctgtccccgcctcagggggctgcgtctgcagggggtgagcttcaggtgctcaggctcgccctagtggggctaggacagacctcgtttc

SEQ ID NO: 31863 - DNA, 1329 bp, Homo sapiens
  chr10:8091808-8093137
  hyper
cgggtgacagaaatggggacccggggctaaggaggaaggaggccagttttcacggcccggtcctccggcttctctcctttgaacaggcgctggggacctccgcggcggccacagctggacgcgcgccgcgaaaggcgcggcggtcccgcgggcgcccggcgtgggctagagaggccggccctggcctggctcaggtcgccctcgccccgctttcatcttgccccagtcgccctttacaattcccacaccgaaggcaaagcaagcaaggaaagaagccggcgcctccccaagcggaccctcccttccgcgcagcctcggccactcttccagagcgccccggtgcgtactgcggcgggcgcagggaatcgaattaaacgtctctgggcggttattgtctttctctaattgctccaacaatggcctctattaaaatggagacacccaattaaaggccccgccgggccgctctcggctgccggcaaagctctggcccccggcctgcgacgtgcagaccgcggggccgcggacccggctggtgcggggtactggcgccggcctcgacacctttggcctccacttcctccccagactcacagcgacagcggccgcttcacaccgtttttattgaccgatcgcagcccagcaagattgatcgagctggaatgggaagggacttctcctcccccaggcccagctcgccagggcctcgggccgtgctgcagtttctggcctttggtgtcgctccccgccccccagccccgcagattcccggcttcttttctgtctgcgcggccgggaccgcccaggcaggcgccggggctccggggctccggggggagggactcggcggctcggctcggctccgcttctttcttctgcctgcaaatatttgctgcctcgctggaaatccgacgatttcgcgcgcgctctgcttgcaaagtctttaagtaaacacgctcaaatgaccgccccgggcggcccgaggcacgctctctccccctccgcgggattagtaactttaggacttcgaccccggggctccgctttgcctgttacccaggtcgggcagcgcgcgggcgcccggggccgcttctcccggcacctcggccccgcggagctcgcctggaagcgccggttgcctggctctggtgggtggcccggccgcgagcatctccgcgccctgggtctgtagccctagggctgagccccagaaagccgcgcctccgctctgcgccatggcctctgctttctgtacccgactgggtttccccacttccactgggacagggtctcttcgcccctgggagggcgggtgggagggacttgcac

SEQ ID NO: 31864 - DNA, 882 bp, Homo sapiens
  chr10:83633664-83634546
  hyper
cgtgtgtacctgtgcgtacatttacaggtaaagacaatattttaaggcaagttcacataaatggcttggagatatctgacaggtctgattatacaaaggtcttctgctccacctgcatctctcaggaactcaggcaaaggtggccttccatccagccgcaccgccatccggcaggggagggcacaggcaccctcccacccgcatccgcccccgccccctcgcccagcagcgtcagtctctgaccccactggatccgtacaggagacgactcacaatcggtcggaagctgcttttgcccccccaccccaccgcaaacgggggtttgcttggatcatttatctatcttgtgtgcattaagaaaccagcattagctgctagtgggaggcgctactctgcccgaatcccagcccgccgcggcgattctgcacacacacacgcaccagcctggcagccagagcccgtctggagacgccctcagcccggggtctgcgttccccgggacccccgacgcagtctcccgcttccgtcccccacgctcaaccgggcagggcgccggggcgtgatttccgatcctctgcctgcttgttgggtccctcggaggcgggtcagaccgcacccgccgcgggcgcccggtgcgcccccagcccctggctcgcggcggcgacagcggcgctgttcgctggagtttgactctccggcggcggcggcagcggcgcgcagcagcgaacggctggagcaaggcgagccgggccgctagccctccgcgctgcgctgggattggtctctccagaagagtgctggccgagggttggctgcgggccggctgaagaacaggtgcacctcaccgcccgggctcgcggagcagccgccgaagatcgcggc

SEQ ID NO: 31865 - DNA, 747 bp, Homo sapiens
  chr10:91294903-91295650
  hyper
cgagaagtctgcatttgaaaaccacaagagatggagatcaaagccgctcgttctccagccacctgcccaaaaactcggccgcagcgcagacccaacccagacagggcaagtgagcacgtgtctccctcccaacccaagctgcgcgccgacgcacccaagttagggtcccaggctcccggcgcgggatgggcgctagggcagcggagaatggagggtccccgtcctcctccagctccaacgacagcgccagcgccccgccgtcccgccgcccttccttgaaggatgcccgtgtcacctgagccaccgcgccctctgcacaaccgtgtcagggagagggaagagggggagccgaggaagcttcttggccagggcgctggggatccgggagcgggggccgccggcgagactgagcccgggacagcccagagctccagcgctccagcgctctgcagcccgcccagagcgcgcagaccacccccatgccccgcccgccctcctgccacacccgcccccagcccggccccgccgcctcctcacctcgccgggaccactgcagccctggcggtagcgcgcggacatgcccccggggcgcacccgccgagccgcgtccctgcgcagtggccccttcccgggccccaggctgcgcgatccgcgcttcggtggggcggggagcggactgggcggaggcgccggcgaggctggggccgggggcctagctggcaacgccgggagagggaagcgtagcgc

SEQ ID NO: 31866 - DNA, 892 bp, Homo sapiens
  chr10:95753372-95754264
  binary
cgcccttcccggagccgggcgccccaggagcgctctctctggctcccgccagaaaggatggctcctaggggtcagggccaggggtctgggaaggggtcgcgccgccagcagccagctccgggggaggcggccgggtcctcgctccgcgcccgccttccccgcgcggcaggagccgggggcgggcccggcacaggccgctcccccgcccggccgcccgcggtggcgctagcggcctctcacccggggcgggcgagttctgggaaagcccggcccagggcgggggccccgctgccgcccgcgcagccgccgctgtccgggcagcgcgcacatctcggcgggagcggactgtgaacggcgcgggtccacacggtaacgctgggcaacgtgggcaacgcggcgggcggcgggctcgcgcggcgggaggggcagcggcggcgcgcccgggctctacctcccgggctctgcctcccgggctctgcctctcgggcacttgcctggctcctgcgcgttcctgggcatcggctctgcagctgacacacagtagcggggacacccgacgccgctagcgacaggcgcgcggacggctggtcccagagggacgctgcgcttggggacgccggcgagactcgccaggagccaagaggtgaggaagcgactctgtagctcggttcctgaggactggagaaagggaaggatgggctggttctctcccaaggcagtcgacccgcctaagggagcagcccgactccgcgtacctggcggaaaagtgtcctcgcgctcccgggggacccgaggcgggcggtcctccagggcatgcaggccgccctcgcaggggctaaaggacaccctgccagtgccttcactccagacgcctgcctcaggtcgccccttc

SEQ ID NO: 31867 - DNA, 1293 bp, Homo sapiens
  chr10:99789576-99790869
  binary
cggcttgcctcaggcagcctgaagggaagaccacacctcgtccagcataaggcggctagcagctacgccgcgcgcggggctggctcccggagctctctgccacccagcgctgtgcccgggaactcggcttcccaggggaggaagagccagcccgcggggctcttccccagcctggaagcgtaggcactcggccgaggccagtggcttcccaggcccgggtctcagcctggctgactgggagactctcccgatagcccggcacatccctcctcacccgctccgccccctccaggccccagaggccccctcccctgacagctgacctccagtgcgcccccaacactttctctgccagctgctggctgtcgcccccacacatcagctcccacctctccgccacctccaacccggccgccgcctcacccccagcccgcgggggaggctccgcgcgccaatcgagtccagcgcctcccagcaagttaggagcgaagccgccgccttcgcgatcccagtcttcccgggttcccgggcggcgtccccgccacccttgcgggcggatccgggggggcgcgcagagctggagaaactttctccgccttagggtggggggcaccggtgcagatactcacgccggggtcagcgctcggagccatcctcccgctctcggccccgccgcctaggggcgtgggaagcgggcgctcgctgccgcctctgccgccggcgccgccgcctgcttgctcccagccccggtcccgggctggcctcgagcctcccgccccgacgccgcgcgctcgctttatacaactccactcgagcgcgcccggtcttatgtaaaggctggcggaggcccgcagccaatggcgcggcagctggagccgggggcccggggtggggggcgccggcgcggccaatcgcggccccgagagcccggagagccgggcgtggggagggagcgcctccccgcgctgatttaggagccgggattgcggtggcagcagccggcagccaggctggcccggcgcggcgcggcggccactggggtgggcggcggcgaaggcggcggcgagggcgggcgccccccgcgccccgccactgcgtcgcgtaaccttcaggcggcagcgaggcctggcgaggaggggagagggcgcctggctgggcgctgggggccccaggccggagggaagcgagggtccctcgggaggcagcgcagggaaggaacgcgaagggggaggggagggcggcgagccccaggaccccgcggccacccctgcgcgcaggaccgagggtggaggc

SEQ ID NO: 31868 - DNA, 989 bp, Homo sapiens
  chr11:100998666-100999655
  binary
cgctatagagagggtacgcgtcgtccttgggctcggcgtcgggcgggtacgcgcagtcggggaagtcgcctacagcgaccggggtggacgaggcacagggtgaactccgcggcggggcaaaggcgctggcagccccggccccgccgtcgtaactttcgtcttccagcagctgccgagtgcgggctgccaataaggcgtgattgagaggcaggataggcacgtggatgaaatccatcaccgtggtggccagcggggagcgcccgggcgccatcggcgcgtcctgctccaccagggcgaccctgggcgctgagaagcgggaatcttccttggggaccagggcgacgcctcctgctgccgcccccggcgggacagccgcggctcctcctccagccgccgcgccacccagagcccgaggtttgcccttcagaagcggacccgcagactcctcggactcagagccatcctcctcctcaacctccaccgcagcggcctgcggagacggcttcactggggccccggaccagtgagggctctcagaggccgggagcagcagctgccgggctggtgacaggccccggggcagcactttatgggcagctgccgtcccggagctgtctccaaccttgcacccggaccggctcatgagcggggacaacacccgctgggtggcgggggcagccggtggatcttcgggaagttcggggccaaacaggcaccaagagctggtgacctcgcaggcgggagggctgggttggctctgcccgggacctgagggcgccaacagagtgtccaagacactgtccagcagtccgctgtccttttctgggggactagaactgctgcctccagcaccccttgtagcttcagctctggaatatgcgccctccacgtccgacagcgactgctggtcctgcgtcttttcgtcggaggggtcctgtccctggcagggccgagggaagagtagcccgtccagggagataggtatggcc

SEQ ID NO: 31869 - DNA, 1745 bp, Homo sapiens
  chr11:101980831-101982576
  hyper
cgcccgcgttctccgcagacaccacagttcggacccggattggacccatcgtttgcggttcgcggggcagaatacggggcacgcttcgggcccctgcccggctgagcgcgggcgaagggcggaccgggccagggcgagcgggtcacgtgcggccgggagaggcgccgcgggccgggagtgtgcaggaatgtagcaacttgcagcgaaaagtttccctgcgctgccggccgggccgcggtgcgggcgggcgcgcagaggaaggaagagccgagaggaggcggggccgcggcggcgcgggcgggcgcttctcctaactttagttttggcgtttgaggcgagtttctgtctcagtcgggcgcagccgccgccagggaaaagaaagggaggaaggaaggaacaagaaaaggaaataaagagaaaggggaggcggggaaaggcaacgagctgtccggcctccgtcaagggagttggagggaaaaagttctcaggcgccgcaggtccgagtgcctcgcagcccctcccgaggcgcagccgccagaccagtggagccggggcgcagggcgggggcggaggcgccggggcgggggatgcggggccgcggcgcagccccccggccctgagagcgaggacagcgccgcccggcccgcagccgtcgccgcttctccacctcggcccgtggagccggggcgtccgggcgtagccctcgctcgcctgggtcagggggtgcgcgtcgggggaggcagaagccatggatcccgggcagcagccgccgcctcaaccggccccccagggccaagggcagccgccttcgcagcccccgcaggggcagggcccgccgtccggacccgggcaaccggcacccgcggcgacccaggcggcgccgcaggcaccccccgccgggcatcagatcgtgcacgtccgcggggactcggagaccgacctggaggcgctcttcaacgccgtcatgaaccccaagacggccaacgtgccccagaccgtgcccatgaggctccggaagctgcccgactccttcttcaagccgccggagcccaaatcccactcccgacaggtaacctcgttgcccctctccccgtttccccgtcgggcgggcctcagaccgggggggcgctcgggagccgcggccgccagctctggtcaggggaggggggttgcgggaactctagctggggtgggggtcccgaggcgaagtggaactggagtcgtccactccgccgcggtgaccagctccccactcctcccagagtccggggctgagatttgtttttcccttctgagtttctctctgcggttgcagccccggggggcgtgctttccctccttcttcctttctttcttcccggggttcccgagaggttggcgggagtggaggaggggtggggaggaaggaagggggtggggaaaagtcgggcctgggccgcggtgggcttgcacaatgcgcgcgcctccgcgcgctccgcaccttcgctcccgccgggccgggctgggaaagggggaggggggcctctggcatttgtgtgtgggtgtgttgccagcggcggccgagtttgtgaagttgagccctgggcccctttcctttgcggcctctcggtccacttcagtctcctgggggagtcaaataattgttctcttgttttccagtgttgattagaggtgggggtagaaccggtccatttagttttttgctctttctttccttcccccctcccgtttcccctccccctccc

SEQ ID NO: 31870 - DNA, 894 bp, Homo sapiens
  chr11:113345433-113346327
  hyper
cgagattgtggggagcggcctccctcccgccctccgatgccgcggctccgccgtgctgccctgggcgccccgcggggaggctgccccagctgcgcccgctcgtgctcggggagaggattcccttctaagtggcgaggaggctactgagaaggagggagaggggatagcagccgcgggctccagacgccctctgcccccgcccgacggggagcccatgcagagccggatcccaggcgggcgctcccgagcaggcggccaggagtggccgcacaaacttctggtcctggcctcgctccccttggaggtccctcctcctctccccgtgacactgagtcgcccgccgctccatccggccggtgcttaccttcaagccatagggcgcccgggggcagagacggcgccggctgcttgaggcttccagctcccgccgcatccacgcgcggccgcccctccggcagccgtccggggccgccactctcctcggccggtccctggctcccggccccgccgcgccgttcagagccccggcgggcagcagctcggccggctctggcccgcggggagcagtggacgggccgcggcggggcggggcggggcggggccgggcgcggggcgggcgggcaggagggagcgcggggacggggcggaggcggcgcggtgcgcgcgtgaggctgccggttcggcactgaagctggacagctctgcggcgcccgagcgcggggagcgcgggagggaggtgccccggtccccgcccctgagacaggccccgcccccgccccccaccaaaggagctgtacctcctcggcgatccccggcctgaacgggtaggaggggttgggggattccgccatcccttgttttgaggcgggaacgcaaccctcgaccgcccactgc

SEQ ID NO: 31871 - DNA, 2360 bp, Homo sapiens
  chr11:115373835-115376195
  binary
cgcggctgccaagcgcggcgaggtggcgggaagggaggctgggtgcagcacagccggcctctccgctgaggaagagctccggctcccttttgttagcaaaagcaaacactgccctcttctttcccgaccgcgccaacgcgcccggcacacgggcagccacacatcgggctccagccgagtgctcggtgtcttcagggaaggcaccgggcgtgcagagccgcccctgggcaaattcccaagactgctcttcacgcagggagcgcgcggaggcccgcagggtgcccgcctggccgcagaggccgcgacgccccctccgccaccctcgggccgccgaaagaacgggcagccgggaaatcccgtgtccccactcgtggcagaggacgctgtggggcgggcgggctgcgggctcccggcgccttcccgcagaggcggcgacagcggccgccccccccgcggggccgggccggggaactttccccgcctggagccgggccaaaaagacccgcagcagagccgagggggcggagggctgcgaacggccggagggaaacacgagaggcgtgcagtttggggacaggggagaaaggcagagcgcgttgggggaaggggcaggggagatcagacaagtctggggatgtcctggggaccggggagaaatcacgccgcgggcggctgggagtcagccaccaggaggcttcggggatggagaactgggggggccctctggagaggtgggggcgaatggacagccctgggaggtgggaggacctgcaagttacggggagaacggcgagtttagaagggtccggaagggttgaggttgtctttgaaccatccccttcccccatgctttacagcccccgggccccccattctcactccactctgcaccccgcgccaagccggggagagaaggtgtgggtgcagccatccctggggactctcattcacacttagccgggcaggggagaaggggctcacagatgccctcagccccttccctctcagccctgagtttcctctccacactccctccgcttcggatgtaggaagtggggggaggttgtcatggaaacgtttcccccctctgtggccaaggctactggggtgccttcggagatttaggggccaaccggtcggtgcccacacctacctgtggggatcagtgccgcggcggagaagagcaacagcagaagccggagccggagcccgggaggcgccgccgccgccgctgccgccgcacactgggatccgctcggcagcactacactcgccatgtcgggcacctgcctcagactggcggcgttggctgcctccggagcccgagcggacagctaatgagatgctaatgacatgcgctggaggcggagtccgggcagaccaatcacagcgccgcgagcccaacccggctctcggagggcctcgctccctcccccaccccgccccctggcgctggcgttcggcggcgcgcccgcgccacctaggggcggggccaaggggaggggcgtatgcaaatatgtttatgttaaaattcgggttttgctttccccggatcaaggaaaaagtgttctcccgggcgcctggcgtgcaaggactcgggctccagggggcgggtctagcttcttgtacacctttattaggaatgtttatagcaatcgctgtatcagaccgacgactggagaatctcccttaagagggtcctctgtcccgcacaccgagtgcatctggcctagcgaaccagacgttgcaaatttccgtcactcaccttgcaccgaaggaatagatctttgggaacgggggctgtgcgggagtggagagtaagaaggcaggtccccggattgacaaaacaatctgggagaagtgcatgcgtgctttgcacgtccggcggagcgggagagcccgctcaacagcctagcggtagactcggggatagttggagaaggcagccgtagagtcgggttctgagattttccagtcggtctttttgcggcagaatctcgggaaaggtagatcgaggagggtatgctcaggctcctccgcttgtcgagggtctcctccctggttttaatatataggtgtgtgttgaatatatgtgtgaaatatttgtaatattagatatttaagattacacaacaacggaaaaaattagtcaaggcttcaggtgaagagcgggggtggtgggagttggggagagggagtgtggtgaaggcagggtctgccgtgttcctccttcggggctcaaaccctctcactcctcctctgcgcccccagcccttcctaaggaagctggggaccaacaggtgctccgagcttcccctgtctctgggagagcctctcctgctaaagcgacttgcatctcc

SEQ ID NO: 31872 - DNA, 752 bp, Homo sapiens; identical to SEQ ID NO: 28339
  chr11:119455153-119455905
  hyper

SEQ ID NO: 31873 - DNA, 496 bp, Homo sapiens
  chr11:120110626-120111122
  binary
cgccactccgggcgcggtgaggaggtgctgccaggctgggttggagcaggcaggtgttccgcgggatcgagacccgccccggcagcacccccggccccctccccaggtccccagctccatgtatgcaaatcactgctttgcatgggcctggggccaggcgcggggctcctgccagggggcgtggccggcggcccccgccccgcgccgcgtgctcacctggggagtgtggcaatcctggcggcgccgagtgttgcccgggccggagcagcggagcgcgcgacagtggcggcgacggctccggcagcggctcccgcggcggcggcggccgggaactggaggaaggagaccctggcttcgcaggggccccggctggggcagaggcgaggggcctgggggggcgctggctttggccccgcctggggcaggatggtgaatctggagtccatgcacacaggtgaggggcggagggaatgagctctgacaggtgtcactgcgc

SEQ ID NO: 31874 - DNA, 1165 bp, Homo sapiens
  chr11:12029894-12031059
  binary
cgcgccgccagggcgcacccacctcttccaccgcgctgcgcaatttgtgctgcgtgtcctccatcagttcctcaacctcgcggaacatctcattgagggtggcctcctcctgcgggtagctgagagccgggccgggcttgactggagccgaggtcgccgtcggagcgggcgcgggggccgtggggaccgccgccgccagcagcaggcacagcagggtggccccaagccgctgcatctccgctctgcgcccgcagccgccgcctgtgtgtcccggaacgcgatcagaggcgcgcggaccacccccctcgctgggcccgccgccccgccccgttccgccccgccgcccgcccctggcgcccctctttcccgcacccgcccggagacgggaggaaaccgaggcccctgaaaacgcagctcccctacacccgaaaagacgcgaccccacccgctccagcccgagccccgatcgccccaggaccccgcacccccatcctcgagcacaagctgagctctgctcctcacctgtgatgctggagccctcgccagagcaaccgaacccggatcctctacgctaatagctcccaagccccagctcacctagactctgtccccggttcaaaccctagcccctcctcgaccaggtcagagtgcccgacccccacttccacctcaagcctctctcagcccctacctggggtggaccaagcacaggtcagccccctccccttggcgtcgggtcctactcgagcgccccgccccacatccaccaagagaggctgagctcagcagagtcgtcccctcccccgccgccgcccctcacccaccccgactggaccgagttgcgctgcgggccggactggatctgctcgctcccgccgggaggccgccgggctgcgggtgcagatgcgggagcggcgcggtgggcgggccgcgggtgcgggagcgcggcggggtgcggcagcgccggtacccgagggagcccgcaagacgcgccccgcccgcccaccaggctccctctccgcccccgccccgagccccgcccgcccaccaggcccaccccgccccgcggaggggccgcagcccggccattggccagccggggcgccggccacctcacgccccacgccccacgccctcctcttctgcctcagcgaccagctctacc

SEQ ID NO: 31875 - DNA, 875 bp, Homo sapiens
  chr11:12131738-12132613
  binary
cgtacacagtcggtactagaagtgccatgctgctcccccatgtccaaaaggggatgccgtgtcttgctttccagccgcctagaccaagaagcgtgaggcccaggccctcgccgctcccttgatacccgcttaccaacaccgggggtttcatctcgcagcgccaccacgccccactcccagcagccctcccctggtctccgccctgtgcgggtcagggtgggagcgcccggccactccctgcgttctgggccgggctacagcccacgtgcgccggcggcagcggcggtgacagccggccccacgggggcggggcgggctccgtgctgtcctgtcattggccgcgccgctgtcgggggcgttccccagcccggtccaccgcgcggcgcagaaccgcaggcgctcggctggctaagcctgcgccgggccgcctcgctcgctcccagctctgtcagtggcccgcggggcccgatcgctgcgcccgcggccagggccgaggcaggcctgacccggggccgggcagcccgcgcgactttcggtaaggcgggggcggcgctggcctcagggtggggagggcgggcgggcgcgggtggggaccgtgccagcctcggctggactctgcgccgtgtccaacgcccgggagggtcaggtgcggccgcagcatcccccgcctcaaacccacccggcggggcgcacagtgagcaggtggcgctgcgacgaagcccggggcggccctggccggcctctgaaccaattagaacgcaataaaagcctcccaccggcacgccgaactacctcttactccgctccgcaacacccaaaccctgcagttccaagcctagaaaatcgcaagcgccaaaacggggtgggagtgacgc

SEQ ID NO: 31876 - DNA, 453 bp, Homo sapiens
  chr11:122852385-122852838
  hyper
cggagcacctgccacaggacaagggccgggacgaagtggaggacgcaggcagagtctccaagcctgctcgaaagccggcaaccaccctccgaggctcgaatctccgctgctctctcccgggcctgggctaccccgggcgctggagaggcaagaagacaagctcctgggtaggttgggtctctgtgttggagaattggcagcttggagaggggggccgggagagccaatgacgaggctgccagaggcagaggggagggtgcgggaggctcggggcggggcggggagctgtccgcggtgctgaacaccaccggccgagcctgggaacaacagagcccgcagggttcttgttcctaccaggtttctcgacctcaatttctgccccgtcactgcaggggctgctttgttcccagtcgtttttaaaagaaagccaaaaggaaaaagtctctgttgtcc

SEQ ID NO: 31877 - DNA, 768 bp, Homo sapiens
  chr11:123524842-123525610
  hyper
cgctcgtttgcgcccagggtaagctcagctcggaagggagtcgcactgctggcctagcagccaggctgtggaagggtccaggttgattcacctctcgcctccccaggatcggttgcgttccgactggaatcctcccagccccgcggctcctgcttcgtccgccctaactgcttctccagctgggcgtgaccccactcccgaagccgccggggccgcccgtctgggctacagaatgcgttccacgtcggtcccgtccacgcccgccctcggctccctggggaggtgcagcggggccgggaaggaagcggcagctcccgttcggccggcgatgtcagaggttggggggtgggtgtagaggcggagccccttcccgggagctcgcccccggatggtgcggggccccgaccctgggtggcaggtgatcagcaacccttctctaggcccccaggccgtgtgtgctgtcagccctgacatgcgcaggcggctctccgccaccaccaccgccccggaccctccccctagtgcacactccccaccccctgatgggcgtgcccctcccaggcccagcgccgcgccgagcgggggcggagccgggagcggcgcagacacttccagccgggatatctttgctcgcgcgctcgctggtctctccaggtctccctctcgcgcctccgcacctcccccgagctcgggcgcaccgccgccctcggctcacgccctccaggcaaacccactccgctcccgcacggacttgccgggtgtagctcc

SEQ ID NO: 31878 - DNA, 852 bp, Homo sapiens
  chr11:12399010-12399862
  hyper
cggcgcgagggagggagcgagggagggagcgagggaagggaaaggcgagcgtgagctgcctcaaatgcttggaataattccgcttccgtttggaaagccgcagcctcagtcccgccgccgcccgctgcgtccgcccagcgccagctccgcgtcccgaccggcccgcggcagcctgcgccgcgccatggccacctccccgcagaagtcgccttctgtccccaagtctcccactcccaagtcgcccccgtcccgcaagaaagatgattccttcttggggaaactcggagggaccctggcccggaggaagaaagccaaggagggtgagtgcggccaggccggccgggcgggcggtaggagccgggggtgccgtaggggccgaggggccggggcactgggaccgggcgggagcgcgccgcgggtgcccggcgcggtggggcgcgcggcgatgcgtgcgcgcgcttcccgggtacgtcgggcaggagcgacgcgcaccccacactgagcccggggctcgcgggccatcgaggccaccccgcccgctcgcggtcgcccgggcgctgccctcctgggccggggaccaggccaacgcccccgccgggccgtgggcgggcgccgcttggcggccggaggcggcgggaccggagcccaggcggggccccagcccgcagacagtgcgatccagtaggccctgccccgccctctgcgcccgaaggctggcatttcccaagtttccgctgcagctttcctgggcgccgtcgctcttactcgttgccttcattggtccttaaaatcaggtcgtttcctggacctgctgacgtcctctggcagcggcgtcgtggctttggcctcttc

SEQ ID NO: 31879 - DNA, 634 bp, Homo sapiens
  chr11:124738440-124739074
  hyper
cggcctagaagtttgtgtcccgatccctctactaaccggcctgtctgtaggcatcttcctttgagacgaggaacgcggaacgtctgccaataaggacatattggatcctgcagagggagagggtaggcaggtggggactgagctccgcagagaagcataggagatggaacgaccagaggattctctttccctctggagcctcaatctctccccacaatttccctgtctgaacgctctgcgccaccccctgtccccagggtcaagggtaggaccggaggacgctatgccccgcatcgtggagcagccgccagatctgctggtctcccgaggcgagcccgccacgttgccctgccgcgctgaaggccgaccccgacccaacattgagtggtacaagaacggggcgcgtgtggccactgtgcgggaggatccgcgtgcgcaccgcctgctgctgcccagcggcgccctcttcttcccgcgcatcgtgcacgggcgccgcgcgcggccggacgaaggtgtctacacttgcgtggctcgcaactacctgggggcagcagcgagcagaaacgcctcgctggaagtggcaggtgagagtcagttgaccgtcagctggttgcttccagagcctggggtaggc

SEQ ID NO: 31880 - DNA, 918 bp, Homo sapiens
  chr11:124932779-124933697
  hyper
cgagattagtcatgcagggccgctgagtgtgacttccagccctccagcgtctcgtgtcccgcccgtgtcggagcccatggctttttaggacaggaagcgctgcggggtagtgcgggcaggcaggcacgtcacaccggacagcgtcgagattgctgctttcggttccccagcgggtggtgaggcagaaagtgcagggcggaatgaggagccccagcacctcagagctgtcgggcagtggcggggaagcaaagcacaggagcgctgtggtgccagcggccgggctagggacgactggcgggtttgcgctggacccgaccccgagggcgggcgcaagggggcgggcgctgccgtactcaggccgcggggccagggcgggccggccggcggggcatttaaaccccgctgacagccagtccagcccgggacacgcgcccagctctgtagcctcctccgtcgactcagccttaggtaccggtcaggcaaaatgcggtcctccctggctccgggagtctggttcttccgggccttctccagggacagctggtgagcggggcaggggagggaggcgtgccgggacctcctgggctcggggcttgcaggggccgcggggggcctcggagatcaccccagatcggccccggcgtcgccgcgtggccaggggtgctggggggacttggtcccgagctcctccagcggcgcccgcctcggaggttgataaccctccctgcccaactccgcccgcgctcccccagaccccgcgacgctggctcggtgacactggggaagaacaggctgccagggagggtctccatcgtttcccgtttccatcctcccctcctaacacacatccggggcgccttcagagcgcctttctgtcgttgggcagctggggaacctgggctcgaaggctggggaacc

SEQ ID NO: 31881 - DNA, 1566 bp, Homo sapiens
  chr11:12695414-12696980
  binary
cggagacggcgtccaccgcgctcgagagcaacaatctgcatcaccagaaaggcaacttctctaccctacacttgcagacttccgcgagtccgggagcactcaacgcagtcacccgcgcttccgcgtcccggactagggaaactgaggcacggtaggcgcgtcgcgcgcaactcccgcctcggcgcctgccccctggaagaaacccaggcttccagagttcttcgcgcgagcgcagggacttccaagccgcgcagctcccgtccgccccgccccgccccgccccggctcgggacaaagcccggagcccgcgccgggagacggagggcggctcccgcgcgagccacgctcccccgtgggcgcgagactccgcccagctgccgaaagcccgcgccccaacggcgaagcagccgcgccggtccgccccgattccccatgacgtcaccggcggcggcaggccccgcctccagccccgggcggcaggccgcatgacgtcaccgaggccccacccctccggagcgagttcggtcctggcgttcatttcattcctgtcctcattccgaacattcttagcatcgctcgcgccgcgccgcgccgcctgagccgagccgagcctctgctgccgccgccgcggccccgccgcccgccgcgggcgcccaccaagcactttgcagactcgcttccaccctgcgggccattccgcgcggcggggcccgggcccggggcggccgcgtccaggcacaggccatgcagtgacgcccccccacccctccacctttgcccggagcgcgggcagcagcccagcgcgccagccggccccggggcaggagcggtgctaggcaggggtggggtggccgggcccagggaccgggagccggggagggagccgggcaccgagcagagggcgggggaagcggcgccgaagtttgcctcggactcgccgggcgctgcggtggctccctgggccgaggtaagttggcgcgcggggcggatgctggggtgcggggggcgcacggggcagcggggggccggcggcgcgtccctcgcgggccgctctttctttgcgggctctgctttgtgtgcgacggcgggcgggcacgcggagggccgcggccgggcccccacacccgcctccccgcgccccctccgaggtgagcggccgggcgccgccgcgcgacttgccaggacgccaagttgggccgcgcgctgggagcccgcgcggcaacaggcggcccccggccggccgcgccgcgccccccgcgcgccccctctcccgccgcctgcacgcgcacacacgcacacaccctcgggcgccttggacggggtgcgctggggagccagaagttcggagcgagcgcgggcgggcagagccgccgcctcggagcccggagccggcctgcacccccctgctttcgccgccgccccccggcgccgggtacccccgaggccggcccgggtctgcgcagacttgtgccgctggcggggggttcgctccttcttctcaaagatgaaaaagggcacggtcgtctttgccgcttctccaggactgttgctgccgctgccgccgcc

SEQ ID NO: 31882 - DNA, 1419 bp, Homo sapiens
  chr11:129148497-129149916
  binary
cgtcgtccaacatgcagcggcaacttcagtcaatcggaaagacgaggggggaactccacgggagcctaagggagcagagacctctggccccgcggggcccacgcacacctgggggcgggacccgcgatgtcgcccgcgggcagcggagggaaacgctcccgcggctcctccgggagcgccggtgtccctggagcccccactcggccgctcccaggagtcgcggctgccgcccgccttgggcccggggcggagagcgctgcggcaggccagaacgccgtccgaacgcccggctcgcggaggccgcggggagcgcggggcgcgggcgcgggaggcggtgggcccgcagcgccgtccgccccgggaggccggggagatggggccgggggcggggggacaaccgagaggctcctccgggagcatgcgatccggaaccctcactctaaaaagaatattttaagaaggaaagagaggccccccgcagccttccccgcggggcctgcccacgtcaccggcgcccccggccctcccgcgcgcccgccttaccgagccccgcggccccgccgcgccgccgcggcgtccctgcgccccgctggccgctccgtgtctgccctccgcgggccgggcccgacgccctccgcccgccgccgccgccgccgagcgccgcccgcgccgccgagcctagcgcctggccgccgagggcagccgcgggggctcggccgggcgtcccccgcgccagcgcctcatcccgcctcgcgccccgtcaggctcgggggcgggggcgccgggccgcggcctccaagtccccacctccggcacgcaccgcgctcgccctcccgcggcggagtcggcccccggggacgcgggtcctcgggctccagagcctctcaccctgacgccttcgggccgcccccgcagcgcccccgcccagctggccggcgcgtgcccccgccggagcccgccgcccgcccagcctccgcctcctccgctccgcctcctcctgcacccgcgacgcccgcagcggggagaagaggcgcgccgccgcggccgcgggcacgagcacgcgcgaggagggcgggcggcgggcggagcgcgcgcgcggccgagggggcgggggcgcgccgaagcctcgcctgctgttgtcccgggagcgcacgtgcgctgcggtggggcgccgaggggcgttcggcgggtgcccctaggggactgggggacagggaacgcgaagtgggtagagacgctgcctgagaggtcccgacgtaggctgttgcctcggccccggcattgtgctgcggtgcaaaaataaaaaaccggccgccgccgcagcagcagcagtagcaccgggaagaggcatcctccgagactacggcagtggctcctctctactcccagctgacccccagaacactgtcaccgcgccgc

SEQ ID NO: 31883 - DNA, 2498 bp, Homo sapiens
  chr11:13030308-13032806
  hyper
cgagaaggactgggaggccttccgctttagaggcagcgcttatagcgctagctggtcgtggaatgcgattacagcgtctccattggagaccgctgagtgcctcggtttccctgtctgtgcaaagtgcactccccagacgccgctgcctcgagggaccaggaaatgcgtctgggggcgccaggaaagatgagaagataaagtcacgatgcgtccagctagctatagacacaagcagaggagccagtaggccaaaggagacgcacagctgatccgtgccgaggcgcgggctccactccctgaagtggagggacccttgaatctttccttgcgtaggcgcgcggcagagcagcgatttggcgaaaagggccgagactcaggatgcctgcaatgcgagcgaggggcggacagggcgcacggggcgcggcaaggctgcgaggggcgggcctgggccctgagcctcctgcacttccagccacagctctgggccttgggggcgggaaggggtggagccacgtggggaggagcaaaacccggaggtcccgggcaccttgggcagagccagagcggcgggagccggtcctgggcgcgttgccccgggagcgcccgtcgtccgggcagagcgcagccgcaaccgcgaccacagccgcagtcgctttccagcctgccttcggtgcgcagcgggggaacagggctagtgcagccgccggaggggggcacgggctcctctcccatcccagagctactgggctgcccttgctgtcctcgccgccccagcagaccccggccggacctgccacctgcgccctggttgcgccatggatccttcggaaaagaagatatcggtgtggatctgccaggaagagaagctggtgtccggcctctcccgccgcaccacttgctccgacgttgtgcgagtgcttttggaggacggctgccggcggcgacggagacagcggcggagccggcggctggggtcggccggcgacccgcatggcccgggagagctgcccgaacccccgaacgaggacgacgaggacgacgacgaggcgctgccgcagggcatgctgtgcgggcccccgcagtgctattgcatcgtggagaagtggcgcggctttgagcgcatcctccccaacaagacgcgcatcttgcgcctctgggctgcctggggcgaagagcaagagaatgtgcgcttcgtgctagtgcgcagcgaggcatcgctgcctaacgccggcccccgcagcgccgaggcgcgcgtagtgctgagccgagagcgcccctgtccggcccgcggggccccggcgcggcccagcctggccatgacccaggagaaacagcggcgagtggtgcgcaaggcctttcgcaaactggccaagctcaaccggcggcgccagcagcagacaccgtcgtcctgttcgtccacttcgtcgtccactgcctcgtcctgctcttcgtcgccgcggacccacgagagcgcgtcggtggagcgcatggagacgctggtgcatctggtgctttcccaggaccacacaattcgccagcaggtgcagcggctccacgagctggaccgcgagatcgatcactacgaggccaaggtgcacctggaccgcatgcggcgtcacggggtcaactacgtgcaggacacttacttggttggggcaggcatcgagctcgacgggtccagaccgggagaggagccagaagaggtggcggcggaggcggaggaggcggcggcggcgccccctctagccggcgaggcgcaggcggcggcgctggaggagctggcccggcgctgcgacgacttgctgcggcttcaggagcaacgggttcagcaggaggagttgctggagcgcctttcagccgagattcaggaggaactcaaccagaggtggatgcgacggcgccaggaggagctggcggcgcgggaggagcccctggagcccgacggtggccccgacggcgagctgctgctggagcaggaacgggtcaggacgcagctcagtaccagcctttacattgggctgcggctcaacacggacctagaggccgtcaagtcggacttggattacagccagcagcaatgggacagcaagaagcgcgagctacagggccttctgcaaactttgcacactttggagctgacggtggcaccggatggggctcctggctctggcagtccctcgcgggaacctgggcctcaagcctgcgccgacatgtgggtggaccaggcccgtggactggccaagagcggtcctggcaacgacgaagactcggatacgggactgagctctatgcatagccaagactcggactccttgcccatgtgcgaatcccttgtgtaggggtggggggcggggggcggggggcgggaacagggggattcttttttcttgcagaatgcagtgggccagccggctcgcggacttgaaaccaggctgttgcgagcccagagctccggctgggcagcagcgctctgcgcagcctcgcgctcatctggctcc

SEQ ID NO: 31884 - DNA, 2252 bp, Homo sapiens
  chr11:133825204-133827456
  binary
cgtccggaccaacatgtcagttaacaaaatcacccttcgcttcgccctctgctcgttctgttttcagacaccaccacccccctcagaagcagaggcgacatattcattccattccggaaagtttcctgaagcacgcccccctgcacagacgagtgacgaggggaccccgtgagaggcgcctccagcccacccggcgccccatgccgctgggagagggttctctgtcggcgagtcctgcctgctgactcccacccacagcgggttctctcccgccgccatctcctccggcttggtgaacttgcccgcagccgggtcgtgtctgcgcgctgacagccctgagctcacagtcctggcaccctccaggctccgctcccacttccatacaagggccgagagccgggggtgccacccagaggcttgtaggtcgctctgcccatctccaaagcaaaagcccgcgcgctcacgcacgcatcacccaactcggtggctccccccttgcgtctcccccagctcagacccaggaaagcggaaagagaaaatcccccctccgctcggattcacagcgtggggacccccccttccccgcccctcccctcccccgccgccgcccccagccagctctgcctcgcagcctggggagggcggcgtggggcccgcgcggctgcggcgcgctcccggggaacttttgcctggccggggcccaggtgcggctgagaggcgcgggggccggcggggtccagccaaaagcggacacacctcgaagctggcctcatcaatcctcctctcaccgggcgcccctgctagggggatccgacctccagctgccaagatgtgtgggcaggaggggcgcgagcggagcgatggacgcccgcagggccgcgcgaacccggggccttagacgcgggtgccgccagtcccagggatcctccgggtcgcgcctccctgcaggcgctcctcgcggcgcggggctctagcgtgctgcagcctgcccggagaccgcaaactcccgcagccagagtttcccgcagctctgggaggcggccgccgggcaggaggcgacgggctaggcgcgccggtgtgcaccgtggggcccgtggtgggcgaagtcgacccaggttccactgcgtcctttccccgagtgcccggcagcccgtgggctctggccccttcccgcccgcccctccagcccacggcccccaggccctccccggcaatgctcccgggccgcctggcccgcgtcggagcccaagcctcacccgcgggaaggcgcgccggggagctggggaaccggggggccaaggagccgggaaaccgaggggccgggcgcgaggggccgagggcgccgggaggggcaggggagggacgccgcacttcaactcaccttcagccgcaagccctcgggtgccgatcacacttgctatgaaagtggccacataccaaatcatagtactaccgcgccagcccggagcctcatcctatcgcaaagtgctcccgcgcccgcacgcgcctcgcgcccgagcgcccgcctcgcgcccgcctcgcgccgcctacgccccgcgccggtgctcctgcagcccgggtggccagctctccatccctcctaggctccgctcggctcggcgcgcgcctccccggccccggcgcagcggcacctgcactactcgcccgggcggagcgcagccaggtccacggtgaagcctagccgggccgggcctccggaaccgcccccgccgcccgcctattgggcgccgcccgcaagccgggggtccgattggctcagccttccgcccgtcgcggcgcgaaggaggcgagcccatttcaaggtgcgttgaagtgtggcgagcacagagccgcagaatcatgcgcattgccggggagaaggtggtatagcgtctctgcccgcttctctctcggctcacactgcgtggcaagtttctggtgagggaaatggtagcttctaacgggaccctggcgggtctcaattaccccggacaggtctgagggaagtggagcccccgcccactcatggaacccaacatccggtttccatccggcaaaaagcagttcccgagaggaccatgctgattctatgatggggaaacccaggagccggcggcccgggagagccggggaacgtccttcgccggagatcttttcaaagaggtcacgcgccgcctccccaccccgtctccctccgcacccagacacgtccccagagcagcgcaccaccccctccaaacgtgatgcagacc

SEQ ID NO: 31885 - DNA, 944 bp, Homo sapiens
  chr11:134201446-134202390
  hyper
cggacgccttttgtacgttcttcctgatgtagcgctgcgaggggcgactttacctcggcgtttgacaggtacgcagcattcccgcacccgcctgcgcctcgcgagcagaaagacggcggactctgcaccgctccacgacactggggacccgccccggccagacccgtcccctaccgagaccttgtccccgccccgcccccggccggggccccgccccgccagccccgcccccgccagccccctctcctaccgagacctcgtccccgcccaccagccccgccccgccccccccccgacagaggccccgccccggccccggccagccccgcccccgcttgcgcgaggcctagggctgcaggcgcggagccgcgagccccagccaatgagcgccggcgggccggttgcccaggcgaccagtgcgcggctccgccccccgcggcgaggctcccgcgcgcggctgagtgcggactggagtgggaacccgggtccccgcgcttagagaacacgcgatgaccacgtggagcctccggcggaggccggcccgcacgctgggactcctgctgctggtcgtcttgggcttcctggtgctccgcaggtgagagagagcttcgcgcagcacctgccggaccccacattccccagccctccgcacctcgggttctctcctcccgcgacccgcgaatcccgagttcccggggggagcagccccagctgcttctttctgggagctccccaatacccccgagttcccctgcggctgcaggcactctactcctgccgcgcgatccaggcctctgggcgacacccggcgtgccctcgggagccggcgtctgtgccccgagccgcccaccccgccgcgcctgtgacgccgggctctgccccccgtggacgcccgcagccctccagccgtcagagccctctcagacgcaccccatcgcggcccc

SEQ ID NO: 31886 - DNA, 279 bp, Homo sapiens
  chr11:134281604-134281883
  binary
cgcgcgcccgggaggacatggcgtgggcaccgatggggacgcagaaaggggctctgtgcgcggcggggcgcccgcgggggcgcggggagcactgacctgcggcgacgagtccggagcgtctccggtgcggtccatcgcgggcaacggcccctacgccccggccccggcgcccctagaccgctgccctgggccgcgtgcggctccctccccggggactgtcgggctccgggcccccgggggccacttcatagccgcggggtccgcgcgcccgcccgcccc

SEQ ID NO: 31887 - DNA, 1317 bp, Homo sapiens
  chr11:1410711-1412028
  binary
cggacgtggcagccggcgggctggaggctcccaggtcccggcctcgccctggcctcgcctcgccccctagagtctccccgagcgctcgtagcggcggggcggggtggggaggcgctgattggccggcgcgggcaccgcttgccgccgccacggcatcccgctgcgttcgtacaggctcgtgtcgactcggctccgttgcgcggcccggctcggctcccctcagctgcgctcgactccgctgttcggctcggctgttcggcttggctacagggctcggctgttcggcttggctacatggctcggctgcgcggctcggctctgttcggctcggctcggctgctgggctcggctgttcggctcagctgcgcggctcggctcgtctcggctctgttcggctcggctcggctgctgggctcggctgttcggctcagctgcacggctcggctcggctcggctcggctcggctgcgcggccgctgacgggcgtgcgctgggggcgcggggcgcggggcgcgggcctcggcggcggcggcggcggcggcggcggaagccaggtgcccccgcccgccctgtcctctcgacgaggcggaggcgtcgccgcgggccaggcctcggactgccgcgtcggagtggacgcggggggcggcggcgcgggcggacgcgggcggcgcgaagcagcggggcccgcgggggcgccccggccgggtcggcgcggacggcactcggcggacgcgggcggacgctgggcggcccctccctgcccgcgcgcccgggcgcccctggccggcgccgggccccagagcgatgacatcgacggggaaggacggcggcgcgcagcacgcgcagtatgttgggccctaccggctggagaagacgctgggcaaggggcagacaggtgcgtgcggccggggcggggaccggggccggggaggccgcgctggcagcgcgctgggtggggggcgcccgagggaggccccggccgcgaagccgcaggcccggcccgggccccggccgcgaacaatgggcggcccgtgcgcccccgtccgctcgtgcgccccggttccgccgcggatcccgcaggccgcttggctgcggtcggccgggcgcggcccaaggacacgcggcgcggcgcggggcgcgcaggcggacaggggcgcacgggacggcgcccctcgggccccgctgcaggtgcgcggcccgggccgcattgtgcgccccagcgaccgggcccattgtgccgcgggaggagggggccgcgcgggcgcccatctgccgtctgccgcggccgcgctaataggcgtgctgcccgagcagctgc

SEQ ID NO: 31888 - DNA, 1770 bp, Homo sapiens
  chr11:14665069-14666839
  hyper
cgtccttctctttcagtcccggtgggtcttcggactgccgccgccgcgctttcctcggcctgggcacgctgggtcggcgtggtcccggctcgcgtccctgttgggcggccgcggcgcgggtggcggcgggacaagtcgtgagcgcgcgctgggcgcgcgcccggccggggcagtcgcgggggaggagcgcccgcccgccgctcgcgcgcccaacggaccaggctggggccgtgaggtaactgttgcagccagcggaggtgggaggcgacactgagtctccagtcccgagaggtgcccgagggaaaaggaggcggcagctaaactggtcctggagagaagccccttccgcccctctcctcagccagcatgtcccggactccgccgctcctcagtccgcgcggtggggaccccgggccgtggcggccggcgcagccctgacgggttgcgaaccagggggcgccccgaacgcgggggttggggtctgggagcgcgagcggccgctacggtacgagcggggtgtgctgagtcccgtggccacccccggccccagccatgaggagggacgagcgagacgccaaagccatgcggtccctgcagccgccggatggggccggctcgccccccgagagtctgaggaacggctacgtgaagagctgcgtgagccccttgcggcaggaccctccgcgcggcttcttcttccacctctgccgcttctgcaacgtggagctgcggccgccgccggcctctccccagcagccgcggcgctgctcccccttctgccgggcgcgcctctcgctgggcgccctggctgcctttgtcctcgccctgctgctgggcgcggaacccgagagctgggctgccggggccgcctggctgcggacgctgctgagcgtgtgttcgcacagcttgagccccctcttcagcatcgcctgtgccttcttcttcctcacctgcttcctcacccggaccaagcggggacccggcccgggccggagctgcggctcctggtggctgctggcgctgcccgcctgctgttacctgggggacttcttggtgtggcagtggtggtcttggccttggggggatggcgacgcagggtccgcggccccgcacacgcccccggaggcggcagcgggcaggttgctgctggtgctgagctgcgtagggctgctgctgacgctcgcgcacccgctgcggctccggcactgcgttctggtgctgctcctggccagcttcgtctggtgggtctccttcaccagcctcgggtcgctgccctccgccctcaggccgctgctctccggcctggtggggggcgctggctgcctgctggccctggggttggatcacttctttcaaatcagggaagcgcctcttcatcctcgactgtccagtgccgccgaagaaaaagtgcctgtgatccgaccccggaggaggtccagctgcgtgtcgttaggagaaactgcagccagttactatggcagttgcaaaatattcaggagaccgtcgttgccttgtatttccagagaacaggtatgttagctggaaggcgaggtctgggacgcgagcgggttcgggtttaccgctgcagtttccgagttgaattcgcttatttcaaagcatgttaactttcagaatggaaaaagggtgtgttgcggggggggggggggaggaaataatgttttattctggaaaggattcttaaaatacaggaagccttttaaaaatgcagaagcaagtagcttttgtcattgaatagaaatcaaatagccc

SEQ ID NO: 31889 - DNA, 1717 bp, Homo sapiens
  chr11:16625979-16627696
  hyper
cgggagtagaggggccctctctcatctctactcccccgggttgctggctgggccgtgcagccagggccaaagcccggccgcaggagtacgcggctagcaccggcgcccgggacgcggacgtcatccgagcgcccattgacagtacagcgggaggtccggagcccagcccagtttgccgcaaggacggcttcgggccacctctagccctaaacttcaagcgcggccctcacagggtctcacacacaaaagcagcccaggacagcccatctcgctaacagcccagccccgccagttcagtcgaagacttatttttagtccccaaataggggctgcattcaatatctgacaattcacacaaaacaacattttcaaacttggtccgcctaagagaccgtaaataaaactcaaaacaagctggcgactgccaccttttatctgctccgaacacaccaattctttttatcttaaagctctgcggagcgccggggaagcagcccggcaccgagctaatctgccctcagcagccccgggccgctcctcccggcatcggagcacaaccccagcagcctttgcacaagccctttcccttctctgcccggccctttaagggagaaggaagaaagcagctcccgcgggagcggccgggctcgggctgggtcccggggcgggtggcagcaccgccccctgccctgggccgagcccgggagcagcggaccgcggccccggctgcagaggaacggcgggtggcggggccccggcagggcgccgagaaggacggagggcgccggctgggctcagggacgcggggcggggaagaaacgtgccggcgaccgtgcgctcggccgggtgactccctggcgaagtccgcgcccggcggggctgaactacccctcgcccccgctcccgccaggtcaggcaccactgccctcgcggccagggtaaagaggaccacagatcagtcagccttggatttcggatgggcttggaattcggtttgtttattcctgaaaagatcattaaaaagtactgtccaaaaacggggggagggggaaggaagggcgacaagcggagggagctggaggcaactcgagcggtgtcccgaaaaagttgcggcggagcggcggtggggtgagggtgggaggagggagcgcaagcgttttctagcgacccgggttttcttcatgaactcctccgagtaaactttatcccggcgagagagcggcggagatcctcgactcccgcccgccctcaaccagtgtcaaccccacaaacagcctaagtttccaaaccgaaatgggggtggggtgggggtagcattaagaagcccagaagctcagcgggtcctcccgacctcccgcacccagagcctgggtgacactgaagcgctccgaacactgtggcgtctcagtcacacagcgaatcaacccaacacttttcaagaaaacaaaatatttgctaggaaacttactttgcatttagtctctattctttgggggatgcggtttaggtcggctcgcaagggaagcccgttttgtccaggttggatattgtctacgtatggatcagcccttggatgagggtttattttaatttatggcttatgcattcttttaaggtcgatttacatgacctccggctacaactaagacagccgaggagggcactccagtcgtcagtcggccaaacccacaattaaaacagccctccccctagtctc

SEQ ID NO: 31890 - DNA, 885 bp, Homo sapiens
  chr11:16628231-16629116
  hyper
cggacgaatacttaggatggcgataacagctttctgttgtcaaaggttgcgttgtgtccctgtccctgcccttttgccttaatgtcctacgcacagttatctacggctacaacatgtgttttctcagggtggattttttggaggggaggtgaaggggagaaaaacagacccccgccacgcagatctgtcactccggaacaaggcgcaactctccaagagggggacgcatcctcgggatcagcgcgtccaccagcgagcggcgggcgcccgggcccctttctctccctccactccccctccgcgtcggcccctcggagcgccctcctcccgctcctcctcctcctttcccctccccagccaagtacgcaaacccgccccggcccggcagccgcggctcccggccacccgcgccctctcggggctccgctcgctcggctctcgtccctctgcctgtcctgccccagcccctcggtcccagctcacagaaactaaccctggagtgcccggaagggcaggagcggaagacgccgggggacggcggcccggccctgggctcctgccccctgccccctccggcgccccaacaggtagctcacagcgggccgcgcgccctggctctgcctccctcgctctcgagatcgctcgctccgtcccggttacctgggcgggctccaggatggtaccgcgcgggagggctccttgtgcgctgcgccgcaggagtaaatggcattaaagaaaaagggaaagatacaaataaaaaaaattaaaaggaaggggagtcggtgctaggtcaattgtcacagtccggggagcaagggaacagaaccccccagcgccgcggccggcgtagcccgttaactcaagtctgcgggggtgtcccgcccc

SEQ ID NO: 31891 - DNA, 444 bp, Homo sapiens
  chr11:17717322-17717766
  hyper
cgggggtgcgagcacagggtcagtgggcggggagggactggagagcgctgggcagggcgaggaggtgggagccgcgctagagcgtggggaggggacccgcagtgggcgcgcggccttagagaggggccagggccggggccggggccgggccggggctgcggtgaggggaggcgcgtggccggccgcccccagctgtggcgtcgttcaggcccggcttagcggtgccggggcgagggattaggggcagtggccgcacctggcggggcggccgcagggctaatgctgtgtgaccgccgcggccccgcccgacaactggcttcatcccgccctggaggcctgtgggctcgttagccccgccggcgtgtgcgcggggtgcggctgcgggcggcgagtgcacgtgtgccgcggggggccctgccgctggcgctgacggccaccggctgc

SEQ ID NO: 31892 - DNA, 524 bp, Homo sapiens
  chr11:17742758-17743282
  binary
cgcggccccacccctgcttactaaccgagccctccccgcgcagaacccaggcccgggaagagtgcggcggtgtcgagcctagactgcctgtccagcatcgtggagcgcatctccaccgagagccctgcggcgcccgccctcctgctggcggacgtgccttctgagtcgcctccgcgcaggcaagaggctgccgcccccagcgagggagagagcagcggcgaccccacccagtcaccggacgccgccccgcagtgccctgcgggtgcgaaccccaacccgatataccaggtgctctgaggggatggtggccgcccacccgcccgagggatggtgcccctagggtccctcgcgcccaaaagattgaacttaaatgcccccctcccaacagcgctttaaaagcgacctctcttgaggtaggagaggcgggagaactgaagtttccgcccccgccccacagggcaaggacacagcgcggttttttccacgcagcacccttctcggagacccattgcgatggccgctcc

SEQ ID NO: 31893 - DNA, 266 bp, Homo sapiens
  chr11:17757396-17757662
  hyper
cgttggggtggccagagccgcaggcctctgttccccccgacggctggggggaggggggaagagggcgcgcgcccccctccccggcgccaactccccctggcggccgctcccatgggtgtcgctgggccgcgccatgcctaagggggcgccgcgatgggccaaggggacgagagcgagcgcatcgtgatcaacgtgggcggcacgcgccaccagacgtaccgctcgaccctgcgcacgctgcccggcacgcggctcgcctggctggc

SEQ ID NO: 31894 - DNA, 128 bp, Homo sapiens; identical to SEQ ID NO: 28373
  chr11:1845553-1845681
  hypo

SEQ ID NO: 31895 - DNA, 242 bp, Homo sapiens
  chr11:1868068-1868310
  hypo
cgtctcttcctctgggagggaaaatccacgaagtcagggacctggagttatttgcagctgtgtcagtgctgctggggcgaggcatacacctgtgacgggacctcaggacggggacacgggtctgcatgaggattgtctaacagtccctacaagacgctggggccaccatgtacactggagtcctctggcagccagtgttccccgttgtgcggggctggccgtgaccacgctggaaacccccc

SEQ ID NO: 31896 - DNA, 1762 bp, Homo sapiens
  chr11:19733708-19735470
  binary
cggggtcatggagcctctcccggcttcttcaggccactctaattacagagtctgtggtaggttgcgtggaggagctgtctcggggcgggaagcttccctgcgtattgtatttgcctataaatacttcaaatagttaagtgaaatgtgcagcctttgaaaactggagaggaagccgttgggaggccccccgcccagccggcctggaagagcaggcagagaaatggctggcgcgctcttaaagcgggagacgagcttcggccctgcccaagccagatgggggcagcgaggctgcgggcgtgactccggaagactcaaaccgttaaggtgaccggagcaatttgaaaaaggaaacaaacttccctcgagccgtgcccgcgtggctctggggcggacggttgcgttcgaaagggcatttttcaaaagaagggtttcaggaacgcaggggtgtgggccccccgggaggcgcgcggccggggcagtgccgcaaagcggccaccagcccgctttgtactcgcggccaagcgcggccccagagtttcggcggcggccagagtttaggccacaccctctttgcagtgagacccgcggccgctgattggcgcaccgtggaccaatgggcgcgccggggcggccccggctgtcagcgcgcgccgcagcagcgccggcagcagcctgtcctcccctgcgctgagccccgcagccagcgcagccttcccgggaagcgcggcggccgctcccgagcgcagccctgcccggcccgccagccgcgcgtcccggcgcccgcgccccacggccacagccttgcctctatctagctcacggagcatgtgcagacccgcaggcgctaaggtgctctcagtccgggggccttctgggcagcggtgactgtcaccccaagagagacctttcgggggctcttgccgcacctctgctgcgtcgcgggtgacactgcggtgctcgcgagcagggtggcagctgcctctcggtggagacgtcttgggacccttgcgcccttcttctctccttccttcgctgctgtctcctttccttccttggctgctcgctctttctctcgccggctcagacccgtagcctccggaacgggactcgtgggtcgccgccgcctctgtctcttccaaaggggcctcctcacttcggagatgcagtgacaagttaatatgggcgtccaagcctctgtttcccaggaggaaatttgcaagaggcggcagcccctgagcgcccagagctcttgaaaggccacccaggagaggtgtgagacccggcggcagcatccgtccaggtgggacccgctgagcgccgtggccagtcccccattcccatcccggcaccccaaaggcgcgctcgcccgattgcttcgagttccccgacctggggattttttttttagccgctggtggtgggcgcctcgtgggctaaggcccggcgcctgctctgctacccgcgctgcctttagcggtcgcccccgccgccgctgccagggacgtgctgggaaagcccaagccccgggagaagatgccggccatcctggtcgcctccaaaatgaagtcgggactgcccaaacccgtgcacagcgccgcgcccatcctgcacgtgcccccggcccgggcgggcccccagccctgctacctgaagttgggaagcaaggtggaggtgagcaagaccacctatcctagccagatccccctgaaatcgcaggtgctgcaggggctgcaggagccagcgggggaggggctcccgctgc

SEQ ID NO: 31897 - DNA, 974 bp, Homo sapiens
  chr11:20184515-20185489
  hyper
cggtctccacagcctcctaaagaattcctaaagcgccaaagaggaaaagtgagggcgggggcgagggggcgagggctggccgcccgtgaaaggaaaaataaatcctaaggaagcaagaaatcggacgaaaggatcttactttaagtgatctccttgaacgcgtcttttcaaactccgcgatagcccaaggagctgcgcggcgcggcggctgcggctaagacctgtgactaatgccatttgacctgagcccatggggttttgtgcgtcctgccattcactgttatgtcgttatcttcaagtttatttcggagaaatcactcgcgttctttgtctcaaggctgagctttctgtctatttctctttcaagagaaaagaagacgggaggggaaaagagagaatcggagtccctggtttggggtttaaggtccttgcctacgctgcgggggaggccgcagcagatccggctggggctccccgggcctaggtggccaaagctgccgaaacctgccttggatagtagaaagagcgtgtcggaacgcactctgggggtttcgttccccccgcgcaggggagagcgagcatgttcctgccccgggcgccgtgcggtcgcagcagcagcgcggccctctccagtgcgagccgtgcctggaatgtctcgggtaagcgaagggccagcaagcgaggcgaaacggacactataaagcagagagtggtgtgagcttccccgccctctgaaaagatggcaagtctccgtttcgggaaggctgcaacgctaaggtcaccctttgcaggcttcggacccccagtcctccatgctccctgccggagcagccaacagagtgagagcgcattttggaaagattggccggatgccgggcggcgacagggaaaagcgcccgacgcctggctttggggtggggggtgtggggagggggggcagggagctaacgggcgaggcgaaggaggagggctgc

SEQ ID NO: 31898 - DNA, 1398 bp, Homo sapiens
  chr11:20618614-20620012
  hyper
cggctgaaagtgggggcaggcggggagcccgaatagcgcctcagccaaaccccgcagccgttcctgcgcgtcacccgcctctgcagagcctgacgcgcggcagtctccacgccggaacccaagtgctcactgggccggggagggccagcgggcgaaatatcaggcctgggggctgagcgggggcgctgggcgtcactcaggcccagggccgcagctgggggaagtgagaaggccggcaggattctgcccactctgcgcagttctcccttcctcccggggcagccaagtctgtgcgccctggaacgtccgggcgccgcgtagactctccattcgcacctggccctttgcgggggctgctcaaatgcaaattgggaaactggccagaaccttccaaagtcgtgactgtccctcggggaagtcggccggggaaccgcagagggaggcctacaccgatctttgggcccgcctcgtggtaccgctccggccgatcgctctctgagcccgagcctgcctgccaggcctgccttctacagttctcgcattcgtcttgagccctctcggaaactggggactgtttaggcagaaacactcgtaggtccccttggcgtcccccaagatgccaagagcctgcggggtgcttctcagcgccagccggaacttgagcaggcacccctgcggaattctcagtcccacccactcagacgaccctcctccagccagagtccaccacagcccaccctaccctcttaaccctcgttcccgacctctccctacgagcgggccccggggagagagcgactgaccctagcgacagcccggcgggaggtggttgggatcttctccagggttcaaaagcgactttctgagccccaatttcctcagctttgcaattggtatagtttctgaaaggccattgctaaatctaaccgagataattcatggatatcccttgcacaatggttgagtattgagatctcaatagacgttagctcaaaactgcaataaaaagcgacctgaaatcctcaaggcgtctcaaaagaaagatctcctcctcctgcccccaccaaaggcaatgcagaccgtgtgtccccagccagctgccctttagaggggctaggcgggaaagccaaccagcggaggcatccaaacactctcgggctctccagaggagcaggagggtgccccttagtgcccccggcgcccgccgcaatctgccactgcagcctacgcctgcggccgcggccgccgcggcattgtcctcccgccgcgtgggacggcccagccgctggcgacggcgcgcaccccgaggcagtgggctgggctgttggcagtagggaagggaaaacgtgctgtctgtggctcctcatccccgaggccaggggttccccgagctagacc

SEQ ID NO: 31899 - DNA, 448 bp, Homo sapiens
  chr11:20621337-20621785
  hyper
cgacgaggagaacaattctcgcagccctaggtatttgtacttgtgagcgtcacctgaggtcgcaaagaggtttcctaggctgtagagctgagaggttggctgtggctcctaaagacccgatcccgggcactgtcctcggtgctgaaaagccagatgccggtacagaggcgagttgctctgggtcctagaggctactgagacaaatgctggctgaagccgaggtacctagatttgtgcaaatcgaggagttctattctgcgtgtttgtgaaagggggttagacgagaggagtgcggtggaggcgaagataataggattattcttacagtgtaataataattattggtgctaatgtttaggaagccgtgaaagataacacgaggggagaaagtggatagaaaaaccaccgctggcagttcttttcatttgaaagtgaattgggaaaaagc

SEQ ID NO: 31900 - DNA, 956 bp, Homo sapiens
  chr11:2290844-2291800
  binary
cgctcgggcctggcgctcggctccgcgggctcctgggggcgcgacccgccgggcctgcccaccccgtccctccaccccggcccccggccctccctcctccctgcctcccggctgttacctcataggtcgagggcgctcagtagccccctaaccagctggagaagtcgagtagctcgcgctccgcaggactcagcgcgccttcgcagccgctgtcgtccgacgagtaggcggaacgcggggagccgggctccgagctgcccccgcggcccggggacgaagaagcgcgggagggcgaggcggcgaccggggtggtccctggcggcccgcggggcgcagacggccgcacggcctgcggcctcagccctcccgccagcgcgttgcgcacggcgtcgtgctcggccagcaggcgctgcagcgcgcggatgtactccacggctgagcgcagcgtctccaccttgctcagcttcttgctggcgccgccgtgcggcacgtgctgccgcagcgcctggaagcccaagttcaccagcttcacgcggttgcgctcgcgctcattgcgccgcgctacggccgctgcgccgcctccggtctctgcggtggccggtcgccgccgccggctgcagcgcaacagttccggggacgcgggtctccgccgggcagcgcagccgacagggacggggggcgcagggggcgcggacctgggcagtgtgccgccgtccatcgcgcctgcatccacccgcccgctccaggtcccggcgcgccgcaggaaggtgcaggcagaggaaccggaggcgacggggaaaactgtggcgccccaagggggcttctggcacggcgccgccaggcaactccccagggcacgcgtcctaggtcgtctggagcccggggataggaggcctagtggtggcaggccgtacgcgccagggagcgtgggacgctcgtgtcccgcgcgtgcggcc

SEQ ID NO: 31901 - DNA, 947 bp, Homo sapiens
  chr11:2291817-2292764
  binary
cgcaggcgcggcgcaggcggctggtttttaaatgtatagataaccctcctccgcgccgccgccgtcgcctttctcacgccctccttccttcgcctcgccctcccgccacgcttcgccctccccctcgcgcgatcacattctgtaaggcccaaagcgtgcgcatgtccccctagcccatcccccggacgcagtccacagatccccagtgcgcccaactggcgaaatctgcgagttcccggtgcgccccctgctcccggcaggtgcttagtgcgcccccaaagcaaggtacgcaggtcctgggttgagccttcccgtacccccaccctaaccccgcgcgcagccccgccagtcccaagagccgccagaccttcgcacgcgcagcgcgcgctgtgggagggaaggcgcggccctggcgacaacacggctgttcgggaggcgcgcaagatccccgggggcagcacgcgccgcgcagcccacacccacgccccaccctcctggggccgaggaggcgggggccagggtctcagccaatcgtgggccacccgtttggccaatcgcgcagggcgcggctccacgcccggccccattgaggaagcgcgtacgcgtggcgcgtggctcacggggagcatcgctaacaaagctgggttcctgctgggccccgccctgctcctcgcccccgcgactgggctgggcgcgctgtcccctagcgcagctatgtcccgagcgcgcccccacctgtgcgttaatctactgggaatgggggtggactgcgccttacctggggcggggtggggcttaaggagtggtcgagactgaggcggggtgggaggttcaggttcccggggcgccttccccaacccgccccgctttccccgtccctccacgcgcaccctgcctgtggtttccgtgcgcccccggcctgagggctctgggcggcaccttaaccc

SEQ ID NO: 31902 - DNA, 208 bp, Homo sapiens
  chr11:2465439-2465647
  hyper
cgacccgagcgtattcgccgcccgcagctcgcgcgcctgggcacccgggggcgctcacagtgatcgcggggccagcacaccctcacccaggacatccctttcctccccccaaccccaactccggagtggctcagagggagggaaagtagatgccggcaccctaccccgcccctcctgcccccgctgtgccgttctcggtcgtggtatc

SEQ ID NO: 31903 - DNA, 828 bp, Homo sapiens
  chr11:2466019-2466847
  hyper
cggaggcagggccaggccggtccgtggggagagggcgggccaagccggtgggcgcgggcagggacgccctgtgcgcgccggaccggcgggggcggggcgtgcaggcgggggcggggcacgccgtcccatgggaccggccctcggccactgccccctccggccccgccccgagcgcccgggctgggccggcagcggccccccgcggcggggctggcagcagtggctgcccgcactgcgcccgggcgctcgccttcgctgcagctcccggtgccgccgctcgggccggccccccggcaggccctcctcgttatggccgcggcctcctccccgcccagggccgagaggaagcgctggggttggggccgcctgccaggcgcccggcggggcagcgcgggcctggccaagaagtgccccttctcgctggagctggcggagggcggcccggcgggcggcgcgctctacgcgcccatcgcgcccggcgccccaggtcccgcgccccctgcgtccccggccgcgcccgccgcgcccccagttgcctccgaccttggcccgcggccgccggtgagcctagacccgcgcgtctccatctacagcacgcgccgcccggtgttggcgcgcacccacgtccagggccgcgtctacaacttcctcgagcgtcccaccggctggaaatgcttcgtttaccacttcgccgtgtgagtatcgccaccggcgacggccggcacgaaggtgcttcctgagagctggtgtgggggagctctgtcccagcgccacctgccccgtcggagctgcgaccccggagcagaggagggaaggaagtggggaaac

SEQ ID NO: 31904 - DNA, 238 bp, Homo sapiens
  chr11:27740003-27740241
  hyper
cgatggtgatgcgggcgccttggagttcctttgcagcacgcttggaattgcatcagactgatcagaaatccccccgcccccaagctcagcccctcccgccacgctcccctgcccgcccctcccctcccctcccttcgcgtagatctgactgagaaaacgactggatctcggaacaatctgtgccccattcgctgcaggcttgctccgtaaaccctgccctacgctccctttgtgtgcc

SEQ ID NO: 31905 - DNA, 704 bp, Homo sapiens
  chr11:27740460-27741164
  hyper
cgggggaggagtccagaacgaccaaaccctggggcgaaaactgccaccgggcttggctctgtggccggaacaaaaggcctgagaagggggtgggggtgagggttataggagtgtggagagcctggtggcccccgcccaggggcgcctaagtccctgagctccctgaagagtggcaagaggataacgcagccgcgcgttccggcagttcgctgtcccccgggggtgcaggcgggggcgggagaggtagaacacaggtctgggcggctccgcgccgcttctatctcacccgccaagcccctcacctccacccaccgccagtcccctgcccacccgggtggcggcggcggctcagcgactagccggccgccctccaccggcgcctccggacgcaacctcgccctggcagggcggtctgcgcgtccagctgattggtggctctgtccagccgccgcacggagctaaaagtgttcttctccaccgcctccagccgcccaggccccctcgcccggcccgctctctggctcttcggtccggaaaggaccttctactcccaggcggaggctcccctttccctgagttaccccgactgactcggacctgggctcagtgaggcatccggcccggctggggagcggagcgcggtctcggcagctccccttcccttgagaaagcgggaaccctctaagccagcgcccgaaactcgc

SEQ ID NO: 31906 - DNA, 715 bp, Homo sapiens
  chr11:280028-280743
  hyper
cgcagcctgccccacctccgacccttgtccccgcgctgtctcccgctgcgcccagagtacaagaagaagtaccgggagcacgtgctgcagctgcacgctcgggtgaaggagaggaacgcccgctccgtgaagatcaccaagcgcttcaccaagctgctcatcgcgcccgagagcgccgccccggaggaggcgatggggcccgcggaagagcctgagccggggcgcgcgcggcgctcggacacgcacactttcaaccgcctcttccgccgcgacgaggagggccggcggccgctgaccgtggtgctgcagggcccggcgggcatcggcaagaccatggcggccaaaaagatcctgtacgactgggcggcgggcaagctgtaccagggccaggtggacttcgccttcttcatgccctgcggcgagctgctggagaggccgggcacgcgcagcctggctgacctgatcctggaccagtgccccgaccgcggcgcgccggtgccgcagatgctggcccagccgcagcggctgctcttcatcctggacggcgcggacgagctgccggcgctggggggccccgaggccgcgccctgcacagaccccttcgaggcggcgagcggcgcgcgggtgctaggcgggctgctgagcaaggcgctgctgcccacggccctcctgctggtgaccacgcgcgccgccgcccccgggaggctgcagggcc

SEQ ID NO: 31907 - DNA, 858 bp, Homo sapiens
  chr11:2949962-2950820
  hyper
cgagaccctgacgcgagggggccagcgcgattgcggggcgccgggtcccccaaggaggtgcagcgcccccgccccgccgtctggggttgaagtggtttttcccaaaggccccggtcccggctgttagggcgcagggctcgccgggacgcgggcagtcactcaccgcggcgggctcatggcgtgcggggtttgggctgcggggatggcctggagggctccgagggctcggagggtgcggcggccgcggcagccacggcgtcctcggcgggtgcggcgggtgcggtgcgttcctggcggctgcgaaagtcctgcagggcgcggcggttctggaaatcgatgagcgccagcgcgatggccgcgttccagcagctctcgcccgcgcagcggaagtcgatctccttgtggtcggtggtgacgatggtgaagtacacgtacttgcccgtgcgctccacgcagtccaccttgaggatggagtggaagcgcagctccttggggcgcgcgcgggggctggcggggaacaggctcaggcggtcggaggtgagcaccccgcgcttcttcttccatagctggaagaggctgtcgctgcgcttctccaactcgccctcgcgtagcacctcgtcgggggatttcatgtcgtgccgagcgcgggactgggagcggcaatgcgggcggtgacggcgccggctctgctcctcgtggccccggcgcggcctttatagctgcccctccccgccccgcccctccccgccccgccccggccctcgggccaccccgcccgcctgagccccgcgcgccccgggccataccctccccaagcccagccgtccgggcccgcaccgtcgcgtccgcgctctggtc

SEQ ID NO: 31908 - DNA, 970 bp, Homo sapiens
  chr11:31819792-31820762
  binary
cgtgatccctaaaaccaccaaatcgccggagaattggggctggatagagttgtctcttgttgttgtcagcccacgtcgtcgcgattttattcaccgccgcatggcgttgatcagatggaaaccatatttgtctccctctgagacctaacccccgccttatgcttttggagtatggactctttaaaacccaagaaaggcttcctgggctgggaaagggggctagggagggagggggaccctcttagcaccaaaaagtctgaggattccccgggaacgtgaagcgaagctcaccaccggtgcccgctacccccacgccggcaactctgtgcttcgtttggcccacgtgtcctccccacgcaactaggggcgacggtcctgtgcctgaggtgacaatcaccccccaaaaacctcacttgcgggtgggggggtggtgattgccagttgacccagaattttctagcaactaggcgcgttaaagtgaaaagcccctggactagctccacctccggccccaaccatcacaggcggaccctagctgatttgactctcacttcccgccctcagactgccggcgacgaaaatccgcccgaatcgggcgccacctctggtggaagctgctgtcctcggcttctgcccaactccaagaagcggaaggggggtgtatcctgcgccccaagctcatgggagcccacgcaccggggagagcccggagtggaggctctgggctcagccctcccaggcctaggccaccgtgccctgagtccctccccaagacttctcggactaagtgggccagactcttgtcaggggagggatcaccaggacctcagattgctgggggcggaggggtggacgctcgtgagtgcgaagttcgggtgtcacttgggtgtgtccagtgtctacaagtgggaatcctacggtttcaaaagtcaggcagggatggggttgcctacactcggtggggtcaatc

SEQ ID NO: 31909 - DNA, 1443 bp, Homo sapiens
  chr11:31825604-31827047
  hyper
cgccaggagcctgagcttcttagcaataaataagctccaaatatagaagaggggggaaaatatgatgagcctctctgacatttgtctttaaaataaaactagctgcacgtcaagtttgagcttaatttctggaaataggcggaagtcgctccggatcatgcatggaaggctaattgaaaagatcagtcggggcgcttgtggcagccttgtcactttgtgacagtgctccgctccgggaaattgcatcgtcacgacaaacgggaccgtgataaaacgaccctttccgtccttatttgtagatcactcagacgagattgaactgcacttgtttccccttcgaggggagccgcgttttcagggtagccgaaggcttggggctgagggggggccctcaccaaggcgcgggtgggggccggagcctcaactcgatgagaagtgacaggcgtttgggggatctgggctccggccgggaccagcgcaagcagggactttgcggggacaccgcttctccaacagagcaaggcctggcccacgtttccggtttctcctaacttccttttattgccttcctttgcttcgcaagttccatctacccctccagctacagagccccacctctaggcacaggaagcttcccggaaaaagaaaggctgtcccagaaagagaccgagagagactttccaaacttcgggcatagccacggcaattcccagtctgctaatgccaaggcgggcgcgtaaggccgcctaaatctagacctccctcctcactcatttcaaaaaataacaacgtgccagccacctccgcagataccgccggctggtgcttgcccaggagacgccagggccagagcgccactcccagcatcgaaatggcagagagaaagcgcagctccaaattccccttcagaggttaagcctcaatcattgtgtcccttccctagggactgctggcgctctcgcccactggcgatgattatgcgcctagaactcgaccgcgaagcaactaataggaaaacatatggtgtcaatttggatgctccgcgcctcgcgcacacccgggaacgagcggcacaaagccctgccggccggcccgcgaccccgcgcccctcggggcctgccagccgggccgcagcgacaaacgctcagggctgcgcgccctggctggggcccgcccgagagacagcctgcggctggggagtctgagctccaaggggagagcccagccgccgaaggcgagcctaccggccaagccctggggtccggcaggttctgcacaactactcccgcaaagctcgccacctttgtgccctttcctcagctacgcgcttaccagccccggaagcaccagggggcgaccggcgtttccaaaacagatggataaggtgctggggaccctccttaagcctgtgtggttcggccagggcaggctgctggaagaccc

SEQ ID NO: 31910 - DNA, 929 bp, Homo sapiens
  chr11:31848333-31849262
  hyper
cgaaccggagaagcgaggggagcctgagtgactggggcgcacatgacccccctcctggggcctttgggctcaacccttacttttaacttgttctaacaggaataatggagtagtactactaatgcatggtcagaaggggcttttctgtctagaacgcaggcggcgggagttgcaccgccacagcccgggagaccaaagagtctccactccccgctcccggcgcctcctcgccgaccggagccccgagcccagtgagcccagccggtcccacgtcgagaggcgctgggttgggagaagttctgctggtcgtgggctcggcccccaggcgccaggccgagtgcccacctcggcttctttagggggcctacagcgggcagccgagcggctggcggacccggagcttgggaggcgaccgccaggctggtgcccggcctgacccggcgttcgcggccgcccgctcgcccgccgcgggccgggagcgtacaggagtgtgacgcagattgtgaaaacagaagggagggagttgggtcatttccttcgctaatcatcgccccctcctgctcctcctccccacccccatcccatcctcgccgccacccagcctcgaactctcttccttgccagagtctgcctcactttgagccagtggctgcactttatggagaaaatatatgtgcccatcactcacccatctatttgcagcgtccatggagcgcctcggggaacacgcatggacaattaaacacacccacttacggcgggatgatgaggctttctgttaaccacatgtgttcagaaatggatacagccctaattttgacacggaatgcagctaatgcaccttgctatagatgtacgtccgttggaaaagtgtgtgatgggcacctgatctacaccaagagaacagggctgtctgcagaagacccagc

SEQ ID NO: 31911 - DNA, 750 bp, Homo sapiens
  chr11:3186017-3186767
  binary
cgcgtcggccgagctggggggacagaccccctgattggccagggtttgtggtggtcagacccagccaccttccctggcggtcccggctcctttaagccccaccaagtggggagccgagctgggcgcgccgcttcccactcgcgggccccacccgccccaacccgccaggcgccgacccgtcctggcccggggcgcccccaggctcccgcgctccccagctccccagcgcgcgaccggccccgcggcgtggttccccgcactggctactgccagggtccgcggggctgcggcgcgagctcctggatcccttcggccggccccccgcggccctcggttcgctccggccctgcccggcggggccctccggatccttcccagcccgccatccccccgccgccctgccgccccccgggccgccgcgctcctacctcctaccgtgccgcgagctcggtgctccgggccggccgggcgcgcgggggctccactggcggcgcgggcctggctgcaggaaatgccagcagatggtccccccgcgcgaggcggagcgagggcgcggcggagggaggaggcccagggagcccggaggcgggaggaggaggcgcggcggccgcaaaacccgggccgaatcgccgcgcggagcgggcgcccaggggctgccccccaccggctgccgcttctcctcatcccccaaccccccgcgcgcgctccggggctcacacccacccgggcggccagaggtcgggacactcc

SEQ ID NO: 31912 - DNA, 1486 bp, Homo sapiens
  chr11:32455921-32457407
  binary
cgccggtctcctggttccactcccgtggggactagcagtcccggaatctctcggactctaaggggccccagacgccctcccggctcttgcgaacagtcaggctcctagctctgcctggctttggaggatgtcgggggccagtgcctgcgtgcactcccactctccggcctcctccccagccgccgcttccgctatcctcacggcccttgggaagcagctgggtaagagctgcggtcaaaaggggtaggagaggggggtgtcctagagcggagagtccctggcgccactgccccgcgcgtagggggcgctccccggcctacttaccctgattgcgaatagcgggctggctctcgaggcagctgggcaggtagggcgcgttaggaaacatcctggcctggccggatgacgcctggctgggcggaggaggaccgaagggcccgtagcgacaggctccggctgtgccagtgaactggccggaaaagtggacagtgaaggcgctcaggcactgctcctcgtgcggctccgcgccgccccagctcggctcctgtttgatgaaggagtgaggcggcggcggcgggggtggcggcggagccggtggcggcgcggggccgcccaacgacccgtaagccgaagcgcccgggggcgcaaagtccagcaccggcgcccactgcgccgcgccgctcacaggcagggcacagccgccgccgccacccagggaggggacggcgggcagcagcgcgttcaggtcccgcacgtcggagcccatttgctgcggctcagacccggacgccccgcggctcctccggccctggagacgttcagcgctggcctcggcggcgcctaacttggcccagatgccgcccgggtcccggactccctgctgctctggctgctgtaggcacccaggcccggagcggagcgtgtgctgagacgccggctccgggacacacgtggaagccgggtcctgcagcaagaggaagtccaggatcgcggcgaggagacggcggggcccgggcgcctgggctgccgtcccggctctgggtgggtgggtgggtgaatgagtaggtgggagggagggcgggaagtgggggagcggacaggcggtcgggttgcggagagcccccgggtgtgggcgctgccttgaactccttaccccagctgcctggctgccctcagcttcccaaagctcaaataagaggggccggcggcgcggggaagaggaggagccaggaggctcggccgctccattcactcagcagcccaagcccggccaggcagcgcgcgctgctccttgggggcgccctcgcagctggggtgagggcgggtccgagggagcgtccctctcggagacaccctcctcttcaacccaacacgcgctctcagctggccggtgtggcacaaccctccccccacctccccttcttggccttcgccagtgtgggagcctcgtctcactggagagtccgttcaggtaagcagtgagtcc

SEQ ID NO: 31913 - DNA, 989 bp, Homo sapiens
  chr11:32457416-32458405
  hyper
cgaatgcggtgggagtagagatggggttgttaatctaaaagagtggtttggagggaggggcaggtaggctccaagagggcgggaacttcaggaaagcgcagaaagaactcagtcaagcttcaaagaagcgtatacccttgctttgcacccttgagtctggctcttgcttctagaactgtcgggtaggggagtggccatgatcttggggtcactggggaaagaggtggccctttgtgggttccagaggtcgggactgaaagcgaacgtccctcagttgggtggccgggagttgcaccagttataagccgggcgtatttcgatcggctagtagttgtttacttggtgaggtttgcgccaggcggaaggcggttgccgcctacctaaaattggagtcagcagcacttagtttccctttccagtgaggaatatctaattcttctacggttaagccgggaaaacagcggctagtttaggagggaagaaaacccttgggcaaacgcccaaagcctgcgtatattccggccggagcatcctggcgcccagtttggggaggaggggtgaaggggagggtttggatacgaagcccggcagggagcgggtaactcctggagccactccgccgagcactgcctgtggccctggtcgaggataccattctggttgctcagtgattgaccaggaggcggaagccagttaaggggaccaaggagtggagtagggagaacctccatcggcccacgggcgcgagttagtgttcgaatctttgggagctcgaagagcttcgctaaatctgactcccttcgtctagtctctgtttggcagcccccgcgccccagagcaggtgtttggggcgggtagggggtgttttggtttggtttttggatcttctaaaggagtcagtatctattgggaaacaacccctaggcaaggagaagaaccgggggccggagcggagcgtgtttcagaggtgcgtataaaatcccaggggc

SEQ ID NO: 31914 - DNA, 472 bp, Homo sapiens
  chr11:3663265-3663737
  hyper
cgccccccgccccaagtctccgcccccgactccccacaccccttcctcagagcctccagtctggggacctttccgagactgtaaaggcggggccgcagtttggctccgcctgagaggggagggccgggggcggaggacccacttgaaggctgcggaagccgccagcgggagggagcgccgagggctctggcgggcgctgcgctgtccccggaggagtccggagtccggctgaaagcaaaggttctcgaggctaactgtagcccccgcgctggtaacccgacacccctttcccagcgccgcacgcggggccgggagcgggcgcgccagggcagggactgaggagcaattccctttctcaaggcctgcggggtctttctgcgggaccctctttggctgtgagtgatggggaggaaacttgtgagactcggcctctccctcaggcgggccctgacccggtcggcccctggtcccc

SEQ ID NO: 31915 - DNA, 865 bp, Homo sapiens
  chr11:369411-370276
  binary
cgcgccccgcacccctccccgcgcgccgccattggctccccgcggcctggctcggtccgattggttccgcgcgcgcggccggggcccgatccgcggtggcagccgtggatgctgttcggtcccgccgccgccccaggagcgcggagccgggagcggccgggcggggggcaccgcgaggagccgcccccgccgcccaccccgggcccgcggccgagggcggcctgggggggtcgcggccgcacccggtggccgcgcacggcggacaaaggaccatgcggggccgcgggcgctgagcgcggcggggcgggccggggatgcggcgcggggcgggcgggggccgggggctgcagcggcgccgctgagcgcggcctggggcgggcgcggcggccgcgatgccgcggctcccggtgaagaagatccgtaagcagatgaagctgctgctgctgctgctgctgctgagctgcgccgcgtggctcacctacgtgcacctgggcctggtgcgccagggacgcgcgctgcgccagcgcctgggctacgggcgaggtacggcgcggggggcgcggggggcgcggggggcgggggcggcgcggggggcgcggggggcgcgggcggcgcggggggcgcgggcggcgcgggcggcgggggccccggggcgcgggccgggcctcccaccgcacagaggtctcggctgggcccgaccctcccggagaccccgcccgctgttctccgctctgcgatttggggggagggggcgcggttcggctcggcccggacgctcgatgacgtcggcagtgacgcgcgcgaccctcccagagagggtccctgactctgggatctggcttggatccggtagtgaggggctgac

SEQ ID NO: 31916 - DNA, 1007 bp, Homo sapiens
  chr11:416533-417540
  binary
cgccagctcctcccgccctcagacccagccagcgtcctcggtccgcggccgcccctgcccggtgggttcgacgctcagcacccagcaccctgcgggcgactcccgctcagctcggacgcgccgcccctccgctccccgtgcgcgctgggcccccagcgcctgtcctgaagcaggaacgtgggtaaaaggctgcggccccgcaggccgaggggctctggttcgctcccctaccccgcgcccacctgcgccctgggcgccctccaagtgaggagggcggagaacgaggacgcgcgcgggaggcgggcacgggggtgcggctcggggcgctcggccggggcagaggcgcgcggatggcggaagctccacccggcgccgggcgagctcgggccccagcctgactcttggtccgccctcggcgcctcaggaagcctcgagctgggatccaggcttgggcgaccgaggtgggatccctgcgcgcctcggcgctcctagccccgctctgttctgcgcgagggtcaccaaaaagccgctgaccacgtcgggcagaggaaagggtggcccccgcccccttcgcccactttcctcccttcccccagccctggaaagggccaggacgcgggcgagctcgggcttccgggcgacgcgggaacctccccggccccgagccatttcctgagagaccgcgcccagggacaagcagcgccccgggccccgactccaggcctgcagcggctctgggaggactgcgacctccactcaccttcgcgggtctgatggcgaccgccactcacctgctgccaggacctggggctcgcgccgggcgggggcggggcagctcacctgagccaggtgcgcagcggcaacagccccggcggcggcgtagccccggcagcggcagcaggtgcggccccgccccgcagtcagggcgggggcggaccccagcgtcccgctctgcgcccaaggctggcgctggaggctgcgctgctgcccgggagccgctgccgcac

SEQ ID NO: 31917 - DNA, 853 bp, Homo sapiens
  chr11:43603346-43604199
  hyper
cgcccacaccacgaataaccccattcactcaatgcaaagaaaaggatctgagcttaaggccaagtcagaacctggaatatgaatcagtttaggacattttgtggtcatttttgaccgtaatgatccgattctgcaatatgggggtggggaagcccttgagggaggggctggaggcccttagtatcttatgtcctggtgcgggggacccggaggtgaggcgagccgcggtgaattgggtagatccgaaaaagagggaaaacacccaggcaccgcccgatccccggagtctcttcctcccgcgcctgcttccaacctaatttggggcgttttgcagcctcgggtctcccacatctcctctttttcaaaactaagtagcacggaagggggtaaaacaggcgagaactggggaagcccccgcagagaaggagctttggagagatgcggttgtgcccgactcagacgcttagcaggaacagaagcagcagcagcagcagcagccccatcccggcctctccaggcgccggtcctggggaggggggcaaagctgcaggagaggggagagtctgtgagtccccctcctccccctccactcattgcagtcctgaccacttcggtcacaagtggcacaaatcaggccttcaccacgctccccgcgcccttcgcctgctaggaacactgctagacgcccttgcccttagggactgggccagaaggacacacatacacacatgagtgcccacagggacagaaatgggtagaagatgggtctagagacaccggagttcaagacccgagggctgcgaaccttcacgttttcggggagggcctgaatttcccccgtatcacaaccacc

SEQ ID NO: 31918 - DNA, 1204 bp, Homo sapiens
  chr11:44337578-44338782
  hyper
cgctgcgcgagttatcagaaatccctggagccaaacactacgggggaccggcggaccaaaaggttcctaactcctttggacctccagggctcgcagaaaagctgccacttctccagagccgccagggcgggcgcgagagcagcgagtccgcgcgggtcctcggcgcgctcgccagacccagccgaccgcgtgactcaccacgtcctccgccgggaggaggtcagcatcggccctgggcaccggtccccagccgccgcagcccctgccccaatctccccggaatgcggacgccgccgcgccaacccgagcctccagtcggatagaggcagggagggaggcactgcccacgacgagtgctctccaggcgctgcaaagagcaggggtctcctaggggctttgagaccgcgggcggacctcgggggagcaggcgtgggacccgatctgtgccggctcagcagggccccagcagcgccccagcgtcgcccgcccttcctcctcgcccaccttacgctgggacttgcaccccgagtttaggggcttagccatttccggaactcgggctagtggactctggggaatcaggcgctgggagaggccttcgcagctgcgtctctcctgcccagcatattgtgttgaatgaggcaagggagtgagggggtcgtaaaggaaacccgcactcaggggcacaccttcatttatctgggaacagcgcggatcccagaggtgcgggataaaccaggcgttccagctgctcacacgctgtttggtaccccgcgtctatgaagcacaaagcaggagcggattggaggttttacaaactgaccaaccccgccgcccgcgcccgctggagggagacgcacacctttgccctgcatattcgcttccaggctctgcatctctgctcttggggagccggccacccgcttttccgcgcgggggctggggttctcgcctgaaggcgaagtccgcgtgcgcgatggaacctggtgccccgccctctctggcaagggcaaggccaagagcgcagggcggggagaggagctccggggacccgcggaaaacctggctcgaaagccctggaggcgagctctccaccgtgttcggtggccaccttaattcttgttgaaccgagaggaagttgttgaaaccggaagtcggcctctggggtctgagcccgtccaccctttgcagatcggtaacagcc

SEQ ID NO: 31919 - DNA, 680 bp, Homo sapiens
  chr11:46299162-46299842
  binary
cgtggcgccttggccagctgggctagccagccaggggttcccggtttcacagagaggaaagtgacagaagacgtgcggagggagacgcagagacagaggagaggccggcagccacccagtctcgggggagcacttagctcccccgccccggctcccaccctgtccggggggctcctgaagccctcagccccaaccccgggctccccatggaagccagctgtgccccaggaggagcaggaggaggtggagtcggctgaatgcccacggtgcgcccggggcccctgagcccatcccgctcctagccgctgccctaaggcccccgcgcgccccgcgccccccacccggggccgcgccgcctccgtccgcccctcccccggggcttcgccccggacctgccccccgcccgtttgccagcgctcaggcaggagctctggactgggcgcgccgccgccctggagtgagggaagcccagtggaagggggtcccgggagccggctgcgatggacgccgtcttggaacccttcccggccgacaggctgttccccggatccagcttcctggacttgggggatctgaacgagtcggacttcctcaacaatgcggtaagatgaagggtctccgttcccgttccacccctcggcacccgtcctcgcggcgcgcctgggcccctagaaggaccc

SEQ ID NO: 31920 - DNA, 702 bp, Homo sapiens
  chr11:61347876-61348578
  binary
cgccagcgctggcacccccggggcaccggtgctggggagcctcgggtgcctctgagggcactgcccggctcccacaggggcagcggctcctcgctccgccacacacgttgtccttgggctgttgaggggtgggggagaggtccttgtggggacactgcgaagccggtcccagacatccagcctggcagtgtccagactgcgggggaccggggtccgagccgctgccgctcgatcccgcgcccccggggctgggatgacccctgggggagcccgtgcggctccgggcggacaacagccccaggctggggctccgagacggcgtccggcgctgccgctgtcctgcccgccggtgcggggcgccccagcccgccggggccgcgcttacctgggctggccgcctccgggtcccggtacatggtcccctcgtcgccggttccctccgggctcctcagagccgcccgcggccgcgcgctgctccgccgccgccgctgggcatggggccgggcgacccccgggggcgggtccgagggcgggggccgagcgggctgcacctagccgcggagccggggagcgggggccgcccgccagccctcccgcccgcccgcggagcacgctgccgccgccgccgaacagcgccgagccgcctccctccggcctgcgcgccgcgtgtgcgcgccggagcgtgtgtgtgtgtacgaggcc

SEQ ID NO: 31921 - DNA, 217 bp, Homo sapiens; identical to SEQ ID NO: 28395
  chr11:61355118-61355335
  hyper

SEQ ID NO: 31922 - DNA, 89 bp, Homo sapiens
  chr11:61447990-61448079
  hyper
cggcgcggcgggccggtcctgggcgcgggcgcggtgcgagcggcgcggcgggctgggcagtgtccagggcgcgcggtggccggcccgac

SEQ ID NO: 31923 - DNA, 624 bp, Homo sapiens
  chr11:61684591-61685215
  hyper
cgctgtcaccccgggacggtcggctgcccacccttcgcaccctgcaccccgagagacacccccgacccctcccccggagtctcctggctgcaagtcggctcgcctgcaggcagggcgggggcgcacagcacctccgggtggcggcgcagacccggcggggacccccgaaatcctcccgtcccgggaggcgaccgcggcccagacccagcgcgggaccgcgagcgcgcgcggacctacccgctccacatcccggcgcctcggggcgcccaggcgtccgttcccagcgccgccgcgtcctcccagcgccgcgtccccgcccgccgccgactccgccaggggccgagccgccccaccgcctgtcagccctgcccgcggccggtcagtaggtctcagacgcctgggctcgcggcccccagcccagccccgaccctgccctgggcgggtcacgtggcggaggggggagcggcccgaggacacgtgcccggccccgcccctccgccggcccggcgctgggatccggcgcgcgctcccaaggcctggccccacccggcccgccgcgccgggacagggagaccacggcgctcggagggaacccggcccccaacatcccgcgggccgcgccgc

SEQ ID NO: 31924 - DNA, 995 bp, Homo sapiens
  chr11:66725377-66726372
  hyper
cgatggggacaacttgggctcccgatcctgacagacttgggttcgaaccctcagggacctcgcgcgaggcgctttagtcagtttctccatctgcaaaatgggcccgagagcaagaatgaggcagcccgcaggcggacgctgcggaggggcgctcgggggctgcagccgggggcgggtccgggggcgggtccagccggccgagcccccgcgcgagggggaggggcgccgtccgctgcgtcgcgtcgcgcaccgcgcacagcccgtcgctgtctcctccagccgtcactcgcggagcccgcgccgcctttgcgcgcgcgacccttacataagcgtccctcgcagcggtgccggcgcacgtccacccgctccgacccgccgcgggaagaggaccgtgcggagcgcggcggacactcacctcctcgccgtcgccagtcctcgccgccgcctctaccgctgctgcctccactgacagagaacagctgcggtctccgtgcaaccgaacttgctgcagtcccggccccgccttacggacttcctattggcccagacagcccaacccctcccgttattgggcagtgttctccgtcactcctcgcccctaggctctggactcctccctgtgcccgcctgtccgtcacgtttaagccttggcgccccacgtcagccccgcccctcccgtccccggcgagcgcctggataagtggcgaggctgggagagcccgcccctggcgcaccaccgcctactcccttgtctccggagcctcacgtgggccgccggaccctagccgacgcccgcaataggcggaagtggccgggctgtggctcgcagttattggctgtcggcgggggtggggacgttcgattcattcacccgagtagcacgtgtctcccgaagctgcaagcacaacagttcgcactggggctcaggcatcccggctagacgcagatacgcgctggctagcggagaagaggtcgcaggaaaagctaacgttagc

SEQ ID NO: 31925 - DNA, 949 bp, Homo sapiens
  chr11:66790543-66791492
  hyper
cgtgggagcgaggggttgggcttggcctcagggcgtccctggatcccggacgcgcttggggatctccggctcggaccccaggagcagagacagcgctcgagcttgtcactttaaattcaagagggagcgggcgggcaagcgggcgagcgcgagggagcgcgcggcgggctcctgggagcgtgcccggactgcggcgcagctccggtccgccgccccggcccggccgagcccccggcccgcgccgcgctcctcggaggcgggagcccggcgacactgcaggggtggcgttgccgccggcggccgggctaggcgcaggtgcgtgcgcgctgcgggaggcgggccggcagctggagcccagccggagcggcggcccctccgcggagcccgggtgagtacgcaccccgccgacccccgtgcgcggccgggatcgcaccctgatcgcggacgcacgcagccccctcctcgggccctgggcccgggaccccagagccccgcgcactccgcgctcctgcacctccgcgccgcgcttgcacacgaacgaatgccgggcaccgcgcacgctgggcgcccttacccggcccggccactccgcgcagtgcgcatcgcatcgcacgccccgcatgtgcacacacgcggctcacccggccatttacacgcctccccgcgcccacgctgcacacacgcccctcactttcgcattcagcgccctgactgtcctcactgtccctgctctggcttcgcaccccctcccgacactccggtccccatacaccctggaggttcccgaggcaggagcgctgggtctgcaggaaccgtcccaatctggaggggaacgttgcaccccagcccgaggaggccctggccgtgtgaagagccagatatgaccctcagccgccggtggcaccagcctgagtggggggctttccagagcttaggagaggggtatggc

SEQ ID NO: 31926 - DNA, 940 bp, Homo sapiens
  chr11:69452414-69453354
  hyper
cgggagtcgaggaattagaatcgcctttaaccctcaagagttgcgccttcagcctcgggatcccagatgcgtcgttggagccagggccgcccccctacctgttgggtttgcgttttaactccagcgcacaccttgccggcagccctcggagctaggggaggggtctcgtttccccgcagcccgccggacagacgactggggcacgggaggggcggtggcagggtggtctgtgtgtggctgaaactaattgatctggagcggaaacgcacgtctgcggttggggcgatggggggggcggtgcggctgtccatgtgccgagcgtgtggctgtctcgggtgggcactggggccggagttcgccccggcccacctcgcagttttggggcgcctgggatcggcgctacgtaagcgaagcagagctgccatagcacgtgggccgccacgcgcaccccaaaagcaagcagtgtggggggaaggggagctcgagcgccttcggagcccaggggccggctttcggaagcgttttcccgggcgacttaagggcttaacaatggaaaactcgcggagcctgagccaagtcctttcaagtcgccgccaggtatgcggctgcaggtgaccccacctgggtgcgcccgcccgccagccgccctggtggaaaagcgggtgcgggaggtcgctggcgaaaggtcgggactggtccctgcaccacccgcccccaacccaagccccgagccccgcggcgcgcagccgcgctgagtcccggggtctgcgtcgcggcgcgccggttcctgaatgaacgcgctcccttcccccgcctgaatgaaggttcccacagccagggacggtggcgaacacgcgcctgcagcggaattcgctttctcctgaccgaccatccgcccaggccgcggtcaccggggcgggggccagggggcgaggaaagc

SEQ ID NO: 31927 - DNA, 1386 bp, Homo sapiens
  chr11:69588844-69590230
  hyper
cgccgaagatgctcaccacgccccgctccacgggcgagagctccagcaggcctgggggcggggcgcaggtcattgcggggcaggtgatccctggcccactccgcccctcggcttgttcgcctccggggaccctatttctggggtggggttggggataaagggccagggttcccggcgcagccgcccccaagggcctccagagcccaagctgccctctagggcctccggagcccaagcctgcgctagctcagattagcttgcctgtgtaggggacccccggcggccgcacccagtcccggaccttcagacgcgagcccgaccccagcggttccccagcctgggccaggccggggcgcgtgtctcgggccccctgtggctgcaccgcgcgccctgtgcccacgggcgaaggcgctggaattcggcgctcggagcccgagtttctgaaggcgggaggcggcgcccgacctcaggggttgcgctgggctgccggagccaagagtgtctgcgtccccagccccgcgtcagaagggaccggagcccgagtccgccccggttcccggggcccccgagcaggtgcccgccgagggtctcagagtgtgactgagcgggttggcccggcggccgttgccccccgcccccgccccttcgcgcctggccgcgccactcactgtcgcgggtgtccgcgtgcgcgccgccgatgcggccgtcggggagcgcctggaggtggaagccgatgcccacgttgcagtagagccgccgcagccgcttgatgcccagcaggtagtcgccggcgccgctctggacggccgcctccttgggctgcgctgccaccggcaggcgcgccaacgagagcgccaccaggctctcccagcggcgctccagctcggcctccagcgtgccgttgggtgcagtgggtgcggcggcgccccctcggcccgcccagggcgccagcaaggccagcaggaccgccgggagcagcgctaccgcggccgtcccgggccccgacatcccggcccgagggccgtgcgtcggtcaggcggtcagtgcgcccgggaagctggggggcagagctgcgcctgtggcgtcccgcgggagcgcacggccgacctcgggcaggagtgcgcaaccgaggaggtgcgggaggcaagcgacggggcccccgggcgccgggctctaccccggctgcatggagcggcgagccgggcggaaagcgcgcggctggagctgggactctgaggagcagtgcgcgcctccctgagcgccaggcccgcccgaggccgagccgctatatatatagcccggcgccccctcctactcgcccgctcccgcggggggccgttcgcgttctcctgggcgcccggggcgctgtggcgttcgcggctggtc

SEQ ID NO: 31928 - DNA, 765 bp, Homo sapiens
  chr11:71318278-71319043
  hyper
cggggaaggtgcggggcgaggcggccgcggctccctggcatccctctccttacccccaggctaagctggcggtgctgctggtgacgctggtggcggccgcggtctcctacctgcggatggagcagaagctgcggcggggcgtgcgccagccccgcatcccgtggccccagcacaaggtgcgcagttaccgctacttggaggaggacaactcggacgagagcgacgcggagggcgagcatggggacggcgcggaggaggaggcgccgcccgcggggaccaggcctggtcccgagcaggctggactcggccgccggccctgcccgtaggaacaggcgcaggggggcgactggccagaggagcagtgaggggccgcctggtccacggactcagcctccctcctcgccggccttagtttaccacttcttaggtcggggggaccccctccgagtcccgcgctgtcttcaaaggcccctgtctcccgtcccccacgttggggacgcccctcccagagcccaggtcacctccgggcttccgcagccccctccaaggcggagtggagctttgggaacccctcggccaagcacagcggttcgaaaatacagctgaaacccagcgggcccttagcacgcgccccagcgccggagcagggtcagggtcttcttgcgacccggctccgctccagatccccccagctctcggcggcggacccgggccgcgtgtgagcgcgctttgcacctcctatccccagggtccgccgagagccac

SEQ ID NO: 31929 - DNA, 385 bp, Homo sapiens
  chr11:74022468-74022853
  binary
cgcagccgcgcctcctccccgcgcaggtaccgcctcagcagccccagcagccggcgctcgggcgccagggcgcgcgccacgctggtcagcgccgagaacgtgtcgccccgagccgcagccctttctgggtctcctgtcccgagcgccagcaccgccagcagcgccgccagccgcgccccaggacccatagccagcgctcgcgaacttcccctcagacagtcctggccgcgcggcggcagccgctcccgccctcgcctgccccgcccctgtctccgccccctcccggctcaggccccgccctctggccccggcccggcccgtcccgtccaccgcccagtctcgctccacgccccctgactccttccttgtttcgacgcctcacctc

SEQ ID NO: 31930 - DNA, 367 bp, Homo sapiens
  chr11:74178245-74178612
  hyper
cgatcactgcgctcgggaggatcggggaggatccgggaggactagcttggtatttgcagcgcccacccctcccccactccccctcggttccacagtctcacggagagcgcgccgtggcccttggaagggaggcgggaagacccctcatttccaccccaggccgcagctcagccttcccagctgggtgggtgccttacctgcctctcagcaaggctccggggcgcccgtttgctcgctggacacggcgccctctgaccgagggtggcccaagcgctgcgaccctgtgcattccaccagccccgttccactccgcgggtgcccagcaccgcccagcgcgctctctggctctgggctcccacccgcgctc

SEQ ID NO: 31931 - DNA, 1063 bp, Homo sapiens
  chr11:74441810-74442873
  binary
cgcatccctcctctgcccacccagcctcccggtctacttacgggctcgagcgtgggagtccagggggaaccagagcagcgcgagtcccagcaaggaggagaggaccctcacctcgggaaccatcctttccccagggtcaggccgctggtccgggagcggagtcgggaggaagggagacgaaaaggacacggaggcacaggggccacagatcaacccacagaccccaggaggtctgctgctagagcggggtcggagaagggccaggaagcagcggtgggcaggaaaggagggcaggaagggaggtctaaggtgggaagaagagaaaggtggaaagagaacgcggggaaaggagggagagatggagagacgaaggaaggtccagcagaagggagaggcgatcaaagaaagggggaaggtgagagggagaggaggagaaagcagggagaggaccggcgtctgccgagcgcgcagcgccgggcgaggcgcgcgggaccagcgggtgttgcgggcgcgcgggctagaggcggccggcgccccctgctcggtgggctcggggtcgggccgcgggggcctggggcccggcggggcggcggtcccagcagcggcggcggcgcggcggccgcggagggaggctgagcgcgggccggctgtgctcgccaagggcttcaggcgccgcgctcgggcgcatttgtactttgccgcgggaagcaggcagcccggcctggcgctggcctagcgctggcgcctcctctggggcaccgcgggctcggtggattggccacccgagaaacaggcccactttttcccctcctctcttgtgcgggtctccgggacggacgctccaggcgcggcgccgagtggaggcgagggggctgcggagggggaaggggccacgcgggccacggggtttaacccctgactccccgcgacgccaagaatgcaggagggcagagttgagggagacctcaggtggaactttcaggtggggaaggctgagctgtcggggctgcgggtaccgggaaggctcagggtaaggcgctcggcggtgcgtgcccggaactcc

SEQ ID NO: 31932 - DNA, 1781 bp, Homo sapiens
  chr11:74951647-74953428
  binary
cggcagcccggaggggcgggggcggagaggatgaagagaaagcgcagcagccgacagccctgattctcgggagcctcccaccccgcctcccacggcgaggagggcgcggagactccgctgggggcggaggacgagaccgggaggcggggaggggggaggcaaaccctgcccactcggctcggagcccggagcggccgcggaagccggaggccggcgcgcagggcgagggcaccgggggcggggggctccgctccccgtctgacccctcttgcccccggccagtcagccagtaagtgcggctcctcagactttcgagacagcgaacggaccgaccgggactgccagccgctccgggtcaaggactcgccccacccgtgccccccaccaggcgctcccaactcactggtgagcgcggcggcccgggcgctggatgcgggggcggccgcgatggccccgcgcgcgggacagccggggctccaggggctgctgctcgtggcggcggcgctgagccagcccgcggcaccctgccccttccagtgctactgcttcggcggccccaagctgctgctgcgctgcgcgtcgggagccgagctccgccagcctccgcgggacgtgccgcccgacgcgcgcaacctcaccatcgtaggcgccaacctgacggtgctgcgcgcggccgccttcgccggcggggacggggacggcgaccaggcggcgggcgtgcgcctgccgctcctgagcgcgctgcgcctcacgcacaaccacatcgaggtggtggaggacggcgccttcgacgggctgcccagcctggcggcgctcgacctcagccacaacccgctgcgcgccctgggcggcggcgccttccgcgggctgcccgcgctgcgctcgctgcagctcaaccacgcgctggtgcgcggcggccccgcgctgctggccgcgctggacgctgcgctggcaccgctggccgagcttcgcctgctgggcctagcgggcaacgcgctgagccgtctgccgccagccgccctgcgcctggcgcgcctggagcagctggacgtgcgcctcaacgcgctggccggcctggaccccgacgagctgcgcgcgctggagcgcgatggcggcctccccgggccgcgcctgctgctcgccgacaaccccctgcgctgcggctgtgccgcacgccccctgctggcctggctgcgcaacgccacggagcgcgtgcccgactcgcggcgcctgcgctgcgccgccccgcgggcgctgctagaccggccgctactggacctggacggggcgcggcttcgctgcgcggacagcggcgccgacgctcgcggagaggaggcggaggccgccggcccggagctggaagcctcctacgtgttcttcgggctggtgctggcactcatcggcctcatcttcctcatggtgctctacctaaaccgccgcggcatccagcgctggatgcgcaacctgcgcgaggcgtgccgggaccagatggagggctaccactaccgctacgagcaggacgccgacccgcgccgcgcgcccgcgcccgccgcgcccgcgggctcccgcgccacctccccgggctcggggctctgagcggcgcccccgggctcggggcttcccttgcctggcccgaagccgtggagatgagacacccgcgagccccgagctctgagaccttcccctgactcggaggcgctaagccgtaccctctcgttcccgcctccgagagctcccaccgtcaaagacccagagatagccggtccgaatccagaaacccc

SEQ ID NO: 31933 - DNA, 1276 bp, Homo sapiens; identical to SEQ ID NO: 28407
  chr11:77184258-77185534
  binary

SEQ ID NO: 31934 - DNA, 879 bp, Homo sapiens
  chr11:82444299-82445178
  binary
cggccgcggcggcctgcgacgcctcccgccggggggcagccttgccgtgggccggggccgcgactgtcggggcgctaggggcggccagcggccgtttggctggcgtgtcggcggcgctcggggagggcgggccggggggcgcggcgcccatgaggccgctgcagcgcttgatctgcttctgcaggtacttgcggtggttcaccttccgcttcgacttgcccggcttgtccagcgccagcttgatgttgctggacgccgagtcaatgaagctgagtagatcgcgggtggcctcgcgcacgtcccctccttcggctcccgacagcagcgcacccgccggagccccggtctcatcgtcctcgaaacagcagcccttgtccagggctccgaaggcgccccctagcccgtccggggagcccccgaagccgaagggcacgaaagggtgcgtgctgaggagcgccgcctgcaccgccatcgccgcggctcccgggctgtccgcagcgctgcccgtgcgcccccgccagctcctgcccgccgcccagacccagctcccgccccggcgcggcgcgcgcggcgcagcctactagttccgggcctggctcgctgcgctgcctcccgggggagctcattaggtcttgtaagcaaggggcggagggagggagcgcgcggcgaccgtcccggtggtagaggggaggggcttacttagcctggcttggaggagtggggggtcgctttagttttctgagctttctgaagctcaacgccttaactccttcgtttccctttgccccgtggtgtttctcttgactcctctaaccgcaaggggtgaggaagagatggctggtctcaaactccagttcaggcccatgaggccgctgcagc

SEQ ID NO: 31935 - DNA, 978 bp, Homo sapiens
  chr11:86382607-86383585
  hyper
cgcctctctccacgcataaaagggagaggagggacaagaaagccaaaccaagtcacaacaagcccctgcaaggcaaaaacagaaaaaccgctggaagggcgcccgggaggatcctttctgggtccagggggcggggcgcaattttccggcagccacgggatcgcaacgcgggccgtcctgccctctggcccattaccttgttgagatgagggttcctggtgacatcgtatccgcgcttcttcaggggcacagggcgcgccgggccaggcttggagtggcagccttgggcgggcgcggtgggtgtccagcgcgggagggcgccgcaggcccggcccggccagggagccagccgcgtgcctgtccccagcgcggcacccatggtccttggcagacctggcacgggagagaaagcaaggtcagggcctccttccagccagccaggacccacgcgcgctgcggggcaccgggcctgatccggggacgcgccctctgggagagggcaggtgctcccaaagggttaaatgttccagcccccgccactcctcggctgccacctgctcggctccgcgcggggcgccaggcctagccaagagccaggcaaagcgaaaccaagccctggaagcagatccggtgcgggtgacagccggcgccacccctgcccccatccctgtgaaaaagaggcgactgcgcggcgaggggtccccgtacccctaatcccgcgtggtggcttgcctcggtcctctccttccctggcccacctgcgctgctcggggagctgaggtctacgcggtcccgctgcggagcaggcggggtgaggagctgcggtctgtgagtcctctcccgccaatgggtggaccgcgctggcggccgcgagctcgcggagctggtgagttcctcaaagagcggtcccacaacctttgttctcagtgcctggcttcccctgaggacgcgcgtggggcgcctcagcactgcgtgcac

SEQ ID NO: 31936 - DNA, 999 bp, Homo sapiens
  chr11:91957644-91958643
  hyper
cgcggcaggaaagtacgttggtgtcatcctagagccccagagggctgagggaagactcgagctctaaaattagccgcttccaggcccggcgccgggaatgccctccagttcgccgcgcctcctccgccgccccctcccgcgcgccccctctcccctgcgccacgctcctagatcgctagtcatccccgccgccgaggctcctctccccctcgcccttttcgctcgcggtttgggaggaggagactgcgagagacaagcgcgagggggagactggagaggggcttggccgtgcgtcggcgtcggctgtgatggggagcccggagcagccaggcggcgagcagtagcggcggcggctgcagctcggagcagacaggagagccggcgctcctccccgcaggctgcgctgtgaactggcctgcggattgggatctcgcgcctcccgtccctctcctcccgctgctgttctcttcatctcggctcccctcctccgcttgcgaacccccggcggcggcggcggcggcgtcccgagcgcagagcgcttctgctcgcggcctcagtcccggctagcgcgcggtgggcgctgcggcggcagcagccgggggaccggctcgcccggagcaagagcgccgagcaccgggtgaagaagaccacgggggaggcgcctcgtagagccgtggatcgccagcggaggcaagggtgcgtggggatttgtagcgtgatgatttggctgcctggtgcaccgactggagcgcgcctgccggagcacagcctcagctgctgggtgcaaatgggctgcgaggtgggctggggaggcgagagccgacgaagcgcgtgggggaaacttttcaccttgtaaagttccaacctccgcgcagccccgagccgccgttgctaccgctgcaaacaggagaagagggtggcttggccccgcggcgggagccgggaggtttacacggagagttggccaagtttggggctgaggatctggggaggggttgc

SEQ ID NO: 31937 - DNA, 588 bp, Homo sapiens
  chr11:93063462-93064050
  binary
cggtttacagttccttcgtgatctatttggttcattcattcaacaagtatttccgggctgcagcttgggtgcccagccttggggtaggcagtgggactacaaagaggaaaggacccagaatagagggggcactggacgtataactgcgggacagcgaggtcgcgctcgcgcggggtgaggttggaggcagccgaggagccgcacagggcagcgcctgccgccgccgccgcgcccatcccccactccgacggccacgagttcgggccgcgacgtccccatggcaacacgcggcggcgccgcgcgcggggagggagaggcccaactgcctcgttggtcgcgcggcgggagggcccaggcggcgggagcgcggcggcgggtggcggggccccttggggcgggcctggcggggcgggaggtgacatacgcggtcctgcgccctcgcctcagacctctcgggcgagcgcggcgcagcgcaggtaatggctcctggccttcccggccccgcctcgcccctgaccctcacccaaaggccaggctgcgcgggtcctcgagcgggacaggggaaccccaaaagggcggccgctctgc

SEQ ID NO: 31938 - DNA, 833 bp, Homo sapiens
  chr12:103351149-103351982
  binary
cgccccgagcgcgccgcctgtttattcagccgggagtccggcacgcgccaggcgcacgcactgcaacaacaaacccagctgaatggagagtttgcaaggagcgggagaaaggaacgggagggggggagaggagaggaggagggggagtttagggagtgggtgggaggaagaggtaagaggaggggggggagtgggggctgcagccgctcgctgcagcagcggggagtggggggcgaggcggggccagggctgcgcgtggggctgggtgtcccattgaaaaggcggacgcactccggcagcccagcactctctcacttctggccagggaacgtggaaggcgcaccgacagggatccggccagggagggcgagtgaaagaaggaaatcagaaaggaagggagttaacaaaataataaaaacagcctgagccacggctggagagaccgagacccggcgcaagagagcgcagccttagtaggagaggaacgcgagacgcggcagagcgcgttcagcactgacttttgctgctgcttctgcttttttttttcttagaaacaagaaggcgccagcggcagcctcacacgcgagcgccacgcgaggctcccgaagccaacccgcgaagggaggaggggagggaggaggaggcggcgtgcagggaggagaaaaagcattttcactttttttgctcccactctaagaagtctcccggggattttgtatatattttttaacttccgtcagggctcccgcttcatatttccttttctttccctctctgttcctgcacccaagttctctctgtgtccccctcgcgggccccgcacctcgcgtccc

SEQ ID NO: 31939 - DNA, 560 bp, Homo sapiens
  chr12:106975167-106975727
  hyper
cgggctctgtccagccggtaccgcgcgccgccttcttcctcccgcaccgtgaccttaactcggcacgtgctggcccctcgggctccccagtctccgtacattgtcccactcagctctgattgtggggagggggcggaccgagggggcggggggcgtctttccgaaggatcgcggaaagccgcgcgctgccaggggcccggggttagagacccccactcccgcacggcgttagggactccgcgcttccccgcccccgccgcggcccgccggctctgcctctgtccatggtcaaagcacccggggtaatccgcctttctcttccgcccgccgggccccattcatattctaatcacagcgcggccgacccgcgaacggccactttatcggggcccgcaggagacgcagcttgctccccctcacttccacttccagcaccccccggccctcgcccccctctttctgcactttcaactccgccgaggagggggtccctgggaaaaccgcgtccccacttggatgccggggcttctcacaaacttcgaggccgactgggggacggc

SEQ ID NO: 31940 - DNA, 986 bp, Homo sapiens
  chr12:107486379-107487365
  hyper
cgagtgtttcaggtcgtcagtactctttggccagagaagtattaagtcaattctatttaatacttagggcacctaaaattcgtaagcggtataagcaagacagtcccacgtctaaattcacagatttggcggatcgcatggaattcattaacatcagactcattaaacacccaaatccatttcccacgggcttgtgactcaccgccacctgttgatgcccacattggaggagccggcgaaccaggggtccaggatgtagacgcagcggatggtgtcggcgccctgaatgcactccttcagggcggggttgtcgtggagccggagcccctttcggaaccagtgcacggcgttcacccccatgccggggggcgcggcgggtcctccacggagaaattcaaggaaggaggctccggctcatagccgacaccttcgcttccaagagaattgcctcacccggggcgtgaggaaagggcggcagagggggaacaggaaaaaatgactccgaggaggggaccggagaaggcgggggcgccggaggcgcagtggaaagatgaatggaggttgcctagtcggcggagtccgggtgtgacgccctttaggagcccgcgcccgccgcaaccgcctggaggcgacgcataacttcgagggcctcggacctccggagcctgagcaagttccaggagctcgagccgccacgacggcccgagccggcacggacggccccaggagattcgtcacggaaacctcgccccaccaaggcggcccctaaagacaaaacggcccgcccgaggtgagtcaccgaggagaaccggaggggaatgagcccctgtcggcgacgctgtctctcggcccgggagaaaggaccgggaacggaggctagaggcggtggtcgaggccgctggacggttgccggccggtgaccggtcccgaggctgcccgggtgactctgccgccgccgccgcgtcagcggcctcggccccgccccc

SEQ ID NO: 31941 - DNA, 1339 bp, Homo sapiens
  chr12:107711721-107713060
  hyper
cggctgaaagagggccgcactaattggtttgcgtacccgaagtgggaatagagagggaggaaaaccatgtttcaggtgttacggggggaaaaaagtgaaatgcgaaccgcaggggagagagcgaccgtcaggcagacaccttgtgaaccgcggtggagagcacacctaggtggggaggtcaccggcccaacccaccaccctccgggagaatgcgggcagggacagcagcagggggcagcatccacgtctctacgcttgcaagggttccccaagtccctggccactgctccccacttcctgcagcctcggtgtccgccgggggcgtgtgtgaggggcggggccgcatggggaggagggatttaaaaaaaaaaaaaaaaagcgaggtaattagcattctccgattccactggctctccgccgcccctgctttgcatacgcccgtcccactggctgcccggggtttgctggggttcggcaaggtttgcagccgccacggccgctgctgcgctccggtgcagggcaggctggcgccgagcgaaccagggccgggaactgggagccgggagccgggagccagctgcccgcggagctgcggcggcggcggcatctggggtggtctcagtcccacgaacaccgtggccggcgcccggtggctactgcgcccagcggggctcagggaagagcggtctagacactttttattttggaagaaaggggcaagccccggcgggagcttccttcccggcctggctcgctccccattgcgcccagctccggcccggactctggaagatgactccagggtctgctctgtatattccagcggcggcagttccgggaggcagccgaaagtactaacagttggtagcagcggctagtggaaaagtgagccaaggcggcgcggactcggctctccccgcgccccgcggcactcgctgctcctcgccgctccttccctttggctcccaggcggctgcagcatgaagtggcgcagcgatggccaggagaggtaagaagcccgtggtgagaacgctggaggatctgacgctggactcgggttatggtggcgcggcggactcggtgcgctcctccaacttgtctttgtgctgttccgactcgcacccggcgtccccgtatggcgggagctgctggccgcctctagctgactccatgcacagccggcacaacagctttgacactgtcaacactgccctggtggaagactccgaggggctggactgcgccggccagcactgctcgcggctgctgccggacctagacgaggtcccctggactctccaggagctggaggcgctgctgctgcgttcgcgggatcccc

SEQ ID NO: 31942 - DNA, 997 bp, Homo sapiens
  chr12:113900580-113901577
  hyper
cggattgcagagagagggaaaaacaccgtctccgccccttggcctcaccctctctcagtccaaagaggtggcggtggctgggtgggtgggtgggggcccggggaaagtctagagcgtgctcgaaatctcttgaccctccggagtattgactttggtcccaagaaattgctcgcggttgctgggagagtactggcggtgggctgaggctcctggagagcccgcggggtggagatgggggtcggccccccctcggcgcccagccgaggagcagctgccagttgagtgcggacccgagagagaacccccgagggacacccacgtctcccaccgcgtctgcgtcgggcgttttggtttcaggaggctgcttcggggcggggcccccgggggccgagcgcggggggcggcccggcggccttaccacacggcggcttcgttgagctcggggttgggatgcgacaggggtccgctgtagccgctggtgccgctcattgggaagggcgggctgggcccgccgctgaatacctcgccgggcatggggtgcagcgtgcccggcaggcctggctcggggctcggtgtgtccgggtgcgagatcatgtcggtgaacctggggttgtccgcggcgtgcgggccggcgagcggcggttccagcgctcccagcggcgtcgagccggggccagaggccgccaggaagctggagtcggccggggactgcgcctgcgaaggcgggccgtgcgcgaagaagtcgtagttgcttcccggcgcgtagtagtcgccttggtagtctgcggagggggagcgggaaggagacagggcgcggtgagagaaggcgaagtaggcgggggacccgggacccggggaggggacccgggcgggcgagagaggggagcgcgcgacaccgacccaaggttagagagacctgcggaggccggcgccccttgagacggtggacgtcgcaggctcacggggagggttggggagagagacaatgagagatctc

SEQ ID NO: 31943 - DNA, 1155 bp, Homo sapiens
  chr12:113905322-113906477
  binary
cgcctcttccgcaccaggactcccccgaggcggggccgggccggattaggccgggaggggtggagagaggcttcggcgaaccagccaagggtgaaggatttcgcggacccgtggggcgactcataaagacttgggcttcctggtccccggctcgcccgcggcctgacggctctataaaggcctccctcccggcacggctctcgcctcggcccctcggctccggagccagcctctggccgtttgtctgcccgcgcttcggcgcagggagggagggggcatcgcctgtttctctgctcgaaaggtggaggtaaagagggatcccggaccccagagaggcttacaaccttccataagcaaggcggggggcggaattcagagaggtaaagtgacccgcccccaaatcgcaataccaggaggacagcagggctagatggaatctttcggttcacagtccccgacctcgggcaagtgccccactcgggcgcacggtctgctcccagaccagaaccaggcgcgctcgtagccaaggaagcttggcgggagactcctccgaggctcccggctcccaggccagcggggctaaggagctgtgcccgccccgggccgcacctggatgacgcgcatgttgaggccggtctcctgcgccagctgctcgcggatgtggcgcgtgggcttgggcgtggcggcgaaggcagccttgagcgtctccagctgcttggccttgatggtggtgcgggggccgcgccgcttggtgcccgagttctgctcctcgttctcgttgttggccgtctccttgtccgacgaggtcgagttgtccgtctctttggggtcgtcctgcagtgcgtcctggaggtccggggacaaactgcggtccgtacaggatgacactgcgggcggacggatcgggaaggggacagcggcgtcagcgacggccagacgcctcttcagtccagtggcgggttcccgccggcccaagctacggcctgcccaggctacggccagccccgctggattccctcccaaacctgcgacagcccctcccccagggacccggtgcccgcccactctctccaggcggggctgggcctttggaggggcgctcttaagccctctccgcgcgtctcagctagtacctgggtaagggtagggggacgc

SEQ ID NO: 31944 - DNA, 874 bp, Homo sapiens
  chr12:113913737-113914611
  binary
cgtcctctcccgacttcgatcattaccgctcccaccccaacacgcatacttcccccaccccacccccaagagccagcgcggctttaacattaaacaaacgcagcgagcgcctccgagctgcgctctcggccgggtctgcgcggcggcggcggcgttacaaattgtaaatttaaattgctcgccggattcattacctcccctctttgatttcagccagccgtgaaaaattatactggtgtaccactgagaaactgttttgccgcaaagagcctacgcctaatcactggctttctccctccgacaaaagtgtaattattttgtttggggtgtaaatataggccgcgcctcgcacacacactcagcgtcccgcagcgccgcagagcaccgcccgccgccggaaggaatcgggcccccgagtaggagcgggcgtgaaggctgagccccgctgtctggaggccggaggagagcggctggtgtggcgctccggcgagacccagcgagcccagcctctgccctccgcagttcgggtttgcccgagaacctcgggaccgcgcgctcccaggcgggccagagaggacgccggcggggtgcaatgggtgctcaggcctagacatccgggcagggatgcgagagggatggcgggggtgggagtggggtgggtggggggtggtggtgaattttctggggaacccttgggggtggccgtctgagagcggcccggagcccaggcggggagagtgtcctggcctgggtggaaccctgggaggcgggggcgtcgtggctggtgtgccccactggcgctaggccgtggattgcttggtttccagaacatctctgcggggcgcagggccttcctgtcagttgaatcgtgctc

SEQ ID NO: 31945 - DNA, 479 bp, Homo sapiens
  chr12:113916237-113916716
  hyper
cgggttactttagaattggcccgactttggcagccccagcgctgcgtgtgtgtgtgtgtgcctgcgtgtgtgtgtgcgcgtgtgtgtgtgtgtgcctgcgcgtgtatttctcgcttgctaatgattgtgtgttgatagagtgatgcagtggcctcattagcctttgtttagaaggtgttaaaagggaaatctgcatcgggaaagcggcggtttacgcagcagcccggctgaacaccgcgagccaaggggctggggggcggggacggtgcccaccccccaggcccccactcttcccccaggcgcccaccgccgcggaccccgggagggaggaggggtccggggaaagcgaccccagctccttcctcccaaggcgagtatgtttaccctgctgggcacccttccgctccgcggggaccactgcgggatcgcgctctctaaaactcctctcaactgccccgcagtgcgcggcggccttttcc

SEQ ID NO: 31946 - DNA, 296 bp, Homo sapiens
  chr12:114075783-114076079
  binary
cgagttcaaggacgcagagaggacgggagggggttaaagcccattcaaacgcgcagccccccgcccccggctcgccccccactccccgccggccgcccgcatctgggcgcgcagaggaacagatttcgcgtttcacacagcgcacaatggccgccctcaaaggcgcgccgcccgcattgttcgggccggcgcccgcgcgtcctacctccgcgcgcgaattaacccccgtcaccccgccattgtcaccgcgcacttcggggccggccacaaaggcgccagaaaaccctgccgtgttc

SEQ ID NO: 31947 - DNA, 1501 bp, Homo sapiens
  chr12:117798076-117799577
  binary
cgagcgtctggcgtcctctggggcgcagtcccgagagagccccttccgggacctcggacgcaaggcccctgagtggccctggaagttggatcccccggggaccctgctccgaaccctggccacctggaagcaacctcatcgagcgctccttccactgcccagccccgaaccgtggcggaacgcgcccctcggcctccctagagcctcctttgcgggagaagcacaactttcccaggttttggagacggcgctcttacaccccaatctcgcccagacggaagaagtgagaggtgcgggcggccccgccatgaccgcgggaggagagcgcaaggaggctcctcgcaaagttggaggccaggccggagcgatgttccgggagcggagccctcccagcctcgggcccccagccgcggacagctggcagtgccaaagactccgccattacctgcggctcgcagttgcgattcggccgcagagtcgggcaccgaggaaggcgtaaagttgagcttgggcaggtacaacggtccccagggactggcatcccccagcccgggctgcccgcgggagggtagcgagctgtgccaagggctccgccattaccgccagcgcacagctcggagccaagcgcgcggctgaggaacgactagggtcttgcaaagttggagcctgggcgcgtagacccccggaccggagcccccggcctgaggccgcccgctaggaggaaaatgaggccgcccgaaccaagttgggacgcgcagcaaagcccgagccttccgcgcacaccaggggctcgggcgggagcggggagccctggggacggagaaggggcgcgggacgcctggatcaggaactcacctgacgccgagccgggcagcgccgaggctgcctcttcgcgctgcgcacccgcccgcccgcctcgtactcctcctcttcctcccgggcgcccgcggccgccgcgctccgggttctgaatcctccgagtccgccgccccgcgcggctggagggcgccggttgcacccactcgcctcctggtaggagccgcgcgcgtccctccccttcccctccgctttgtgcctccaagatccctccccaccccctctcccctagcccccactcctcccttctcttcttccctccccttgcgtcccctccctcagcctcagcgaacccaagttcgggacggaggctgcgggcttccccggcgcagtgctgggcgccccgcgcgcgcccctggctcaccccgtccgctcggccgctgctcgctgcccggccgcccctcggaggagccgcggcgctaagtagctcctcacccagcggctggaaacgcggcataaatatgtagggactgagccgtgagctcagcgagggtcgtgagggggaatttatttcttaatgtccctcctttatcctatcatcactgaaacgaattagcagtgacgtccaacccgactggtttatgggtgtggggagggagacgtcgcaaccctcattaaaagagcc

SEQ ID NO: 31948 - DNA, 980 bp, Homo sapiens
  chr12:119418675-119419655
  hyper
cgctgcgccccttggcgggcgggggccctgctcggcagatggcgagaagccgaattggtgagggattgtctatcaaatggcactttctgggtggtggagacctcgctaacccccggcgcaaagaggaacgcagggcaccctctgtaccggcctaggccgtgtctcccaaaagtgagggtctgggggaggccggctggggtggatagattaagttttttacgagcccccccaaccccccccccccccccacgcagaagatcagctacaagacttgcgaaggggctggaaagaaaggtggcctggcccaaagggggcacccaggaaagggctgaggaaggccagcgatgatgggagaggagaggggcctgggaagcaggatctcctgcctggcgcagattggggtgccaggatggcttctcagagggatcagcgctgcaactcggtcgccgcggggccctggtgacaggcgcacgccccgccctttctcctcccaagacctgcgggcttttgttatgcagatggcggcaggaggctgagcctgaggaggagggggttggtggggaggaggagagacggagaggggggaggaaagtgcagctcgcgcgaccagcctcctcttccaacgtcacattgtgcgagagacaaaacccgggcgcgccggagctcacacgcgcacgcacacacatccgaccccgtcgcctcttctctcctggtgctgcccagaaagccagccctcccttcccttcttggggcgcagaggctcagccagctcagagcgcagcctggagccgacccagaagggcgaagaaagcccagcggacgagcctcctttctctgctgcctgcccgggctggggcgtcccatcccccgccctgaactccgatctctcccaccccacccctctctgggtttcacccggacagagccgggagctgggtgtcgcccccgtttggaatccacgtttcagcactttggacagc

SEQ ID NO: 31949 - DNA, 890 bp, Homo sapiens
  chr12:120031515-120032405
  hyper
cgcagaaggggtgaggtcacgtctcccttgagccccgagccgctggcttttcagagcctcgccacaagccggcggccagagccccagaccacacagaccgtgcgctcctccgccctcccggcgccgccggcctcgcccatgtctcagtacgcccctagcccggacttcaagagggctttggacagcagtcccgaggccaacactgaagatgacaagaccgaggaggacgtgcccatgcccaagaactacctgtggctcaccatcgtctcgtgtttttgccctgcgtaccccatcaacatcgtggctttggtcttttccatcatggtgagtgaatcacggccagaggcagcctgggaggagagacccgggcggctttgagcccctgcaggggagtccgcgcgctctctgcggctcccttcctcacggcccggcccgcgctaggtgttctttgtcctcgcacctcctcctcacctttctcgggctctcagagctctccccgcaatcatcagcacctcctctgcactcctcgtggtactcagagccctgatcaagcttcccccaggctagctttcctcttctttccagctcccagggtgcgtttcctctccaacccggggaagttcttccgtggactttgctgactcctctgaccttcctaggcacttgcccggggcttctcaaccctcttttctagagccccagtgcgcgccaccctagcgagcgcagtaagctcataccccgagcatgcaggctctacgttcctttccctgccgctccgggggctcctgctctccagcgcccaggactgtctctatctcagcctgtgctcccttctctctttgctgcgcccaagggcaccgcttccgccactctccggggggtccccaggc

SEQ ID NO: 31950 - DNA, 473 bp, Homo sapiens; identical to SEQ ID NO: 28420
  chr12:123380333-123380806
  binary

SEQ ID NO: 31951 - DNA, 721 bp, Homo sapiens
  chr12:124779503-124780224
  hyper
cgcgcagtgcccaggagcgggagggcctcggcggaggcgccgggccggggctgttgcccaccgcgcaggccggggcggggagaggaagggggaggaggaggcgcctagaaaaggaggcgcgggccggggaggtgcggagagggccgggcggcaacgtgcgcctcggggctgggccggcctgcgggatcgcagcgcagcgcagaggcgaggctgggcccggcgggcgggagccgcggagggcggagggcggagggcggcggcgctggcaggagcgcggcccacggcggcgagcaggctgcaggcccgcggggatccggggcgcggggggcgccgggcctgatcgccgcctctcgcggtgcccgcaggtccccgggcgcgcagctctcgccccgccgccgcctgccccgggccccggagcgcggtggagaagcccccggaggagcggggggcccgcgccccgcgccccccagacatggtgggccacctgcatctgcagggcatggaggacagcctgaaggagcagggccgggagggcttgctggacagccccgactccgggctgccccccagccccagccccagcccgcccttctactccctggcgcccggcatcctcgacgcgcgcgcggggggcgccggcgcctcctcggagcccccgggacccagcgaggccagagcggtaaggaggcgctctctctcccaaacgggggaccgcgtgggc

SEQ ID NO: 31952 - DNA, 703 bp, Homo sapiens; identical to SEQ ID NO: 28422
  chr12:124979300-124980003
  hypo

SEQ ID NO: 31953 - DNA, 983 bp, Homo sapiens
  chr12:130646597-130647580
  binary
cggcgtcctcggggtgccggggaccatcccggggaccgccgggaaagggggcgccggcggagaggatagcgagaggcaaagttggaggccaggcagagagagggcgaggagaggcgggcgggactgccggggagggtcgcagcgcgcagagccccgcgcgccaggcgggctgtcccggggctggcgggcgacgcgggcgggactaggcgctgcgccccccgcaggctgggctgcaggccgggggggatcggcccccgcggggcccgggagcccgcggcggggcggcggggaggaggctgccccgggccgctgcgctttctcatgcaaagcagcggcggggcggggcgcgcggcccgggggcggggcctgtcagcgctcggcttttctgcccccctttgcctttttgcgagtcttctcatcccgggacgcaaacctcgaaacagctgccggctggtcccggccgaggccggcgcagggagggaggagccgcccgggctgtgggggcgccgcgagctgggccggcctcggtgtgcccgcgccgccagcccgctccagacgcgccacctgggcgctccaagaagaggccgaagtttgccgcggccgtgagttggagctcgcgccgggccgctgcgccgggagctccgggggcttccctcgcttcccggtattgtttgcaaactttgctgctctccgccgcggcccccaactcggcggacgccgggcgcggagagccgagccgggggcgctgtgcgcagcgctcgggccaggccgggcgggcatgggcgggggcccgagcaggggtggagagccggggccagcagcagcccgtgcccgggagcggcggcgctgaggggcgcggagctccccgcgaggacacgtccaacgccagcatgcagcgcccgggcccccgcctgtggctggtcctgcaggtgatgggctcgtgcgccgccatcagctccatggacatggagcgcccgggcgac

SEQ ID NO: 31954 - DNA, 264 bp, Homo sapiens
  chr12:133195893-133196157
  hyper
cgagggcgcggggcaggccccaagagccccgcagagcggacccgggtcgcgggagggcccctgccgtgcctgcgggcgggactcagccttcccagggtcgcctccggagccggcgccgcccctgcccgcaggtacgtattcatcgtgcagaaaagctaccaggagagcgagacgggccccgagagctccatcatcaccaaggtcaaggggatcaccacgtccgagcacaaagtgtgggacgtggaggagtacgtgaagcccccc

SEQ ID NO: 31955 - DNA, 1110 bp, Homo sapiens; identical to SEQ ID NO: 28424
  chr12:15941612-15942722
  binary

SEQ ID NO: 31956 - DNA, 1749 bp, Homo sapiens
  chr12:19282260-19284009
  binary
cgctgtgtttttgttgtttgaaagagagaaatcaggggcttgggcattattaggctccctttgatcgcgccctgggatgggaagccttcgggcaaagccctgggggcaggacgcgtttttttttttttttttttttttttttaatcgatcccggaaccttcgcgcggcggagggggcgggcgcgccgcaggggcccgagggaggggtctggggcgcggcgccgcttgcccatcccccgagcgcgcggcggggcggccggccggcggccgccgggatgcggaggggcggcgacgggggccggaccctgccggggcggcggggcgggcaccgcccgagggggtagggcgcgcgcgggggcgcgccgggccggggaggcgcgctcgctccgcgctcccttcgctcgctcgttccctcctccctcggcagccgcggcggcagcaggagaaggcggcggcggcggctagggatcagacatggcggcggatctgaacctggagtggatctccctgccccggtcctggacttacgggatcaccaggggcggccgagtcttcttcatcaagtaaagagccggggacggcacgggggcccgcgggggcgggagggcaggaggcgggcggctggcgacacgggggagagcccgggtctgtgctcctgcagcccctcggctcgcccccgcgtcccctctcacgctccgtgtctgccccttctctcacccctgcagcgaggaggccaagagcaccacctggctgcaccccgtcaccggcgaggcggtggtcaccggacaccggcggcagagcacaggtaacgccgggcccaaacggagttgggctccgcctggaggaggcggcagagcccgggccgcccggctccccgcaacctgccccgcgccgcgggccccgggaggcggcgaggcggggcggaggccgggcgggagcggccgcaggtagaggggccacggggactccgccgccgggagttctctccagtctcggggcgcctctttctcctcagcctttcatcagcacttggagacggcgccctcttcctgcgccttctccccccatcccagcctagacgaccctcgcgaccctagagtggcgacgctcccctccctgaaacctggagtcctgagtttttcctccgcggccgctactcactccccggtgacccccagctgccgtcttgccccccagcaatcttcaggcagtccttacccactcccctccctgcagccccggaccccgatcgcccgccgggataacgtaaccacatcctccccctcctcccaggagcgctgcctcctgccgtgcagcttcctcctcctaggtgggacttgtgggtaggtggctgatgaaggaggaggaggaggaggagaggagttcgggggtgctgcgatcctctctgtgacagggaacggctcgggaaacgcttggcgcgttccctcctgccacgggaggagcagccggagccggaggaggcgttcgcagcctcagttgctggcgatccggatctaaagtccccgccagccgcacggaggttgcacagactgccaggaggcggtgggcgtgcgagggggtgtcccgtatgggggcacccgggccctgtttggagggagtccgtggggaagcggctctctcgggtggctttgggagcttgtttgaatgctaagtgtgagtggagctggaaaaggctcctcgtagtttctgtactggtctgggtttcttttatcattctttgtttacattc

SEQ ID NO: 31957 - DNA, 1323 bp, Homo sapiens
  chr12:2161370-2162693
  binary
cgtgctcggctgcctccaaggaattattaaacctgggtctaggaatctgttcagacatctgggcaccgctgcctcgcctaccaggctccgcctcgctgcccctcccgcttcccctcccctcctctatctgtcacttctacaaccgctctgattataattgatcaaacagaatcacggaatcacggctcatcttgccgttttgttcagtggcccgatccgaaacgagactctggtagtcgggcaaattgtattcctcctccttggaattccgctcacagaggccttcccggcgtggccggcccagcagggacgcgccgccgcagcggaggagagaacgcgggcggggggctgcaggccggcgcggggggcgcgacgccgccggcggggcgcgagggggtgtgtccgcgccgcggccaccgcggccaccgcggctggcgcccgggtgcgccgcgcgccccggcctccccgggggctcctcacgccgcccctcgcccgccggcggccggggcccgctccctttgacgtcatgcgggcggagggctcgctcgggcggcgctgccgcgggcgccgggagggggcccgacttcgggctccagtccgccgccgtgcgccccgcgccgtgcgcccggctccctgcgcgccgccgcagccacatctggaagcgttcagcgcgtctgcctccggcgcgccgggcgggcgggcgggcggcgcgggcaggggcgggcgcgggcgcggcggggctgggccggggggagtgagcgcggcgctctcgcgcgcccggtgtctccctctcgctgcctctgcagaaacagctcctgccagagcggcgctcggcgcggcgcggcgggcccggagcggcggcggcggctcttcctgcctccgcgcccaggagttgccggctccctttgacagcagagagccgggcaggggcctcaggaggactcgctgggagtgggcagaggcgcctcggcccctgccggcccaggcgggccccgcgcgccccccgcccctcctctccgcctcttctcgccctgcctctcccgatttattttttcaaatggtgtagccgccggaggtgcggtgctcagttcttggaaggggcccggatgtactgaggatgcgttacagtttcactcgaggaggcagtagtggaaaggagcagtttttggggtttgatgccataatgggaatcaggtaatcgtcggcggggaagaagaaacgctgcagaccacggcttcctcgaatcttgcgcgaaagccgccggcctcggaggagggattaatccagacccgccggggggtgttttcacatttcttcctcttc

SEQ ID NO: 31958 - DNA, 932 bp, Homo sapiens
  chr12:2861645-2862577
  hyper
cgccacatcaccccggtcctttagactcctgcgcattctatttccccgtttccttctcacacccactttcttccctggctcccaccacagcagtgcccatctgctcctccccgctcactcaggtctcctgctcaggacgcccttgccgagggcgcggggcatttgtactgaagaagggctgcaggagagtcggtgacccctccttctacttgtatgtagcggccccaagtgtcccgggagctggtggggcgcttgggctgtatgagcccggccgccaggaggctggggctgcgtcaggagctgtccgtggtgcttaagcggcgtctgctcgggcgcggggtgtggcgcggcgggtgagcgctgtccctggtcctggagaggttcctggcccccagtggcaacggtgagagcagtggcccagaaggccagtaccgggaacgacgatggcgggcacaagggtgggcttgcagcagctgctgctggtgctcccacaggctgcggttctccgcgctcagctcatccagccgccgctcctgctcgtcgatgcgctggcgctggatgtggacgaggctctgctggttctgcacgatggatggcccagagcccttgaggtacagcacggcgcgcaccgggttttccagcaggctctcgatgccacccaccgccgcctgcgccctgcctgcccctgggctggcgcctgggagcgcgagggcgcgggaacccagcagcccagcggtcctctcccacgggcccagcctccctcccgccgccagcgccgcgtcaccgccaccccgattgtcacacactcaccacggggagaggccgcggcccagagcaccccttcctgtctcttggtgtccagaggaggctctgcctcccgctgggcagagaggagagggaggaggccagcgagagggagcctgtgtcggggc

SEQ ID NO: 31959 - DNA, 911 bp, Homo sapiens
  chr12:29936617-29937528
  hyper
cgcagccccgccgccgggagggtgtgcggtccccgccgccgcctcgggcagaggtggtcaccaccatcgcgccgccgccgccgctgctgccctggcctctcccgggcgtctggcatcctcccctaccggggccccggcggcgcgcggcgtctgcccggaggggggctcgggcatggtgctgcggcagctggacccgccgcgagctccccgcgctccgccgccgcctgcgccgcggagttggcccagctgcaaataaacagcagtccccccgcctcccccggccatcgccacctcctccgccccactgcgcatgcccgctcgctctctcttccaccgccccccaatcccgggacgcgggccggttcccccgcacagcccggcgccctctgcccccggcccgccttgcttgcaggtggaccggggttcgcggcgcgcggctgcccgggagctgcggggaaggacaccccaggttcccacttgcggtgtccggctgtgctcacccccacgcccccgcccccatccttctcccccgaatggggctgggaaggggcacatctggcggacccctcccgggggacccaggagggtttagcaggtgcgcagtctggaacccccacacccaccttccagggagaaaagtgccgctgcttcccgggaagttcccggcttttcagcacccgggacaacagcagcggcgcccggagagacgctctccacccgccccgcgctcgcgtccagtcgccggctctgtgctctcctgcccgggctttctctcacccgcccggcgcggcgtcccgcttggcggaggaacccgcggggatagggagcaccttcctcaaagccaggagaaggggtctccctggacaaggacatcctgctcgccctgcccgggtgtgttcagaggcgccacc

SEQ ID NO: 31960 - DNA, 1049 bp, Homo sapiens; identical to SEQ ID NO: 28430
  chr12:3186011-3187060
  binary

SEQ ID NO: 31961 - DNA, 1186 bp, Homo sapiens
  chr12:33049135-33050321
  binary
cgcaccagtgaggggcgcggaccggcggagtagaaaaagaaaggggtgaaatcttgaagtgagttagttaacattgatagatatgtacaatatttaatatacataggtacctatatgacaaagctgagtaataggttatggaaaagagtgctttccacaagcaagtcggtcataccgaagacggcgagcaacaggtgggcagaacacggggtcccgcactcccagcacgcggggtgagggcgggataggaggaggtgaccgggtgtggggcagggggcggcgccggggagcggcgggctccactcaccgttgcccacggagctgcggcccttccgggcgagggtctgctgcacctgctcctggatccgcaggctcttgactgtctggccgccgcggccgctgctccccgccagcttcagcttggcctcggagggcagcgccaggctggagctgtccagttgtcccaggatctgctggcccaggacggtccggatgtagccgtactcagctggggcgccgggggctgccatggggccggtgggggcgaccgagctgctcgcctgcctctggactcgcgggcgaagccgccacggagctgggggcgctggcgcgagccccgccccgctcgagtccggccccgcccctggcccgccccccgcgccggtgagaggcccgggccgggggggagctcggcctcgtgggccggacgcccggccttccctgaggagggggcgcggctccggccgggcacgcgcagtcgggcccgggggcgggggcgggggcgggccggacccgctgagcgcgcggacacctggagacttgtacccgcccgcggggaggtggggagaggggcgcggttcgcctggggtcgcgcacgttgtcggagtcccagcggataccgcctgccggggccgcgccccgctctgcccacgccccgcgctggacaggatggatttccgctcgatgcagggaggggctgccctgcaggcaggtgagccctcgagagtcactcctgttcttggactgaggcttgcctccgggatccccgagcgagtagtatgtctggttagtcaggctttgtcgcactgttggaaacgtttcctggttttcctggacctgagggtgagaaagggctatttggtcaggcggaaagggcaatatgagggaaatgtgccaagaagataac

SEQ ID NO: 31962 - DNA, 756 bp, Homo sapiens
  chr12:3474897-3475653
  binary
cgggagggcacacggcccccagaggcccagagctcttcccaaggcacaagtgcagaaggcggactcaggcgtgtggttaaggaccccctgctgcgggcccctgcacacaccaacgcgtgctcccacgcgccgcgactcccccgggatgcctgccccacccctatccgcagccagcgtccccctgcccgccggccccgccacggtccatcagggactgcgggcggcggaggtggcggcgccttgccgggacccccagcctccctcccccgcccccggcgccccaccccacgcgggcgcgcttctcccgccgcagccgcccgcgctcacctggcccggacacgggctccgccacgcggtgatggaagctgagcctagagaggcggagagcggcggctcgcagggccacccagcggcacacggcccgcgcctcggcccgccccttccttgccggccgggggagtgtccgcgcgcctccagcccgccccgcgccccgctgcggtgcccagtgcccgccgtcctcacctggccagcgggacgcgcccgggaaccccgcacgcgggcgggccgcctctttgttagcaagtttgcctttctgtgattcagagcacgcggagcgaattaagtggagtgaggggtactgtgcgactgtctgcgggaaacctgcggggagcgcgggaagggatggacttgatgagccgcggcgcagcggctttcaaacctccccgcgctccgcagcccccagcccccgccctaccc

SEQ ID NO: 31963 - DNA, 1010 bp, Homo sapiens
  chr12:3599978-3600988
  binary
cgtaattcgccgaggaaggatccaggaactggcagaggagcgggagagctggggtgggccggggtggggagggtgcgagttaactgtggcccggtctcgcccggacctcgccctaggtgggagcacgcgcaccgggtctgagaacctgcaagagcctcgcccggcgccggctttctctgggccccccgcgcgggcctggcctccacgtaagttgtgtgcagcgccagggagtggaggcggccgagaccctcggagactaggggagggggcgggcccgggggcgctgggggccctcggtctgcgcccagccgccgccggctccagcgaacctcctaccccgcccccactcacccggctcagcccctaggagagacgcgcaggaagcgtgttgcttcgcccagcggatcggcagaagttgagaggagttggcggctgcctccggccggccggactttgcgagcagcctggagaggatccgcgaccgccgccgccgccgccgcggaggcttcggggctgcttccctcgagcttagcccgcagcgcgggtggagaggggcggggagggggtcgggggcacgagaagaacttgaaaccgtgtgaaggaatccggagcagatgagaagggaggaaaataaaagaaagtggagactgcagaacagactccgctgtggctgactgtgccggccgacgctccagctgaggggctgggttggatttttttttttctcccatcctctcgctctctcttttaaagcgacaccagctctctctcctcctctactatctcggtatcaccaaacccttgccggctcttatgggcatgaaacactcctcccgctgcctgctcctgaggaggaaaatggcggagaacgcggccgagagcaccgaggtaaggaggcgagcgagcaggggctctcggagaccccgccgcccacccggaccaccgcgccgccgccgccgctcagcgccgagtgccaaactttccccagtttcatcccgctcgcttctgcc

SEQ ID NO: 31964 - DNA, 487 bp, Homo sapiens
  chr12:4140253-4140740
  hyper
cgcagcaatgcgcctccaagccgggcccaggccgagcgcctctcgccgccgcgcacattccggagggggaccgcggggctcaaagggcctgcggcgtaggtggctcagccctttccttggctttccctccagggccatacttgccgaaacccactgcctgagcctcccgcccgcccgccgcgcccccgcccggggccgggaaacgagcagggacaactccccgcccgcgcctccccgcgcccggcggcccggctagcaacccagaggcgcggcgctgcgattggctgcgcgggggagaaggggcgctgcgctgctccaatcgccggccgcgcccggaggccgcgccgccaggaggccgcggacgcgtgctcgcatgcctgtggtatttgctcagaggggcatgaccacttcgggcaagcctttaaatgtgagtcagctttcggccgatccctgggaaaaattccttcggtgttgtcaggcagggttc

SEQ ID NO: 31965 - DNA, 977 bp, Homo sapiens
  chr12:43945085-43946062
  hyper
cgacaggaccagtgagctcccacgcgttcctcattgtccaactctaaacttcttccaccaaacgtccccgctaaaggtcccaggtcccagtacagccaggggcaagacaaatgcacacatgctgatgcgcacgcacacacacacacgtgcactgggacggttagtgctctgctttcccacacccccaacttgccctaccctccccaagcaaagaccctaccactaatggccctaagcaacccacttccttccccagtacctcctaacctccccgcagcccccaactcgttccctccgggtgcaagcgaccccctgccccttgcgcccccgccgtgtggtcctgggagtgcgatgcgtcttaggcgcgcgcgattcctcgaaacccggcgcagtcgcgacctctccggctgactggtccgggagtcccgggagctccagcagggccagcgttccccaacgggctgagccgctcgtccccgcgacctgcatgtcccactcgggccccgcgcccccacttagccgctgaaggcgtctcgcggtgactttaccttgcctggggtggaagtcaacttcccaagacctggtgatgaagagcgagagatggtagagcagcccagtcagccacttggccacccacatggttccaccctggggaccccgatcggggaggcccaccagagccgccggcagccaagccggcttccctcgcgctccgatccctctcctccctctcgcccgccgctctccgcgcctcagcagcctagggaacagcagcgcgggccctgggccggctggtccagccacaccgcctgtctccgctcgctgagccgctgcttcatcgcactgcagcctcaccccccttcctgcgcccgcgctgccctcagaaactctctgctcaggttcagctcggcgcggggaagcaactcgacctagcaggaatggtgccaatatagccaccccggaccggcgagcgccgc

SEQ ID NO: 31966 - DNA, 292 bp, Homo sapiens
  chr12:52242120-52242412
  hyper
cgagaagtgaccctcggctcccacgtacccgctagggtctctcgccggccctgccctccgacccccgccgagctgaaccccgcgactagcagcccccgccctctcggccctctccggccccgggccggcggacaaagctccggacaccctgaccgaacggtcacctccccccgccccatcccggcccgcccgcggccccgtacctcggcatcacggccgggtcctaggtgagtgtgcgcggcctgggggcgcgtccggcccggggaccggggcggcggcgcgggccgggggc

SEQ ID NO: 31967 - DNA, 265 bp, Homo sapiens
  chr12:53342685-53342950
  hyper
cgtgtccatgcccggttggccaccccgtttctggggggtgagcggggcttggcagggctgcgcggagggcgcgggggtggggcccggggcggagcggcccggggcggagggcgcgggctccgagccgtccacctgtggctccggcttccgaagcggctccggggcgggggcggggcctcactctgcgatataactcgggtcgcgcggctcgcgcaggccgccaccgtcgtccgcaaagcctgagtcctgtcctttctctctcccc

SEQ ID NO: 31968 - DNA, 1402 bp, Homo sapiens
  chr12:54332438-54333840
  binary
cgtgcgcagagcgggtcacgtgggcgcgggaggggtgctgagaggtggagagcgggagccggcggatttcttaatgaagtgtctccgcatgcgtagagggaatgtagggagggaggtggaagcactaggaggaggggaggggtggagagaaaagaggggagggatggggggaggggaaacaggagcgaggtgtctccctagctcgctgcctctggcaagtggagtttttaaaaagctccagcagatcatgtcatgacgacttcgctgctcctgcatccacgctggccggagagccttatgtacgtctatgaggacagcgcggcggagagcggcatcggcggcggcggcggaggaggaggcggcggcacgggcggagcggggggtggctgcagcggagcgagccccggcaaagccccgagcatggatggtctgggcagcagctgcccggccagccactgccgcgacctgcttccgcaccccgtgctgggccgcccgccggctcccctgggcgcccctcagggcgccgtctatacggacatcccggccccggaggcggcgcgccagtgtgccccgccgcccgcaccccccacctcgtccagcgccaccctgggctacggctaccccttcgggggcagctactacggctgccgcctgtcgcacaacgtgaacctgcagcagaagccttgcgcctaccacccgggcgataaatacccggagccgtcgggcgccctgcccggtgacgacctgtcctctagggccaaggagttcgccttctaccccagcttcgccagctcctaccaggcgatgcccggctacctggacgtgtcggtggtgcccgggatcagcgggcacccggagccgcgtcacgacgccctcatccccgtcgaaggctaccagcactgggctctctccaatggctgggacagtcaggtgtactgctccaaggagcagtcgcagtccgcccacctctggaagtctcccttcccaggtaaggaagggacccgagcgccgccgccgccggggacccctccccgccctgcctgccccggggctccgcgccccaaccacccccgccgtctggccccggcgcgcccgctcggctgggctgcctatggagccggccgggcgagctgcactgaggaatgcgccggggaagaaatctgctccgacacgttctctgtagctgcccggccgagaatgaagcaatcacaggcgcccgaaagccgggccgccggctctgctctgtccggtagctcgcctccgcctccccttgcaggctccagcctcccgccgggctcttggcccctaaacctgcttccggcaagggatgggggcggggtgggcctatagtgccttggaatccaggacaaaacccccaacccaccgaataactggggagggc

SEQ ID NO: 31969 - DNA, 822 bp, Homo sapiens
  chr12:54366668-54367490
  hyper
cgcccatcccaccgcccaccccaccccaaccctctctctcctcctttgctcgtgctgtggtatggagagaaggggagtgacgagagaaaaacgaatacaaatctgcaattgattttcataatgtttctgcggtgtttgcaaaccaatcgcctgaacgtccccgatcttacctaagagagaacccctcctacgtctgcgaagtgctccgaactgatatatgacaatatctactttggatcacgtgctcagagagagagagactaagacggataacgcgtcatctcgccttcccaaattttcccccctcgctagaccgggtccaaaacctccatccggagccggcaggagaggagaacgatgtttaactcggtcaacctgggcaacttctgctctccgtcgcgcaaggagaggggcgcagatttcggcgagcgagggagctgcgcctccaacctctatctgcccagttgcacttactacatgcccgagttctccacggtctcctccttcctgccccaggccccctctcgtcagatctcctatccctactcggcccaagtgcccccggtccgggaggtctcctacggcctggagccatccggcaagtggcaccatcggaacagctactcctcctgctatgcggcggccgacgagcttatgcaccgggagtgcctgcctccttccaccgtcaccgagatcctcatgaaaaacgaaggctcctacggcggccaccaccaccccagcgccccgcacgcaacccccgccggcttctactcctcagtcaacaagaacagcgtcctgcctcaagccttcgaccgtttcttc

SEQ ID NO: 31970 - DNA, 956 bp, Homo sapiens
  chr12:54379055-54380011
  hyper
cgcaatgtaactccgaactcgtacgcggagcccttggctgcgcccggcggaggagagcgctatagccggagcgcaggcatgtatatgcagtctgggagtgacttcaattgcggggtgatgaggggctgcgggctcgcgccctcgctctccaagagggacgagggcagcagccccagcctcgccctcaacacctatccgtcctacctctcgcagctggactcctggggcgaccccaaagccgcctatcgcctggaacaacctgttggcaggccgctgtcctcctgctcctacccacctagtgtcaaggaggagaatgtctgctgcatgtacagcgcagagaagcgggcgaaaagtggccccgaggcagctctctactcccaccccttgccggagtcctgccttggggagcacgaggtacccgtgcccagctactaccgcgccagcccgagctactccgcgctggacaagacgccccactgttctggggccaacgacttcgaagcccctttcgagcagcgggccagtctcaacccgcgcgccgaacatctggaatcgcctcagctggggggcaaagtgagtttccctgagacccccaagtccgacagccagacccccagccccaatgaaatcaagacggagcagagcctggcgggccctaaagggagcccctcggagagcgaaaaggagagggccaaagctgccgactccagcccagacacctcggataacgaagcgaaaggtaaggccgcctgggccgcgggcgccactgggacgttccggcacttggtcttcgcggccggggaggggggcaggggagagggttgggcccaggaggccccagaccatttcgggaatgcgaccctggctttcgactagcgtccgctgagctccaggctggtggcgcgtcacttagctggggaaggtaagcggcgacgtggaggtgtcggccctgcccc

SEQ ID NO: 31971 - DNA, 898 bp, Homo sapiens
  chr12:54387801-54388699
  hyper
cgggaggaagaaaaggcaagagctcgccaaggcgagccttggtctctgagatctctcgtcggctgctggggctccggctcagcctggcagatccgctgtggcctctctgggacctcgccccggcccacggcctgacttcggctcggagatgcagcccttcccgagaacaggtgaagaagacggcggcagcggggactgggggcttcgggtgggaacgccagggctcagggctttgtgtgggtcgtgcagggggcgaggttcgaagtcctgggctggaccgcagcacgagtgtggcccggacggctgcgtggccagaaggggtgttcgggcagggtgcgagagcaccggcaaggtggattgtgtatggactttggccgcagacagagcagagcgggctcccgggctgtggccggcggcgaggcgggcaaccgcatgttgagtctatagaaaggaccttgaggtctgctgggtgtttgggctgccctgggggcggcggcccagagtgtggagcaagcggcgcgcggggcgcggcggtcagcgtgggagaggctgcaggccctgcacgcctctgcagctgccgggccgtgtccgggacgtctgaactgaggccgaccaatggtcacagcatgaaaaataaatgcaatggaaggtctttctgtcttttcttttccgcgtaaaaggtcctttcttttttctctctttcggatatacctggatttggtccagaccaggttgcccgcgggagggccccgcgagcggcagcgcgcgagggagggagagagagggagggcgagaaggagggagggagggaaggagggcgggcggcggcggccgtggtggccggggcttccctccccaggcgggagccgcctgtcctgtatctatggccgtggggagc

SEQ ID NO: 31972 - DNA, 980 bp, Homo sapiens
  chr12:54393256-54394236
  binary
cgctccccttccctccttccctccctgtatctcagcttccccagtcccctcccaccctccctccctcaccgcccctgctgctcctgaaagaaatacatacatacacactatttaaaaacgcatttttaaaagccacgttccgaactgacaatcgctgatctcggctcgcgcagagactgcgggagcgtcggggccgacagagacggattacgtcaagaaatagttcctccacctacctcggtcggcctccccgcccctgcggggctcccgcgcccagctcggccctgggggtccgagaaccctggcttcggggactggcattttcaccccattaaaaaatcctcatggttggggggaggccatctgcttatgggtggacatgggcacaggggcttctcagatgagctaggagccgtcctgagggggtgaccggtgccttgggtccagagttccggacccccaggaaatcgcaggtcgcggggagcagcagagagaagggggtgggagagggggaaaagaaggcaaggaaaaaaaagcccctgcgcattgatccgcgccgtatttttgggtaaatacgatcacgtgggggccggggagccaatgagctgtggggaaaaggctggaaaaataattacctgacttgattgttctgtgagcagataaaaagtacatatacagttcatacaataatcttatgtatgtaaaaccccgttacgatgtcggcgacggggcccatcagtaactattacgtggactcgctcatctctcacgacaatgaagacctcctagcgtccaggtttccggccaccggggctcatcccgccgccgccagacccagcggtttggtgccggactgtagcgattttccgtcctgtagcttcgcgcccaagccggcagtgttcagcacgtcgtgggcgcccgtgccctctcagtcgtccgtggtatatcacccgtacggcccccagccccacctcggcgcc

SEQ ID NO: 31973 - DNA, 152 bp, Homo sapiens
  chr12:56882303-56882455
  binary
cgacagtctgcggatgcttccgcgtgggcccggcgagcgcgggtatccgcggatgctgagggcgggaaaggcgaggacaagctgaggcgaagccggtgggggcgggaggcgctccccgggaacaccgtggggctgcgaatgatggagttgtc

SEQ ID NO: 31974 - DNA, 768 bp, Homo sapiens
  chr12:59313762-59314530
  binary
cgcgggaagaatacttacagccgagcgacccaggacgggagtggctcgggaagacgcgctagccgcttacgactgcagtccagcaggtccccgaggcagcggcaggtagtggggcatgggcgctcggcggctaccccagagggctgcccgagttccccgcgaccgccgctgtctgaccggccagcgcgccccagcaccgcgcacagcagcagccccaaccccgcggcgcgcgcacggaggctcggcgcgctcatcgcggtccagcggcctaggtctctacccgaagctcccagccggcgcgcgctcggggcccggcacaaacttccagccgagggtgcacgcccgccctcgcggtcgcgtgcgcgctcctccctcgcgctgcccggtcaattccttcttttactcccggcggcgaagccctttcatgcccccaaacagcaggagggaaaccgaaaagaactgccaactgcaacagagttgcagcttgagcagcgtcggctcgccgaagccccttcttgtctgcaaaagaaactttttcgcctccaccccgcggcactgcgccaagtccccgcgcggcggagtagcaaggcgggcgggtagaggccgacgcgcgcccattggccgactcggctgcgggcgtccccgtggccacgtgacaataacaccgctccagccgggggcctacgcgcgggagaaagtggagctgagattgtaggaaattcagagttatattttccagcctctccagccagaagtctccactacgtc

SEQ ID NO: 31975 - DNA, 764 bp, Homo sapiens
  chr12:63327114-63327878
  hyper
cgggaaccaagcctgccccggggtatccgggccaccagaacagggtcagcatcaaggcgcccaggcattggaagagctgattggttcccggacgaaccaatcaaccagcgaggccgtgcacggataggggagggccaaaactaccgaggggatggggttaaaggaaaaggcgcaggtgtgccagccaccaggttttgcgtgcacttttgcactccctggttcattaataaccttgaattctattctaaatgtctcctagttttcccgtttcgtacagctgaggtagtagatagaagggaaaacgttacttatcttaccattcataagatggttattaatagtcagtggaaaagtggccatggagctgggggaagggcaataaaatcctccacctctcctttcccgattccactctgggtcgtcaacctaactcagtcggttcctgaaatagctgatcagtcaaacgcaagcttaatcaccaaagcggattaccaaaatgttatattagacagttggaataagtttccccctccccaagggctgagggaaatagtactggcatttaccgaaagcgcagcattttactacctgctaaaggagaagcggaggaactcgcgggctgaaagtgagagaaactgagaccttcggaaatgtacaaccacgcactcggacacggccacctcccggaatcggacacaagctcccaggcgcagtgacatctcctccaagcctccacccccataaactcttcatcacgcgggggc

SEQ ID NO: 31976 - DNA, 970 bp, Homo sapiens
  chr12:63544148-63545118
  hyper
cgggtggcacaccgcgatgtagcggtcggctgtcatgactaccagcatgtaggccgacgcaaacatgccgaacacctgcaggtgcttcaccacgcggcacagccagtcggggccgcggaagcggtaggtgatgtcccagcacatttgcggcagcacctggaagaatgccacggccaggtcggccaggctgaggtgtcggatgaagaggtgcatgcgggacgtcttgcgcggcgtccggtgcagagccagcagtacgctgctgttgcccagcacggccaccgcgaaagtcaccgccagcacggcgatctccagtttggccagctcctcgttgcgcacgtccctcggtgggccgttgccctccccgagggcttcggcctcccggcttgtgttgccagcgccggtggccagaggccaccatgggctggagttgcccgagggccccgcgtcgggaccggcggagagacgcatgctgtccatgcagctcctactcggccctcttcggagctccagccctcgcgggccgctccctccccgtctcggaggacttgggctcctcgtccgaagcgcagggtctttggcgcgctcgcagcttgccgggctctgcgatccctccagtgggcgtctcccggagcagcgtcccgcctgcccactgagcagctctcagcagggtgagctggcccctctccctgctctgccttttttcaacttcggcgaggtcgggaaggtgagctccgagcttccggaagcactgggttcccaactcaagtatttatgcggtgcttgtttccttgggacgcgctccctcccgccctattgccggaagactgctggttgcctactccccgctccctggagttttattttttcctctccctacgtcggtgtttgtcctctgcatcactgtggagggggtggagctgggagactcgcagattcctcctcacagtaggtgggatcgtggcgctttccc

SEQ ID NO: 31977 - DNA, 690 bp, Homo sapiens
  chr12:6472476-6473166
  hyper
cgcgagcccacgaggccccgcgtggtgtcactgggctgcgcgggcgggtcaggaaaggagcggagcccatgggtgggcggggccaggggccggcgaggggcggggcgggcccctcggcgctgcgggcctcaccagctggaagccgatcttccagtccttccagtccacctgggggttgttgtcccgcaagctggaggccacgctacgggctcgacgggccccgtgaggcgggggcgggaccctcaggcgctgcaaggggtgcggcagagtcccccgcaggtcgcgacggctgcgggagccggccacgagagtggtgaaggagctgtatttgtacaggtcaaagagcgtctgctctgtgatgcggtccagctcctccagctcctctttaatttccgggtacctgaaggggcgaggggaagagggtcaggccaggggccctggagcgagtgtctggcccctccggggtcagggtcctcatctgtgccccgggaggccggtccatcccggagaagcctgggcggggctggggtcgtcgtggcgcctcctggccgtccggcggtgaagggtaaacaggtgtgtccgccgggaaggcggaggccacggcgagcccagccgggacactgtggactgtttattgaaggagagaggcaggaggcgcctgtcgtctgtggggcgctctccccctcgccc

SEQ ID NO: 31978 - DNA, 1205 bp, Homo sapiens
  chr12:66135079-66136284
  hyper
cgggaccaccggccttagccttctccaagcccagggcagggcgagaagaacatggcccggttcccctcggggtctctggcccagctgcggagggggaaaggtgatcgatcttgctgggggccaccgctagcccaccgcttcctgccgcgacctgccgcggcggccggagcccgggagcttcccattggctcacgggccgacgccatgcagtctgggggggcgtggccgggcggcggggcgtggccaggcggtgcggggaactgcggagagaggagaggagaggagaggaggggaggggaggggagaggagtggagaggagaggaggggaggggagggcaggggcggggcggggccgggcggcgggggcgcacaccccaatctccctagcgctgtgggggtggctgcagctccccgcgcgctccctcctttgggggggtttctgggctcgtgacttttttttaaataaagaatgagcggatgcccgtgacaagttaatagctctcgccgcgctctaaagttaagttgtatctccttcccgccgcgagtctccttccacagacccgccggagctgccgggacgggcgctgcgcgggactgggcgttaggtgctcccggctggttccggcgagcagcccccacccctcgcccacgctcggggttagagaccccagcaccccacgcagacggcccgggcttagacctctccacgtcgctgtggcgcgcgccccgccaacacccccaccccacgcgcagcccgtgtcttctttacccccgcgcacttaacgcagggcgcacgcacgcatcccggccccctcacactcacactgcgtcttctgtcacaccccctgtcgcacacacactgttctctgactcccaccatctcctgtctcacacccactccagtttcgtgttgagcggccgccagttctccctcggtcgcgccggcgcacgctcgtccccttctgccccggagcccgcccgcgccgcacggtggccccttgcgctggcctgatcgtgggaaccaggcggggccccagcgtccctgcccctgcccggtcatccatctccctcccggtcggccagccgagacttcaaaggcgcctcctccggccgggcctgccaaaccccgacgcagcctggatgtgggccgggggcgctccccggcggggggaggccgggccagggcgcgtctggggccggctcc

SEQ ID NO: 31979 - DNA, 748 bp, Homo sapiens
  chr12:66217380-66218128
  hyper
cggttgcctctagtctttcctggagaaaaaagttcaatgaagaagctggggcgctctgtgtgtgcacattgtttgcatgtgtctgcgaatgtgcatgtctatctgcgtgcctgtgtgtatgtgtgtgtgtgtaaatgcgggtgtttaccagcgcatgaatgcccccgtgtccacgtgtatctgcgtgcatgtgcttacacgcgtgttcgtgtgtatctgcatgcatgtctccgtgtatgtgcgcgctcgcccgcccgcaggctctgtggtgagggcattccgaggcggagtacggctgtcaggggacctctcccactccactgcagtcccttcccactcacagtgaaccggtgcgctgcctgaggtgcagcctagacgcttcctgcaaagtgttggctcggcacggtagaggcgcaggtaaaggccaagccccgaaacgtggctccgggacagtcacgttcccgcgccttcccaggacaactgcccaggggtgacctcgagaggcgggtggagctaggcccacggcgagccagcccgggatccccggcctgtccctttaaccccgccgccgggcgggagcacgtgagcggggctccgggtggcacccgggcgccgccgccgccgaggcagttgtatttcgaacgctgcctctggctagcagccaggcgccttggctcggcggtccgcctggcctccctcctcctcatacttttcttcctgcgcaaccccctcccctttatccgcccac

SEQ ID NO: 31980 - DNA, 1765 bp, Homo sapiens
  chr12:66218548-66220313
  hyper
cgcagggtggggggaagaggaggaggaattctttccccgcctaacatttcaagggacacaattcactccaagtctcttccctttccaagccgcttccgaagtgctcccggtgcccgcaactcctgatcccaacccgcgagaggagcctctgcgacctcaaagcctctcttccttctccctcgcttccctcctcctcttgctacctccacctccaccgccacctccacctccggcacccacccaccgccgccgccgccaccggcagcgcctcctcctctcctcctcctcctcccctcttctctttttggcagccgctggacgtccggtgttgatggtggcagcggcggcagcctaagcaacagcagccctcgcagcccgccagctcgcgctcgccccgccggcgtccccagccctatcacctcatctcccgaaaggtgctgggcagctccggggcggtcgaggcgaagcggctgcagcggcggtagcggcggcgggaggcaggatgagcgcacgcggtgagggcgcggggcagccgtccacttcagcccagggacaacctgccgccccagcgcctcagaagagaggacgcggccgccccaggaagcagcagcaagtcagtacgagggcgcggtgggggcaccagcccaccccgtccccactgccggggcccagacacgcgcggggcggccggagtgcgggagcccagtcgccgcggccgtcgcacactgcccgccggccggccggggggagcggcgcagaccccacgagtgcgccgcgcggccccggggcgccagcaaccctccgggcggggaggtggggagccgcggcgggcggcccggggaaggcgggaggtggggtcgggcgaagcgcgtcctcggactttcgctattgtgcacggccccgagtggcgcggtgtcgcccagtgactggaagcgaccgggatccgacaaacccgggctcgcaggcgctttccgagttgcttttgcaactgcccgggaggaaggaggtgccggggacccgggcgcttcggccgatctgggctgaaggggctagagtcttgggggccggaggctctttctcccgcctcccggggctgctcgcgggtcgggggctggcgcgccgcagccgcccccttggcgccctcctccaagctctcggtggcccaagactcgcgccctcccgacaaagaacgcatggagacccggctgcctggtcctttttgggctctttaaatatgcggcggccgccggagggagcccggggcaggggctacggggagcctggttccccgcaggacggggttaactcgcccagctaagggcgcgttgaaaggagtgtccaagagagtgcagggtagccagggtcgcttccttgtcaggggcccggtcccccttttgcccctggatctcgcgcctcagagctgcagccattaaatgctcttctccaaggccagtggccgggggttgagtaggggacgatcgaggggcgcccgggaccctgcggagtggagggttttgtctgcggatgcaaccaattaagcgtgcagccggcgcttgcagagctgcgctcagcgcgcagggctgggggttttgttcgctgtaatttccaagccgcggcgggcagagttggagcgggatatgtctattgagaacatttaaactccactttctcgggctttaaaacttgctctctgcttagtcttaaatcgcttccttcatggcaaacacgccgattagaaaataatcctagagtcccaaagttgtcc

SEQ ID NO: 31981 - DNA, 988 bp, Homo sapiens
  chr12:69326527-69327515
  hyper
cgcttccatcccttcctggcggtggtagttgaaatccagcgcagctaccaaaggcagcaacagccctagccagaggcacgggaagtccatgttctagagatgaataaaaataagaagaacctgagaacacatgagggcaggcgggggcatcaccagctacgtctcggtactccggtctcagggtctcccgacactgacgctccctgcctcctaaggaggcaaaagctggaagcaacaccttcgggagtgagccgtgcaaccagagaccgggagcacgggcagcctcggtgccctcgacccagccgcccgcgcctccctctcctcctcctcctggcgcctccgccgtccggcagctgccacagctgcgcccggccccgcgcacccccagcctcaccaggtcccaggcgcgcacctctacccacccgcggccgcccggcggggccgggtgttatagcccggtcagagggcgggcgcgcccgggccccgcccccggacgtccctccggcccactccggagccgcgcgggtgcctcccgggcggggcctcagccgccttcgcacctaggagagacggcgcccgcgcggtgcgccctttcgtggcgcggctgctggtgcccgcggccgggcggctgagctgggcggagggctgcgggcatggagtcgccgctcgcggacagtctttgctggagccccaggtcagaagtgtgtcctcgcctcggccacggctgtagcctgggcagccacagggcgctccaccgagggacactctctgtcgcagactgcagccgcttgggagacgtttagggctcggcgggtttcctgcggttggcggtgccggggcccacctggagccgggacgcatgcggagtcctgagtgccctgagccccgcgcgggctcctgcgggacgggcggcgtcggccccggcagggcgagccaagctcccagcagtgccaagctgcccagcgaggctaagcaatcacggggcttc

SEQ ID NO: 31982 - DNA, 1447 bp, Homo sapiens
  chr12:71833328-71834775
  hyper
cggcgcgcggcgttgagcactgaatcttccaggcggaggctcagtgggagcgccgagaactcgccagtaccgcgcgctgcctgctgcctgctgcctcccagcccaggacttgggaaaggagggaggggacaagtggagggaaagtggggccgggcggggggtgcctgggaagccaggctgcgctgacgtcactgggcgcgcaattcgggctggagcgctttaaaaaacgagcgtgcaagcagagatgctgctccacaccgctcaggccgcgagcagcagcaaggcgcaccgccactgtcgccgctgcagccagggctgctccgaaggccggcgtggcggcaaccggcacctctgtccccgccgcgcttctcctcgccgcccacgccgtggggtcaggaacgcggcgtctggcgctgcagacgcccgctgagttgcagaagcccacggagcggcgcccggcgcgccacggcccgtagcagtccggtgctgctctccgcccgcgtccggctcgtggccccctacttcgggcaccatggacacctcccggctcggtgtgctcctgtccttgcctgtgctgctgcagctggcgaccgggggcagctctcccaggtctggtgtgttgctgaggggctgccccacacactgtcattgcgagcccgacggcaggatgttgctcagggtggactgctccgacctggggctctcggagctgccttccaacctcagcgtcttcacctcctacctgtaagtacttccccacgtcactccgggagagagactaagaggggaaggaaggttcgtccaaggcgaggctggaggctcctcggcgcccgcctgctcgtgggggaggggggcgagtttgtcaagggcatcctggccaggcctgttagggcccccagagaaatgcacgtgtctcggggagtagcgtgccggcactttctggacccgcagagaaatggcttcgagtgcaacccgggaaagcgctgctgcgccgcagcttcccagtccagcgctagaaacatcgcagggcgaattcctgcaaatgcaggcatttgcgtgcggagtggacatttgtgacccagagcctggtacccaaaggcaggctgccatctggtccccgccccaaccgcctctctgcgtctagtcgcattccacgaaaagatggtctgtagaaagtttccccaaaggagaaacaacttgcccagctccaaagggtttttagtctgcatcccttgcactgtgacgtgatgtaacctttttggggttttttcctcttttcctcccttccttcctcccttcttccttccttccctccctcctttctttttattttctttcttttttaacggcgtgattaaaatgtggcaaccacaaaccccgattagagctgccagaacgttatctttacctttggctgcccgcgccgccctttgaagtgcccgcggcc

SEQ ID NO: 31983 - DNA, 607 bp, Homo sapiens
  chr12:75602890-75603497
  hyper
cggaaaggcggagcggggggatgctggcctgcagggtcaacatgccctttccaggaaatcgcccctttcaccacccccgcccccatttccagataccttaacgagaccgagagaaaagtggttctgctttggtttccgagtggacgaggttctctgggcagcgggactgagtcttggcgcccaggtgagccgcccttctccgacgagaaactacttgttggcgttttccggattcaggtggttgagccgcttccctgggcgctggggtgggggagaaagcccccgccggccgccggccgcgctccccgccttcattctgtgatctgcggatttgccagtcgccaacctccgcgcccagagtcaccatcgcgcagggttgggcaaaccatggagctcggggcgggtccagccggcactgcccgacccctccgggagcgggcagatcggctggccgtgaatggagtggagactggccgcaggtcaggagagctcaccacttgaaggtgaagtcgccctgctcggattccatctgcagattttgtttctcccccaaatcagccactgctggagctgtcccttcagcaccactcgccatcaacctcccgcc

SEQ ID NO: 31984 - DNA, 1630 bp, Homo sapiens
  chr12:81330233-81331863
  binary
cgttcagtttaatcctctagaaagaaaatttttagaggtacatcggactaaatcattttcttctgagtacaccatttccaaatggccgcccagggtcctaaatccggcggctgcggagagggactagagggtgtcctcctctgcagagccgtaggactcgagcgccttcatcactggacgctggagccaggaaggaaacccacacactcagggacaggtataaccccacaggggtgcaccagtgaggccccgatcgcagcggaggactccatccctgagcttgtgagggcgtcctggggaggaagcgaacactttccccgttcaagtcagagagcaggactcactgggtggcaggtcagaagttgaattttaacccgacctgcgctttgtccccgcgccttccgcagcctgggcgccgcggtggcaccgagctgggagaggacacgagaggctggcgcgggagaagccgagagttgctatcgaccgggagctgccggcggcgggagcagacgcgaccctcgccgctttcgatctcgaagccgcggagagccgatctcggctgctggggctcggctccccgcgctctgccttgccctttcggcagagggcagctccctgcctgctgcagccccgccactgtgcgcccggcagcccaggggtgcgcccagcccgccccccgagtggccgccgggactccagcagttggaccgaccctcgccctccggcgcctggacaaacttccttcctcccgggcccctgcgccaagcaagctgacaggcggctccctcgccggtctcctctgggctctggccgggcgagcttgctctctgcccctctccaaccccgagcccctggcgcctatagccgtccccgcgcagcggctccaacaaagccagaggaccggagacgacccggcgaggggctgggagtggcagcggggaccccagagccagaaggaggcgtcccctcggcggggcgagtacagtgggaaggggcagcgggaacgtagcggggagagaaaggggaagaaagtgttctgttctcggcgcgaacgccttcctggctcgtcctcgttccccttctcctcctgcctgagcgcgtcccatgtcccgttgggaattggcaggcggggaagggaggaggggagaggggacgcggtggcctggcgagcgagccgctcccttacctctgtccagggtgagcggctggaccactgtcaatgtcgccatgtctgccgtgggagccgaagtgacgctcggcttcagcatcagcaaccgctcgtagtgagaaaaaaaggaggagattgggggcgggggtggagagggaagacggaaaggagggggaggagggggaaggaaggaaggtggtggtggtggagaagaaagcttgggtgggttggtagccagatggagacgcaactgttccgcggcggcagatcttcagttgcggtgcggagctgagcaggtatccgagagcgactgcatcgccgggctctgggagggaaggctctgccctagaactttgctattccacccccaggagcgctgggtgggtgtagctggcgggttgcttcctttcaactttccactctaataaaatggtcagaatatacgtgtgtgcatgcgggtgc

SEQ ID NO: 31985 - DNA, 858 bp, Homo sapiens
  chr12:82152624-82153482
  hyper
cgcggcgccgctccccctccgcgcccgggccacccggggtgtgtggggcgtccctccaaaagaaagcttggagaaaaggcgtgagaagtatctgggagagaagttctccacccagtctcccctcctggagcccctctggagtttaaggctaaccctgggagttagaaacctaaaggaaaacgagtccctagggatgcaaaaagcaggacaggtctcctcctggcccccagcctgtttccgcgcgctcccgtgtctcgtttcacttaaaggaggcgctttttctctggaaaggcaaacatcaccccacgccgtcccccggccccccttccctcccccccgccgcccccccgccgccacagcacacacacccatttttctcctcccggcctttctgcaagcctctttgcttgcttcaattggccggaagaaccaacctgctggcagccggtgaggacgctacagcatcttctctcctcacttgcctcgtgcggtggctgctactcctcctcctccgtctcctcccctcctcctccttggcagccaccacctcctcttcctctggaacaagggcttcccctggaagctgctgcagtggtttccaccggcccttaaataaattctgaagtaatcacgtctttgctctcctcctcacgcacacgcgcccgcggatacactcgtctcccccagagccgctcccgggctgccgaggctcgctctgctcccagtgccccctgcgaaggcgagggccagggatgggcaaagtgggaagggggcacacgcttccccgcctgggcttctttcacacaatgggctctacagccttcgcttgtgtcagcctgcgctggtggggatgggaac

SEQ ID NO: 31986 - DNA, 322 bp, Homo sapiens
  chr12:85306620-85306942
  hyper
cggaggcgcccacgtgctcggcccgcccgtgttacggccgcctaccggctgcagaggagaagggtaggctgtgggcggcggcggggcgcggaggggtagccaggagcgcaggctgggctccgcacctccctgccccaaaacccattgatgcagcggccactgcggctgccgagcggcgtcttcccagagcccggggctgtgcccgcccgatgcaggatgcaactgaggaagcccgctccaaagcaaaacaaaacaaattcctccagccatgccgtctttctccaacccactcaagcgaaagaatggacaccagttaccagcc

SEQ ID NO: 31987 - DNA, 1353 bp, Homo sapiens
  chr12:85673619-85674972
  hyper
cggcggcaatgaatctgggtgtcaggggctcgtctctcctggcatttgtctgaaatggagctgtctgtctgtctatcctaggcctggacgccctctgcccgggtaagtggggaaaatgggggtggggtaggggcggagggggacctggggtggagttagtcgcccgcctattttcatattcattagaactgggaggctgcccgaggaggccagctgagtttcaagatataaaagcaacttcgggtgctccttttccagccgggacgtattaaagggaccggagcggggcagttcccgacgccgcagcgctcgctttcccttccctcctctctggccctccctcctcccacccactggctccctcccccagcgctctccagtttctgtgccccaggagctacgcgacagtcttccaggattatggagtttctgagcgagaagtttgccctcaagagccctccgagtaaaaacagtgacttttacatgggcgcaggaggtcctctggagcacgttatggagacgctggacaatgagtccttttacagcaaagcgtctgcaggcaaatgcgtgcaggccttcggacccctgccccgcgccgagcatcacgtgcgcttggagaggacctcgccctgtcaggacagcagcggtgagtcgctagcgccccagccggagccgccgcagcccttccgcaatcgaaaatgcaggatcggtctgatcaggcagggagggagaaaggagaaaagtgggagcgagggacctggaaggtggaggaaggtagtggaaggtgctcgctttatgaagcggtgttactgctgctgcagcctttgggggcggagggcggagggagggagagatccagcaccgggttgcctctgagcgattctcctttcgctgtagggtctggtcgcctacggatccctgagtccttctgtaatattggttcctggagtaaactgatagggcgctaaatagagcgtaattgagtcaagacagaacgcttcctctgcgagcccgccttgcagtccgggcggtaggaactgaaatcgatcacagctcgttagagtacgtcactgtcgtcacgagtagggaaaaaaaaaccggaaaacaaaaacaaaaaacaaaaaaccctttgagctcctttaggtaaagataaatctttttaattttccaagacgtggcgatatattttcaaagtttgaggatccctagatttctagcgtgtgtgaatttgtaatttctgcttttttttgcgtttgcaatacaacacgcgttgaatgtttgttaaacactaaagcacactaaatagcttcgggcaaaccatccccggcctaatcactcattcccagattctac

SEQ ID NO: 31988 - DNA, 848 bp, Homo sapiens
  chr12:88973866-88974714
  hyper
cggctcggctcgggatcacacaccacgccggcctcccccgcatcctcttgtctcacccggcaggcacagccctgcacgccccagctgcaagtcccagggagcgccggcttccccggggcaccgggcgcgatttttcctggagagcctgggagctcccgggcgcgccctactcacttgtgtcttcttcataaggaaaggcagcgctgcgatccagcacaaacagtggtgtggcgactccgtttagctgttctggagctccagcatattgcacgaacagcggcggcagatagtccacgcattgggtagcccgagcgcagcgccctctccactgtccctgcttcccgcagcgcttctagtctcggcgcgaggcggcgagcgaagcccggctgctgagccgccggcgcttttatacagttcccgcccgcctgctccggacacgcctccttcccttccggagcccggggtaggcgagaagcaggcaagggcgcggagggaagaatcgggagggcggccagagcacggtaaatgccccagaagtttggcagattaggccaaccttgtccgctcgcctgggggccccggacctgcactggcgggagaccgcgaaggcgcggggacgcagagggcgaagcttggtaccctgcagctactgctcgcgaggagtcccagcttaccctcccggatccgctggggctcacctggcacccccggggacagacgaaatacctcgcgcgccagagagggctcggagctccctctgttatacaaagtcggagagggagaggagtccgggaggttcggagcaaagaattcaccctgcctgccttagagaaataaagtttaattgc

SEQ ID NO: 31989 - DNA, 958 bp, Homo sapiens
  chr12:99287760-99288718
  binary
cgcaaattggaatttcgctggaaacactgacccgaccttcaccgaagcagcaaatcgcagtctctgctgctctgctcctgctctccaaggcttaacattggaaagtccatgcccacgtccccctctaattaatcaatgtagaaagaaatacgagggaagagagagggagcacactccacaccaaccttgccagcttctattcttcctgctattccttaaaggcgatgcacagcgcacctggaaattacgtggacttggcatggctttttaatattaaagacaaacgacctttggaaaatatacactgttaaagtcaaaccatttggagagacacccagcaatttacctcctcaaactcctcggaaccccaagaatgaggaaaggaaatggaaaatgcgcttaacccgggggtggtgggggaatcgataaccagaacaggtttgaaaaaaaaagcccccctcccgccccctccgtagagaccgctagctgaggctgcaacacctgccccggcaaagcgtctccgcagccttcccggcttgcccgactcggcttcctccgcctctgccccggctgcggcaccacttcttggagccacgtctcggcgagcgggggccgcggagcgagggggccgctgtgccgctactcacccgagccgctcgggctggccgcgagccgggatccgcgagggctggcgggctctggcccccgaggacgcagacatgtggcttgaacctccgctcccctagccgttgcctctgtgcatctttctgggcgcccccagcgaatgcgagcggcgaggcgagggcgagcgcgccgaggaagggcgggagaggcgcggagcttggccgcgccgcgctgcgccgagcgccgggctctccccgcgagctccccgggcccgcgcgcgcgccccccactgcccccgccccccgcgcggcgcgtgccccccaccccccgccgc

SEQ ID NO: 31990 - DNA, 933 bp, Homo sapiens
  chr13:100620289-100621222
  binary
cgggcccgcgggacggttataaacgggactgggggcacgtgggtcaggaaaggggccttcggaagtggcccggggattagtccctttgatcaatccgttccgggatcccggataacccccaaaagggagagcggcgtggcagggagggaaagaagtccggatgggccctctcagaacacaatgtccaatagctgagcggcccagggaccgccagaaacaccaagcgcgggttggagtctgaacccgaggcgcctgcgtccctcccgcagggacccccacgctccaccgggtggggcccacgcggccgccgggagggggcaggaaatgcaaccgtccgcgagacgcagagccaaaaacccaaatgaccgcgggtcccctcgccgcctggggtcccccgcgccccccccgaccccacgcacgcgcgcgtgccccgggaagccaccggggacagtgcgcagggcgtggcctgtcccgccgggggcccggatcggcttctgcgcccgcagctcccggcagccgcctagggaaggccgctcccctcgcgaggcctgggcaggcgggaagggccctaggccgcgcgcggccccgcgcttgggagttccctttcggggccgggctggggagcggcttcacggtccctggatcctgccctgccgagaagtgctgggcacaggagcgagcagccggcttagcgggccagggcgtttttacgagagcctcctgggaagtttcttcctggaaaaatcattaaggcggactgatcccgattagagagaaaaggggctcctgggaaaacgtgctccccaccggccatcaggcggcccgcaggagccaagccaaggctcccgcctcgggccaccccgacgctgctgcccccgcagagccccgagcgcccccggcccgagcgtgggacccggcggctacctcctggcc

SEQ ID NO: 31991 - DNA, 948 bp, Homo sapiens
  chr13:100621229-100622177
  binary
cgccgataaatctgccaagtgattactgaacgtaaactccagttacttaagtgtcctccgaggggtaatcgtatctgtccctataaatcccgactgcgttcgcgctcatcagcgcttccgcccgacgcgctggtccgctcaaagggggcacacgacccacaggagccatccaccgcctcgcgccgcagccgccctcctcagcgctgtgggatccccagaggcagggcttgaggtggggtgggagggtccccacgacgccggtggctccccaccaattccacgacagggtaggcctcaccgatggtgggaggctcgggtcctcctacaactagaaccttctctagaaaggcagatgtcaactccagcaccctccagggcgagtgtgatactgcgtgtgagagggcgcgtggggcgtgtaaatgatgtgagtgtgaggacacacaggtgtcgcgggaatggggtgcacgcgcaggaggatatgagtgtgtaaagttgtgggagacgcacgcagaagaaggtgtgcgtgaagagtgtgtcacggtgggcgagtgcgagtggtctccggggttccgaaagcgcattcctgtcttcccggaggggtcccttcccctcccggaaggcctgcctcgggcggcccaaatccggcagcaaatcccacgcccggtcctcggagcgcggagactgcgcggggcctacgacccggtgggaagagaggcgcttgccggggcggcccggcctctctttccatcgccctcccagacttcccagggccgggcgggtggggactgccgaccgtcctgggcgccttcctgctccagctgctgctgcgtctgctccgaggtggcggcggcggcggctggcgcgcgttgcgggtcccggccgaggggctgcgggcgcgctggagactccgccgtgtgggaacccaacgcggggcctgtgtgtgctatc

SEQ ID NO: 31992 - DNA, 999 bp, Homo sapiens
  chr13:100622725-100623724
  hyper
cgatccacttgcagatgagctcctgcttgattggctgccgcatgtagcgcaggaaggccccagccgcccctgggaggtgggggtggtgctggtgcgggtgctgcgcgggcgccggcggcggcggcggcgccgggggcggcgcgtggtgctgcaggtggggcccgggcccggccgctgctgcggccgccgcagccgccaggttcaggtttaagttcacggctccgtagccgtgcagggcggccgccgctgcggccgcaaccgccccgtagtgcgcgtccccagagcgcggcgcgaagggcggttcggcgcggccgtacagctcagccgccgcggctgccgctgccgccgccagccccaggcgcatctggccgttgagcgggtgcgggtggccgcctggggcccccggcgtgtcgtgcagcgcggggaagagcgccgggccgccgctgccgtccgggcccgcgtaggtgccgctggcggagatgaacatgccggccgagtggggaggcggggccgggtgctggggggagccggtgccggaccgctgctcccctccgagcggggccccgtgcatggccgccgcgggggccgtggcggaaaggtccctccggaggacgaagtccctgctgtggcctttgccgctgctgccgccgccgccactgttggtggtggtgtagcccgagagggcaggaggaggaggaggcgggggagggggagggggtgaaggggtgggaggaagaggaggggctgggggcgggggcgcggagggctgcgcgccactgctgcccccgccgcaggggtagctgcccgcgccggggtgcgcgaccaaggctgcagcacgggcggcggctgccggagcctccgggtgtgccgggaacgcctgggagggagggctgaggcccagcgtgctcgcctgggccatgtgctcgggtccgagcggagtggtggccacgccggggtcagcgcccaggtcccgcaggcggaggtgcgcgacggcggccc

SEQ ID NO: 31993 - DNA, 1676 bp, Homo sapiens
  chr13:100631544-100633220
  binary
cgcttaagccgggagaggctgcctgagccggcgcaagagagcccgggttctgccagccatagtgagctagaggattcttcccgcgtttttgtttatttcatttcagaacataattctgaaaaatttattattttctcttcgtttaattttatttcaactcctagagatttataaataaaagcagttctccaggccagccaggagaacacgcccgaggcgctggcctcaggctgtcccttcacacctccgcagcctctgggccctccgttccctctctagttacctcgggagcgcgagatttgggcggcgggacaggaaacgtccgcagcggtcagccaggcgcggcgccgggagcggcctcgccgctgggccaccgcccgggtggtactccctgctcctggagaaggagtggatggatatatatgctttctagaaggtttaagccctgccgtgtctgacggcttcttctcccgagaccctgagcctgacccgcagccaaactccggcctgagtctcgcttggtctcgggcgttcccacacttctcagcccaaggatgcgcggcccggcttctgggcatttaccctgagggtgacactgtctttaaacgacttccgaacaacccccttccacgcaggggccgctgcccagtgtttactgctgtaaacggagcaggacgcaagcggcgggtggggagctcagcgcgccgaggggcggacggggacgccgcggggggcggggaaggcggtgtctgggtgggcgtccggagggtgggaagaaggggcatgcctggctttctctgtgcccacggtcctgcacctgtggtttcaatgccacagagcaagtttacaaaggcggggtgaaagtagggagcgtgccaagcgggcagcagaccagccccccgccgctccttgtggcgcgctcccggcgaggccccgggcctgaaatgtccccgcgcgcagagcctcctgccaggcgacccagctgttagccacctctcgagcggcctggagtgctcgggccaggcgtccccggggttttcggtgtccgctgggagctgctcagatcccggggaagtcggtggcctacgcagaaagactggagcgctgggttgcctcccattcctgacccggctgagggcgccctgaccccgcggcccgggcccgcgtccgagccacgctggacgcccggctcccgggagcgccgcggtcggccaggactagaagccgcggcgccgaggtctcgggagaagcgcggcaggatggcaggccgggcccacgggcacgttcggcggctgcctgagccggcagcagctcagggagcgcgaggactgaggggcgggcccggcagcggggcgggggcgcgggactgactaggccgcggcggccaatcgcggcgccgggagggcgggcggggcgggagccgccgttaaaggggcggtttgaccgggggggcccggcctcgagctggagggagggagggaggccggggcgggagactagggggtgcggggggaggggagaggaaaaggaggagacaaaaaataaaaaataaaaggctgccgctgcagcgttggcggcgcccatcgaaatcaacggaggcggtggcgaacgcagcccaccgcagccgagacctgggagcccgcctgggcctcacactccctcgggtcgcggactgc

SEQ ID NO: 31994 - DNA, 1394 bp, Homo sapiens
  chr13:100634131-100635525
  binary
cgaggcagatccaggcggcggcggaggcggcgggcgcaggagagcggctcccagggctgaagtggccgccaccaccgccgcctgcgcctggagcccggtggccgccggacgcaccgcgcggatcgggagcgggagtcgaggcggcgcggaggcgcagggctcgcaggggcgggcgggcgcgctggccatgctcctggacgcgggtccgcagttcccggccatcggggtgggcagcttcgcgcgccaccatcaccactccgccgcggcggcggcggcggctgccgccgagatgcaggaccgtgaactgagcctggcggcggcgcagaacggcttcgttgactccgccgccgcgcacatgggagccttcaagctcaacccgggcgcgcacgagctgtccccgggccagagctcggcgttcacgtcgcagggccccggcgcctaccccggctccgctgcggctgccgctgcggccgcagcgctcgggccccacgccgcgcacgttggctcctactctgggccgcccttcaactccacccgggacttcctgttccgcagccgcggcttcggggactcggcgccgggcggcgggcagcacgggctgttcgggccgggcgcgggcggcctgcaccacgcgcactcggacgcgcagggccacctcctcttcccgggcctgccagagcagcacgggccgcacggctcgcagaatgtgctcaacgggcagatgcgcctcgggctgcccggcgaggtgttcgggcgctcggagcaataccgccaggtggccagcccgcggaccgacccctactcggcggcgcaactccacaaccagtacggccccatgaatatgaacatgggtatgaacatggcagcagccgcggcccaccaccaccaccaccaccaccaccaccccggtgcctttttccgctatatgcggcagcagtgcatcaagcaggagctaatctgcaagtggatcgaccccgagcaactgagcaatcccaagaagagctgcaacaaaactttcagcaccatgcacgagctggtgacacacgtctcggtggagcacgtcggcggcccggagcagagcaaccacgtctgcttctgggaggagtgtccgcgcgagggcaagcccttcaaggccaaatacaaactggtcaaccacatccgcgtgcacacaggcgagaaacccttcccctgccccttcccgggctgtggcaaagtcttcgcgcgctccgagaacctcaagatccacaaaaggacccacacaggtaaccgcgggctgggacagggaccaggcgcggaggggagacacgcacaggctgagactcaggctgtgggtgccgacgctgggcgcagaccgccagccggggacctgggatgggaggtgtttttgcgtgtac

SEQ ID NO: 31995 - DNA, 873 bp, Homo sapiens
  chr13:100635554-100636427
  hyper
cgatgacaatattattgggctaggtttttccatgtgcggaaatcgagttttgaatgattagcctcacatcaaatgtatgcttgggtcatgcaattgcttcgtttgctcagccccggttaataatttccgttttaagtagaaagcacaaaataaaactgctcgctaattcggtgcccgggaagcgagcctagagaggattttgccagcttgtctgaatgtgcttttctgctcggagtgtatgtctgtctgagtggtttgtgtgttttcccacttcttttactcggggtccaaacgcccttcccgggactgtttcccatgaaatgagtctggtgtgagccgaagctgtaatgcgtttctcatttttaaagtgtttttaaagcccgtctcggggtgggtcgcgggggctttactgtggtttcgcagcagtttgtgaaattctctaatgggcaccacagagtttgcgattcccaacttggacccaggtcagctagagccccaggtcagctagagccccaggcagcgcggccccgcggggggatcgcgtgagaagagagagccgcaaaagaacgcgcctcccgcctcatagattattcatctatgaccaggtctcagccaaaatcgtgccagacgatttcctaaaagaaagccaaatgttttagcaacttcccccgtcaatatttactccgaagtggggatgcgccagcggcctattgttctcttccgggaagggagggagccgaggtgcgagacaagcttttaacaaggtttaaaatttgagaaatttatttgcatgaaatgctcgctttcgagtcctgtgtctgagcggatgtctttaagaaacaatttaggtgctaatggaatttaacgttaaac

SEQ ID NO: 31996 - DNA, 775 bp, Homo sapiens
  chr13:102068457-102069232
  binary
cgggtggaggcgcccctccccacccctcccccgcgcggggcccccgcccgcagcccctctagcagcccctctcgcagccccagcgcccctgagccgtcctggcccggaccggccaaggaactaacgagcgcgcatcgcgggcctcgggcgcagggcacggagccggccgcgccgcagcctcccgggcaccggcggcggtgaccaacctgtaaccccagcgctcagagctgtcatggtgcccgcgggcggcggcggcggcgacagtgggcgaccggcaggatcagtgccaggcgcggcgcccagggcgggcggggacgcgggcccctcacctacggcggctcagctcaggcagcgcgctcggcccggctggggccgcggctcacgctcgccgtgtcactcactgagcgccgccgccgccgggcaggctgggggaggggtgggagccggagttttcgggcctttaaaaaattattattttatttaaatttttaaagttagctttgctacagggactgcagtgatgccgaagggcgggcaccgcagaggaggctgcgccgcagttggtggggagcgccagggtcggtactggcagttccttcttgccggctgccacccgcagtcagtctcacagcaacagctaggctctcatctgcgagctcctctcgggggtctttcgtactcaacagcacggcggcggtgtgcacgggagtccgccgggcacacgcggggtacacttaagtgcactgccaggaggccgggagcccagcgtgcgagc

SEQ ID NO: 31997 - DNA, 510 bp, Homo sapiens
  chr13:108518148-108518658
  binary
cgacgcactgcctgcaagtggtcatctcgccgccttccttgagcaccacatccagactgcagttcaaagtgttgggactggacaaccccgagaacaactcccaaagtgtgtaggaattacaaaacgaaaggtaaaaatccgacaagttccagagcggagtgggatgcttgctcctcacctcctgcccgtcccccccggccgccccccgactccagttcctggcgcacaccgcgtccgcattctccaccgtgaagcactggcccgaggacgcgccctgggggtaacaagtctccaggcgccacacgggcttggcagagtttcctagaaaaagagccttgccccggtcgtctttgcctcggttgcccttgccgccgccgccgccgccgtctcccggggaggggggcagggtgggggacgaggaggcggagaggagtctgtgtgcctgggcggcgggcgaggactcccccatgctcgccaggagcgcgggccaggagggctcctgctgccgcc

SEQ ID NO: 31998 - DNA, 1416 bp, Homo sapiens
  chr13:108518714-108520130
  binary
cgctgctgctgctggtgctccttgtcccgggcccgggtcagcttggcctcggcgcagaaccacaagtgatcagagagcaggactgtgaaaaacaagagagatgccagagacagtcgccatttctgagccctctcggaatcgatgaacggtttctcgttctctcggggtgctgccaaccagatttttaagccgtcgtcatactgccgacacatccaagcacccctggtcatattttgggaacgcacagccctggccgactccaccgtgagggcgcctgtgccggtgtcaccacaatatgcattgacttaaagggtttaatttccttatcccctcctcccgtttcttctctctcctctctctctttctctctcttcccctctccctctctcctctctctctctctccctctccctctcttttatctctctctgtctcttttgcctacataaatattaccaggctttgaaggaaggtctgacttgcttcctaatcatcagccgaccccatcctctgtagagtgggaaacaataatggagagagagagagagagagagacggaggaggctggtgctggtggccggcggcgaggctgggtgcagggggcgatggtggaggtgacagggtggctggcgcggctccggtcacccaggcattgtcagcgcgcgggtccccatggccccgcggagcccagcccgctctcccctgccaggggcatgccgcgcctccgctgcccactgacggcgcccggagcgcctcccctcctcctcctcctcctcctcttcttctcctcctcttcctcctccttcctttccttctccttcttcttctcctccgcctcccgctcctgctccgcgctggctctcccagagtccggagcctgggctgcctccggcggggcgctccctcccccccaccccccaccccgcgctctaagtgctgccgccgccgccgccgccgccgccgctgccgcagggccgcccgcgggcgccgccgccggggctccgactgctgacgccgcctcccgcggagctccgggccgaatcgcctgggctgggcctcccgagagccacagtcatcttcagtccgcgggctaagttgccgccatcttcgtcctggagaaacacttttttggggggagcgctggcttttgcgtcatctcctcccgcgccgagctcgctccatcctggcgcagtggcgccggctcggcccgggaggagggagaaggcgcgcgggggcgggcggcggcggggccgcggggcccgggggcccccgcccggctccccgggctcaggcgcctgctctttcctttctgtccccctgtccacgatattttgttttaatcactgaagagaaaaataaaagtcagactgcggacggcatggccggtgaggctcctcgcggccgcgccgcccgcac

SEQ ID NO: 31999 - DNA, 788 bp, Homo sapiens
  chr13:109147592-109148380
  binary
cgcgatggcctttgttctgttaggactccccagggggacctcggctccaggtcacagctctgggcactcccttctcctcctgctcccaggatcttgctaaagtggagacggaaggaaaagtttcaggagtgagctgcgttcttagaattgtagcagagagagaggagggagagagcagaggatcggagggcaggagtggagagaggcgcggtctcctggaacgcgcgggggaacgtggaaaggagggcgcgggagacccggagggctgccccggcggggattagaagcgaggcgggttcagcgtcctgggcgccgcaggaaagtgacccgcagagcgaggcgcggcgccccgggagctggagctcagccccacgacccgcgctgcggcgggcaccacgcggggggcgcgcggggaggggagaggcggggccggcggggactgtgtcgccgccgacgccgcggctgcgggtcgcagaggcgggcagagagagccgccgccgagcgggtggcggagcagtccccagcctccagccggcctggctgcgcgcaaccgcgccggccccgggcacaggggcaactgccgacccctctcacccgccgcgcggggctggtttccgagccgagtcccggccatcgccgcgtcgcctggcgcccggctccggcggacccttctccggcaggtaggggcgtcggcggggcgctgcgcgcggtccaagcgcggggaacgcggcggggcagcctctccgagtctggaggtacgcggggcgcagaggctgttctgcaccgcc

SEQ ID NO: 32000 - DNA, 687 bp, Homo sapiens
  chr13:114017783-114018470
  binary
cgctgggattacaggcgtgagccaccgcgcccggcatggatcgagttttgatccatcccgatatggctccctgctgggagggacgggtctccttcgcgtccgacccgccggcccatctcaaagcgggaaaaccggtccctgcggctgccctagctcggagcccgcagcttcgtcccgacctgcccggaaaggttcctccccctccctccgctccgggagcccggactttgcccggcccgtcccagcccaacccacctgcgccctcgggacccacctgcgcccccgggacccacctgtccggctcctggggacgcccccgccctgcagcagccgggaccatttgatcgccctgcgggtgagcgtgaccaggtagctggagaaaaacttctcgtaggcggcgtcgtcgaagtcctcaggccgctcgaatccgtacgggtcgatcctgcaaaaccgagagaaggaggccggcgtccccgaagtttcctctggggggtcgcgggcccgcgcggggaccgcagccgccggggacgcccgcaccccgcgccacacacctggggacccgcgagcgctcggcgggctgcatgcggggagggaggcgcgcaccgagcgaggccagcgggtcccaagttcgcctcccggctccggggcgcttaagtccttccggcgggaccgcgggcgcgtgggggc

SEQ ID NO: 32001 - DNA, 941 bp, Homo sapiens
  chr13:21634593-21635534
  hyper
cgcctcgggccgcgtcccgccaagaccgtgagcaaactcgcagagttggcgcggcagccggccgggagacgccgagcagggcctggccgcccgcagcccgggaggaacggcgcccccagggtccggtggcctctgaggggctgactggcccgtgagccggcggcgcggccgcggggaacggggtgggaaccgcgcggcagtgggtgaggcggcgcagccaccgggggctgaggggcggcgcggcctcgactgcggcaccgccgtgggtccgtcggctcgcgggacgacggggcggccggcgggggccaacagggcgggctctgaaggactgattggcccgtgggacgatggcgcggccgggaggatggccccggatccgtgggaccgctgcgccgccggaccgggggtcccgaggctgtcaggggcgcccggccgggcgtctagtgaaaagccgatcccccggagacagcggaagcagaggcgcgcccggcgctacggcctttcgggtctaggacaccgcccccggcccgcgccgcccctgccccgccgggatcccggccgccccggtcgccgcacaacaaagcggcgcagccccgctgcccccgcccgacgccggcctccaacttccccggctcctctggaaccggctccgcgggctccgtacggcctggactacgagccgccgggcgggggcggctccgggcgggcgcggaccgtgggggcagggcgcagggctccgtccggacaaacttcctcggccgccccgccgggcgcccttcccggagcctcggcaccacagtaggtgcgcggagccgcagggctcgaccgcttcgcggaaactctcgccaccctccgagctgccgccccgaccccagctcccagccccctcacctccaggggcgcggtctacaccctcgggggcgtcctggccggcggctccc

SEQ ID NO: 32002 - DNA, 783 bp, Homo sapiens; identical to SEQ ID NO: 28492
  chr13:24734971-24735754
  binary

SEQ ID NO: 32003 - DNA, 1474 bp, Homo sapiens
  chr13:25744652-25746126
  binary
cgtcagaaaacatcaaacaaatacgatctgccgacgggtctgagggtggatcgacagaggcagggtctggggcggcgggcgcccggccgctgccgccttcggagtcgacaagggggaccgtctttacgggaacggcccccgtcctggaagcgtcctctgccgtgcggacctccccgggccccggctcggcgcgccgatgccccgcggcgtcctctccccgggcgccggtgtcgccggggtgcgcgaggccctctgcctctcggcagctccgcgctggggcgcggtcggcgggggcgggcacctcctctccccctgcgggctcacctgctgggtctcgcggggcgtcctggctgggctcctccggctcgcgcgcggctctgggcgtctcctccttgacgcactccaggctggcggtgagcgagccgggtaggatcaagccgcccccgggcgcgcgcccctccgcggcctccgccttggcccgcttgtctttcctgtgccagcgcatgccgctgaacagcccccgcagcccccgcttttgtttgccgccggccttgctcgcgtccacaggctctcccttgccgttttccgagcgcccgttcttcttcagcagcgagaagaagctgtgcgacttggccaccgagctgctggcgagggagcccccgccgggccctgcggctctggggggccccgggttcggccgccccccgccgcccccgccgctgtcgcccccgccgcgcggctcctccttcctgccgctctccagcaccagcacctcggcaagtccgtcgtgggtcctgctcctcaccagccccgtcggacccgagcttttcccgtcccctttgtttttgaccccaaaaatgctgggcatggtgccacccgatttcctcttcttgaataatttgaaggcagctttattaatcttccccgacggcggctcggcggccggcgtttcggcggcacagtcacaatgcaagtccatgtctgccgcgagggtcccggtcccggccccggcctccgccttcctcctgcagacccccacggacgcgccagctccgccgcgctcgctgacagccccgccgccgccgcggctccggctcgtctccatggaaaccgcgcgggataagccgctttcgtcagcagtgggctcgcgccaggccactgtcacccgtattctaaatcaacctgagccgcgctcgccgccgccgctgcaaaagaaacacacataaaagaccatcttccctcccgcaagggcttatataataccctaacccacttccatccgacttggctcggcgctgcatggcgtttttgtggcaggagcaggcaacacagccgcgagctgattgcagaaattcgagtcgtaattatggaattcaaattccctcaactctcacccaccttcggattccttctctagactcgctcttcacgggagcgcaaccatggatcacgaaatgcctctaaaaacgacaac

SEQ ID NO: 32004 - DNA, 764 bp, Homo sapiens
  chr13:25945911-25946675
  binary
cgagtcccccaggtgcacccctctcctggaagagcccccgaaagtacaggcccaatctcccaccccaccaagccctccccatcgccttccccgacacctaaaagccccggtcctgcgtaatattgcggatccctcccagcctcccgtccgctcctcctcccgcggggctccgctcagggccggtcccccgcccccacgccgcagcccgggccagcggggcccgccgcggtggcgttcgcggatgctgccgcattggccgctgcggcacggacggcgcagcctcgggcgcggcccggcacaggcgccggcggtccccgccagctagcagcccggcgaggcgctggcccacccatggtcctcgggcggcggcccctgcgcccagccctgcgcgtagcctccgtctctcgcccggggccgccgagcccccgacacgggcgagatgctgaacggcgcaggcctggacaaagctcttaagatgtccctgccgcggaggtcgaggatccgctcgtccgtgggtgagctgggaggggcgcggcgagggagggtgggcccggggcgggggcggcgcggggcgcgcctgcggttatgcgacactgccccgcccgcgccccgctcccctccctgggctccctgggctctctgggctgcaggatccgccgacgcggcgcgctggccgcacgggggctgggcgtcgctgcacctgcggggccaaaaggctccaggccggggcgaggtgagcggcgggcgtcagagacccccggctc

SEQ ID NO: 32005 - DNA, 1765 bp, Homo sapiens
  chr13:26624610-26626375
  binary
cgtgagggtgaattagggacccacaccgaccaaataataagccagaaggcagactccgcctcctggtcctaggccctttcctgaatttccccccttcaaactcccaggtccctgacgtccaggcaacgccaaccgtcctccctttcgcgctgggcgcaggccgccctacctgccgagccgtcggggccgtctttgtccgcccggccaggctcgccagcgccctgctggcggtcattgtcgcagccgccctggtccaggcgcgcctcggcgctggagcagcagtagcgcaacgcgcagctgccgcagcagatggtggcgtcgccgccgtcgaagcgctcgggacactggaagccgatgcgccagacgccctgcgcgtccagccagccgtggcagtactcgccgctggccctcgcccccgccgccagcagcgcagccagcagcagctgcaggagcgaagcggcgttccaggatgaggagacggacgagcggcgagcgccccacatggcaccaccctgggcgcggacagcgcgtctccagagagcgcaggacggtctccgagaagtcgtggccccggcgacccccgggcctcgtcactgactgtcccgcggcgctttccgcgcgggccactcccctctgccgcgacgcccaggaggcgacgacgccgggccctaggtccaggagctcctaagccatccccgtcctcagccggtggcccggtccccttagggactgccttatgagttgcactcgctgatggaaatctcgggatgcagtcagaaggcccccggggctgtcgtccggaagcctctggaggtttcactggcaaccggaccctccctgagcatccccgaagggatgctcactcgagccgaatgaccgctgggcgcgccgccgcggacctggagccagggctctgcgcagggtttaagcctcagggtcccgcgcgcgaatcagggcccgtctcccctcctttattccctcctcgggcgggtagaaggggcgaaggcgggcagtgcacgcaaggctctgggcagcaagtgacgcagccggccgcgctcagcctcctctgccccgaacttggtccgcatggctccggccgggccgcccgggcagcccacgggggtgcagccccgacgctccactcggcggggccgacggccaatcttcccagcacgtcgccgagggagcgctcctgaccccgggaacgtccaggacgcaggcgagggtcctgcgcgcccccagccgcagtcccgggagcctgcccagctggcggcggccgcggctgctgctgggcgcggatccaggcgggcggctcgccccggttccccttctccgcctccccggctgcagcgcggtcccacaggagcccggcagcctccggccggctctccctctcccggtcgctgcctcgccctcgggaggtgtgcgcaccgatggaagcctcccacggaagtttctttcctccgggctacgggagaagccgagcgcagcagccgcccacagcctcgcctcgccccgcccggcgccagaccagctccgactccgctcgctgccgcgctgagccgcgctcttatagaggccggcggctccccggcgcgcatgcgcgctgcgcggctcccccccacccccgacctcagggacgcccgcgggcgccgggcagcccctcactttcctaccccgggcaaggagaaaggtgtggccaagggcggggtctgcctgctggaataggcgcgggaggaaacccaacctaagcaatccaggcctc

SEQ ID NO: 32006 - DNA, 1290 bp, Homo sapiens
  chr13:27131483-27132773
  hyper
cgcaaactcaaaggtactgtaatgggcacctagcaatcagaggtgatacaagggtctcttggcccgaagtatccccacctctcctcgctggaaaggacgctgcctaagcctcatcccgagctgggggcggaggaccaagggtgagagccaccgcctccgcaatcccccgcccctcggcaccgtcgctcagcgcgctcgccggctccctattggccgaggcactcgccaatcctggtgaagcggccccgtgagttggccctggttggtggagccggcactgagcccccctcctgctccggccgagcccccccgccgggagggggcgtggccgcggccgtggacgggccggaggcggcgtcgctcgcgccgctgcgtgcggtgtggtgcgaggcgggtgcgccgggcggccgcggcgcggcgggaccatggagctcagagcgcagccccggcgccggcggcgggaccgcggaccggtgagtgagggctgcggtcgccccggctctccgctgtaggctgctgtggccctctcggctccgggccgggcggctgtcgggggaggggcggccccacggcgaactgaagttgctgcatcgccgcgcgctccggccgggcggcggggcccactgcgggctgcggcgccgcctcgcgcctatccctgcagcccggccgcattctcccggccggctcccgcgctggcaggggcttctcgccgtcacggcgcggccaggcggcccttctctcccgcgcctccgggcctccggccctttgccgtccggtgcgcgctccctggactcgggacagccacccgccctccccgccgtaagtggcgcccgggcctccgctcgcgccccacgcacgacgccccgggccgctccgcgtccgggaccttcgcatccgttcagtgtctgcgcgccctcgctggttctggtccagctccgcgtgccccccggccccattcggccctcgccgccctggcctgtgccctcttggtgcccgcgtgcgtgttggttgcgggcgtcctctccctcgaggctgcggtgccgcgtggctcccggcctcggagaccaggccggactcttggagtgcaggggaggaggtggggcggcccgcgagtgcgggggaccgcgcgcacggagccgcggcgcgcggggtatcatccccgggggtctttacccgcgcgcctgggctttagcgagggcagaagcttcctctcagtttgtggtgctgacgtgcaatggcgattgcttcttgatttggcccctctgcaagggagagttccctggtggagac

SEQ ID NO: 32007 - DNA, 941 bp, Homo sapiens
  chr13:28366733-28367674
  hyper
cgggataccgcggccagggaaagcgcgtggagagccgaaaggtgcggtgggcgcagagggcgggctggctgcggggcgaccgcgcgccggggccatgccgcgctccttcctggtggactcgctagtgctgcgcgaggcgggcgagaagaaggcgcccgagggcagcccgccgccgctcttcccctacgctgtgcccccgccgcacgcgctgcacggtctctcgcctggcgcctgccacgcgcgcaaggctgggctgctgtgcgtgtgcccgctctgcgtcaccgcctcgcagctgcatgggccccccgggccgcccgcgctgcctctactcaaggcttccttcccacccttcggctcgcagtactgccacgcgcccctgggccgccagcactctgctgtgtcgcccggggtcgctcacggcccggccgccgctgctgctgccgccgcgctctaccagacctcctacccgctgcctgaccccaggcagttccactgcatctctgtgggtaagcggggccgccgcgcagagggaccgggcagaggtgatccgaagcaggatggagagccagagatggaggaagagggaccctgggctttctgggggcggtgagggtcatgtcggggactaaggggggcgcttggggtggagtgaggatagagggccgggacacaacgccaggaggcggatgagggcagacgtccaggtcctggagtgtgggccggggtaagtgagggctgggatccaaggctctccatgaaggggaaggggttccagggctgcatgactccgggagaatcaggatctcggagctggacaaggagcgctcactgtagctctgctgtggattgtgttggggcgaagagatgggtaagaggtcaaagtcgtaggattctggcgaccgcctaccaagggattgggtccacagcacagaggtctgatc

SEQ ID NO: 32008 - DNA, 900 bp, Homo sapiens
  chr13:36919871-36920771
  hyper
cgcgcaatccatcccaatataaccgcagttgttcgtgggccttcttgcagagaaaggctgcccaaccttgacggggccatgggcgctgcgggagggcaaaagaccacagagatctgcgaagccaaagtaaacaacggggttggggcggcgagaatgatcaatagcgatgctccgaaaggactccgcgataggaatcgagcgggaaggattccctccatcctaacagtccatgggttaagaggccgaagcttccctaaataccacactcccgcgagagaagggactgagaacaacttctcaaactattctctctcgaaatcgctcccttcctcgaaaattccatctctgagactcggatgaggtccccaccccctccacccttgtcccgtgaccgtcgcccgctcagcctcccagccgagtccgcggggcctggggcgcccaccccgcccacccaagggaccgcgcaggggtgaactcccccgcgccccacctgcgccttccagacctcgggcgccccggcgttgcctcgagagctccctgcgcggccgccgcggcacggaccagctcccactcccttacactgggcgccgctgcgctcgccgggggccggtcccgaggttcccaaggcctcgcgcgcgcgcttgccgtggcaaccaagacgttccacgacgcgcgctctcgaacgcttcgcgtcacgcggccgcgcggccccgcccgtcggcctcgctcccgccacagagcccgcagcacgccgccgccgcagcctaggtcacgtgagtacccacgcgcgcgtcttgccagcggattcatcaccggcctgctcagactaggttctgcccactctgaccttctaaatggtacgtgggaggacgtccgtccccttcggacccaagagtcacc

SEQ ID NO: 32009 - DNA, 1393 bp, Homo sapiens
  chr13:44359835-44361228
  hyper
cgaccccactttccccatgtgctcgccgcgggatgacaaccacaacactccagaaccaccccccttccgaaagagggcggggttacgccttcagccaatcaggacccgcgagccccgggtgtccaacctatggggtggctgtggccgtgcagggggaggacgtggggtggtctgggaggggccgcgtccgtgggaggctcgcacgtgtcgggtccggagaggcggggaggcggccggcgtccagcggccgaggcgcgggctctgcaccctggcagcggccgagtccggctgccccagtgcctcctttacctcgcgttgggccaggcagggcgcgctcccgccgacgaagacctgtccaaggtgtccgagctccccgcgagaggggacagtcacgaataacaacagtacccagcgcagactaggcggggaggaaagtttccggcccgcagcagagcggagtccgccaaggctggaggaaaagggatgcagagcgggagggtgaaaacctgaaagaagagggcagcgggaacactgtgtgggcaggaacgggtcccgggggcgacgcccgcagggggagacgggtgcggggtgcgctgtccaaggtgcaggggaggtgactggcgcgcggcgggcgcggagcccggagctgacactggctggcgggcggaggggagagcggggaacagctgtctggggcgctgggcacccccgggcgcgtaaaagtgagggagcttgagacggggcacggcggggaagggcgtgggggctgcaccgaagcccccacgcgtccacgcacccctcctcaccagcctcacctctagctccactcccctcccccctcgcccactcccctctcagtctagatccaggtgccgtggcgggggtgagaccagaggaccccggctcggagcccggacgccccagggaggctgcgggccccggagctgcttacctggggccgccgtatggggagcggaggcaacccgctgcgcggagtggggcgccgggcgcggcgcggctcctcctagcctcggcgtcctcctcctcctttgcttctcccggactctgtcccgggcacggagctgggagacgcggccgggctgcagtcgccgttccctctgctgccgccgccgctgcagcagacagaggacgccccgtggcggctggaagcctgtgtgagtagcggcgcccgggagagcggggatctgctgaggggcgctggagactccgcggctggaggcgcgcgggcgtgcgcacgcgcgcctgcgagtgtgagtgtatgggtgcgcgcgcgcccacggggtgggggagtcgcgaggggagggggagagaggccgagagatgctcgtagggaccgaggcaaaattctacgaccccggaaatccgtaaacgc

SEQ ID NO: 32010 - DNA, 824 bp, Homo sapiens
  chr13:44947704-44948528
  hyper
cgacaaacacaggaggggccgcgtccccgtccccgacgcgctcacaaacgccgtggtcgcccgaaccttcggccccgcagcattcggctacaggaccgcgacactgcagggccccggctctgcgcgctgcgctccggccgctcggcgcgggaggacgtgcggtcgcgcctgcctcggtggccgcgcggggtaggtggctgcggggaccggaaggatggcgaggaagtcggaaagggtttcctgagatgagagattacttccgtccgggctgcggcctctctctggagtcggctagccggggctcggggagcggggtgcgcagggctcggggccacgccttgccacctgcagcgcccgggtgggccgcgggggcctcggcgggacgcgctcggccctgtcgcaggagctaacgcagggggaatccttgcaggtgggagcatttcagagcgcacaagccatggtggccaaacagcggatccggatggctaacgagaagcacagcaaaaacatcacccagagggggaacgtagccaaaaccctggtaaggcggggtcggcgccggccaggcagagccctgcagcccggcggggtggggcggaaggtgggggcggggccgggcgggtagcggcgcagggtccggcctcccggctcccggcccgccccttctgcggggtcctgcagagtgggggctgagagctgggttcagggcggcgcggtctgcttggcgtcctcgtgggcggagagggccctggttggtcgtggcccctctgggagtggctacctgggctaccagggaggcgcagaggagccctcctccccgaccc

SEQ ID NO: 32011 - DNA, 994 bp, Homo sapiens
  chr13:53420038-53421032
  hyper
cgaccgcaggcggaggcgcgtccgccgcggggctgccaaagggcgctttgccggtgccagggaaggtgagcacgtcgaacatgttgggcctgggcccggctccccgggcggcctcctccggggagccgggagccgaggctccgccgcccgccgccccgggccgctcttcccggagggccccccctttgcgcacctccttcttgcggcggttgcaggtggtggcgatggcgatgatggcggccagcagcagcgtgcagctcccggccagcacgatgatgacgatcagcggcgtgtcccattgcagcaccgacccggacaccccgagccgagagccaggcgggcgggaacgctccgggcttcctgcactggcaggcgcagccggcccacgcccgccccctgctgttaccacgaagctgacagttgcggtggtggtgagcgggggacggccgccgtcggatatgaccaggagcgccctgaacacgcgaccgggtggctcctgcgagaggtcgccggtgagcagtatctcccccgtgcggcggccgatggcgaaggcttcgcgcggctcctgctgctgcagctcgaacgccagctccccgttggctccctcgtctgcatcccgggcctgcacacgggccacaaccgtgtcctttgcggtgcgcccaggcaccgccacttctagggagccattggctggcgccgggtgcaccaggactggcgcatggtcgttctggtccagcacgcgcacttgcactagggcgctgctggaaagctgaggggagccgccgtcgctagcttggatgcgaacgtcgagttggcgcagcgtctcatagtcgaagctgcgcagcgcgtagatggctccggtagctgggtccaccgagacataagtggacacggcgcccccggcgcggcccacctcggcctccagcagccggtaggtgacctggccgttgcggcccaggtcccggtcgcgggcggccaccgtggccaggtaggc

SEQ ID NO: 32012 - DNA, 708 bp, Homo sapiens
  chr13:53422554-53423262
  hyper
cgcctcacaggactcatgcctccagcctcaagtgcgatccgaaaggctaaggaagtcttctctggtttccaggtcgggcgtcagtctcaggctctcggaatcacgctctttgcgagccctgtgcgggagaagtctgcgggtagcagctccgagcctccagcgggctctgaggacgcgcggacccgccctcactctgcgcctctccgtctcttacagaagctgcgccgcctcgcgccgcctttgcctttatagccgccgatatgctaatcacccgagccgggtagccaatggccgcctccccctcgcgtcgcccctccgcctgcctctgacaatccctttaatgtggaaaggcttagaggggaaaacaagaaaggaaaattagggaatctttcttttgtttaactccttttgctttttcccccttttcttgtcagcaccctgcatgtagaggagttggcacagggctccaggagtaaaaggagcggatggttttgttaattgtcgcctgcctccctccgtgccgcggctagaactaagtgcgaacacgctggggtttcaccccagtggctcctgattccgccttcccccagcccctgccaacacacacactctgcattttgcacctctgacgcttccaaacccttgcagccccctacccacagacttgctctgctgaatgaggctctgctttccttctctcctagctac

SEQ ID NO: 32013 - DNA, 923 bp, Homo sapiens
  chr13:53424677-53425600
  binary
cgcagccctttcttccgctgtcttccatctcccaagtgcgatttagtatgtagccctcccaccgtccccgcccaagagatattccttggggggtacacgcagtcgaaggaactttctattttccttccgagccccgcaacactcccaccccaacctggggctggctggtgacctttagcgcccctaggctaacgtcatctctcctcacccctcttcccccggagacccagacgggaacaggttcagaacttggctggtggacagcggcctcagcgcttccgctggcgtacccagggcaaggtcaggcccgcctggcgctgctgctgccgggcggaggacccggaaggtggggaaagtgggtggaaatggggccggagtcccaaaggaagggatttcagcggtttccgcgagcacagcccggccgcgaatggctgggacccggacctcgcgccagcgccccctgcgcatctgcaccccgcagttctgggctggactcgggagccccgccacgcgctaagtttgggtttttcgcttggccagagattcggaactacttgcaatttctactcaaagtgcttccgcgtcagcatgctcattctcaaggctgaaataaaccaaggcgtgcttgaaagtgggaaaaggaaaggggagtaggggcaggcaaaagccaggaggcgggaggaggggtgtagggtggctggtagcaggtctaaagtgttttttccgcggccaggccctcgtcgatcggaagtagccacgacggcggcggcgccgggaggctgagagctgggagccggggagcccgggaagggagccgcgagcctccagccgccaccggcgcgcacaggtctttccgtgccggcggtggaggtgtgaaggcacgcgaacaccgtgagctccgggccggcagcggacagccactc

SEQ ID NO: 32014 - DNA, 1466 bp, Homo sapiens
  chr13:79169684-79171150
  binary
cgggcgcttcttctctccagcccttggttcgccggagcaggatgctggtctcaacactagggctatgtcggcttctcaccgaaccgagattttcaatttcagctttgcgattcaggattccacttgaattccccaggacgaaagcctagcggccaggctgcatttcgccccgggtataaatccctgccggataaattcaaatctgtagcagggttttggtaatatgcatcttagcaacaaaacaaaaaccaacctcgtatgccttccagttctttttaaaacgtgtacggcagttgtgaaagttttgtggtgcttgagactgttgacttatgcaactggggagagggtttttttaaccgctttgagatattggtccatcccttttctctcagaacgtcctcaagggcacgtaagagttggaggtgacctccgggagcgcctaattttgagccgcggaacttcggcccacttctccgaggggaccaggcgcgcgccaatacgcatgtgcgggctctgagcgctcagagcgcgcctcttccttcccggctccccgcggtgcgcacccgctggccactctgcgcacgcgcgccgggtgccccggcctaaggccgttgacctcgggttctccccggcacagtcgaatccacgccagggccctcaggccggtagctgtcctgcagtccgagcggagctgcgacctcgggcagctggaagcctgtgggctgctgcttctccaggcaggcggcggagggatgcaggcaggatgagcggcggtcccttcgccgccacccggagaaccgcggctggtgcccttgaaggccctgggatgcctgggttgggtgggtgagtgaacgagaaccctgagtgagtgaggggagggcgggtcccctcctggcttcaaattcaacccaatcagctctgccgatggtttgaaactgcacacgccgacccacccgccccgaagtctgaaagttatgccctggagacctgcgagctgcggagtgcagctggagagggagctgccccacgaggaggcctccagaataactcccggagtcggaacagcgctgggctgctgaagtttgcagcctccggatccgcgccccgccctgcagatccaccggatttcggggagggaatcggggggctgcccgtcctcccgtaaagctgacttgacaacaattacgaaagtttttaattagctccttgttataattcattttatttccagaactctccgaccataaattattcaaagagtaagccaacccgagcggggcggccgcgcgccttccccacgcgcgccgggctggctctggccgctcagctcacccgatgccccgtgagccagccccgcgccagaagccgcggtggcaggaaggtttgatcaaacattaaataacgtaatgtttgcgacaaggcttatctcacaagtggaaaagaggacctcgcgagaattagaattc

SEQ ID NO: 32015 - DNA, 1293 bp, Homo sapiens
  chr13:79175610-79176903
  binary
cgcaccacgttctttttgaggtccagtttctcggcgatggcggcgatcttctcggacgagggccggggctgcacggcgaagtaggcctcgagggagcgcttctcgggcgcggcgatggaagtccgcttgcgcttcttctcgccgccgttgaagagctcaggcttgttcattttctcgcgctgggcgccctcggcctcctcgagccacgcctgcaggatgggcttgagcgcgatcatgttgttgtgcgagagcgtgagcgactcgaacctgcagatggtgctctggctgagtgagcccacgcccgggatcttgaggttggccagcgccgagcccacgtcggcctgcgtcacgcccagcttgatgcgccgctgcttgaagcgctccgcgaacgcctcgagctcgcgcgggtccgtgtccgagtcgcagatggacgccaggcccgctgcgcccaccacggccgccgccgccgatgccgctgccacctgcccggccgccgccgccgccgctgccgctgccgcgccgtggtgcgccgccgccgccaccagcccggggtgcggcagcccggacggcatgttcatggcggccgccgccgcggggtgcgacaggtggcccaggctgtgcatatgcgggtgagggtgcgcggagccgcccaggagcccgccgcccgggccgccgccgccgccccccgggccgccaccgccgcctcccccggggccgccgcccgggccgccgccgccgcccgggccgccaccgccccccgggccgtcgtgggcgccgccgccgccggccgccgcgcccgcgccgcccgcgccggccatgagcgcgagcgacggcgaggagatgtggtccagcagatcgccgggttcgagcgcctggtggtggtggtggtggtggtggtggtgcgccagaggcaccgtggaagtggacgtgcacggcacgctgttcatcgtgtggtacgtggcgtccggcttgaaaggatggctcttgccctgggacacggcgatgtccacggccgccagcgcctcggcccgcgccagcagcgtctcgtccaggctggcgaagaggttgctctgcagctgcaggcgacacaaaccaaaccaaaaaaaccacaaaaccaaaagagcaaaacaaaacaacagaagaaacacacacacaggccggaaagcacagcatgcgaagggcaaacacaaagcaaccaaaataacaacgggtttgggggcagtggagagcgggaaagacggagagggggcacattgacgaccagggagggggcagacgagaagggatgggagc

SEQ ID NO: 32016 - DNA, 2359 bp, Homo sapiens
  chr13:95362823-95365182
  binary
cgagccggtcactggtcaagaatggatctggttgggagttctgcttgagagaacagagatctgcaaagttcaaatagtacaaacagggaggcgaggctgctcagagccatcccactcccagaaacgaatgacacaagcagcttttcccgtgtgccagccatttcagacctcacatttgaacagcgtgcatgcaacacggaccgggagggggttgggggttggggggctgaggggcgaggaagaagaatgagaaacaaaaacaaaaccgaccatgaaacttccaacaaaactggaaaggccaacatgtcaaaaagttactcctccacctccgtgggtcaaaacgcaacaggttccgaagtgcaaagcaaacgccaactgctgccgcacacaaccgcctgctttcgagttggctgccgaagtgcgggtctgaaatgatcctgcgaattcacaggcctgctcgcccgcgcccttgcgcgcttggccactcctgccccgcctggcctctctgcctctacctggcacctatacattctatgtacatacaaaccgggcccccggtcgcgggagggcgcacggggaggccgcagcgctcgtacctatacatatgtacacgtgtgcacaccggtcctcgcgaggcggccccgcggggtcatagcgcggcagcgtaggccgcggggtaggggtccagctggggcttgcccatgcccggcagcaggatgtaggcgagcggcggctgcagcccggggctgggccacgcgctgcagttgcacgggatcatgtagcccgggttgcccgggctggggtgcgagtgcgtgtgccccccggcggcggcggccgccgctgcagccgccgccgccgcgccgtggaaggcgcccgcgcccgcggtcgggtagcccagcgacgacgcgtacgggaggccggacgaggacgacgagatctctgccattttggagcccaggtcgagcagcgagtaggggctgcccgcggcggcggcggcggcggcagcggcggcggcagcggccgactgcgggaagaagacgcgtgcggcggcagcggcggcggccgcggccgccttctcgggattggcgagcagcgactcaggcaccaggccgccgcccgcccccgcgtgcagcccggcgcccgccttgagcgcagggtgctcggcgtccgccacgccgcccaggccgtagggcaccgggaaggcgaacttgtccttcttgagcagcgtcttgggcttgcgccgcggccggtacttgtagtcggggtgctccttcatgtgcatggcgcgtagacgcttggcctcgtcgatgaacggccgcttctccgactctgtgagcagtttccactcggcgcccaagcgcttgctgatctccgagttgtgcatcttggggttctcctgggccatcttgcgccgctgagcccgcgaccacaccatgaaggcgttcatgggccgcttgacgtggtccaccggcttggacatgctctcgccctgccgcggctgcagcccgccgcctcccgggccctcgccctcggcccggaggaaatcaatgttggctgcccgcggagacccgctcggccggccggggctcgtcgcgccccggcgtcgctcccgccccggaggagggggctgggggaccagcccagggccacgccgcgccccgggccgccttagtgtctccggccgagcgctcgagcaggttgtctctgggacactctaacttctcggcggtgccccctccccgcggcggcagtttgccctttacgttctttgggtccttcgtctgcagtggcgtttgctggtgagctccccgcaggtagcggcggccgggcagagcgctcctcctcctcggtcgttctctcttaaatgcaaagcgtccccaaaagttgcgtcgcggagactcctcgaagttgagccgaggagcccgccgccgcgtgctgccaagtgccaaagggggctctcagcggctggagtgtttgggttctcctcggtgactttctcatttgacagaagcagatgggggtggggaaggcggggaggtggccctggaggaggaagaggagggggaggcggaggagtgtccaggcgtgccacgagaacgcagagcgcagcaatggatataaatacaaatacagcagcaccagcctgtcttcttggctccgggcagggtgcgccgatgggaaacccccaatcggctgggtgattttttttttttggaggggggagctgtcccccgcagcacctgcctctcgagtcttcctctcccgctgctggactgacgggtggggcgaggaaggagggtggatgaggcttgagcaagcgttggtcgcccggcctcagaggaagttctcccggctcgcc

SEQ ID NO: 32017 - DNA, 993 bp, Homo sapiens
  chr13:96742659-96743652
  hyper
cggcgccctggcgagcctcatgcagccccggcgctcgcggccgcagctacccggctgcccggctgcgcgcggcaggtccaggacccgaaccccgctccccagcgcctgagcgcctgcaagccgccggcgggatgccgcgcgtcgcctgagagagccgcgccggggcgggagcagggagcgggccggcccgggcgcacccgggagcgcagggcgccccacgccgcagccgcagccgagcgcgccggcgcccgcctcccccgcccggctcgcaggccccggctcctcaagccccgagggccgcggggccgccagccagccacacgcctcggcgtcaggggcatggaggaacggcgggctccgagccgcgccccggagtccgcgaaacttccgagcgggcgcccgtccgccctgccgccgccgccgccgccgcttcgcctgccggcctgagagcgggaccatggatgaaaggttcaacaagtggctgctgacgccggtgctcactctcctcttcgtggtcatcatgtaccagtacgtgtccccctcctgcaccagctcctgcaccaacttcggggagcagccccgcgcgggggaggccggcccgcccgccgtcccgggtcccgcccgccgggctcaggcgccgccggaggagtgggagcggcggccccagttgcccccgccgccccgggggccccccgagggacctcggggggccgcggcgccggaggaggaggacgaggagcccggagacccccgggagggggaggaagaggaggaggaagacgagccggaccccgaggccccggaaaacggctccctgccccgattcgtgccgcgcttcaacttcagcctgaaggacctgacccgcttcgtggatttcaacatcaaagggcgcgacgtgatcgtgttcctccacatccagaagacggggggcaccactttcggccggcacctggtgaagaacatccggctggagcagccttgtagctgcaaagc

SEQ ID NO: 32018 - DNA, 1265 bp, Homo sapiens
  chr14:100437458-100438723
  binary
cgccggtgacctcgacggccctcggatcagggatgccccgagtccgagcgggcagggtgctcagcagggccaggtgatgggaatcatggggccatcgagcacggaccctggctcccccggtggcctctgtgagctctggggtcaggcggggactggaggagcgtccgcgccgggagggagcgcaccgcgccacgtgcccgcccggcgccccgcccccaccccggccacgcccctcgcgcttccctcaaagccccgcccctcagccccgccactctcgtccgccccgcccctcgcagcctcaagctcagcgctcccggaggcgcggacggtggggccccgcgccttttgtgtcgggctttgaccgccgcgcgcgctcattcacctcagcggccgcgggcggaggggcgcacgcgcgcgcagtcccctcggagggcggtggggcgaacagcaacgcgcgtaccctagctcttggctgctgtgctgagactagcccgcgcgcccgcgcgcctctccctcgaggactcggagccgcccgcgcactcgccaggggccgccgccccgagtctcaggcggacgcgcacgcgttcccgccgcccggaccccagccggctcgccccccgcccccccatcccccggcggcggcccccaggcacgcgcccgcgcacacgccggcccgggcacgcgcccgccaagatggcaggggccggggcccagctgtcagtcgccgccgccgcggcccttccccgcagctagcggccccgacgcccacccggagaagatgagcccccgctgccccccgcagcccagtcagacgcggagccgccgcgcccggggccggctcccccgctagcgcccgcgtcccgcgccccgccgccgccgccgccgccgccgggtcgcccctggcccggcgcgcccgtccccggcagcgacaatgaggtgagtcggggccggcgcctcgtgggaggtggcagcggccagcgtcggaggggctgggctgggggcccgcggtgcccccgagggcgggaggggggctccacgggcgcgggggcttccagagaaccgcgggggctctgcagagattcgggggcattcagagcgcgggaatggcttcgcgagagccgtgggggcgtctggagagccgggagggtctgcagggcttgtggggggcagtgttctgcaaggggcaggcggcgctggctttggctgcttgtggggtcctcttaggctccggggggcctgcggcggcctgggaggcagacccccgc

SEQ ID NO: 32019 - DNA, 463 bp, Homo sapiens
  chr14:102355922-102356385
  hypo
cgtgtcctggggctcccctagaagcaggcgcagtggacagagatgtctcagaggaagggagctgggtctgtcgcagatgggtgcttcagaaagatcgcacctgagacagcacggaggatgcgtgtgggtgtcagtggggaactgggcaggtagaataagaggagttcaggaatcacttctaccctttgcaggaactgtgctaaatattgcgggctttaaaattaagtaagacattggcctatgttgaaatacagcaaaaacgtaagatggattaatgaacgagtaaaagatggatgaacagatgtgcgtgtgatcaagcagatggagcacattgctcgtggtcgaatctggtggttgaaatgggtgttcactgtagaattctttccgttttcctagatgcttgaaattttccaaaataaaatattgagaaaaaaattcgtgcaagaccaagttctctgccctc

SEQ ID NO: 32020 - DNA, 677 bp, Homo sapiens
  chr14:103745232-103745909
  hyper
cggacccggcaggcacctggcgggcactgtgcgggcagggaaccagggagagcaggagggcgcgggtccgggccaaggctggcgggggtcgccgcggcgcgaccgcctcctccgccccggctccgtgggatgcgcgtccgccctcccaggccccttcctcccgccctcccccgccccccgttttcctcccctcccctcccgacccgccccaggccagacccccgcgcgggtcctcgccctcccaggacccttcctccctcccctcccctccccgccgcgtcccggaccctgcgggctggtcccgcgccccgccagggctgccggggtgtgctgctggggagcgtggagtgggcaggaccacgctggacacgcagttcgcgtgcggccgctccccgagcagtgcgcggcgtgggcggaggagcggctccgcgaggagatcgaggcgaacgcggcgcccgcgttgctggaggtcgtggacgcggcgggcgccgagcacctggtcacgctccaggacctggacatccgccacggcgacggctccgcggtgctcccgggcgtgtgcagcgaggcctcgttccgggccgtgaggccgccgagcaagcgcctgcgccggccgtgggaacccggggccgtcccgcgggtgctggtgggcacccaggccgacccggacgacgggc

SEQ ID NO: 32021 - DNA, 78 bp, Homo sapiens; identical to SEQ ID NO: 28505
  chr14:104158805-104158883
  hypo

SEQ ID NO: 32022 - DNA, 1283 bp, Homo sapiens
  chr14:104582815-104584098
  hyper
cgtgagggggtagggcgtccctccccccgcgtgggaaatgaggaggcaggtacggggctacccctgtgggctgcggggtgggggttcagggtctgagaagcagaaacctccctccctccagtttcactttctctttacccctccccttccccctcccacgaagttccctttgaagtgagaggggctggggtgggtgtgtccagcccagcccccacacccaccggagagctagcgcggccctgggctcctgtcgggcgctggtcctcacctgttccggccaccctgggcctcgacccggccaaggtggagccccgggccctccgtgcgcccgagcacccccggcccagacgagacggttcgggcgtggcccggcggggacccagaacccgggaggccaggtgcgcccaggccaggcgctggaggctggggcgccggatggggcggggcggccgctgagtcagggccacccccgcgcgggcgcgcggagcaggtccccgggccgtggaggatcagtcgcgggacctatgggcccgggagccgccccgcccggaaaaaccggtcgggccagcgcggcgcgggcacattccggcgccgggaagggcggctgcgccgcataaaaggcgccgccgcgctggccaccgccgctcggagctcagccgccctgccacgcggggcccgcgggacgaggggacgccggggccagcgaggacgcggcggggctgggcttggcggctgggatcccccagcgccaggcgagggcgtctaaggcgtccggtacggcgtcggggccgggtggctgcagcagggcagggggtgcgcgaccagcggggatctgggcgcaggggccggtccccgggatccgcaggcgacgcgggcggtcccaagggcgtcgggggctcctctctccgcagctcggcgaaccgacggtgttggggactcgcgcgctgggtccagtggttcttaacagttcaacagttctgtagcgcaattgtgaaatgtttaggaccactagacccggcgggcgcggcgacagcgacggagcgtcccacgcgcggcctggagtcagagtcacagtcaggggtgcgccggcgaccaatccaggggagcccacggaccggctccgcgctccaggtcggccgccccatgcgccgcgccccgcagtccccagggcctggctggctccacctgctgccagggaagaccctcggccggagagccaagtgctgctgggaggtggccgggcgtggccgggctgtgctgtgggaaccgctgggtgggggcgc

SEQ ID NO: 32023 - DNA, 2468 bp, Homo sapiens
  chr14:104603142-104605610
  binary
cggacccacccggaggctgtggctagggcggagagcgcagcgcagggattctcgggctcaccttgcgccttgctaggatgggcgaagtagggggtcggggcccctgactgatcgtgagcccccgaggtgactccagccttgtgcaccccgtgttctgcggatatgggatgtgagcttgtgcttcccgaagcgccgcggcggtagaagcgctgaagttgcgggtgtggctggccaggggcgcaggaccggtgctcccgaccgctgcgtgcttctgtgttgcgtgtgtgggtggggggacgggatatagagagtgtgtgtcccggagcagtggagcggcgggaggcggtgctgtctgccggcagtgcggggtggggtttgggtgttgtcctcagtacccagatccagatgtgggctgacgcccgttttcattctccaggctgcgaagagacgggtaggggaagcgcttccggccccccaggctgggtggaaagcgactgcaggcttacggatctcagaaagagtggagagcccctgccactttattccatacccccttgcgttttcgaacccctaaggtcatcaacgacccggaaagccgggaggggatcacccaccccactttctggggagtgcgtgcgtgggcggggaggcttatccaagtaaaagggggtgggcaaaacggaaagggtcactttgacgtactgagtctctgcgaaggcctcaccgtatgtgccggcagccgcgtgtcctggtctccgccgggtcacgaccttcggagtttccgagtgcgcctcaggcctgggacgcgcggcgctgtctccccagtctcggagccgtgtgcgcagcggccggcagggggcactcgcgtcacggggagcccgcccgccgcgcccgcctggcttgacccgggctttggggctgacccggagcctggcccggagctgcctgcggccgcggatgccggcgacatttggggcccggctaggcacagagcaactggtcgccagggaagggcgggggggcggcctcccagccggagacaaacaagcaattaattccggagctgagttcccatctgccaggcctgctgacaacaggtccggcgcacgcccgcaggacctcccgcttcccgggcggcacggcgcgcacacccacttgcgggcacacgcgcggctgtaaagacacgtgccgttcgcagacgcgccgaggcacagatacgccggcgcggtcgctgcccggctcgaggcgcacaccgcggcgacactaacccacgcgcgacagttagacctaaagtggcccgcgacacgcagagtacgctgggcttgctggaaaggcgcctgggagtctcggggccggggtcccgccccttcctcggcccacctcgccgtgggccttgggcaagagcgtcccctccgcagcctcagttttcccgcctgtagagggaggggcgtcggcgcctcctgggagacgcgcagccctggtgtcccgggagaggggcgggaggcgcatgcgcgcgcgcaactagatcctcgccgccgcccccagcgcccctccccggggcagggactcacctaacaggttggggtccttggagtgcgcggggccgcgtggggaagcggggaccctaccccccccacgcgccgcccagcactgggcaagggcggggcactctctgggctcccgcccctcgccgcccgccccgggagcccgagccccgcccttccccggccccgccctcgcctcccgagcgcgcccaccggagccaccgcgctcctcgcgacactcgcaggctctgcgaacttccgagcggctgggccgggccatgggggcgcctcggggccggatcacgtagccgcggcgcccccggagagccagcgtggccgggagcgcctgccgggctcttcccgcgccccggccatggtcggccgcggcgtccctctgtgcgctgcgcagcccgcggtacgcgcggcccggcctggagagggaggcgggcggcgggggcccgggacggcgaagatactcgcggtgtgcgctggatccctgggggccgggcctcctgctgagggtagcggacccgcaggcgggacctccggggatggagggagtgggtgagcgccagggtcgtgcccagggctcctaactttggcaagagcgtcacgctggggcagggcgcgcaggggtctggatccgacggacgtcccaggctcactgtccgcttccgcccccacaccctgcaggtggccgagggcggcccggcccgcgagccgccgccgctgctggaggtgtccccccgaaagaggctacccgccgggcccgaccaggacccatgcggcagccgccctgctcccgaaggcgccggggccggcccagagcagggccactcggccggcggaggcggctggtgccgccactgccacacgaagctggtggagctcaagcgacaggcgtggaagctggtcagcgggccc

SEQ ID NO: 32024 - DNA, 727 bp, Homo sapiens
  chr14:105070705-105071432
  hyper
cggggaggtgggtctgggggcgctgggggcatggaaggggcgccgcgccgggagcggcccccacttacccctcgtgtcccttgcagaggaagaagagcgtgcgccaggcgtgcgcggcggccagcagcagagacaggaggctggcgagcaggctgaagcggcaggcggccggcgggccccactcctgcaccgtgaagcgctcgcgctcctgcaccgtgaggttggcgctcagccacatgccctcggtgaagagcaggcagcggccgcggaagtcgtggccgttctcggacagcgggaccaccaccacgaagctgaacaggaaggccaagaagtagcaggcgcactgagcgaaaaggaaattgttgagcgccatggccggcccgggcgagagcggcggcgggaaggccgcgggaggctgcgccgggcggggaggccgcgggaggctgcgcagtggcggcgccggcaggtcccgcgcgcccctcccgggacgcgtgcgcatcggccgagcgcgggaagcgcctgcggtcagcaccgcggacagctcctggtgcgcgcgggccaggagcccggggtccaggggccagagaagggcggcctgcgggagatgcgggaattttaccaggtcggcctggagggaccgaccctgtgccgctaaagacttcgggagccacctgtacgggcctcacacaggccgactctgggtcgtcagttcctcatcagctcgaac

SEQ ID NO: 32025 - DNA, 960 bp, Homo sapiens
  chr14:105330940-105331900
  binary
cggccaggtcaggtccactgtgggcgtccaggtaagacggcgtcgatgcccaccaccatcgcccccagctcagcccagagcgcccggggtcagaggtggagatgtcggacatacgcccagtctggccaggctcgggagggaaaatctgggagcggcctctggaactcaccctgactccttcaccgtccgctcctctttttggcttccggggccaaaggttggggactcgaggcgcggctggagcctacagctcctggagcgtagttaagcgttaacccgctggccctgggccagggcgcggggctgctgtgcgcacccggttccgcccgtcgagctggggccggaccgggaggcgaagcggggggcgctgccgagacgggagggcatggggtctgcgccgggtgcgagatgagccggggaggccagcggggcctgggcggtgggggaaggtgggcctggggcaggggcgggatggcggctcgccaagcctctgccgaccggaccacgcgcggggctaccggggcgggctcacctggcggccgcggacccgccctaacctggtttccggcggggcggcgcggggtgcggcgcggccgggcgggggcggggcgggcgggggcgtgcccggggcggggcgttccgggggcggggctgagcctcccgcagacgtcagggacccgcgcgcgaggccgccggcggccgctctgccgtgggctcggcccgggctgccacgagcgtgcgggcctcgccgggcatgtcctaggcggcggccccgcccagcgctcggccgggcgggcgggcgggcgcgagggcagggaccgagccgggccgagctggggaacaagccggggaccaagccggggaccaagccggggactaaggcgagccggagaccgagcccgaacagcaggtaggacgcgccggcccagcgctggccgcggcccgggcctcccatcgccc

SEQ ID NO: 32026 - DNA, 583 bp, Homo sapiens
  chr14:105444359-105444942
  hyper
cggccgggaaggcccagaaccacgcgcgagtcccgcaggcgtctccgagtcccccgcccccaaggcccgcactgcgcgcccctggacacgccccggcgcgcgccctcgcgcgtagcccacccgccccaggggagcgggctgcaggcggggaggggcgcaccgctgccgggggttccgggccaggtgggcagcaccatgtggaagcagtcgcacatcgcggcggccaggcggtgcgggcctggcggcccgtcgcgtccagtcgctggtcccggctccggcgcacggggcgggcgggcgggagccgcgctctgccccgctgccctgcgctgccgcgggcggccgacctcggactgcggacaccgcgcgccaggctacccagccgctcagctaggaccccgcccggctccgcccagccctgccgggccactgcggagcgcgctcgcgggcggtgccgtcggcctcattcagcccattggctgccgtcgccgcggccccgcccctcccagccaggccccgccccaccccgcgcccccggcccgcctgtcgcgtccgcagaattaactttggactcccgccagggagc

SEQ ID NO: 32027 - DNA, 843 bp, Homo sapiens
  chr14:23834171-23835014
  binary
cgtggaggtctctccccggcagcctccactccctggtggactcaccgacgtggcaatggccatggctttggcctcccgcgcagcctgcctcaggccaggctcggttttgctgacttcagcggtggctgccccgcaccatggtccgcggcctctagcccccagctgtggcgcctgagtcgtggcctccgccaaggttggaggaggagaaagaaaacccacaaaacttcccaaatgagaggcaggctagccaggcaggaggaggagcggggcgggccggggcgtcgctgcgggacggcatccaagggcgcgcgctgcgtgctgtccccgcggcctcccgggcgccaccggctcggccaggccccgggagctgcccgccctaggccgcgggggcgccccgggctcgcaggatccgaaaattcccttcccgggccggggcgggtgagcaggcgggcgctgggctgcgctcgacgcctctccaggccgctcaggagagcctcgagggctgggagaagccgccggggcggttgggctggacgagcgagtttaggggccaaccgtctccacccgccggccgcgctgcagagcggtgctcccagggctggggtctgcggcgaccccgctgggaggaagggagagcgagaactgagacgcttgccccaagttgcctggagccaaaggcccccgagagcgtggccgtggggctgggtcgctggagtggccgcttcggcccagacactcgcacccccggcggtgcggcggttttcacgcgcgcactcactcagcgcgcccgggggtctgaggtcgccgctacggcgcctcgccccgggcagcagcaaccagcac

SEQ ID NO: 32028 - DNA, 1378 bp, Homo sapiens
  chr14:29234550-29235928
  hyper
cgggatccttttaaagcccccgattcgcaatttccccattcacttcaacctccaaccgaaccttcccagttccaaagcccaagaagctgggactgtgagatccacgttcccaaggctccccggtgctttccagcagcactcagggttggcaagagctggcttcagtatactgttatttcaggaatgaggcccgcacaaaataaaagcatttgagaaacggaaaggaaaaaaaaggagtgaaaataggaaggcttaaaaaaaaaaccggaaagaaatagacgcccacccttattttccctccaatgtcaacaagcaaaacgaaaatatttccagggtgatcgctcgcagctacccgcttccaattcggattagaagctgaggctggagcggcgaggagaaaacgacatcgagtcaccccgcgcgtgagcgacgctctggagcaggagagaaggaaaaggaagagacacacgtatatagcatgtgttacctgatttatttcgagattgtttggtactgttttctctctgggcacctctcatttcggaaggccatcagaggcgcccactactgagcggccccggccgccgcagcagcacccggagccccagtcccggtttccccgcggtgccggagcccggagctcgccgccgcccaggcctcaggaatcgagtaagtaacccctgtttggccccgcgctcctctgcccacttcctcctcctcatctcatcgctcccaaagctctcccacaccctcctcccccgaagtaaaggacacccccgcacacacgccagcggtgggccttatctccccccttatccaaagctgcgctagactattacctacaaagggcacaattttcctgctggctcagaaatgccagacactggcctgcaaggccgactcggaaaagtagtgcctcgcctctacctcctccatttcctgccctctcgcatcctctccctgcactcccactcttcccactaccaccaccacccccgctttcaaaaataaaattggatacaaactttaatcactaaggacaaatattgacgcttaaacgaaaatgacccagtacaatgaggaggaagccggaaatgtgagctattggccctaggaggggaatttcggtggagcggagccggcggggtggagggggtggcgggggcgcagggaagggctgcggcaccgcgtgctcccgccggcgtatccctacgcggctccgcgcggcctcggggtccgaggcccgcggagagggggaggcgagcgcccgagggggcggcagccggcgggcggggcgggggtgggtgggcccggcccctccgattggtcgacggcgagagagacgctcccgcacgccgccagctctgattggcccagc

SEQ ID NO: 32029 - DNA, 786 bp, Homo sapiens
  chr14:36973066-36973852
  hyper
cgtaccacataaacaaatgtagaagatagatgccccagatcaagaaatactactaaagtgacctgacttgacagtaattgcaggcagcttttgagaactgcatcggggttaaacggcagagatcctgacgacctgggcgaccgtccctgcgcagcccggcgggaggctgcgcccagaatcctgggctttgggcctctggggcccggcgaggagatgaagaagtcaagcctcgagctctccggaggttcgatggccgccgggccagtgcgggctcagaggaagaccctgcaaaaaagagcgctcgcccccacccctggagccgaccctgcgcagtagggccgcagccggtccccgcgggcagctcagcgggcgcgggcgggaggctcccggaacgcaggctgaggtcaggctgaccacgccgcctcctcagtcgccgtatcgcggggctggcggccagcgccttagaagagcctgctccgccgcaggaagaaagacgcccgacaggcgcccactgcccgaacccacgcgggggccagtcagccagcgggccgtgttgggaaagctccgcgcggcggcgggacataggatccccatcggggacctgggcgacggcctgagcttgggcgcccctccagctgggcgtcatctccacacagttcttcccttgcgccgcgaattcagcccctgtgaagacgctttgggcattggcgagcaacaggggaaaaaacgagtcacttaaatgggagaaggaaggggatggtcatgaggacttggaggaaaccacac

SEQ ID NO: 32030 - DNA, 788 bp, Homo sapiens
  chr14:36974730-36975518
  hyper
cggggactcaaatgctggcggcctctgggctggggccgagcagggggtgccgaccgcgggaagtctgggcggccgccctcccacccagacgagccgatgctgggccgcggtccctctcagctacctcgcttgcccgcctcggggcccctggagaggggtctgtgcctcccaggcagggaagcgtcttgatgtgcaccccggcgttcaccaaccaaataagggcctcgctcacacagtcgatgtcatgctgggtattaaaagggttgtgctgcagctaaaatatctcacagtgtgtgtgaacctcataaaagggaggacccggattccaagcccctcgaagtccccaagcagcctggagggtgggggactcccctctccttctctccacactgagcccccgggcaagcccaggcctcctcctgcgccggggtccccgggctccgaaactgcgagagccctgcggagcccggccagaggggcagagggtgggggctgggggcggggacctggggggtgcagcccagccagaacccgcggcctagcctgatcgcggggagccgggatccgccttccatcctgggaaacgactcgggttagggaagcgggatgggctccgctcggagttcccaggcagctggggcgccctccaagtgacgcctttgtccaggctgcgctcgcggagaataaagggggcgctgtccaacctcaggttcggggaaaaccaaggaaccaagggactctttttctaaaatgccctctccaaactacagggaggaggaatgggacac

SEQ ID NO: 32031 - DNA, 815 bp, Homo sapiens
  chr14:36989187-36990002
  hyper
cggtcggggttccccgggcacggacaggtctttaggaggagggggctgagggacagggtgggggtttcacctgagcctgccggggctgctcctccctcccgccgcggcctcccagccccgcgccttcccactgcctccggaccacatcgggcttcgctgcgctgagccccagtcgccaacaaatgagcgagcgagtctggggacgaaccctggggccgcactgttggtctacgtgtctgtcagtctgtctgcctctcttctgccgccgtcagagggacacctctgctccccgccccctttccccctaccggagagaatccgagcgggcggagggggcgctgagtaggggatcgactgcctcccggaggctgtcccggatccccgagccacaacccgcccccgcagctcaggggtttttcagtgggccacccccgctaacacgcctcccccaaggtcttccccccccccccccacccccggccgagcaaacacagcactggcccccagagctgggaggatgggaaggggtctcacgggagggtccgtcactgaagttgccccacctcgaacaaacctggtgtccctgaccctcgcccatctcccagacacgcggggatctggggctggagctgactttccgaggacatcacagccccagcacccgagcccagagccacgctgttttcccctctgatgcttcagggagcgcgcgagcagggagcggcgtgagtgcccgtctgtctgttgccgggcggaactgagcctgaaccccggcggctggagcgctggccaggagggggcgaatgccgaggtgc

SEQ ID NO: 32032 - DNA, 815 bp, Homo sapiens
  chr14:36990508-36991323
  hyper
cgcgccaggggctgggagggcggagcgctccccggccggccccggcaggtgcctccaagacacccgcgctggtcaaggagcttcttgaatttagtttttgttttcacattttctttcccctccttgtagagaaggagctcctgatcatgacgaacaggcagttttgagctacttaattcatccgggctccctttttttattaatagcaattacagtagagaaagttttatttatttttaaagatttcagccctctccttgaagagagctcttactccctcaatacaaagccaacttctataataacattcgcttttctcaccgcctaccttctttaccagggtaaagaaagctcaggacaccctccgccctcccacctgcgcccgcgtttttgtgcggtccccacggcagagctggggaggccaccctacgtttgcgcagggagacgcgctcgccgctggtgttgcgaaagaccagagcgaagcccggctccttgcccttccttcccaggggcttctctggggggcgctctcaggccccgacgaactgagcattgatcactgtggtggctaagcaaggaggggaggcgacgccgggcttaagcgaaccacagaggagaactggcaacgctgaatacagaccttgtctgcaggcgcgacctggccgggcctgagtcccgaatggggtctaattgcgaaggcggggtgggtttcccagtcacccagcttctttctctcactcgccattatttcatagttgtttgtaagtttaaggaacaccaagtgtagaatgttgtacatctcttccagtctcaac

SEQ ID NO: 32033 - DNA, 847 bp, Homo sapiens
  chr14:37050213-37051060
  hyper
cggcggctggaggggcgccgcacttctcctgggccgcggcggttcccacctcgccaccgccgccgccgccgcacggctgcccgtcgcgaacaagcaccggcaccaccacgcgacgcagcaggccgggcgcggcgtgcagctcggcggatgctgccaggtcaggcgactccgccgcccctggagcgcgagcgcgcttcagcttgtagcgatgattctggaaccagatcttgacctgcgtgggcgtgaggcgaagcaggctcgccagctgctcgcgctcgggcgcagacaggtaccgctgctgccggaagcgccgctccaactccagcgtctgcgccttggagaatagcacccgccgcttcttccttttctcggcgtccgagcccggagacgcgggcctagcggacggccgctgcgacgagtctggcgggctggtctccaggctgctctcgtccgaggctagggacagcaaaggagacacgggtgggtgagacgccggaccctacgagggcctgctgcccttctggcgcgggcgtggaggcactggccagagggcacgcccactagcccgagactttcgggatgaggccatttcctgagtccacatctggacatccacctctccgaatgcggtgacctcattcataccacagcggtcatcagcgggcctgagatcgtgccccgaaaaaacccaccccggggccctcttaacatgtccgcaccggtagttgcgctggccgaccagtttatcacaagctgggtcaccagcgccggcctcctccaggtcgactgcactgcagtgtgccgaggtttgcggagccctgagtgggaacggggtgggggtaaactc

SEQ ID NO: 32034 - DNA, 868 bp, Homo sapiens
  chr14:37051081-37051949
  hyper
cggaggcctggagatcgtggccgtgttttcaggcatggagagggggcggggggtggggtgggggcggcaggtggcggcgcgttttaaatttcaattattccgacctctagaaatcgtcagacacagaaaccccaaatctcggagcaccagtgccaggcagggatctgctcttaggatgtgccgaccgggatgaatgcgttaggggttcgaggacagggctcccgtttccaagactgaggaaatctagactctgggctgggatttcggctttccggcccctcgtgggctgggcccttgattctgctgccccacgcctcctacctcccaccccgcaccgcaatccaccacgcacttacaagggtagtggccgcgctccgaatccagccaggcggcgcaggggtcgggctggggggcgcgtggttctggctcccgcctcggcaggtgttgcgcgtcctgctcgggtaaatctagaaggctgcgcacggtgaagctcaggcgtccagaggtggccatggccgaggaggggaaggaggcgggggcagggcaggctgggaacggaggggcggccgggacgccgctcctacggatgggcgtgggaggcgctcgccatgcgctggcagccgggatattagcgcatttacagcggaatctctgtttatataaacagctcttcccacccaggccgctttgaaagccgaggtccgggtctccagggtgttaagtacctgaatgagcactggaccagagccggggcgagcccggaaggtgccacctccgcccccgccccgccccgcaccccgccccgcaccccgccccttggcgcccagttacctcccagaggctgcaggaagcagcatttggcattagc

SEQ ID NO: 32035 - DNA, 997 bp, Homo sapiens
  chr14:37116534-37117531
  hyper
cgccagcaccgtggggagcgagtgggtcccgcccggccgcggcctggacctggcagccgggcttcgtgggcgctctgagccgtggcccgtggcgcggggtgatccttgtgcctggcgccggcctcagaaccccgtttacggctttccgcgcatacggaggttgctggggaccccgacacctgcgcgccctcgactggggcccgctccagcagtgaagacccaggcccttccctgggccgtggctgctcttggtgcctcatgggagcgcccggggtagggactcggctagtgacctgtaggacatgaggggcgagctgggagccgattcgcccacggcgtctccttcgccatggaggccccccacccattccactccggggttgcggccacgcaccataagagcaccttcaggtctgagctctttaggggtgggagtaggcagttcgtgagtccgggaaggcctgcggggtttcccgcctgctgcggacttagcgtggggccgaccggggctggcgagggctggcgaggactggcggggacccgcggggctgagccagctctcgcgaagccctcaagtgaggaacggcgcttgtggctgcgcgctctccgcagccaagttgcagggtccagcaggggctcaggtcctgttccctccgcagatcccggatctagggctctagtggtctcggccggagggaaggtgacgcgcagtgggcgcagacgcagagtgcggggcgccgaacgtgggaaggagcgggttcagcgcgctggtgagagtttcaggaaatccgggagagggcggtatttaccagtcccttccccgagagcaaccaggcaaatcggggaaggttagaggtgggggacctgcctgagccgggacaaaaaactttggagctagggccttctaaccctggagacttgccgactccggggcgggctctcgcactcaagtcccgagatgggatgattttccaactttcgtccagcctctccttcc

SEQ ID NO: 32036 - DNA, 838 bp, Homo sapiens
  chr14:38052540-38053378
  hyper
cgaggtcaagacccgcagtgtcttagtgggttttcacctccacctccgtacaatcaagagggcagagaaggcgggggctggaggtggctgaaagggcagggatggcggtgaaacccgggaggaggcgacattcgtgtcaggtggcggtcccaggcagtgtccacaggcccggaagccgaggggaccaggcatcaagccccgcgtccagatccctgcacccgggggcgggacctggtgtcccgcggtccccgcccaggttcctggggcgcttttccgcaatggctggcgtggaagcgagagggggcccagtttttccttgccaggttgcgggtacagccagctccgcgccggggttgggcggcgcggccgggatgctgagagccctgcgtgctcagccaggggcgcagggcggcccttctgcccagcgcgccccgggcaccagggatggcttcccagctggaggccgggagggaggagagtaaatacccattctgcgggggcagccctcgggggatggttgcgaagggagaaacgaaaaataaatcagacaagagagccgtcccgcccctcctcgcccggtcctggcgggcggcgccactggtcctgcagcctcgggcgtgcccgcgcccccccgagcccagggggcgtcgcagcgggccgggcgggccaggactgcgcctgtgtgcgggtccccaggagcactgctcgcctgccagccccgcccggccgggcccctccggcgggatagagccctgctttgctcttttcgttggccaagcacaattgtgttattggagataatgaattcaatccccatcaaagggcattaggctcgccc

SEQ ID NO: 32037 - DNA, 993 bp, Homo sapiens
  chr14:38063865-38064858
  hyper
cggagtttcctaaaactccctctccggctgcgagagtcgggacagagcagggcagcaggtcccgcttccaggcccggccaaggcccggccggggccacaccggcgggcgggcagcggtggcaccgagaaggcgcccccggcccgcctgcctgccttgcctggcgcccaccgctccccggcctcccccggcacgggctccagcggcgccccaccggccgcccgcctcgccttgcctctcacctcctgcgtgtctgcgtagtagctgttccagtcgctggtttcatgcccttccatcttcacagttcctaacatcctggagccaccctgcccaatacaaccatccagccctgtgcgaagcgacgggcggccgcgcggcgcggggcgggggaggggagctgagcagctgcagtcacccgagcgcccgcgcgggcccaacgccacccgggcgaagaggaagcccagagctgcggggcgcggcgtgcgcggcggcggcggcggcgcggcgggcgggggcagcgccgggggcaggcggctgccgcggagcgcggcgccggggagcgcctccgcgggaagtgagcgggctgcctctgcgaggcaagtgcagttgagctgatgtggatcttacgtcgcttgagtgcccacctcctcgtcctctccccatttgtccgccgcacaaagacgctcgcacctacaaagcccgaggtgcacctgcaaggcggccgcccgccagtccggccgccgcgcctcccgccccgccgcttcaccgctgcgcgcgacccctcccccgcgacccctcccccaagcggggccctcactttgtttgcaaagcagtgtaattggtttaggcccggaggctagggaaagagggaaatggggagggagggggtgtaaccccctttggaaaaagaaaaaataggcggggccaggcgggcgggcgggctagggctctggatcggaacctcgcagccggagaaggccgggggcggtggcgtc

SEQ ID NO: 32038 - DNA, 930 bp, Homo sapiens
  chr14:57264733-57265663
  hyper
cgaggccaggagaagcggccccctcctaagccgtcagcggctcatcctaccgggagacctggaaaaccagcagccgcgggccctgctgggcttgctttcgccgccccggccccttctccccggccagtggaccccgctcgccgtcccgtctgtcagtctcggttttagctccttcgggcgcagggcgctcgcctcccggccgggccaccccaccctccaatccccgaggccgacccgacccctgcactccgccaggccgcgaggtttcccagcgaccggcgccccggcccgcggccgacctggaggcctgactgcagggctcgggcggggccctctctcggctctggctggcggcccactcccgcgggcgtacaggcctcgccaccgggcctcggccttgccgcggcccacagcgccctgggaccggcgcccccgaggcctgagaactacgcccggggggcgcgggctgaggctcaagagaggtcctaggtgcgggccagggatggagccagcccagagagaaaggggaaaacccggcaaggcaagagcctcagtctcgcccctgcctggcccgccaggctgtgagtggggcccattgggcagcgccaacctggggagtccggcgtctgccccagctgggggccctcggggcagagatgtgagtgctgttcccaggtaactccgactgggcactggggagttagaaaagccagctctttagccagagcgcctagggcgcggcggagagcgggccgcccggcaccacgttccttctggcagttccgccccagcctcccagcgtcttgcgcctgtggcggcggcagtacgggcctggggggtcacccacaggaaaggtgagattagcagcaccatgtgggagaggggttgaggaaacccaccattatctaaaacttggaggtttccaaagcc

SEQ ID NO: 32039 - DNA, 868 bp, Homo sapiens
  chr14:60973254-60974122
  binary
cgtcccttccccttgtgaagctggtgaacaaataagtgattccaaggtgccctggcgcagtctatttcctttgggttaataaaattaaatcaagtcccttgcgatggcgaagatggatctcctgatagtagtccccaacctccaggcacttctcagtcccttcctgccaagccaccagacagtgctcctactctgccacacgcagcccgcacccttctggcggctcccgcgaggccaactcagactctcagttccagttgcccgcgagcctcagacacgcagaagctaaagcgccctcatctaattatttgcagaactattatccaagaaatgggccatgggataaatattcccatttcctggatggggcccctagactgtccacttgctcacaaagattaagggtaagaaaccagctctccccgaatgtgccgcttccaaactgtccagtaaaagggcgagagggagacgtgtggtctcctggggcatggacaacctctcccacctcagcagctaggcgctgggatcggggtcggctctcggctcggctcgcgggctgtaaggtctccgcggaccccaccgcctcttctgcgcgctaagggtgagcgccaagcaatttcgcgagcaatagccggcaaagtaaccaccccgagagggaaaataaacctctgcaaactggagcaagggggtgctttcctcccctggccagaagctccgggatcgcagccctcccgggtccggcttcatccctgcccggccaccgaggccctctttttctgcaccgcggattctcctccgcctgcgtgttcggggcccttgtatccgatgtttctttctaaaagttgtccttccggctgattcggaagtc

SEQ ID NO: 32040 - DNA, 1113 bp, Homo sapiens
  chr14:61747077-61748190
  binary
cggaacgtgggcagcgccgccgtgcgcatccacaccacgaagtcctgattgatgaagccggtgttgttggggtcggggctgagctcgtagactggccggcgccagttgggcgggggcgccgtgccctggaaggccaacgccaggctgccgttgaccagcggcgggttgcggaacttgacgtggtagtcggtccaccaggcgatgccggagcggtcgagcggcacctcgacgtagggcccgccgggctggcgctggtgccaaagcgagaaggagtcgttgaagaggctgttggcgatggcgccgcagggcgcgatgggcaggccggccgcgctgcgctggtagggggcgcactcgttgacagggtggcgcagcgcgctggggagtccgctcagctgcgcgtcgtcgcgggacacgccgtagcgccggttgttctggtagaagttggtcagctcgtagtagaggtacactgggccctggaagagctcgggcagcgagaagtaccaggcgcacgagcaggggggcggcagcgcccggccctggccagccgcggcgcacaccgagcagttaccggtgcccgggtcgcctgtatagtcgtactccagctccttgatgccgttggaggagtagtagaggcccaggcccaggccgatgaaggccaggcccgcgcagaagaagagcggcagcgcgatgctggccgacagcagcggctgccaggcggggaggcgctgctgagtgaaggcggtgttgtcgggctggtgggcgccccgggccgtggcgctccaggtcatggcggccgcgcggggaccgacgcgcgggctgaccgagtgggggccccgccgcggggcgcctccctctccgcgccgcgcaagcccggggactgctcgcgggtcgggtttcccgccagctcaggtgggtttttgcccgggcccctcctctgcctccgtcacaggtgagtttagttccaggccctacgagcagtgcccacaccctcccagttccgcctccgcccaggtgcgctgcacccccgcgggtcaccgggagccgcacctcgcccgccccttccgaggtgagcaggtgggtgttttttacctcacctggtagactcagtctcgc

SEQ ID NO: 32041 - DNA, 873 bp, Homo sapiens
  chr14:65170688-65171561
  hyper
cggacacggccggctctggtaggattaggatccccagatcgatcccggctggtcactcacttgggaaagccctcagcccccttcgcagggcccggtgttccctgtccatacaaggggtacgttctggcagtccatgctgtctcgggaggcggtgatagcaggtctgtgacaccagggtgaccccaccacgtgcgtcttggtatcctagagcatctaggctgcccgggggtgcgcgctcatcaccctgcgggcgttaatcgttaaccgcgcccaggcctcgccgccgccgcagccttaccccggctctggctcgccgcgccgcgaaggttgccccggcccccgcagagccgccaattgctggactgcagccgcgagctggagtctccacccacaggaaaaattcctggcccgcccctccctcgctccctcgctccctcgctccctcgctccctcgctccctcgctccctcgctccctcctgccctcccgctgcagctccggctccgctcgacttcctgccgggcgctggcaagccgcgcgctgcctggggtctccgggggccgcgcttgcagctggccgagtccgggccagctgaggggctggcggtgggcgggagcggtcggcggcctcagccccttcagagagcgactttcaaactcgcgcccgcgtcgcggcagcacctgggcagccccgcacgccgtgcgcgtcccgagcccgcggggcagctaccgctcggtgagtgtcccctgattctcctctctcccctcttatctccctgcattaggctgagcggcggtgccggcagtcacgctggggccccagtcccttcgcggcccccgtgccagccccctgcggggtgaggaccggggcgacc

SEQ ID NO: 32042 - DNA, 361 bp, Homo sapiens
  chr14:67878644-67879005
  hyper
cgttccggggcgcgcgtctggccccgctctagggagccgcgtcggcggggccccacccgggcaatgtcccgaagctcgacgcgcactcaccctcttgaccaggaagccctccttgagcacgccgtcctccatgtcgccgcccgcacgccagggccaccccaggtgcgccttccccgcgcctcgcgctcctcggcacccgcgcagcccgcgcagtccgcgcccacggcgcccaggaagcagctccgacgcggcagggcgacgcctccctggcgcgtgtccagagcctgaggccccggggcaggaagtcagaccaagtcgggatttctgacgtgacgtttccacccaaaggtgctccagggtc

SEQ ID NO: 32043 - DNA, 978 bp, Homo sapiens
  chr14:72398613-72399591
  hyper
cgtgtggtgtgcatgttgaatacataaaaatgacgaggttaggaacaatatcgctgacggtcgcggtgtcccgttttaatttagagggcgccagcaacacgtcagtgagggagattcagaagccgccgggcacctcaccccgggccgggaatccctaagagaaccttgacgccgctgaagtttccggaccgggccagtttggaattgacgaaagcagcctccgcccggtcgagccagtctctcggttttctcggcggcttcttgaggatgaggcatttctaggttttctcctcctcgagcaaatcacggtctgcgccttccgcggctctgggaacaggtgagccgtgcggcggcgcccgcgggacgcgctcaggtgccggtccccgcccgccggcccctccctgcagcacgcggtccgggcccaggtgccggggcccaggtgccggcgcccaggtgcgcggggcacggggctgcagctccgctcggcatccgacagcgggcgccgctgcagcagctcgcgggccgcggagctgaacggcttcgcgagttggggcagctcctcgcgctcggccctgctcggcggcgagagctccgcctgggcgccgcgttcctacagccgccggagccgccaggcgccgagggaacggacagacctccgcgcacccttgccgaccggggcgggcagaggcgggcaagcggcgaacgcctgggagcgcggagagccaggccagcccggagcgcgccggggacaccctgtgcgccccgagtcccggcaccatgcgacccgccgcgcgtcctcgcgggcccggggcttcgctcttcgctcgctgagcccctgcgctcgccaccacggaaactcggaaagaggaggcgaggctgtggggagcggcgcggagacggactagacttcccctccgcccccaagaggctgccggtccccggttccctgggcttctccagctttatcatgaacctggc

SEQ ID NO: 32044 - DNA, 956 bp, Homo sapiens
  chr14:75078377-75079333
  hyper
cggctgggcccgctccacgggctgcaagcccgcgacaggcgcgtcctgctcccggaacagactgtacaccttggctgcagccgctgccgggtagctgcccccagggcgccgcagtcgattcgcgtctccaccagccggctcgtatctccctacggggtccctttgggcatgacccgcgcccacgaagagagccagggtgagcggcaggaagcctctccaggggttccgcagggcgcgccccgggctgcgggctttggtccgcggcctcatggcgcggggcggctggagagtggtgcgcgcgggcaccgcgaagagctttgtggtcggcacgctggacgcccgcgggctgttctcccggccccgcccggcggccagcttctctgagtctagggggccctgaagcggccgactgggggcccggctctcggcggaacgagggctgcgcgccccgagcctcgagtccgcgctcctactccagctgggctcgcacggctgctgcaccttcgcgcctcctccctgtgcctgcagccgtctgaaggggacccggacggttttatttttggaaacctcccccggctttttcgtctcttttatccacaccaggccccctcctcggagggacagctcagccccctcattaccggagagggagcgaggaattccagcaacacccactttggcaccgggaagccagcgggcggcgagcgggcggcgagggggattaacccgtgcggagcagggggcggcgcggggctgacccaggcgctggtcgggcagatggcgcctgccacgaccgggacactgggccgcctttctcctgctctgggcaagttcgaactgcagacctgccccgaatcgttctcccgcccctcgcctcagggaccgtctttggatcgggggacccaggctgcagccttgcaggtctgaaggaagccgggaggggcgccgaggcccgc

SEQ ID NO: 32045 - DNA, 858 bp, Homo sapiens
  chr14:81902288-81903146
  hyper
cgtccccagggacacctgttgtcgcctccccactcgggccgatgaagacatcctgggcgtcccaatctcgaagacacccgtcggccagaagtgtctgtgtatggggccaggtgtcgcaggagtcctcctccacccctacctgccttaagcagagtcccctcgtcctcccccaccccgggacgcccgcggctggtggaaacgccgcgcctccgcgtggctcgaccaggcaggctcgggggcgccagggggcacagcggcgctaggacctcgcggccggcccgcccccgcccccgcccccgccccccgcccgctccacctgcggggcccctcttggggggcgcgctcgcctcctgctgcggggcgtgggtgcagttacctgcgccgcggtccgcagggtccccggcgtccgccgaaaggtcgccgcggcaaagccggcttctctggccgcgggatacccacccggccgcactgctctcgccacgatccctcccggccgcagcgccgacgccggctccagactcgagctcgctctgcgcccgccggctcccggcgccgctcccgccgctcctgattggccgcggcgcgctcccgagccgcgccatgattgggcagccggggagccggggcggggggactggccgggcgccgccgggatctgctggccaagcttcccgcgccgcagactcgctttcccgcggctcccggggccccaaccagaccccgaagctgggattcttcccctctgcgcctagtggggccggccgtccaggcacgaggcaacacggaaagcatcgattcgagcgacatggaaatggcgtggaatggggagcgcatgggagtcccacccgctccgcctgc

SEQ ID NO: 32046 - DNA, 254 bp, Homo sapiens
  chr14:86000933-86001187
  hyper
cgactgtccgtatgtgtgtctgtgtgtgtgcgtgtgtttgggggagggggttagtggtgttgcagagaggcggaatttttctcggtggcctgatgcgcagtggtcctaaggtagtgagtggccgcgtgtgcgcattgaggcggcggcagcggagagaagacggtcacgtttcccgaacggcagccttacttaggctaagaaaatagctgcagctcactccaaaagcaaaaagattccagccccaactccccgac

SEQ ID NO: 32047 - DNA, 551 bp, Homo sapiens; identical to SEQ ID NO: 28535
  chr14:92302201-92302752
  hyper

SEQ ID NO: 32048 - DNA, 315 bp, Homo sapiens
  chr14:92414008-92414323
  hyper
cgctcggctgcgagcgcccgggcagaaggcgaggggcgggcgcgcgcaggggtgcgggggctgggagggcccgggccccttgaccttcccacccaggggcggggcggggctggcagcgcggcccggcggggaggggcgtgcacgcccgcgctgcgtggcaaggggacccgcgagaacgttgtcgcctccggaaggaaagggacttgaactcacgacccacgcagctccagggactagaaactcacgatcgattgggaaaccagaacctacgaagcagaggcttggggcgagcgacgggagagtcgcgatcttccc

SEQ ID NO: 32049 - DNA, 896 bp, Homo sapiens
  chr14:92789091-92789987
  binary
cgaccaattaattttctcctgcatcttccccccgtggtgggtggcggggtggggagggggtgtgtggcggggcctcgggtcggctcgggggtcggagagcccggacaggagcgactacactgcagaaaccctttttctaagagtccccagcggtgccataacctgtttctctctgcagcagcctcagagggtaaaggaagggctcgttgcagctccatatggaagaaaggagagaaaaagggagaaggaaggggattatattggtcagtagaggtccaactactgaagagaagagtgcacgggggagtgcgccctacgggacgagtacacgtgctgggaagggcggggggtgagaggcgggcaggaggggaggagtagggaggcgagagcagcgggcgggaggcgccacggcctctcagacgctggcgcccgcagccgagaagccagagagaaagttcccggggagagctcgcccctgggagggccgacgtcgagcctgctcgccgcgagggtctcaggtaccgcgcgtccagccagccttcccgcggcgcgcactcggccgcccgggctcggctcgtcgggaagcaggggaacatcgccggctggcagccggggcggccgccgccaaacttggaggaggaggatgctgcgagtgggcgcggcggcgcggggcgcgggggcgcactgagtgctccctacggcgctgctgccagggctgtggccgggcgagccggccgaagcggagcgggcaggtagcggctctagcgccgggactgcgccagccctgcgagcccgggccgccagcgccaccgtgccggcgtcgcctcctcgccacggagccatggtgcgcgcagcgcgcacgcggcgcgcgggactctgagctccggccgcgtcgc

SEQ ID NO: 32050 - DNA, 894 bp, Homo sapiens
  chr14:92789988-92790882
  binary
cgtccccaccttcccaaggggctcccccgccgacctcgccctcgggccatgaggctttggcccggagctcctcgcctctgagtcgcgcaccgcctgctccagccccagcgccgctcggccactgattgcactctggccgctgaagctccccatcctctcccagagacggcacccaggcgctccgggatggcgctccgcgggaccctccggccgctcaaagttcgcaggaggcgagagatgctgccgcagcaagtcggcttcgtgtgcgcggtgctggccctggtgtgctgtgcgtccggcctcttcggcagcttgggtgggtgctggtacgggtcccctcttcctggggagttgggggctttggctggggagtctcggggcggctgcgagatgttttcccctccttcctcatcaggttggtcccaagggttcatccagtcccctccccgccgggcaggtagagcgcgcccagaagagctgatggacgctctgggctgtggcgccggttcccctgagctacgagcggcccctgggggggctcaggacgcggctgcaggtgtgtgttactaagacgaaagcaagaaccgcttccgtcccgggagtgcgcccggaatgggcagcgcaactgcggggtgcaggcaggattctcttggtctggggtgggcgaaactgagtggcccgctttcctattctgcagagccgcaggaaccgccactgcgtctcgcccctgccctggttcaaaggggtcccctgggtgccctgaggtgtttgttcttcccaaaccctaaaggcgttggggcagtctgccgcggggggtagctgccatgtttcagcatcgcgtctctcaactccccttaactcccacggagggagaaggcgggtgtgtggagcctc

SEQ ID NO: 32051 - DNA, 932 bp, Homo sapiens
  chr14:92980037-92980969
  binary
cgctgccgaatggcttttgacaaaaaaacccttgaccaccaaggccagcctcttcctgaaagccccgctcgctccgatacaggaagtagaagggagcgagagccccagagcgcggcggcagcggcggcctggcccttccagagggccagagccagggacatgcgggcgcccgggactccgcgttccgcgcggcccggcgcctgagcgcctccgttccccgtcccggagctgccggcggcatgatccgacacgccggggcgcccgcgcgcggggaccccacggggtaagtccgggcggccgccccctcctccctcgcgatccccacggcccgcgtcctggccgccccactccacttcttgtcccagagagtccttcgggcgcgtgacctcggggttgtcgggctgatacgggacccccaccgtggccgaggccagaacctggttctgcggggcagggggcggccctggtgactccgctggacccgatgttggctaaactttcaaggccaggcatttcactgggaacccagtgcacactttaggctgctggtggacggattacgagggagtgcgtcgctacctgtcagcgccggggctgcccgcgtggacgcggccccctccctggcgtctgccccgcctgaactttgcaaacaaaactcgcggtcccagccccgccagcctgctgcacccgctgctctgcgagtcgcagcgcgcgccctcgggtactagagccccgctgggcgtggggtcggagacccggacccccgcaactttgggtgcccgcggcccaacagctgaccggccctcctggaccgagggtccactgggcccttttcccgccgcccctctgccctggccgtagacggtgaccttcggaccggccctggtcgagcctagtgcttgggtagggtccagggcgcacgggctgcgcgc

SEQ ID NO: 32052 - DNA, 1410 bp, Homo sapiens
  chr14:95235472-95236882
  hyper
cgcgacagcgtgcccacgttcatgtagggcagcatctggtgcggtaccggggacaccagcaccgaaccggggccctcgtagcctgcgacagagtggggcgcacggtcagccgcccgccctcgccaccgcacgcatgcacgcccgccagcccccgaccctcttccacttagaagtcgtctgcaaggggatgctgagaattgggggtgcacgggaatcaggggtgcagggaaaaggaggaggcgtgttagagcatccatccgcacacccgccaaagccagtaagagaattcaaaacaaaacaaaacaaaacaaaacccagtttccccgggcaggcactgaattccagttttcgcgaactctggccaaaagtttgcagcaagaagtttgcaaactcctgcgcccgatcggcaaaagcggaggggggagttgcaagaggagcaaagtttgaggaaggtgaattaaccaaccggctccatgggctaaggaccgcagtgggcggcagaggccggagcgagcgcgaccctacctgggggcgtcgggacgcaggagcactgctgggcgcccagcggcggcacggccccgcagcaggccgggcccacgggcgccgcctgcacgtgcagctgcccgtagaagtagttgttgtagccgaggcgggagccgctgaccgcggccgggaggcccgcgccgccgggggccacggggcgcgggtagaaggcgccatagtccgaggaggcgccgccgctggcgccgtagagcgagtccccgtgcagggccgggaagacgacgggagccgccgcgctgtgcgccaccggcaacaccgagtccttgcagcgcggccgggcggctaggatgttgtcgatgctgaacatgctggcgggcatccccgagccccgcgtcgggaccggggggcggcgggaacgcgccgaggacagagccttaaagtgggggggtccactctcctccagccgccgaccaaaccgaaagagagcgccggcgagcgcgcagccctgcgcccctccccgccccctgcgtccgctctccctcctcccgccctcccctagccgcagcgttcgctgaactcaacccgcgggtaggacggagctcagaccagctgaacctcttgttggttttatactgagtcgacgtcatcctggatttagttcctggtaatatgcagatgacaaacagaaccagatttggccctttcttttcctttgggtgggggaagagggttggggggagggggagaggtgccaaggggagggggttacaaggcctgaaaagagattgtggattgcgaattaatgaaattaacctaatcttttccattcggcagccgggccgcgggccggccgagctgggcgggcggcctaattgccttggttaatctcattaattcctttgtgccgcc

SEQ ID NO: 32053 - DNA, 519 bp, Homo sapiens
  chr14:99736040-99736559
  hyper
cggctctcggccgcccggcagccagtcctctgcggtgactgggcgcgcagccctctcgagctccgcgcgggcagcccggccccagcccggcgaggtgcgcggcggattgcaagcatataacctgcccgcggtctcgatggcacccagaggatgttttatttctattgcagttaaaaaaaaaaaaaaaaaaaaaaaaaaaaaaaaaaaggaacggcgacccaggcaccgcgagagaaagaacggcggggaaatgttcgcgcgcagcgaagaagccgccccgcgggctgcggcgggcggggagcgccgcaaagccaccttcccggtgcaagtgtgcggggactcggggcgggttcccctgcaaacaccgtacctggcccgctcgcgctcgcttttcccctctgctaaataaacccaacagggacggtggaagctgctgcttgtcttgccccgctgcctgactttgcccgcccagccacatgcttgaaatcgacacgatttcagccggtggatttccactgc

SEQ ID NO: 32054 - DNA, 828 bp, Homo sapiens
  chr14:99737178-99738006
  hyper
cgagcgtccagccgggctcggcgcgcacacacacacactcctccagcctgcatgccccctccccggcccggagccggctccgcaggcccccgagcccgaggcgcgtccggctgctcggcgccccaactccccgggctgcaaagaaactttcctatggcccccgccccccgccatgctccaggccgacgccgtagactctgccagccagcgggcggccccggcgcctggccaggctcggctgttccgggctcggtgtccccagccccagacgcccggagccccatctccggcccctcgcgcgcactccgcagacacttacgggtgatgagctccctctgggacaagtgctgcgggttgccctgtttgcggcgggacattgccccggcatctattctggcatcgcccggagagctgcactgatggggggagccgggggagggggtccgagccgccgccgcgccgctgccgccgctgccgccgccgccgccgccgccgcacctcctcctctgcccgggttggtgttttttttcccttcctctctttccctctcttcctcctcttcttcttctttattttgctctttcttctatgctgttttttgttttgtttgcaaaaagaaaaaaaagggaagaaaagcaagaaaaacctctcgatctaaaataagaaaaagaggcaaaaaaaaaaaaaactgctgttgctttccgcggactggctggtttctttaaaaatatattctttcgaaggaaaaaaaatctcttacacttcttcaaactgcttggcctcttgcacttgcaaatgtcttcttgaacttaaactgggttttgcacc

SEQ ID NO: 32055 - DNA, 960 bp, Homo sapiens
  chr14:99739919-99740879
  hyper
cgcccccaggcctggctccggcggcttcacccgggcgcatggcgaggccgtgacgcctcagcgccgcctccctcggggccttttcctcggggggcacacgggggtttttgttttcgtcccgaaggtcttgggtggggcgatggcaccaacaatttaacagcgcccagagtccgtgagcgagaacagaaagagatcccttccagtcccataccctaaaaaataataacaataaaatgtgccctggcttgcagttctgtaaactgtgggctccacggtgggcggacgcgaggccgagcggatggagaccgggggcggggcgcggacttgcacctcctcgccctggccgggcaggctgcacccggctgcccacccccaacaccccacctccacgtggtccaaagtctagtagggcctccctcttctgccatccctctcaccgggaaaatctttccaggaaagtggcttaaaaaaaatatgcccacacgcacctttaataaacttctttaagacattcataaactggccatccctactcgcccggactctaaatttgaaagatcaactcgcgctctctttctgagaactagcgatgtgaagcccagagagggtgagcactttgccctaggacacacagcgcgtcagggacaggtctggacccaaaacaccgcggcgtgcctgcagcccagcgccgccggcggtccgggactcgaaatcccgacccacgaccctcaccttcctggggttgattacaaggaaggcagaccccgccagtggcaaggcgggacggggaggacccctcaggaaaagggagcccctccgcgagcggcgcaagggctctcggagtcccagctgcagccgccaccccgcgtgcggtaaggggccgtgcctggggagggggcaccccctccccactcccagcaggaagtagctggcgtgggccggcgcgtgccccacggaccc

SEQ ID NO: 32056 - DNA, 1399 bp, Homo sapiens
  chr15:100881161-100882560
  binary
cgccccacccccaccctccacggcgaccactctgcgtcgcaacagaccggacgggccgacccggaggtggcgcgggcagtaccaggccgccggcggcgccgcaggcgctgagcgagacgagggagccggggtggccgagcacacggcccgagtagaagcacagctcggcggggcggccgcggcgccgggccgcgcccgcctcctccacctcgaagcctcgggacaggaagcgcaggtcgcggcgcagctgaaggtacaggtcgcgcccgaaggccggcaggtgcagcagcagggcgcgctctccgggccgggcgcgcggggcggctgggggcgtgcgggggcgtcgccgccgtcggggcccgggggctgcgggcagcggcggcaggtgcacgtcgtcggggcgcacccgccacgggagcaccacctccacgtcggccgccgcgtcgccgacagctgcggggagagaggagacgcgtcagcgcggcggggcccgcccggacgcccgccctcccgctggccgccagccgcgccagcgcggggacagcgcgacccggagccggcgctgccttcccttccctcgcccggcacctccacgctggcccgcgccacccggggagggtctccggcgcagccgcgcgagcacctcccggaacggcgccgcgcatcggcgagcggagacccggcggcggcgcgcctgccacggagccacccgattcccgtactccggccgcggcccgcgcctcctccgctcgggcgccgtcagcggtcccgccgccgcccccgggccgccaggacgccgcgagaacgcagagggaaggtagccgcaggacgcggggtgaagagggctgtgggagggggcgctacctgtgcccgggtccagtccccaaaccagcagcagcagcacgggcaggacgagcggaggcagcagggcgccgtcacacatggtacccgggaccggcagcccccccggaccgtggcggcgaagcaggagcgcgctaggcggcggcgccagccggagtgaagccctccagcctttggaaaaagtaattagcgctgcggacaaacccaacgtggtaaaccccaagccccgccttcccctcggaaggcgggaggggattgggccctcgctttcctccgccccgcctcctccttccctactggttgggatgggtcgaaaccacagtgcgtagttaggttgtcagcgctttcttacacgtggtttctgggcagtggcggggacacggcaccaggtggcgcgcgggagccgaccggagccgtgggaccctggaagagctggaggatgcggggctggtcttcagagcttgtcctcattttggaactctctcagcctgctgcccagtttcccgggaaggtagggcggaaatcgccccggccaagc

SEQ ID NO: 32057 - DNA, 627 bp, Homo sapiens
  chr15:100913438-100914065
  hyper
cgacccccgctgcgaggggtttcccgcgggaggtggacgaagcgtgggccaggacaggcgcctggcactggggtttcagagccgcgagtaggccctgaaggccgggagggaccgccagtccccactggaagccgcttccgtgcagcccgggacaggtgcgcggcgcccctcgccttcgcctccgcttctgctcttcccctcgcggccccgcgcgcccgcgccctccgcccagaccccggtgcagcccggccaggcgcggcggcggcggcgtctccagcgagggaaggtcgtcctcacgcgctccggcctcagggcgcctctccgcccggcctcgcagccttcccgtcctgcccacggccgaggccgcggctgtcggggtggcctggacgggtgcagggctgggcgggggcggcaggacttgaaccggcgcctgctctcgcggaggcagcagcagagctcacccctttctcgggaaatggtttatcgtggataaaacgcagtccccaaagcgaaggtccgacgggcggccagacgcaccccggggaccttcaggtggacacacggggcctccgcgcgccgagccgcgagggaagaggggcggcgggagggagggagcagtgggcggcc

SEQ ID NO: 32058 - DNA, 1392 bp, Homo sapiens
  chr15:102028780-102030172
  hyper
cgacaacccagcggtgtagacattgccactgactgcaaaggagcttgtcaggggagcgacttgccaaaggtcacaccgctcggccatcagaaccgcggcagaagcccccacacaaagcgccctccctccgctcctggagaggttttaaacccaggacccccggccctgcgctgtcccaaggcctctccgacggcggccgggctccagggtgcaggctcccggccatctacccccgggagccgcggacaccgagggagcgcgagtccccgagacgccgggccacgctcatgtcacccaagcagcggccgcggccgccttggcgcgcgcaccgggtccggagctcgcgccgcccgtcgagggcagaggggccgctcccccgcgggggagagccgggtgggcgcccaggacccagcggcggacggcgcgcgacgcctgaggcagcccagactcccccggagcccggcaggtgtccgcgccgccccggcttctgaggccacacttccgagcgcggggttgggcggcactgccgggggacttgcggtcggcgcgccggacctgcgtgggcgcccacgcgggaccccagtcccccccaccccgccgagtgtcccgcgcgcgcccccccgggcgacacccccccccgcagggcgccccggccgcccgccgtccccaagcggtcccggagccttcccacgcgcgcgcggggccggggccgggcggacaggactgcggaggcgcccccctcgcgcgcgccggaggccgccgggaaagttttgggcgcgcggggccggccgcactcacctggcccaagttgaggtacccgtgcgccgccgccacgcggtccgcctcggccgggccgcccagcacttgcaccgcccagtggttggtgtagacggggcgcggcgggggcggagcaggcggcaggcagcgccagcagcagcagccagcgccagggacgcggcgcgagcggccggaacccgggcccgccggcgccccccgcgccccccgcgccccccgcgcccgcggcggtgtcggtggcggcggcggcccggggcggcggccggggcccgggcgcaggcggcgcgcgcggaggcatagcggcgacaggctcgcgcggcgcccgagctgcgagtgcgccggggggtggagtgccgccttttaaagccgctccgcgccggggaagcgccgccgccgccgccaccgccgccgccaacaccgccgcgggcgggagccggggaggaggaggcggccgcggcgcgttcccgcccccgggcccgcgctcctgcgaccgggctccggggccgagagccgtccgggaggcccgaaacgccccccaccgggggaacttccccgccgacttctggggctctcgggacgcggtgccgccccagaggc

SEQ ID NO: 32059 - DNA, 1408 bp, Homo sapiens
  chr15:26107409-26108817
  hyper
cgaagactgaggcagggacttcaggccagggggccaggctggcttttcctgcctttcacttcaggtgggagcggctgtggatgaggatgtccagcggccgtcggtttctagccttgggatcattctggccccgacacggagtgacaggggatccccacgcgtccccgcatccagggcgcccctttagctgcggcggaggcacagagaggccttggcggcgctgtggcttcggtcggcaccgggtcccgcgcagccgggccctccaccctgagtggagctgccttctaagcacccagcccctgccaatcactgtgcccaacaccaagttcccggggcgccctgccctgcgccaccgcgcgctcgctcgcccgcccgcccaactcacctgctgaagaccaggcagcccaggtggttgatcttgtggtcggagcggtggcggctgtagtcctcccacaggtccctgaaggccgtgatggccaggatgaagagcaccggcgccagtgccaggccgggctggaaggcgttcaccgccggcacgaagttgagcagcgcgatgaagacaaagtacacgttggccgggcggtggaactgctcgaacaggttcttgggcaggaaggacagcagcgtgtacttggtagtcttgagccggttgtcggccaggtgctgggcacacccgcgccgccgtcgccgctcgcccttggccgcgccagccgcagggtcctcggcgcccgggggcggcagcaggttggagcgcaccgtgcgcgtcctgccctctcggcgcctccgccgtcccggaggcccgggctcctcggtccccgccggctcccgctccatggccgcgtgtcgccgcgcccggctcctccgccgctcacgcccgcccgcgccggcctcttaggttatcatcactcgcggcccgggcgcggcggtgcgagctccccgcctgcgggacgcacggagaccgcggtcagcgcgccgcctggccggcccagcgcgcccagcccgcgcccagccccgtccactcccgtccagccccgccgcccggccgcagtccccagggcgcaagctgggcgggtgccgcacagagcccccttgtcctcgccgcccgcccccggcccgggtcgtttccgccgcggtggccacggccccgccctcgttccgcgcccggactgggccacgccggatagcgggaaacaaaaaaagcccgagctggaaacttcagagaggtttagtttcgtttcccagaagcatcagttcggtcccaaaacgctgcaaacgcgcgctgcctgcagtaggagagaggaaaccgcgaagcgcgagaaaaggcgcccccgtccccaagcagcccgcgcgcccttccaggggccagacctgctccatcctggacggcgaaacgacctcgggagacccc

SEQ ID NO: 32060 - DNA, 1239 bp, Homo sapiens
  chr15:29130654-29131893
  binary
cggaggccgcgatccccgagagttcttcgctcgagggttcttcgctctagggtcccccattacagctgcgcggggccgagcaagcagggcgcggcggccggggcaaggtgcggagcctcgcgttcaccggctctacctgcggagcctcgcgttcactggctctacctgcgggaccagacccctgcagctccccagccagcacggccggggcacgcccgggaatctgtgtgctccccagggcccggggcgttcggggcgccgcgccttccagcgcctgggtcccagccccgatcccggagaccggcccggggggacccggggtcccgagtgcaccctcctgccctgcagactgtcccagcgccggggccagggggcgcaggacctcgcgcacgcccggcacggacgcatctttgtcttccctctcttcacggcgcgcgatctagccgggaatcgttttccggccccagtgtgcccggcgcgggtgaggcggaagcggccggggcgggggcgcaggcccggcagccgcaggccggtgcgggatgcgccccgcagccgcgccgcgtgcgcccggcagaggcggccctgcgtgccgtacgctgcgtccggggcgcgcccgccgctattcgggaagctattcagcttcccgggctcattagcagtcgcggtgtgcggctcggcgcgggctcacaaagagctcggcctcgcggactgagccggcggcagcggggcggggacggcggcgtacccgggcagcccagcgccctggccaggtaagctggggaacctgggctgcctgacttgccggcggcggcagcctggggccgcccggggcgccgcgaggacccggacgcgtggggggcggcgcggaggttgcggcccgagcgctccagagcgctgccctcccgactcagcgtggctgcggggcggccgccgctgggatatgggggtacagcccggcggccccactcctctctgaccggccgcttccccctcccacgacgggtgggcgggcggggcggggaccaggcggcggctctcgcatcccgcgcggggggcaccgcggcaaggggccacccggcgcggacaagaggcgctgtgtggcggggctgtccgctcgactcctgccgggctggccgggctgcttggcaccggcatcaagtccccgtgccgggcggcaactactgagtttggggtcgcctctgggttcgctgcccccagagaacccaagcccagatcttc

SEQ ID NO: 32061 - DNA, 1359 bp, Homo sapiens
  chr15:29861930-29863289
  hyper
cgagacgtctttcttctatggagatttgttcaccactggcttctctgatttggtggttaagagtctgaaaatcggtcatccttaaggtctggagctcagaaagcacgccgcccccccttgcctgccccctgccccaggacgccggatgcgggtcgcctgcccagtcccgtcgcccacaaaccacgccgttctgggcggacgcgggaaaccagaagtccccgaagccaagtcagcgagcgaccacaggggccgcccggccgatccccgatatccgggctgacccaaaacccgacgggaggcgcccctcccccgcccccccaccccaccccccacccccaccgcccccggtcagggccgccgcgagggtgagaggcgcgcccacatgctgctccgctccgggttcggctcccacctcctcgcctcggccgcggccgctcggatggcgaggtcgtgtccccggcgcgcgcggtccccggcgctccctccggccgctgcgggctcggaggacggcgggcgcctggctgctgtttcctccaagaaaagtaactccgggaatcagcgcaataggagcgggaacgcgatgctccgagagcggcgagccgggccctggagttattctgctcggagtttcgaactgcgccccgcgctgcagctactcggccccggcgttggccgccggaacttgccgcccgcggtggcgtcccggcggccgcagcgcctagcccccccggcccgcgcagtccccggagcccgtccccgcctggtcgcggacactcaccgagaagcctgcccagaaggggcaggagtggcggacgcgggccgaggtggtgagcgccagcgcggcgaagctgactgccacgatgaggcatccgagcgccatctgcgtggccccgagcgccagcacgatgcgggagcggcccgggcactcgcgcaggcgggacaggctgcggggcagcgcggcgggacgcggcgctcgggggccgccggccggaggcatcgcgccgggcgcccgcacgcctcgcccgctcccgcccggcccggcgcgcgccgccgcctctcctcacagagggtccgaggcaagttgcgccgggtgcagggacggcctcccagccggctgccagggctgcggcggccgcgcgccgggagcgggccgggccgggcggggagccgggcgcccgcagcccccgccggtgcccgcgcccatgccgccgccgccgcgccgcccgcccgccggccgcgccgcgctgcgccctcccccgcccgccccgcgcgctccccggcccgagcgcgggcgcgagccgccgccgctgctgccgtaccgggcgcgagccgctgccgtccccgggcgcgagccccgcc

SEQ ID NO: 32062 - DNA, 1677 bp, Homo sapiens
  chr15:30113537-30115214
  binary
cgtaggaatactttgtattacttgtgaaagtttaattcaagttaaattattaaatgttaaagaggttattttcaaagttaccttaaataagtaatacagcatgaaagaaaacccgacctactacgcctcacaggctgagtggagtgttttgcagtctcaaagccttatcgctggcgtgcgcataccgcagggagtgacatcagatcgaaactacagggtttcgccggggaccaaccactcctccaaagacagcagctcccggccagcaggaggtggcaccccaagccccgacccgctgagagccggcttccagcccccgaaccctcactggagccgagtttctccgcgagggacctgttgcgtgtccccgccctcagcgagccgcagccaggcacaggcgccggcagctatgcacctgcccagtacggcggccgggcgcccgcagccccctccccggccgcccccagtgcggcccgcgccgcccccgcccgaggggctccccgcggcccgcggcccgcggcccgcggccccgcgccagccctgcccaccccgccgccccggggcccagacagccgccagcgagggagggcgggacgcgggccagatgccggtgggcgggcggcgacggtcggcccggtctggccctggcggccgcggaggcgctcaccttggcggccgcagctctggcggacatcttgtctctctccagcgccgcgcgaggctcctcggacccgaaactccgcggcgctggcccgcccgctcctcacgccacagcccaaataaacatctcccgagagcgagcggggcacgggcgggggcggccggaagggcccggcccagggggagggaattcaactcggacaaaagtccgggaagcgcccgccccgcccgggtcttctccacggggcgcgcccgaccggcacctccctccgagcgcggccacccactcggcctcccgcagctttcgcagcccggccacgtcggcctcgcccggtcgcccgcccgtcagcagcacccgtggcctcccggcgtctcctcggaagccggcttcgccacgtaacttcccgggaaccggcggccgccaaggaacgcggcgtccgctggctcagccggcgccggcaactcagcggccacgcaaacctgccggcccggcccactgagcatgcccggcccggcgggggcggggctggacgaggcgaggcgaggcgaggcggggagggggcggggccgcggcgggggagggggcgggacgagcggccggggtcccgaccccaagcgcggaaggaaaagccgggtaacccaagtaacttggaagacagtttccgctgccgtgcgagtcttcctgtttgtttttatccaaggtctggcagaattcgcccccaaggagaaagcgcctgtgcaccaaagctttccttaagagacttgtccacttgctcctcgacaagccacgcacatcatggggtgagccccatgcatgagtgcggctggaaaggccggcagagccgatacccgacagttgtttccttcactgggcaaacagcatggtcacggctgtcaccgcgtgcctcggcgttgttcccacggaaggcggaatgcattttctgcaaggcgcgtcatggctttcatctccgaggagctccggcagggtcagaagcgttgctctcgttcaccggcgcc

SEQ ID NO: 32063 - DNA, 1068 bp, Homo sapiens
  chr15:32162216-32163284
  binary
cgcagtcacagctccggtgcccggcgagcggcctcgcgcgcggctcggggccgggccctgcccggccgtctgcaagagccgcgggacccccgacgcgcgcgcacggaccgaggggtcggtcgccccacgcctggcatcacgttccagtgcggacagccaaagggctgagcggaggcagcagccccgacccagcggtagcgccgcgccctgcccgagagaggcgcgccacgccgggccggagccggtggcccgggagcccgcggggtccggagcggagcccgcaatgcagacgcgccggcgagcccagccggggcccgcgccccccgcgtccccgcgccccggccccgcggtcgcccggcctcaacgcccacctgcctcgccacggagctcgggaaggagacggcgccggccccgcgcccggagagcgcacctgcctggtccgcgggcccggccccgccgcccgccggcagcaccgcggccagcgccgtcttacctgccgcgccgcgccgctccgctccgccagcccgcagcgccgcagtcgccgctacccgacttccattttctctcgctttaaaggaaaaccagatcagctgttttgctcccgctcgggctccgcggccccctccccagctgccgctcgcggtcccggtggcctctcctcccccgcctcctcccgcgctccgctccgcccctcgcgcccctccgctccgcccgcggccgcgcacaacgcccgcctcccggctccgcctgctgcctccgggcgcgcgccctcctctgacgtcaccggtcgcgttcgcgccccgcccccgccccgcgcggacgtgcgcgcgccgcgcctgtgccccgcccccgcccctccggggccgggcacggagagcgcgtgctcgcggccgcgagccgaggaggggacgtacagcgcccgcgcgcccgcgagcccgctccggctctcccatgcttgcccctcggggtgctccttctgcgctctccgcctggactgcaggaaaaggctgcttaaacagcctgccttttcctgctgcctgactcgcgccatctgcggccacctgtctc

SEQ ID NO: 32064 - DNA, 791 bp, Homo sapiens
  chr15:33009589-33010380
  binary
cgacaggctcctgctggcggccagcgagcccgccaggttaacgggggcgccggggtcagcgccctcgaagttgggggcctcgggcggggccgccggggagccacgacggccgctcgaccagagcatcccgcagtcccgttccctccagaggggaagaatggccgaatctggcacgatcccacggagatctcgctcttcccagcgcagtctccgctactgagcgcgggaccaacgcaggcgatgccgggcggccgacagggaaagcccagacctggggcagagaaggaatgaggggccgccagccggggggatttcctcccgctcttccctctccaacgggagcggaaaatgtgatttgctgtgcattccaggcgcggttccctggggtgacctctcccagccggcccgggcggggggagcagacaaagaggcgaggcgggcggagaggggaccccgcggggaagcaggaggggtgcggggggcgggggcagtaccgggaaagggggcggatagcgggtctggcggcggcggcggcgcctggccaatggagaggcgcggccccgggcgccgcgctctgccgccggcatttaaacgggagacggcgcgatgcctggcactcggtgcgccttccgcggaccgggcgacccagtgcacggccgccgcgtcactctcggtcccgctgaccccgcgccgagccccggcggctctggccgcggccgcactcagcgccacgcgtcgaaagcgcaggccccgaggacccgccgcactgacaggtgagcgcggacgcaccc

SEQ ID NO: 32065 - DNA, 1297 bp, Homo sapiens
  chr15:33010398-33011695
  binary
cggagggaagagggccgcaaaccaacccaggacccgctcagttccacgcgcggcagccctccgtgcgcgcaggctcgggtgcgttgttcgcgggggtgaattgtgaagaaccatcgcggggtccttcctgctgaggccgcggacaccgtgacctcgctgctctgggtctgcagggaaacgtaggaaaaaaagttgtcaggagcgggcaggatgacccccacatcccgtttccacctcccggaggcccccgaacacgctcctggtgctggtggcagcagcgcctggcagacgcgcccgcttagcgagggcgcgaagtccaggccgccagagcgcaggagcatccggacctgctagtcggccgctgactgcgcggcgagttgccttgagagggtcccatgtgcttggggcgccgcgctgggtctgggggcgtcttggggcgcccattggagtccgcgggttggagcatccggagaatccatgatgtgtgcatttgccgatccccgaggtgagatggagactggcaagggcagagccgctgtgttcagccacagcggaaaaccgaacggtgggtaatccgacagctgcggtgcggggcgcggccctggccgcggggtccagcgaacccgcagtgctcacaaggcagacaccacacgcgctcgcggaccggccacgcactcgcgggcgctcgcttctctactccagcctcttccccgccccgcgcacgcccgggctgaatggtagacgttctggcgccgggcagcggccaccggctggttcccacttccgcgcgcaccccttaaactgtgttctagaggccccagcctcgccttgcagcgcctcactagctcctgaggactagggactggcggctgaggcgggttggcggctgcaacgagctgggcgtctttcgttctctctcgctgcctggctggctccgctggcccctccacagcttgcggagcaaggccatagcaggggagtgggaggtatattggggctgtcacctccttgctggccggagttatttgtagactacagactccggaagaacagacgcgccaccgctctcgcttggcattgccttcggatcgcagctcctccttgggggtgccccagcttggcgtttatttgcctgcgccaggctctggcgacggtcaccgggccaggcggggagggacggacggcaggtgaccagcctctgctgtgaagaaattcctgcgcgcccggagctgtccctaatgcattcccgggtcgaatccgtctactgccttcccctcctcgaccgactccgaatctc

SEQ ID NO: 32066 - DNA, 664 bp, Homo sapiens
  chr15:39872823-39873487
  hyper
cgccccgtcggcccatttttctttttacaaaacgggcccagtctctagtatccacctctcgccatcaaccaggcattccgggagatcagctcgcccgaaagcccctgcgccaccccgcgggccctcctaggtggtctccccagccccgtcccttttcgggatgcttgctgatcaccccgagcccgcgtggcgcaagagtacgagcgccgagcccgtgcgcgccaaggctgcgtgggcgggcaccgacttttctgagaagttctagtgctcccaagccccgacccccgcccccttcactttctagctggaaagttgcgcgccaggcagcggggggcggagagaggagcccagactggcccccacctcccgcttcctgcccggccgccgcccattggccggaggaatccccaggaatgcgagcgcccctttaaaagcgcgcggctcctccgccttgccagccgctgcgcccgagctggcctgcgagttcagggctcctgtcgctctccaggagcaacctctactccggacgcacaggcattccccgcgcccctccagccctcgccgccctcgccaccgctcccggccgccgcgctccggtacacacaggtaagtcgcccccggcggccgccgaggaccaaagctgcccgggacatccacctggagc

SEQ ID NO: 32067 - DNA, 1005 bp, Homo sapiens
  chr15:41913266-41914271
  hyper
cgccacactcccataattacccaaaccgtctcattccaagcccaaggaccgggctttcaaggggacacgaaaggaacgcccgggaggtgagcgccaggagatcgggagaggtgcctttcccggcatgctctgcagcacaccgaggggcgccaggcgtatcccggcgtgcatcggggagcgcccaagggcgatggttcccggctcctggagaggcgtgcgaagttaagccggtaggtgcgagcttccttagctttgagcctctggtttctcgtttcctctttatgggtttaaatccataacggcagaaaaggatggccctctaactaccctccctctccgcgtgcgaacgactcggcgccgcttcgagctcggtgccaggtgattagcgggtaggggcgggcttgcgaccagcacgtgacccgaactggcagccaatgactagccgggtggtccagcagcgcgaggattccgggacccgcgagcggagcggcgcgtgggtcggttgcggtcggccccggcaggtatgcgcaggcgccttgcttgccacgcgctacgcccgtccccacgcgcctggtggcgtgttcttggcgcgaagtgttaagagtctgggtgtttttgtgcgttggggggaaggagagggtggcgggggcgggggggcgctgaggcgtcacgtggacgccacagccaatctcaggccgaggcgcacccacagctttccccggcgccccggggtgcgacgtgttcactgaggttcgaccgggccctgacggcctgagcggtctttcgaagcgcgtgtgcggcctgtaaattctggccgcggcttttcgtggcgtcctgctccgcggtgagcacagacgacaagttctcagcaaaatggctgctggaaagagtcgccaagcagggggagtgctggggccgcgtgaaggtcacatgacgaggttggcagcgcgtgctgctggcgcggggtagggggagggtggggggcgtggcgggtcacgtgccttc

SEQ ID NO: 32068 - DNA, 1793 bp, Homo sapiens
  chr15:48009312-48011105
  hyper
cgaaaaggttgcttcgcaggctgcagcacccactgcgagctggatgactgaggcactgggagttgctagaaggagcagctactcagaggtggggagagggagggtgcgcagcagagcgccggagaggagggacgcggaggccaccgaggggtcagcagggccgcggcgccagggtgggggcctccaggcggcgctggccacggttcacccgcgagggcgagcgcgcccggccggccgcgcctcctgccgtccgtgcccgggggtgggacccgcgccgggagctgccgagtgcgtggagggagccaggctccggctcgcctgatggattgacttggagatggatcgaattacaccatttgccgtgcatcggtttgttttgctcctgctctgtcccgctgctgctgctgctgctgcaaggggtggtggcgagtttcaggattctatcaaggaagccaagacctaaggagacagagggatatctatttttacaatatttttctttattttctttcttccttgcgcgtggcaagcttttttttttctttttcttttttcttaccagcctccccccaatgaggtaagaccgttttcaacaatttgctaatgctcttgtggcgcccggtgggggtcggaacctgagatcccgaatcgctgtgtgtgtgtgtgtgtgtgtgtgtgtgcgcgcggtgggggtcggaacctgagatcccgaatcgctgtgtgtgtgtgtgtgtgtgtgtgtgtgtgtgtgtgtgtgtgtgtgttgccactggacagttgatttattttccaagctgctctctctgcctgccgtgcaagggacgcgcaaagggctagagaggtttggcggacgcgtcaaaactggcaaagctggcggcttagggggaggggcaagtggacttggaggccctcctccactgtgcacccccttggaaaaaaagcggagggggcatcaagtaaaagtttcttgccaggcagagccagctcggcgtcccccgcacatagctggggttagcaggggttgcttctctgccgggcacagcgtctccaggagccagccggggagagctgagccaaggccgaaggagccgcctgcgggcttagccgccccctcccgcccgttggccccagagcggacgctgggacgcccggggtctggcagctctgcgcccggctaggagcgggcgggcgagcattagcctgcgtcctggagaaggggcgcagcgccgcagttgaggccggagcagcccctcgcgggcgtaggatacctgtcagtgagcgcccggattgcacggcccccgggtagtgcctgccggcgaggggcgggagctcgggtgacttggccatccccatccccggcccaggcccggagggcggccgcttcccaccgtccctctccccttactggcagagcgcgctgcgggcggactcccgggcccggagcagcccaccggccaccccaccgcccacccggctcccggtgtctcctcccggccgctctacccagcaactttccgtgctttgttccccgactggaaatgctttacggaagcgtcttggacagggtctccgccaggcgacaagagctcggtgctgagatgtgttacgttctcatctccccatcaattatggatggaaacaaataaggaagagtcaattttgctgagccccttctccggcaacgagaggcgttctgcagccgggagggagccgccgctcgcgccggcagccgctggcaggggcatggtgaggaggaaggtagggaaacttttatttcccgtcttgacagcggc

SEQ ID NO: 32069 - DNA, 941 bp, Homo sapiens
  chr15:53078748-53079689
  hyper
cgctccttcgatagcctcctgggtgccacaagcacctgccaggcaccatgtttgcgcctccagcgtgcgggtcccagcactcaggctccctccccctccacagtgccgtcccctgagctcggctatgtagctctccacgcttggaggtcagagggcgctcctgcggccaggtttccatggctcagaggtcgtctctgaacagaacgtgtcagtctgtccttccagggggcgacagcaggcagtggggggaggagggatattgaagtccagagcaagagcctccagggggcgggggtgggggatggggaccgagttttcccggaggggtagccttctccatttctatcttcttcccacattcccccgctccactctttggcttcagcgggcactgcctgggtaagaggccctgaagcctggctctggggtggtgtgggtgtgtgaaaaggcactaccttgggctctggagagacggagcagtcaggacgaggagcagccccttcgcccactccctccggaacctcagttgctcgcgggcagcccacgggtggagatatggtgccggtagcacaagagctagagagtggaaaaccgggggccagcgattcgctggggcgcccagcgagcctcttctcccctgactggttcccgggcgcaggctgcaggaacctgcatgaggactttgcctggggcgaacgaaggcagagctgggctggaaaacctggcagggcagagtctcagccagcgcggtgctttgggaccggtggcctgcagcgcccaaacccaaagaacgctttgggtcgcttcggggcacgaatcgcaggctggtcggcacctgccacccccagcttctcattggcaggcacgagttggaggagggggctttggcctcacgctttgattttagactgtgaaacggctcagtgcccccggctcagagc

SEQ ID NO: 32070 - DNA, 771 bp, Homo sapiens; identical to SEQ ID NO: 28572
  chr15:57668421-57669192
  hyper

SEQ ID NO: 32071 - DNA, 612 bp, Homo sapiens
  chr15:61519485-61520097
  hyper
cgctcgcattccaaatccaccgtctcagggtctaaatatactctttgcagccaaaagctccccgcacacaaactcaccgagctagcggcaggtccaggcccccagccctcatccccttcccttttgtcccagccctcgccgcccccctcccgctgaaaccgcggttcgccgcggtcaccctttggaaatcgcctttaattaaatgtttttcgcgtgtgtcatcctgatggcttttactgtactcgaattccgtgaatgggaaagcgcctggacagggggtgtggctaaggtggggggggggatactgtaaaacagccagcacatgatcagccatattcctacctccaactacaacatcgagaggaagggagcagttcctggggcccccattcgcctctacccagccctccccaaccgccgccagaagccgagtgcaagaggagggggcgcgctgggccggtacccaagccggggctggagaaatcctctccgtccccagctccaggcggctcgcgcgagcacgcttcctccggagtgacaggcgcgatttatacattatttacaacagtaattaaagctgtagcttcctcctgttctttgcaaactccaggc

SEQ ID NO: 32072 - DNA, 954 bp, Homo sapiens
  chr15:62456599-62457553
  binary
cggcgactccttccagcccgcagcgcgcgactcagcagcccgtcggggacgcgcaggaggcggcagcggcggggccccgcagcgagcgcgtcctggggcaggcggggaccgccgggggccgcgggggtggccgggcccggacctcgcgggccgcacagggtccccaggggggcgtccgggcctccgccgccgccgcagctgtgggcccggggccggggcgcgggcgggcccccgagcaggagcgactccttgcggcgcgtgtgcgggctctcgagcagcgcgcagaagccgtaggtggtgcgcacacggggcaggtgcggcagtgacagcgctgcctgcgagcgcgggtcccagtccgtgcggccggcgtcctcgtctgccgcgcggggccacaggtcgctttcagcggcgcagcgccggggcacggcggcggcccggattggagactcgagcgtgcaaggggccggcagccgcggcgggatgcagaattcggggatgcgattcggcgtgagcactttggcgaaggcgggcttcggcgcggagctgcctgcggccgaggaacagagtttctcgaggagccgcatccttggaggctggggctaggagtggcgggaagaggtgcgcctgcgggggagagaagctgctgagtttgggcgcctggagctgctgcagcccctcgacgcggctggatccctcccccagaccctgtaaacgtcccccacgtgtttaagaccccagaccagttccagccttcctctcccctgcacccacaacaaatcagccccgcttcagacctttctctcttcttcagtgtctctggatctggttgcaagctcagtgccagtggcctctagcccgctgccgaggcgccaccttcagtactgcggccaggagagtggcgctcccctcttataccgtaggctgagtcccgcccagccgccagcggcccaaccc

SEQ ID NO: 32073 - DNA, 108 bp, Homo sapiens
  chr15:62684243-62684351
  hyper
cgccccgaggccgccgaacagcctgagcttccagtcgcctctttggctttagcggcgacagcagtagcgcccgcggctgcgtgttctgctctcgcagctcgtagaggc

SEQ ID NO: 32074 - DNA, 419 bp, Homo sapiens
  chr15:69366376-69366795
  hyper
cggagatgggctgtggagggggacgttgggaactgcccgaccccattctcgccttttcccgctggatgtgcagctttcggaacgtgcaggggcgggagtgtctacaacctaagaaaagggccgcggtggggagcccggagcagggctgggtgcagggagcgctctcgctgcccggggcgctctgcgctgcgcgcccagtggggacagcacgccgccccgggagtctccaggcgcgggaggtcccagcagattttgcataaagggaggaatcgagtccagagaacaaacaagatactggaggtggtggcacggagaggattgattcggtttgcaaccctacgaggtcgtggccgctcggggcaggaaagcaggctcctgtctctccaggatccagcctcccgatcaccgcgctagtcctc

SEQ ID NO: 32075 - DNA, 140 bp, Homo sapiens
  chr15:69591376-69591516
  hyper
cgagacccttggaacccaggtaacccggggcgggactccccgccgcgcgccgcctccccacctcccggtccacgcgcacccgccctccgcggcagccccagccgccctgcgcccgtggagcccgttgagcctgggtggcc

SEQ ID NO: 32076 - DNA, 954 bp, Homo sapiens
  chr15:71055275-71056229
  hyper
cggccgagcgggcgtgggcagcagggcgagcgccgggagaggagagcgacgagggggggtcaacggaaagagcggagtaggggtgccaatcgaggaactttggatttaggaggagggggccagaaccgccccactgaggtttcttccagaagttcggaggcttgggagaaaggggtggggaagagacccgtagaggctcgggtgcggcggcggggaggatccccggggtctctgggctgacggagtctccggcctcagggaggagtcgccagggccgccgaagccgaactggcagaggaaaagcagaggaaggcggcgcgcgaactcgccagcaaaggagggctgcgctgctcccggagcggagcgcctcgcagcccggaccgcgggactcaccgcgctggcggcggcggcgccagacgacgcggggccgggcacgtcctgcctcctcaggcgggacttgaggctcttcatggctaactcttgcctggcccccgcgcgaaccttaaaggctgcggagtgccagcgcgcaaggagtagacggcagcggctgcagcagaggcggcgcgggctgtaccagccccacctgcctgccacctgcgggccccgggcagcagacgtcgacaggcctgaggcggggctcccctcccgtagccaattgacccgctgccctggcgggggcgtggcaaaccgcgaccaatcggaatgcgggaatggggcgggacttcccttttaaactgagtaacacccttcctctcccagctggaggaaaagtttgggaactttagcccgggaaggggcggaggaggtgggcggccagaggcgtggagatgcgcgcaggccgggctccaggccaccggcgcccgcccacccggagcttaagatctagagagagcacggggtcccgcctttgccacctctcatcttcccggactcccctcctctttccacccacgc

SEQ ID NO: 32077 - DNA, 824 bp, Homo sapiens
  chr15:71145995-71146819
  hyper
cggccgccagccctgggagcctcggttgggcgacgaagctgcgggctggggcaccggctgcctccacgggccggttctgactcaggggctcggcccggagctgcttccccggcggcggggctgactcaaccccctctgcccgaggagttgtcgcgcgcagtcagcgccccgaactcgcgcgcggcccggcgccccctcggggcccacctcccgggccagccgccgcgcctacctgtgcccgcggctcggctcctcctcgctcgcgctgccccagccggggctgaggtaccgggccgggtccccggcgccccgagtctccgccccctcctcctcgtcctccaactcgtccacgtcctcggcctcctggatggcgacgcggatctgcaccgccgtcttgggcccgggccgagcctccccgccggactgggccatggctcgcgggactgcggcgccgccggggtcctcacgccgcaaggcccagccagccggtcggcagcgactgcgacgagggggcgggggcggtgcgagcgcgcctgccgctcggcccaggggagggacaggggtcgcggcgccccgccccgcgccgccgccgccgccgccgccgccgccaccaccccgaccgctagtggagcgcccgcgcaggcggggcctcggaggtggagggcggctttccggagctcctccgacggaggcccgtcccggaaggatccccgcgacccccgatcactccctccgtcttttcgccgctgtggggccccagcccgagaggaggtgtcagggctccctcctcctgcgccttctttcacggcgccgcagggatgggc

SEQ ID NO: 32078 - DNA, 1146 bp, Homo sapiens
  chr15:71184276-71185422
  binary
cgcgtgtccaggcggcctgcttggtctccctcctctcccctcttaggtgccggggcgggcacccggtgcagggtgggcacggcgcctgccaccagcctcaggcgctgggagaagcgcaggttcttctggataaccgaagagacgtcaaaacaggctggggcaaagtggtcagagcagatgaccgagcggtcattgcctccgtaccagtcggcgcggcaaccccgcacgaagcggtcccagagcagccgcacggcccggtccttgggaaagcggaacagcgacttcccagacttggtggtgttgccgcagtgggcggccacacaacgggccggcatggcggccgtcttcggtgcgcgggagccgggttccctggaccttcgcccttgggcacgctcctcgcagcggcctcggcgaggcaagtcctcccctcctcacctgtccactccgggtcgggattgtttccttccctacctctggtcaccggaagtggcgatctggggcccccaatgggagggctctttgatatcttcctcctcctcctccctgcgctgctccccaggagccagtggacacaagcagagggatacaaatttcgcgcgggcagcgctgaggtgggccgtaaagaggaacggaccggaagtggtggtggttatagcaaccagtgtggccagcctcttccccagcttatcctcctcccaatactcccgctctgtttttatgaggctgggaaaatagaacgaggaagtggtgacgcactgggctctcacgaatacaactagaagctgcaacgactgtgtggctctatcgattcgggagaggtccagaccggaaatggtcgtttccatggtaaccctgagcaggttgcctgggagatgacctctttcgggtctctttgaatctccgctgtagcgtcacctggaaggcagatctaacagagaacctggactgtctcctatcatgattcccgggaaatatcgctctgtttctggccgggctgcgaacaacgtaagttgggccttctactttctctttcttcccactggtactctttctgactggcgtctttgtcctaggagatgggctgtattattaggaccggcaccgctgggtctactcaagctattgtctgaccagggtttgaggttc

SEQ ID NO: 32079 - DNA, 1034 bp, Homo sapiens
  chr15:71407569-71408603
  binary
cgccccctcccgccctcgtggcctctgtctagaccgtactccctcctactgggtgatgtctcttcccctgggacccagggaccatcccgttgttgacctccggggtcaggggtgcggatgggggccggcccttcccgcggtcgccgccagggggcggcaggagcggctccagatgacagcgggaggccgcaagaggggagggaggaaggaccgagggagcgcggatcccgctctcggatcgcaaactctgagccagagctctccgcgcgcgcctgaaccgctggccgcccgcgcagcccgacgcggaatcggggcacagcgggagcccgtgcagggcgggcgcggggcggctgggcggcggtggcggccgtccatgcggcggcgctcggggctgcccggcgccgggaaccacgcgggggcgaggcgaggcgaggcggccgccggtcgctccgggacgcggaccgccaggtgagcagagccgcgcgccccgcgtcccctgcgcgccgcccgcgcggccccgacccggcttccgctgcccaggctccggctcccgctctctggccggcggggcgggctggcgcgggctacccagtgggtgtgtccggggcgccgcgggctgcgccgctccgggctcggggagccagcgcgcgcctggtccgtgcggacggctgcgcctccttctctggttctcttccttgctgggagtcttgctctgtgctggcgccggcgctcatccctccaccctcgactctagggacagtcttaaactctagggacaatccacctcagtcgtccccgggtcggggccccgtgctccccgggtcgggtcggaggggaccggcgagtgcacacccagcccgtgcgccccccacctcagcctcgcctccctcccgcctggggcccgagagccgggcaagtctcggtcagcgctccttgagtcctggcctggggcctcggatctgtgtgtctgtctgtctcagtttagttgctgcaacccagcgagcgcctggagcccgagtggatgggttgtttcc

SEQ ID NO: 32080 - DNA, 118 bp, Homo sapiens; identical to SEQ ID NO: 28590
  chr15:72612103-72612221
  hyper

SEQ ID NO: 32081 - DNA, 874 bp, Homo sapiens
  chr15:73660499-73661373
  hyper
cggccccctcctcctcggcgtcctcttcctcgtccatgatccacgccttggcccccacctgctgcgggaggctgtagagccgcttgcgcatggacggcggcagcttgtccatggcgccaggggccggggtcggaccgggccgggggcaggagcgcggcgccgcggacgggctccaggtccgcccgccggtcagtccgcccgtggggacgcgtcctttgccgccggcgtgggggcagcctcaggcgcccatgcttgggcaggctgcgcgccgcggggaggatcctagtcccgctccgagtccccgggctcgccgcgctacacctcctcccgggcccggctgggcgcggggaccccgcgctcccttcttgcctccctccctccctctggcgttcaggggcgcggcgcgccgcccggctccaggcgccccgcccccgcggggaacaatgggcgccggccggagaggctctgcggccgcggcgctcagggaaccgctccggagtgcagagcgcacggcccgcgcgggtcccgggcgtgcgtcccgcgggagggctggctgtccgtctgtctcgccgcccgggctttgtggctggccacccgcgagctcgcctcgcctcctctgccccggcccgtccggcccgtcccggggctcccgccgcaaccgagcggagcccagcgacccgccgggcttacatcagcggccgcctcccccgaagcgccctccggcagcgctcgggctcccgcgccccggaatattcatgaagccgccgcagctcgcgggttgccataggagcggctccagcagccgggcctgcctacctgggcttcttaaaggggcagcggcgcacgggccgggggctggaaaggggcggggggc

SEQ ID NO: 32082 - DNA, 987 bp, Homo sapiens; identical to SEQ ID NO: 28592
  chr15:73976461-73977448
  hyper

SEQ ID NO: 32083 - DNA, 968 bp, Homo sapiens
  chr15:79382738-79383706
  binary
cgaactccgcttgctcaggtagcctttgcgcgtgccgtccttgcgcgccagcagtcccagggacgcgacgtggccatcattcagccggatccccttctgcatggtgctcagaggccagcgagaccccacgcgcttacatcttctccgcgcagcagccccccgtccgtgcgcgctgcgcgctgcctctctctggcgctcgctcgctcgctccctctagctctcccctccccccaaatatctacactccaggatctggcgccgagccgcggcttcttgaatccagatataccattccccgctggaacctcttctccgctccgcagagccccagtacccggaagatgccgcccgaccctcctccggtgccgggcaaactgagggactggcgatctgcgcgctggcgaggggcaggcggagtcatgtgacgccgatccctcgaagagcccgtttcagcagcgcggacagggacacacgcacgcagccccgccgaggcgcagagccgcgcgcaggctgcaacttggtgcctcctccccctccccagacacacacacacgcacacgcacacgcacacactcaaaccctgccctccctcccctcatctccccttctctccctcggatgttaaaaagcaaatcagatcaattttcgtttaacccaatgaaaccccgaaggctcgccatcccgggagtttgcgtctttgcgccccaccgcggcgcactgtagacctggggttaagtgccagttgtcattttctcctccaaaggctcgccccccccccccactttatttctaatacgaggtggaaggaggaaggtgggtggcgaaatagagctgcaaaagcgtccagtcctagtctttgcatagtcagccgggtcacattgaattccagcatccggctgcactcccggcggcttccccagctacctgaggacagtacagggggtgagatggggtggtggttggtgaac

SEQ ID NO: 32084 - DNA, 875 bp, Homo sapiens
  chr15:83951722-83952597
  hyper
cgtctgggccgctttaaatgccctggccttcagaggactgaggcgagcacagccataaaaccaggggacgttaccgaacccccgagcgtctgatgccccccgccccccaaccacacacaacttcactcacacaattaaggctgggagatggcattccacttaactgtcagactcggagcggtggcagccccgcagccacaaagagatgccttaaatgagaagaacatgtttctacaccgcatttgtgaaagtttggctcggagctacgcgctgattaatatcagatctccttcactcgcctcgccacaatcttgtcacatctggctgacaaatcccgaggaactccggcaaagccaggcggcggcggggctccgggtctgggcggcggctccggaggagcagcgggagaccccgcagcggcctcctccttctccgcccgcggcccccagcctcgccgccgccgcccggctcccagcacggaaccgacggggcgctcccgagacgggcgagccacgcgctcgcaggtcccaaggccaggctgggcgggactgttaagggagctcgaagtcgggggccgggggcttcccgtcccggcgcttcccatgcaaacccctgaaggaagcggcaggcgcagccgcgggctccgcagcccaggcccacttcctgtcactccaggaaaacctcggagcggcggacgcggctcggcccggcttccagcccagagcccaagcgccttagccccgtcccagcgctttctgaaagacgggccacctcgcgcggagccgcgacaaggactccagggtccgcagtgaagctggtcaaatctgccccgcacacggtcaacgctcggtctgtgtcccggaagctttcggacc

SEQ ID NO: 32085 - DNA, 1391 bp, Homo sapiens
  chr15:83952613-83954004
  binary
cgactttcagtcgtgggttttttgttcttgtgggtttgttttgttttttgttgttgttgttgctctacaaaagatttgtcccgcagtggacgggagcctcctcacggccgcccgcccgtctccgcagttctcctcagtgaccggaggctgccgcgcgccccgttctccagagaaacaatccccggagagaaagacggccagtgtgaaatatcagctgtttcacaaattctgaggtaaaagaaaaaaaaaaaaagaaggggtcgacccccacaggtggaaacagcaagtcctaacgtcctgggctgaagcctggggtgcgggcggcagagagtggcgtgtagggtacccgccgagtgccgccgccgatttccacaggctggcccgccggcacctccgacgcgcccgcagatccggcgcggagaccgtttgccagctccgggacgtcgggcagggacgggtcccagagccccaacccccccgccgccgcctcccggccggagaccacggtccctcccgccgcgcctcggggccgcgctgccgcgcaggtagccagctggccctcgggaggtggccctcgggtacccacgggagccggagcccagcggcgtcccgggccgcctgctccgcgcacagagaatccccgcgcccgcggagggcgccgcgcttacctcggccatcctgcgaccgctgcggtgccggggctgccggcgcgtctcccgggcccgggccgccccgcgtccgccccggctcggcgggcgccgccgcatccacgctccggccgtcggggcgcgacccggcgaagtgggcggctccccaagcgcccaggctgcgcagcacgatggccgcccccgccgcgcaccgcgtgtgcccgcacgcccgccccctgcgccccggggacgcctctccgcccctccccctgcccctccgcccaccgcgcggtcgccccacgccgcgggcgctgcttcgccgcccgggaggccgcctcccgccccgggaccggataacgccctaaatcagcgcagctgaggcgaggccgtggcccccgcagaccgcggagacctcgccggcggccggcgcggaggtgtctgcccccgccgggcttgaaggcacttgttggtaaaagacacagacgtgtcggtgtttgcctctcccggggaagggcgaaacgctctgaagttctctggcgctcttctcaggagatgattcggcctcccctcctaccctggggcgccctcggggtctcactgccgcggaggaagaaggcagcgccgccctcgcctgcagaaacctcattcccgagaaagtgcgggacgagcgtcttgggatgtggaagaagggggtcgccaggaggttttcttaagaactcaaaacaagcgccccccaccgcacac

SEQ ID NO: 32086 - DNA, 907 bp, Homo sapiens
  chr15:92936677-92937584
  binary
cgccttctcgccgcgcgctgggggctgtccccaggtgttggtctttgtgtcgagaaaactttgcgaggaggcgagggagctggacaaagagcgggcgagggagggcgtttgccagcctgaggggtgcgccgggcggtgcgcgcacttccctgggctcagctccgtacccggtcgctcgcggtggccagagcccagtctctctaggccaggagtggcgtccggctgcatccccgcgccctcgggagctgaataaagccaggcgggagaagcaaaggctagcgcctggacgctggagttggtgggaggaggcgagcagaggcgcggagcaaagctgtcaaactgcgcgcggagccgggcgcggggcgggggaagggagaggagggagggaggggcaggcgggagccgggagggagcgagcgggctcgccgcgcctgagcaacccctgcctgtcgctgccgctgccgctgccgctgccgccgccggcccggactcgtccggagcgcagggtgtctgcccagctgcgcgcggcgcgcggaggctccggcgtccgccgctgcgccctccggcccctgctcctcgcgccggcccgcgtgggtcccggcgggcgcgaacccaccatgcagctgcagttccggagctggatgctggccgcgctcacgctgctcgtggtcttcctcatcttcgcagacatctcagagatcgaagaagaaatcgggtaaatagctgctcccaggcccgtgccacgagccctggcgggatctctccctccttctgtactctccaccctccgaccccctttgtgtgcgccgcgccccgctgtagctccgctggagagatggggacggtttggcagaaggtggcggcgacaggggcccgggacggtttggggagaggagggtgggggcgc

SEQ ID NO: 32087 - DNA, 852 bp, Homo sapiens
  chr15:93615977-93616829
  hyper
cgcacccacgacggggtgcgggagaaacaaaagacccgtggaaataggaggcggggtccggaggaggtccggagaacttgagcccggactcactcgcgcacatctggcccagcattgaggggcggcccagggacccggccccgcgcgcccggccggcagtgccttacctgcggggaagctgcagagaaggaaggcgagggtcggccagaatcccagggctgaacgtcctgcccctctccccatacccatccatccagctcggcctgttaccactagcctctccctggaagaagagttcagaaaaaaagaagaaaataaatcacgctgcgaagaaagggcagcctcgctccgccggcgggagcagcgagccgggaggctccgtccacctcggccgcgggcgcccggcgcgctccccttcccgcgccgccccccgcgcgcccctccctcgccatccatcactcggttctccgccaatgtcgacgcggccccgcgccccagccgcctgcgcaccgccccctcgcgctcgggtttcagcgaggccggcgaggtagccggaggcggccgggcggggacccaggctgcccggccgcagcgctcgccgtgaggacctcggaaaaccacggccctagatcagagggcgcgccacgctccccgaccctcgcgccatctccagcccgcggctgtccttgcaaaccaggcccagcacccttgggaggccgcagggcatgaggcggggcaggacgcccccttaatcccctccacgaatatccaatccaagtagaaaaactgtccttggaggcaaatcccagccctactttccaaccagactgccgaccccaagcttccaccgac

SEQ ID NO: 32088 - DNA, 875 bp, Homo sapiens
  chr15:96873798-96874673
  binary
cgcgcgcgcgcctggccaggccaaccccggctgctgccttataaggcgcgccgtcgccatggcaacgtgcgctaagttgcagcagtcgtgtcaaagttcactatatagagagctcagtgagctgatcgcggagaagccacttctgccagccccggcgcctataaatcgcattccctcccgcgcccccctttttagcatatttgatcactttgattctctgttcttttctctccgcggtgtgtgtgtgcgtgcgcgcgtgtgtgttttcttcttctcctcctcctctccccgagttgcctcctttctccgggtgccgtactgccttttttcccctctttcattctttctctccgtctttttctcccccctctgcgcacgaaggatgtgcttctaggtggtgatctgccctcctctctctcttttatcatttctcccccgccgccggcgagttgactctttccctatgtgtgtgaggcggcggcggcagcagcagcagcagcggctccggcggcggcagcagcggcagcagcgacttcagcggcggcggcggcgctagacgcagcggctccgggcccgacccggcggcttcggcggcggctccggcggcagcggcggcccgggcggcccgcagggaacggcgagcggcctccacccagcgactgcgggcggcggcggccggagagagcgaggcgcgcgccggacgcccggggcaggcggcggcggcggcggcccagcgccaggacgacgccgcgcagcgcccgacgcggaccactttcatgctgattcccccggacccgggcagcgctccggccactccgcgggccgccggcctccgccccggcctgcctggctccctgggcgcgcccgcacccggc

SEQ ID NO: 32089 - DNA, 1234 bp, Homo sapiens
  chr16:1203074-1204308
  binary
cggccccgccccgccccgccccccgccgctcagcccgaagtttcctgcgccgcgcgcggacgggctcgaggctcgctcgctgcctcaccggtccccggcccgcgccccgcgccccgcgccccgcgccccggcctcacccgtccgctcagcggcctccacgccgcgccgaggccgccgccgtcgcctccgccgggcgagccggagccggagtcgagccgcggccgggagccgggcgggctggggacgcgggccgggggcggaggcgctgggggccggggccggggccgggggcggaggcgctgggggccggggccggggccgggcgccgagcggggtccgcggtgaccgcgccgcccgggcgatgcccgcggggacgccgccggccagcagagcgaggtgagacgcggcgaggacgcgcgcccgggaccctcttcaacttgcgcgaagcgggccggggagcccctcggggtgggggtggggccgctggagggagggagggggcgggcgggggcggggggcgcgtttgtctctaataagaaaagacaaagacatcccggcggccgcggctgttcccgcagctccgcgccgcgggaggcagggcgggggcgtcgccaccggccccgggtcaccccctgtcctctgcaggtgctgccggccgccaccatgaccgagggcgcacgggccgccgacgaggtccgggtgcccctgggcgcgccgccccctggccctgcggcgttggtgggggcgtccccggagagccccggggcgccgggacgcgaggcggagcgggggtccgagctcggcgtgtcaccctccgagagcccggcggccgagcgcggcgcggagctgggtgccgacgaggagcagcgcgtcccgtacccggccttggcggccacggtcttcttctgcctcggtcagaccacgcggccgcgcagctggtgcctccggctggtctgcaacccatatccttcccggccggcggggggcggggggcggggggcgtggggagggtgggggcccggggcgcgggactccctcggcatgcgcccccgcgcgcccctgttggtgggacctggcgtgggccgggcgcgcgggggtgcagggcaggggctggaggaccgcgctctaatttctgagagtggcgggcttggggggccaccgggcgcctccggactcccttccccagggccggctccggacggagaaggtggaagcgaagcggtgaggcccccgc

SEQ ID NO: 32090 - DNA, 859 bp, Homo sapiens
  chr16:1967780-1968639
  binary
cggtcccaaccccactgcccggagcgcacccctgctccctgggaggcaggatatcgtgccgctgctccctggggcgcacgataccctccccaggaaggcgccggtcagggcggacgggccagggtgctcaccggtaccaggcgaggccgcgctcgtagcacctgtcgaagaagtggggctcagagcccagcgcgcggacgtcggggtgcagccgcagaaactccagcagggcgcgcgtgccgcccttcttcacgccaacgatgagcgcttgcgggaagcgccggcggccgggaccgctggccaaaggcaggccgggtgctcccgggcggtggacggagctggacggctcggagggcgcgggggccggcgcgggggcgcgggcggccggcgggcagcggccggggagggcgcagaggcagtaggcgccgagcaccagggccacgagcagcatcggcgcgcgggacgcccgcagagcggccccttgcccggcccctgcgccctggccgcccccggccccgccgcccaggccgccgctacctgccatggggtcgcgccgctccaggcccgggagcgggggcagcaggcgggcgcgcatctcggcccgcgcgccgctcagtccgtgggtgcccggcttgtgctctgcgcccggcggtcccgcagcctgggagcgggcgcggggcgggaccgggggcggggtctggacgccctcccccctccccctcccccgcccactccgcctccgaggccactgcctgggctggacccgccggcagccgccaccacccgggcgcgactcgagctgccgggaccaccaggacgctcctgctccgagatcccaggccctggctcgcttgactcc

SEQ ID NO: 32091 - DNA, 30 bp, Homo sapiens
  chr16:2070510-2070540
  hyper
cggccttgctgtgttctcgttagagacttc

SEQ ID NO: 32092 - DNA, 1452 bp, Homo sapiens
  chr16:22824947-22826399
  binary
cgggctgtgtgtgtccatttggcgagatgtcgagagcggggggagtgtccttgtcggtgtatctgggcccaggttaggggacttctcctccccacccccgcgtgggtgtgggggtgtgtccgggctagggcgcgtgtgcttctgtgcctgtgcgtgcgtgtgcgggtcagggtggtgggaccgcgcatcagggcagggtgcctgcgtctgcgtctgggtctgtctggtctgcatgtcggcgcgatctcgacctggattcgtgtccctggatgtcgagaggccagcgtggtgggggtgtccagcctcccggaggagtactatgccttgacaccttcgtttcaccgccccaaagctggcctggggctccgtagggagtggcctgcatggggagggcccgcgtgctgtgtttctgggaggggtaagagagtgggggcgcagggggcgggccaggtccctgggcgcggcgcgggctcgggggacccgcgcggctgacgtcaggccactccttaaatagagccggcagcgcgctccgctcggcatttcccgaagagccagatcgcggccggcgccagcgccaccgtccggtccacccgccagcccgcacagccgcgccgccgccgagcgtttcgtgagcggcgctccgaggatcaggaatggggcttcgggcgctgggcgcgctccgaacccggcgcacgtaagagcctgggagcgcccgagccgcccggctgcccggagccccatcgcctaggaccgggagatgctggaaatgcaaccgcctgttccccgaggagccgctgcccccgggaccccctggcactgtgcgcaccctggtcagcagcccccggagaagacggcgcccccaacgcccgacccgcgtggccgtggcagcgccacgcgagccctctaggcgaccgcagggccacagcagctcagccgccggtgccccctcggaaaccatgacccccggcgcgggcccatggagccatggcctatagggtcctgggccgcgcggggccacctcagccgcggagggcgcgcaggctgctcttcgccttcacgctctcgctctcctgcacttacctgtgttacagcttcctgtgctgctgcgacgacctgggtcggagccgcctcctcggcgcgcctcgctgcctccgcggccccagcgcgggcggccagaaacttctccagaagtcccgcccctgtgatccctccgggccgacgcccagcgagcccagcgctcccagcgcgcccgccgccgccgtgcccgcccctcgcctctccggttccaaccactccggctcacccaagctgggtaccaagcggttgccccaagccctcattgtgggcgtgaagaaggggggcacccgggccgtgctggagtttatccgagtacacccggacgtgcgggccttgggcacggaaccccacttctttgacaggaactacggccgc

SEQ ID NO: 32093 - DNA, 380 bp, Homo sapiens; identical to SEQ ID NO: 28601
  chr16:23724334-23724714
  hyper

SEQ ID NO: 32094 - DNA, 989 bp, Homo sapiens
  chr16:25703066-25704055
  binary
cggcgtcccgagctcccaagggaggggagtaaacgaggtggggtggggaacaccccaagtgcgtgcgtgctgggggctggggggcacgatctccgttctcccgggtgccccagccctagcgcacgcctccgctcccccgcccccttcgcaggcgcgcgcgaggcgcaccccccttccctcggcggcgccgggcgcgcgcccggccccctcctcctcccctccgcgcctctcctctctcccggcagaaagttagcagcggggaaggaactccgggctgcaacagcgcgcggcggcggcggcagaggctgaagcagaagccgcggcggagccggggaagcgggggcgctgcagacggagcaggtgccgccggcgggtccgcgcgcccccctcggtccccttgcctgaggctgaggggggggcggtggtgggggggccacccggactcggcgggcagcgtggggcggggggccatgcggccgggctcccccctggcgcagcgggacagcggccagggccgggggcgcagcggcgtcgcttcatgcagccggggcggctgggcagcggcggcggcggcggcggcggcggcggcggcgggggcggcggctgaaaccatgtccgggcagcgccgggggctgccgccgccgccgccgccgccgcgagccgggagccgcgatggcccggtggcccgcacctcctccgcctccgcctccgcctccacctctggccgcgccgccgccgcccggcgcctctgctaaggggccgccggcgcgcaagctgctttttatgtgcaccttgtccctgtctgtcacctacctgtgctacagcctcctgggcggctcgggctccctgcaattccctctggcgctgcaggagtcgccgggcgccgccgccgagcccccgccgagcccgccgccaccctctctgctgcctacccccgtgcgcctcggcgccccctcgcagccgcccgcgccgccgccgctggacaacgc

SEQ ID NO: 32095 - DNA, 750 bp, Homo sapiens
  chr16:25704061-25704811
  binary
cggggagccgcccgagcccccagagcagccagccgcccccgggaccgacggctgggggctgccgagcggcggcggaggcgcccaggacgcctggctccggaccccgctggcccccagcgagatgatcacggctcagagcgcgctgccggagagggaagcgcaggagtccagcaccaccgacgaggatctcgcaggccggagagcggccaacgggagcagcgagaggggcggcgccgtcagcacccccgactatggggagaagaagctgccacaggcgctcatcatcggggtcaagaaaggagggacccgcgcgctgctggaggcgatccgcgtgcacccggacgtgcgggcggtgggcgtagagccgcacttcttcgacaggaactacgaaaaggggttggagtggtacaggtaggaccctgggctccgcgggctggtggagacgcgtgggggagacgcggaggggaagccgcggctttccacgcccttcgagcatccaggcaccgtcccgagaggcccaagcccccgcgagggctctgcaaaccctggcggcgttgctcagggggatcggctgagagggctggactccagcgaaaggtcactttatttcagggcgaggggaggaggtgtcaccctgccctgcctcccgcgctcctcatccaaggaggtgctgtctgaatctgcccagctccaagcctgggaacccccagccctcctgcctgctgggtgtttccgaaaccaggctcttgc

SEQ ID NO: 32096 - DNA, 345 bp, Homo sapiens
  chr16:3021562-3021907
  hypo
cgcccggctgccctggtgggctacactgtgttgtcgggtgtggccggctggcgtgctctcaccgccccctccaccagtgctcggctccgggcatttggatggcaggctgctgcccgcctactggtatttggggcccggggagtgggtctgggttcaggggctccaggctccctgccctgctacctgcgcatggacgcactggcgctgcttgggggactggtaaatgtagcccgtctgcccgagcgctggggacctggccgctttgactactggggcaactcccaccagatcatgcacctgctgagcgtgggctccatcctgcagctgcacgccggcgtcgtgccc

SEQ ID NO: 32097 - DNA, 33 bp, Homo sapiens; identical to SEQ ID NO: 28604
  chr16:31483764-31483797
  hyper

SEQ ID NO: 32098 - DNA, 1432 bp, Homo sapiens
  chr16:4165534-4166966
  binary
cgcctagaggcccgggacctgctcctgtcctaaggggcggctccagcacgcgacctggacaggcaccatctgttcctgtggttcccggctcagcggtgctcccaccgcccccaccgcccccaccttcgaggcgcacgagaaccgctcgggacggacctagaacgcccgggggtccccgccgcgtggccgccgtggctccgggaccgctttgctcgctcgccttccgcgcctctcgccccgagggtggcctccgcgccgcgcggcttctcctcctcgcgcgctcgcctcctccagctgcggctccggagggaagttcagaccttgagcgctcccagccccgcgagccgcctgcgcacaaacaactccgctggcggcgcggagccctccatcctgcaggagccgcgctccgatgcgtcaaaggcggcgcgcggccggccccgggcccggaccccgacccggagcagcgagcttcggcgggcgcccccggctcgcgctccccggccgccccccgcgctccgggccggccctgcccgcggcggcgggcgctgggggtgggggcgccccgggctgcgagtgcgcggagcccgtcggcgcggcccgtctagtggggcctgcttccccccgagtgcgccgccgctcccgccgcggccgcagctgtcccgggaccgagcgcgtggaaccacggacgcgggcccctcgccgggcggcggtgcagacgctgccgcagagccgggctcccgcgacgccggccgggacgcccgcccgcccgcgcccacgccgggggccgcctccccgagctagagatgcggccgccgccgcgcccgccgccgtgtcccccgcggccgctgcctcatgtcggaagagctgccgccgccaccatctccggcccctgccccgcccgctgtcactgacagacgcgcgcccgcgccgcccctcgcccagccgcagcgcgcacgcgcggcccgcgctcgccgccaccgcctcctggccccggacacgcgcacgggccgcgcgccgccccgccttggtgcgcgcgctgggctggggctgcggggcggggcggggcggggcggggcgcgcgctcggctccgccccccgccccgggcggcgccgcttctaggcggcgggctgtggccgctgtccgcgctccgggcgctgtgggcccgccctccctcggcgtcccagaggccgcgcgccgcccggggtcccgaccctgcggagagacctgaaggcgcctgccgtggaagaagccgctggccgcaacgtttgggaaatcaaaatgttgccttcccactcggcacgcctttgggataaatcgaagtttccaaccgttggatttccctcccgggaggctccccttgctctgtaagcaatgaatgcgggccccggggcactcggcctgccctggacctgctcacggggcgaccttcac

SEQ ID NO: 32099 - DNA, 1995 bp, Homo sapiens
  chr16:49315005-49317000
  binary
cgtccccgcgcctccgcagagcccttggagaggaccgggcatcggtcttccatccatccctccttcaccagcccaatctgcacgccgcgggaggaaggaacactcacctggtcgaagtagatgatcatggtgcgattactcatctcggacggctcgtggttggtgctcctgatggcagagaaagccaccttggcgctgccagagcgcacagagatgcccagggcagtgcccgtggggtcggacgtggggttggagtcgcacaccaccaggcacttgccctccagcacgatgggctccgtctcattctgcccgcgggccgggcccgccagccacgcagcccccagcagcagcagctccaggacgcccagcatcgcgccgccggcgcccaccccgccccccacccccagggctgctcgcgccagccgccccccccgtcccagtcccgctccgaagccccctcctcagctccgtgcgcagctccgccgccgccgctctggacactacacctcttcctcgcactccgggactagcgtcccctccgcgactagcgtcccctccgcgctgtgttcccggagcccctcccgggcctcaggggtgccgcggctgcccagccgcacttggatgcatagccgctgctgctcggtcccgctgctgccgccgcctcctgcccgcacccgccgctgccgccgccgccgccgctctgaattattgatgcagccggcgctgcagccggagcgggcggagagcgcgcgccgggcacaaaggcgcggacctcggcctggccccgcccccgccgcctcccggcccgcctccctccgaggccctgcccccgccccggccgaggccacgccccccagccaatcctgacgcgccgcgctccccaccgagccaatggcggcgctgtccgcgctcggccacctgaccccgggcgccgttgttattaggcgcggcgaggcgggtggcgcgcggcagcagggttgggctctcgccgtgagtcgacgaagggagcgcgggcgcgcgcccgcgtccgcgcactgagagtcgcctcggccgctcgctttctcgactcccgcctcgcgcctcgatcctgttccgcctccctcggccctcctgcccgcccccactcgtcggccctcaggtaggaggcggcgcgccccggggtcgggagtggaatcgctggaggctgcgagtcgcctgcccgcctgtgggcgcgcccgttgggaggggagcgccccccagcgggcgcgggcgcgagggcagccggcgcgctgggcgagcctggctcagggtcccggcggccggggtgcagggcgcgtgcgcgcgcggcggggcggggcctgcgcggctctggcgggcgcacgtggtgcccgggagctgctgggcgggcactcaccgcggggactcggtgcggagccggggcgccgagtgtctccgtgtccctctgccccagccggcggccgcgatggtggagcttggcctctcgctctctcccgcctctccagcgactgctctgccggccgcggaggtcggatcgagcggtcattcattcatttgttaattcgttcacttattcaggggagatcattgaacccctacggagtaccgggtactgggccgggcgctgaggacgcggggctgagcaaaagcagccgaggcccaccttcgtgccccttaaaacccagcgtgcggggcggcaacgagtactgcttttctgttttgcacttaaaatttacattttgcatccgtactttttatttactgtgcacccttacggcatgctttacgcacccgtacctgcacctcctagccttgagtgtagacaccagatcctgagatgggcgatttttcgagaataatttttaccctaagtggattttcgtgccacgcatggacttggaactacacacacgtagtccaaaacgtgaaagtcaaaatgcagctttgccaagtggcagggagaaaggagagctgagaagatgaggagaggaagggcgc

SEQ ID NO: 32100 - DNA, 664 bp, Homo sapiens; identical to SEQ ID NO: 28609
  chr16:5007944-5008608
  binary

SEQ ID NO: 32101 - DNA, 973 bp, Homo sapiens
  chr16:51185092-51186065
  binary
cgaggccacttcggggtcggattggaaatgttgaggcttcgcttgcttcctccgcgacatgctggctcaaacatcagctggggcagaataaaaaattactaaaaaaaaatcttctcaaaattacggaaatcgagcggcggcggcggcggcggctccccccgcccgccggcccgcccgccccctccccggctccccggccccgggcgcagcgcgcatgtgtcctgctataattatgattatcaataatgcattgcgattaatcatagaggggctctttgaaaggcgattggcaccgggccagcgctattcaaacccgctcgccttaatcaattagttcgtgatttgctgcagacccctgtctctccgcgcgctggcccaataagccggccgcggggctggctctgcgcgccgcgccgcccgacactgggttaaccctctttgcgaccgcccgggactccgcggcccggccgccgggggccggcctcctctccactgcgggcccggcgccccggcaggcgccccccgctctctccctctcccctccctcttccctccctccttcgcccccccccacaatcccgggctgggccgacccaaattagcatgccctccccggaattgagccgccccgggtggggggtggggccgggcggcgagggctggggacccgggctgccggcgcgctgcgaacttcccaactcgggggcgaggcgcgccggcccgcggggggagggagtcccgcggcgggatcaggggggagggcgtcccgtttcgtgagtgtttcttcgtttctttaagagctaccagaaagcagcccacccccacccccattaaaaaaaaaaataagcgagtggggaagagccagccccacgccggtccgcctcccgcccacggctcggcctccctcccgcctggctcggcgctcctccgccccgagttctccatcccctggatcccgggctcgcgggggcgc

SEQ ID NO: 32102 - DNA, 756 bp, Homo sapiens; identical to SEQ ID NO: 28610
  chr16:52579636-52580392
  hyper

SEQ ID NO: 32103 - DNA, 814 bp, Homo sapiens
  chr16:54316028-54316842
  hyper
cgtgtcttgttccgtggcttcgaggggtgtgcgcgcttcctatacctccccggaacgcgcgagatagtcacacgcgccactttgagggtcaaacaccccgcatctggccacactgtacctttactaacgtggggagggggcaaaaaaatgtgtctctccttcttaccccgaggtgtcactcgcccaaacactccctacaacttcttcaagtcaaacttgggcaaggttggctggctgactgcgagaggaaaaagagggcgcggagggggcgcggcgcgcggccgggtgtagaggccacggaggcgaggcgccgagcgtcccctttgtcctgtagagggagctccagccccaaatttccctgctgcctcccccggcccgcccaccccaggcccgcctggagccggaatcccggctggaaaggtgcggcggtctgacacccccgcaacccccgcgccggggccttagcaggatgcctcttctagggcacgtgggaaaacccaccagggtgccaagacgcacagatgctcccaggacccgggctccccaactctcaactagagctgggcagtcacacatcatctagaggattatgtacccctaggcgaccctcttctccatatccgcctccaccgtcaccccacaccctggcatctataaagagggaaggggggcaaccgggttggaaggaggatggaatctgggcttgcacagcctcttataggtaacagtgagaaagcctcaactgtgtcgatcaaagaatggggacgaagggagtgatgagaacacgaccccgccacccgcgcaggctaacccc

SEQ ID NO: 32104 - DNA, 936 bp, Homo sapiens
  chr16:54318434-54319370
  hyper
cgagcgaaggcggcggcggcagccgggtggcccgcggctccgggaagtcccagcaggtgcggaggggcagagcccagcagggagagcgggtgcaggcgggggccgggcggtgggcctggaaacggccggttggtccaagccgggaacttgcccagcggcgctgagaccagtctgtgagcggcggcggcggcggcggccggagagagctgcagggcggaaggcgcgaccgctgcccccggtggagacccccccgcgccgggaggcgagcggcgcgggttgtccgggcttgtggcagtctccgcgagggaccagatcttgggcttctgcagggcggaggcgggggctggtgcgggagcgcaggggtccaggctcacggggggcgacggcagagacggcgaggccacggccactggtggtggcgctggagccagactcaggaccggtagtggccggtcctctaagccctcagagctatcttccgagtcgctatttttggagtccgaaatgggtcccaggcctaggtcgccatccctgcgcgccgccccagccagggacagctcaggctcggtggccgcgccgtctaagttctccaaatcgatctcctcgtcctcgtcgtcgtcagccaggccctcgccccccgtgtcctcctcctcccccccgagctcctcctcctccagctctagctcgcgtttgccgtcctcctcgtcctcctcttcgtcttcctcctcgcgctcgctcccataagcgtttccctcctcgtcagtgcggctgcgaggcgcccaagtcatcttattctccttcttgaggcgccggcgcgcgttggcgaaccaggtggacacctgggtgagggtcatcttggtgatgatggccagcatgatcttctcgcccttggtggggtaggggttcttgcggtgctcgttgagccaggccttcagc

SEQ ID NO: 32105 - DNA, 2428 bp, Homo sapiens
  chr16:54319392-54321820
  hyper
cgttcttgggacgggacgggtccccgaactggtactggccatacgggtagaaggcggggtgcgggtgcggaaacgcggcagccgcggccggatgctgcaccccggggctgtccttcagctcatactgcgcgccctgtacgcacatggagaaggaagggacacgcgcggagggagcgcgagtgagccccagccatcgctgcctcccccctcctggcctgcacccctctagtccggcccccgcgcgctcagctcgccctgcgccccagcgccaacccctccttccctggctccgcgggctcttaccagctgcgggaagatgggcagctccgcggcgtagggcaggaaggcgccgtagccttgggcggcggcggccgcagcggccgcggcgtagggcgccccgtacacggacgagagcacgttggacagggaccccgaggcgttcagctccgaggctccggcacccaggccgccccgggcccccgcgctgccgccgctgccgccagcggcccccgggcgctcggacgggtaaagcgggcggatgtattggtatcccagctgggggaaggacatggtggcccgcggggcacggacggagaggggggccgacccccgggccgcccagctcagcgccgcccgcgggctccggcgcgcatcgggggctgggccgggcttggggccgcgctgccgcccgcgctgcgctgtgctccgcgttcgcctattgatctgctccgcggcggcgacggcggcggcgagggcggcggcgaggagccaggtcaggtccgaacagattggcggagattcccggggctccgggctctgattgacatttctacggggcgcaagcccctcctctctgcgccgcgctccctcctctcggccgccggagctgcctctgcccgctcctcgctcctcactgccctcctctccccagcagtgtcgcgcctcgcttccttcgccctcctctagttttcactccccctcctcgcccttcctctcccctcccctctccgcactcctcttccccccaggatcgcttccgctgcttcgggctcctgcactgccctggacgctatgaaactctcctttctcctctccccttctctttccctttctcacgagggcttttgctctccggtccgttcccttcacttcttcctttctcactacttctattttgtaaatctctctctttactcacacgatactccccgcgacctttccagcctctgcgccctgggctaagtaaggcagccaaaagttgtggacacttagggtgccgcgcggggggtgtgtgtcggtgtctgtctgtccatccccgcccttccaccccctccctcgcctttccccaaatctcgggtctgacgtcgcgccctcttattcgacttttccccgcgtctcttccccgagtcgccaatcgcctgggcgccttacgggcgaggccgcccacccccgcggatcccgcgcgcggggcggggcggggcaggggcgggagccggagcgccgcgagtccctgcccgccccctcctgctcgcgccgggcgggggagcgagaggcgcggggactgggtgagtgcagggtcagctcgcccctcccgcctcccgcccctccgagcctgtccccaggctgaggcgcgggacctgggccgaggctggctccgggagctcccctgtgcccgggccccttttacagctcgcacctctcgactcccggccactttcagcagcttagggagggagctagcagccggcgtgggggtggggagcgagggagtgcgtcctaacagagtctccagaggccacctcgctgccttgcgggggcgaggcagcccccaacccagcaggaccaaacccagagattagccacttaacgccgcccccgggtccgtgtgcgaatcccttactaaaaatggcgggctggctccgggggctgaagggtggcagcccgggggcactggaagggtagggagccgccacaaatcggtgaagcaggcccgcgccccaggcggctgggaatgggggaggagcagggcgccgggggacggaggccctaggaacttttggagagctcttcgagaagtttctgtattggcgtttttgtctgtggagaaccttccttgcgcgacccctaccccttctcccggtcccggcgctaacctcttttctctctgcaaggatcctcccaccgcctccggtggggatggaaagcaagagttttggtttaatgatgggatatttcctaaatcaaacttgaaatctcaggatcgggcgcccaccttcacggattagggcgtgcagtcgatagcggcattgaaattcccagcattgccgcggctgggggctcagagctttaggccgcggcggcgacccacaagccggccaggcctgcagtgggcacgccccggagacaaaacgggggtggtgactctgcc

SEQ ID NO: 32106 - DNA, 881 bp, Homo sapiens
  chr16:54962422-54963303
  hyper
cggaaagccgtgtcccggacgagagccgcggcgacgaagggaacaggcgtggacagaggagccacgcccacgcgcgcccgccccgaaccccgacacccggagaggctcgaccggcgccgacgcggcccgaggcccaggccctagcccacgggacgtctggtcgggcgcggggcaccgccgcgtccgttcggcccacgaggggacacgactagaggggcggacggcgcggccagagggcctggcccgggcgggggctcacctctcctccgccgcgcgggcgcgcgggccgcggacgctccctcgtggctggcgcgagcccccggcgggcggcgcgcgcgggccgttaccgaccgttagcgccaggggctgcggctgcggcgggcggagccgggggcgggcgctgaggggccgtggggccgcaagaggcgggagcgaggggagcagggcggggacgctgctcccaggagctcccggcgacgactcgggcctactgcgagcccgggaagaggccgccggcgaggccgccactggccggctgcgcgctcccccaggctcgggccgcctgggccgctccgcctcgcttagacattggccggctggcagccacctcggccccacggtccccgccgccgctgcagccagcttcccgtctccatgacaatagcgcgatcgagaccccgcccctccccgcccctctggcgccgagactcggaggaaagcggggttacgtcaccagggggcggagcccagggaggccagcgcccaatcataggtgaaggaggtgtcaggcactgggctgggcggacccaggggctctcggagaatgtagtctgaaccgctcaggcctcttggtgggcggtgtctgggggaggggagcagac

SEQ ID NO: 32107 - DNA, 751 bp, Homo sapiens
  chr16:55512659-55513410
  binary
cgaaaatttctgtctctgaccatctatcattgtggctgatcatctgtttctgaccattccttcccgttcctgaccccagggagtgcagggtgtcctagccaagccggcgtccctcctagtagtaccgctgctctctaacctcaggacgtcaagggcctagagcgacagatgtttcccagcagggggttctgaggctgtgcgcccagatcgcgagagaggcaagtggggtgacgaggtcgtgcactgagggtggacgtagaggccaggagtagcaggcggccggggaaaagaggtggagaaaggaaaaaagaggagaaaagtggaggagggcgagtaggggggtggggcagagaggggcgggcccgagtgcgccccccgcccccagccccgctctgccagctccctcccagcccagccggctacatctggcggctgccctcccttgtttccgctgcatccagacttcctcaggcggtggctggaggctgcgcatctggggctttaaacatacaaagggattgccaggacctgcggcggcggcggcggcggcgggggctggggcgcgggggccggaccatgagccgctgagccgggcaaaccccaggccaccgagccagcggaccctcggagcgcagccctgcgccgcggagcaggctccaaccaggcggcgaggcggccacacgcaccgagccagcgacccccgggcgacgcgcggggccagggagcgctacgatggaggcgctaatggccc

SEQ ID NO: 32108 - DNA, 901 bp, Homo sapiens
  chr16:55689557-55690458
  hyper
cggtcgctgcttccccagtccttttttggcctcctttctgacgcgacgcagaccccagttctggagagtctgtcactcgctccccgtggtgggagatcagaggcctggtgtccttgggagcggcgagcggtgctcggcgcaggatagaaagggagtgcgcgcccgagtcccccagatccctgggaacccgcgccaccctcccgcccctgcccatccccggccgcgctgtcagtctccattagcgctaacaggctccagacggagcgggccgggcgctgggttaatgcaatcggcgcgttacctggggcgcaggctacattaccagcccggcccccgccaggcacggccagaaccagtcagcccgcgccctgccggccgccccgcgcctccagctcttccccggccccgcccgaacgccacacggcggagcccagccccagcccgcgccctagagcctgccaaggcgccgccggtcgggggccggcagggcgcaaggcaccagggatcccctcgccgccggacacgtgagtgcgccctgagcgcgggacagggctaggtctgcctgggaggcccgggccgagacgcgccagcagagggctagcgagtttgtagtgcagtgacgttaagtgtccgagaaggctcctgtggctgttgaagtgtcgcggacctgagctggggagggggtcggcacgctgccctcagcctcggtgagttcaatcccagccatttggggcaggcgagagtgggtgaacgaggaaaagtgctgcagggtcttcagccgcccccagagggctgtcagaagtctccaactcttgagttccggcgtgccccaacctctgtttccaaatttttccagcggacgcgcgcccttttctgggaaccctgcgtccgctcagcgcgc

SEQ ID NO: 32109 - DNA, 981 bp, Homo sapiens
  chr16:56224379-56225360
  binary
cgtttcgaagggggaggacaggagaatttagtgcaaagacggcctccaccaaacgaaaccgtccaacatttgcaaaagcttttaaaataaactgctcagggatcaggggtttgctggaaactcccggtcgcttgaagccctgtccctccactccgggcaccctggcctccccagggtgggcacccctcctgcacggagagcggcggctgggatctcggagcagggtcggctatggccctggaggcagcggctcacagagaaaaagctctggcttttctccgcccgctgcgttcctcttcttacagcctcgggtgtcacatattaggtgctcaataaatgtggacataggaaacgaaaagtccgaatctgtccttacgcccccaaggcgaattctggggcgcgcgggtttattccgacccactaccacatcgcgtttcctgaggtaacccggcctcggctctgcggccccagcggctggagagccacggagaaggcgggctacgggcgacaagatggagagccggcccgagagggacagaggccgcgctggcagcgagctggggggcccacctgaccgtcctgcgggcagcccggccccgcgctcccattgacaaggaggtccgcgccgccggcgcgtggggcgggggcggaggcggggtggggcgccccggcgcgcgcccggccccactccccgcccccgccagtcccgcaagcacccaccccgggggagccgcgggccgggagggcgctggggggaggggcaggccgctccgcgagcgcgtgtgcgcgccgccgccggctgacgcgaactccggcgcgcgcctcccccgccccgcgccctccccgtcccgggggcccggcgcgcggccctgctgacgtcagctggcggcccgcggagccgggtgcgcagagccgctggcgcactcgcgcgctgcgctggcctcctccccgccccgggcccaggcgcgcgcgcgcttgttc

SEQ ID NO: 32110 - DNA, 721 bp, Homo sapiens
  chr16:56671950-56672671
  hyper
cgagagtgagaggccgacccgtgttcccgtgttactgtgtacggagtagtgggtccgagggacctaggtgtggacagggacaggcaaggcgacagcgaggagaaacgaaaatcacatcggtggcggttgctctgcacacaactcgctcgctaccgcacgctccacgctctgcactacgccgatccggggacaggagcaggaggctgtggctgcactcagacttcgggacaggccgagctgaaaaccgtgagaggggtggggtggaggcgaccgaaacgccaaggctgggttcccggaacgcgcggggactagggtggaaggcaacttcggggaaactgggaaaggcgaccgggacctcggggacgccccgtaccccgggcgtaaactcactcccgcgttagcggccccaaagcggggagggggtggtcccgtggtccgcacccaggggagctcagtggactgtgcgccttgcctttctgctgcgcaaagcccagtccaggtcatcacctcgggcggggcggactcggctgggcggactcagcggggcgggcgcaggcgcagggcgggtcctttgcgtccggccctctttcccctgaccataaaagcagccgctggctgctgggccctaccaagccttccacgtgcgccttatagcctctcaacttcttgcttgggatctccaacctcaccgcggctcgaaatggaccccaactgctcctgc

SEQ ID NO: 32111 - DNA, 468 bp, Homo sapiens
  chr16:57318148-57318616
  binary
cgtccgtgcgggaagcgccctaggggtacgcgcagcgcgtcggtgacagtgtgagcccgggtggggagcgcaaggttcgcgaaaaatgaacgcagcgccggagtccctcacccatcctggccggaccgggagcccccggccaaccccgtgggcccgcgcgtgctctcaccagctgcagcagcatgagcgccccgaggcgggagcgcacgaagcccaggtccgggcgcagcgccgacaccgaggcttcggcgccctgcgcaggactgctggtccgcgtgctaactttcgacgggaactcggccatggcggctccgcttgcctcccgaggtcgctacggccgccgtcgccgcccctccagcggtgggtgccggctcccgcgccgcttttcccccaggctccggatccctgtgtggctccaggcgctgcaggaggcgtcggggctgggagcctggggcgccaggtgcggcc

SEQ ID NO: 32112 - DNA, 930 bp, Homo sapiens
  chr16:62069316-62070246
  hyper
cgtcttggcgagggcagagccgcagggcgactccggagcccggcaagtttgtagcgggcaccgcacctcccagagctggagctgccacttgtgggaaagcctcgcgctggggctttcgcagctgagccttggcccgcagccctgccgcgggggtcgccctccctcgcctcggagatgaggcggtgcagaaaaccagccatagaccactcgggccccctcgcctccttttttccctggcttgcaccctccgcacagcgggctgcaggtgcttcccattcaccgcacggaccccgcagtgaaggcgcgcggctgcagccgcgcctgcctgcgttgggaagcggcgaaatagccaagtcgccgcagggaaggaaaccggcaggaaaactggaggggcacagcctggagcttgctactctctaggatctgttgtcaaagcagtttgcaaaaacagtcaggcaaaaccttgaggcgtacgtacgttatcacccacggatatcgcgaaagacacagcttagcccagagcctatgctaagaaccctcatccaccatctgaggggcaggaggcgcgcaaggtgtccgaaggggcatgggaattcctataagaaacggtcccttctggatagtcggaacatagaggaaaacgggggtgggttaggggaacacttactcttgtggggccctgcgctggcgaatgtcaagcctccaggttcacaaatggctggaggtgctcggggttagctcccgagggcggcaagcgccgaccggtcctcgctcgctaggcaggcgcctccggattccgttcatgcctctcggagctacagggcttggtgcggagacgcagggcgggcgcgctgggctctgggtgtccgcaacccaaagtgcagctggtgtcttgacgctaccgtctatgcacaagccggcggcggcggc

SEQ ID NO: 32113 - DNA, 750 bp, Homo sapiens
  chr16:65157302-65158052
  binary
cgccacagccaagcagtttgaaagggctagaggggaggagacgggcccaggagttaacggaaaaagaggccgaaaacggaagagaaagcttgggatcctgagcgcatggggaaggaaccccagtgcggggctaaggcaagagcggccgagccctgccctccagctcctggtcaccagcccgcgggtcccgagcgcccgcagccgcccgggtttccacacggcttggggagacgcccgcgggggcgggtgccggcgaggctgccccgggacctaccctcttcggcctgcgcgcccgcgtttttcttgacgactccaggatccgggtggcgctgcgtgcctgcccccagtccgcgtcctgcgcggagaggatgcctctgtcaccctctgtgtggacgtggcctttgaactcctcattcctccactgcgggggaagagctgtaagtttccagctgcccggttatcttactcctcagccttccccccaccataggtgtccaaggtgatagccccctgggtctccagtaaccccccaacctcgcaccacactctgcgcaagggacgcgcgaggacattgactcccggtgctttcctgtagagcgccagagagcagatcgtggtgcctgccactcctgcctccccctgtgggtccctggccctgaaccttttcagagctctaccctgcttcctctgtctgcctttttggcctctgctgtaacccctaaaactttgggtacttcccaagccaccgcc

SEQ ID NO: 32114 - DNA, 314 bp, Homo sapiens
  chr16:67427309-67427623
  hyper
cggaaggacagaacgacgcaggaatggaccgatggacgcgggagaccaggcggctccgcagctccgctccctgccggctcccgggtgggactgcagcccaggcggctccgccgtattatcccctgtttctcggtctccatagagacggcgagtcccacccccgaggctgtctcggcgggagagtgaccaaggtcacgccggccccgcccacgaggccccgccctccccgagactctccgggagccgcatcccgcccctcccccgcaactccgcggtcctcgcgacggcgagaccagcgctctgcagttcggggc

SEQ ID NO: 32115 - DNA, 999 bp, Homo sapiens
  chr16:68771034-68772033
  hyper
cgcgtctatgcgaggccgggtgggcgggccgtcagctccgccctggggaggggtccgcgctgctgattggctgtggccggcaggtgaaccctcagccaatcagcggtacggggggcggtgcctccggggctcacctggctgcagccacgcaccccctctcagtggcgtcggaactgcaaagcacctgtgagcttgcggaagtcagttcagactccagcccgctccagcccggcccgacccgaccgcacccggcgcctgccctcgctcggcgtccccggccagccatgggcccttggagccgcagcctctcggcgctgctgctgctgctgcaggtaccccggatcccctgacttgcgagggacgcattcgggccgcaagctccgcgccccagccctgcgccccttcctctcccgtcgtcaccgcttcccttcttccaagaaagttcgggtcctgaggagcggagcggcctggaagcctcgcgcgctccggaccccccagtgatgggagtggggggtgggtggtgaggggcgagcgcggctttcctgccccctccagcgcagaccgaggcgggggcgtctggccgcggagtccgcggggtgggctcgcgcgggcggtgggggcgtgaagcggggtgtagggggtggggtgtggagaaggggtgccctggtgcaagtcgagggggagccaggagtcgtggggacgatcttcgagggaaggagaggggcatccgtagaaataaaggcacctgccatgccaagaaaggtcgtaaataggagtgagggtcccggggataagaaagtgaggtcggaggaggtgggagcgcccctcgctctgaggagtggtgcattcccggtctaaggaaagtggggtactggagaataaagacatctccaataaaatgagaaaggagactgaaagggaacggtgggctaggtcttgagggggtgactcggcggccccctcccgggagttcctgggggctcggcggccgtaggtttc

SEQ ID NO: 32116 - DNA, 909 bp, Homo sapiens; identical to SEQ ID NO: 28627
  chr16:71659877-71660786
  hyper

SEQ ID NO: 32117 - DNA, 147 bp, Homo sapiens
  chr16:755538-755685
  hyper
cgctgtccgccgggcgacctcccgtcatggggagcccggcatgggcgtcggcgcgcgggggccgccggggtgctggactggccggcagggcccggccgcgccctgcgccccgcgtcccgtcctggccgggccccctcggcagcgcac

SEQ ID NO: 32118 - DNA, 381 bp, Homo sapiens
  chr16:78079784-78080165
  hyper
cggggagcggctacagcgcgggatcctggggagatagctcaaggcaggccagggaaggacaggccgggcaatgggcgcggagacgaaggggccggacagcggcgaggcgctggctccggtcgcggcacccggctgctgagggcagtgctgctgcttgggacgttccaggcgaccaagtaccctcggcggccctggcagggcggtgcctggggtgggcgctgggcctccaggcctgcagccacgcttggcgctgtccgctagggccaggtgctgaagtgttggccgcgagcggagctgctgcagcgctggcttccccgggccgctgcgggtggacttggacaacataaagggctgattgagcggggccactttttcgcccgc

SEQ ID NO: 32119 - DNA, 2829 bp, Homo sapiens
  chr16:79632619-79635448
  hyper
cgagccggacccccgcggagcacttatcagggtggctagctggaatcgcgtgtcagactcacatgaaaaactcgggagaggacgggttgtcgctgctcgagccgttttctcggaagccgctgctcaccaacttctcgtatttctccttgtacgcgtccctctcgcgcaccagcctggagatctcctgcttgaggtggtcgacttgctgcagcagctggttcttctccgactccaggacgtgtctctgctgcaccctcttgaagcggcaggactgggcatagccgcggtttttcagggtccgcctcttctgcttcagccggatcacctcctccttgctgaccccgcgcagctgccggttcagctcgcgcacagacatggtcaccagctgctcgtcggagaagcggtcgtcgaagtgcaggccgccggcggcgtggtgcgggtgcagggcgccccccgcccccgccgcgcccccgccgcctccgccgccgccgccgccgccgccgcccccagcgctggccgggccaccgccgcccgcgcccccagcgccaccggccgaggcggccgcgctgcccgcggcgccgggcgcgccggccgtcgggtggtggtggtggccggcggcgtggtggtggtggtggtggtagtgcgggcccgcgccgctctgcgcggcggccgcggcgatcacggcggacaccacggcggcggcggggcccatctcctcgccgctgccgcccaaggaggcgccggcaccggccccggccgccgcggccagctgctgcgccccgcgcgcgtagccatcgaagccgccctggagctggtggctgttgctgatgagcgcctcgaccgcgtcctcggggctgaagcccagcgcctcggggttcagctgctgcgggtagccggtcatccagtagtagtcttccaggtgcgccttctgctcgctgcccgagcccgggctgggcgccgagaagctgggggaagggggcaccgagctgcacggcgtgctcatgggggtggaggacagcgagcccccggcgatgagacggccgcactggctgatgatgcggtcggtctccaccggttcctttttcacttcaaacttcatcagatcgaagtcattaacatattccatggccaggggactggtgggcaggtcggagttgctcattgccagttctgatgccattctcctgccgccgccgccgccgccgccgccgctccgccagatgggctgcaggagaggggccagcgggctgtgctgggtggccagcgggtgagccagcttgccgggctggggcgcttctagcttgcgcggcggtggctggcccgaaacctccgagcgcgctcacacacacacccccccgccctgcccgcgccccccgcgcccgccctccctcccccctgctcacgccaatgtgctccctcgctcgccccggcccctccttgctcgctcgcctccttgcgcgccgagccggcggcttcaggctcgggaagatcctccgcgagctgcggtggcggcggtggtggctgcggcggcgaagctggaggagcccggcccggtgcgcggcgtcccccgctcgccgctccgctgcgcgctttgcataaggaagggctcgcctcgccggcccgggctgcaggcagggcgcgcgcggcgtccgctcggggctggaggcgcggcgggcgtctgtccgggcggcgcgggccttggcacgggggagttaacacttcatgcttctcgcctcctcttctgcttggctctctttattattttttttctttcctctctctccctcgcgcgctctctacctctgtgcaaagtgcaaggcagaggtgcagcccgactggaggagagggaggggggagtttagttctttcttgcctttttttaaaaaagcaaaatagcgaagtcctggggaaagacgaggcagagagcaaaggggggagggggaggccaagccgacaagcagcccgagctacagctagaagatgaaaaaagattttaaagcctctgatccagcaagaagagtttaaagcaattgctgagttttatagcactcgtgacgtcaggtccaaatgagaaattgactggcactccgggccaatgggaggcggcgagagcggccgcgattagcataatagtatagaaacaaggaaacttttcggagctgtcaatcagggcccaatcagctgactgtcagctgggacgggctggcttaacccttcctgcgccgctgcctacccgggagggaacgaggcccggcgcaaagtttggtgtaagaggggaaggagtttttccagaggggcttcggcaatccgggcggacctgggagggcggtttgcttttctttggagcgcgagacaggcctcccatccggagccccagctcgctgggggctcactcggctgggattggcctgattcccctcccctgcctgccctccacccccaggattgtgaattcgcctcccagcttttcctcctcgcaccaactctggtacccaggtgtctgccggggaccttccttccctgagcctggccgtgcccggcgctcaaacttggccccaactctttgtccgtctctcgggcgcccgtgcggggaagggaccgggaagggagggatgcagtggggtgtccggatcggggctgcgggctgggcgccgcccggccatgcgcctgcccagaaggctgggcatccgtggagagggaaagcccattttatccctctctttacaacgaggtaaaataagttgtttagaggccattcttcacggagaccggctgcccgctggcgtcgcgtgcccttggacagagcgagcgcctatgcgagataactcc

SEQ ID NO: 32120 - DNA, 536 bp, Homo sapiens
  chr16:79804157-79804693
  binary
cgtgtgtgcgtgtgtgcgtgtgttcaagggctgggggctcaattgtgagaggtggcccaggggccggttagagactgggaaggacgacagaggcaagacacgcagcgagtgctctcgcgagagttcaccgagttgataaaattattaaaacacaaaatacacatttgcgtgagggggaaaaaatacccgcttgtccgtcctgtcccttcaggctgcgcaacgctggagggcgatgggagctccacacaggtgggacgagcctagcaggtaaaccttccaccggcccgagctccgcgacgccgcgcccccagccccgccccgccttaaaaaaaaaaaaaaaaaagaagaagagaaagagccgccgggagaagcgcggacgccgccgcttcccgggctccagccgcggcccagaagaggaggagcccagacgcccttcgcgcgccattggtccatccgcctagcaacagccgcggccggaccaatgggagccgcgaagcggccggccccgctccagaaacttggctgcggagaagttc

SEQ ID NO: 32121 - DNA, 503 bp, Homo sapiens
  chr16:84853348-84853851
  hyper
cgagggagctgagcgtctccttgtccctagccggccctggaggccagcggccccgccttcctcgcccacccggcgcccgcgcctcagctgccccccgcctccttcagcccgctgagcctgcggggcggggccgggggcggggccggtgatgctcggtcctaccagcgccgccagcgatctgggggcgtggcctccgggctccggggagcctacaagaggcggtacgctgagccccggcacccactcgcatcccagggcgtctccggctgctcctattgagctgtctgctcgctgtgcccgctgtgcctgctgtgcccgcgctgtcgccgctgctaccgcgtctgctggacgcgggagacgccagcgagctggtgattggagccctgcggaggtaagtgtgatttccatgcttctcccttttgcaaactgttacccccccgagaagctggaataactaggacagatgccacctcgcagggctgactgtgtgctggcaccacacc

SEQ ID NO: 32122 - DNA, 1143 bp, Homo sapiens
  chr16:85202563-85203706
  binary
cgcgcgcggctccggctggacacaaaatagatagaggagccggccgctattgtgcgcagtttgggacgcggggggaggcggcggcgggcgggagggaggcaggcttggaggaggagggcggggggagggagcgcgcggggagggattcccccgcccgccgcgcgcccgccctccgcccctccccgcccctcccgcccgccgccgccccgccccctcctccccaattaaatgaccccacgccttggcaggcgccggagctcgcacatgcggctgccgctccagccgcccgggccccgccgccgccgccgccgccgccgccgccgccgccgcgttccgggcgcgctcgccgcggcgccgcctcggcccgcgccgccgccggggggtgctcggcaggcccgggggggcgccgctgcgaggggccgtgcgcccgcgcccgcgccggccgcccgccgccaaactttgcggcgcgcacacatgctccaagttgggcgcggcggcggcggcctgggcgggagctgagggcggcccggggcgcgcgggggcccgggcgggcggcgcggcgcggccatgagcgggcggccggccccggtctcccgcaagcagcggctcatggcagccgtgggcgagcgggctgcgggcggcgcgccgctctcctgcttcatctgcggcggcggcatcgggcgcggcaaggagctgaagctgcaggtgaagcagccggcggcgggcgcggggaccccggcgcagcccttcttcccgttcctgcagcagcaggagccggcgcccggcgcgcgcgagctgtccccggccgacggctgcgtgttggtgtgcgccgtgtgccgctgcttcctgggcgagcagtgggccgccttcgagcgcgcccgcacgccggtggacaagcgcatgtactggctcaagcggccccaccagtgcgacgcgggcgcaggcggccgccgtggcggcgccggggccccccgcgagtggaacgtcgcctacgcgctgggcagcgccaccggcgacgacgacgaggacgacggtggcggcccccggctgcgcggggccgcggaggagacgcgagactccgacctgtcggagctgtcggacaccgaccccctttccgagcccgacccgcccgcgcgggacgcc

SEQ ID NO: 32123 - DNA, 792 bp, Homo sapiens
  chr16:86531211-86532003
  hyper
cgtctttacctgcccgccccgcccccgcccccggccccagccggcgcgcccctaattgctggaggagctcgacgccggcggcggcctctgcagcgagctaattgagttggaacccgagcggtcttcgttaagccggacgcaaggcggggacgggggaagggggcgggaggtgagacgcagcctgggacctccggcctggggttggaggcccacgcttgctggggtgggcttttggtggaggaagagcaatcatgcggagggctctgccgccgggttaagtggacgcagcgactatctggcggttctcgggggtctgcgttccctggttcacaaccaccccacccccacgcgcctgtgcacatgtccctcccgccgcgcagggtctccgcgggcgcgccccgccccaaatagagcttactacagtaacccgggagtctcacatctgcgcgtcccccacccgcccacccccgcaccgcctgtaccccaatttcggcccgcacccgaccaaattttaaaaattgggagggttttggggactgcaatggaaaatcagctggccccggccccagactccgtctacactggcacagacaggtggagtacaaagccggcttcctggatgattcaggccccaaatcgtaggtagaaatgtgcaagtaatggaccttcgatctgctttccctcccttagcacataatccgtagtattcgctgtttcccgttgcccctatagacacgccccaaccaatctcgcactgtaagtgcatttcttgggttttccggggaaaagcac

SEQ ID NO: 32124 - DNA, 389 bp, Homo sapiens; identical to SEQ ID NO: 28638
  chr16:86609636-86610025
  binary

SEQ ID NO: 32125 - DNA, 870 bp, Homo sapiens
  chr16:87525633-87526503
  binary
cggccgggttgttggccttgatctccgagtcgcgcagcgagtggtagtccttgcgggccaggtcctccaggcacgagccgaggaagcgaagctcgagcgggatgcacaggtccagcaggccgcacaggaactccacgcgctgcggcgacggcagctccgagaaccagcggtacacgccgtccctctgcagcgggcagcgcttctccaccatgctgccgcccgcgccgcgccgcgacccggggccggggaccgcgcgggggcggccggggggcgccgggggccgcggccggggcgcgccgggaccggggacgcgcgggccggggccgggtccgggcgagggcgcgcgggcgccgcgggccgggcgggcgccggggcgggggcggggaccggggccgggcaaggctcccgtcaggggccggcgggcgggcgcgcgcggggcgccgggggggcccggggcggccggggcggccgggggcggcgagcggcctcgggccccccgctcacggggaggcgccttccccgcgcccgtgcccagcggcggccggtgcgcggcggcggcggcggctgctcctcgtcgtcgtcgtcgtcgtcgcccgggaggcggccgcccccatctccccccgcgccgcagggtctgtcactgcgggccgccccccgacggagccgccccggccatgccgtcgccgccgcccgcgcctccgcccaggccggccgttaccccgggccgcgggcgcggcgtcgccgcctggggagcgctgggggccgcggccgcgaaacggacgctggagggggagggacgcgcggcgggaggcgcggagggatccggccgggacttgccggccttgctgctcccgcgcggcggacggatcc

SEQ ID NO: 32126 - DNA, 505 bp, Homo sapiens; identical to SEQ ID NO: 28640
  chr16:87526565-87527070
  binary

SEQ ID NO: 32127 - DNA, 1491 bp, Homo sapiens
  chr16:87635912-87637403
  binary
cggggagcgcggggctgggggcgcggagggcggggcgcccggggtccccgcccgcgcgccgcgccctagcctgctgggccgcgcccctcttgggaccgccgcgctccgggggcgggggcgggggcgggggcggggggcggggggcggggggcgggcgggggcgcgcgggcgggcggggtgcgggcgcgcgccgcgcggcccgagcgcgcgagccgggcccggagcgcacgccgccgccgccaccgccgccgccgccgcccgagccgccgcattgctgctgctgctgccgccgccgccccgcgcccggcccgcggcccccaatatggtgcagccgccagcgccgccgcccgtgccgccgccgccgcccgcgggccccgccgccgccctcgggcgcccgcagcgcggcagccgcaggtggggggccgcggcccgggcctgagctgccccccgcccggcctcggcgcggcgccctccccgcggggctgccggcgaggggccctctcgccgctgaggtggagccgcgggccccgccgccgccgctcctgccccctccctccctcctcccctccccctcccctccggtcctgtctccagcgggagcgcgagacgctggtcaggctccgcggcgcagctcgaaaaggaataatcgcccccgattgactgaaattcctccggagccggcgccgcggccgcccgcgcccgagaccgcgctccggggccgcgtcctcctctcctccggaaaacgctcgcgacccagggccgccggcggccgcgactctgctgtgtcgatcgcctgagtccgttttcaccgtttgcgggatctggaaccgagttacatgcatgtccagtgggggcaggtttaattttgacgacggagggtcctactgtggaggctgggaggacggcaaggcgcacggccatggcgtctgcaccggccccaagggccaaggcgaatacaccggctcgtggagccacggcttcgaggtgctgggcgtctacacctggcccagcggcaacacgtaccagggcacctgggcgcagggcaagcgccacggcatcggcctggagagcaaggggaagtgggtgtacaagggcgagtggacgcacggattcaaggggcgctacggggtgcgggagtgcgcgggcaacggggccaaatacgaagggacctggagcaacgggctgcaggacggctacgggaccgagacctactcggacggaggtaggtgccgcgggccgggccgggccggggcgggagggacgtgcttccgatcgcgccccttctgtggatctctggggaagttgagctgcgtcctccggttgggccgtgggcaccaggggcctttcccgggcttccctggaagccacggcggctcctggctacaggttgccccgctgcctggtggggacagtgcccctgtgccagctgaagggtgttgggggctttccaggggcagagccaggcggggcccagcagagcctccgtgcgtc

SEQ ID NO: 32128 - DNA, 122 bp, Homo sapiens; identical to SEQ ID NO: 28644
  chr16:88699839-88699961
  hypo

SEQ ID NO: 32129 - DNA, 303 bp, Homo sapiens
  chr16:88800059-88800362
  hypo
cgccgcaggaacacctgcacgcgtgagaggacgtccgagaagccggctgccagctccagcagccgctcagccaccaggccccacttggctgcccctgtgatggtgtgagggtcagtgcggggcacaaacggggattcccgggtcccctgtgaggaagaggctctggagcccagaggggactctgccaacgccccccgagctgggacatggcacagcagactgggtggcagctgtgctctgcccgcccaacccaccttcaggcacctgcgtggcctggtggggagtggccacgcccagcccctc

SEQ ID NO: 32130 - DNA, 192 bp, Homo sapiens
  chr16:89268343-89268535
  binary
cgggggcgtggcaggggcgtggccgggagcgctcaggtgccctcgcggcgcaggtgcactcaggttgcccgggggcgcgcgggctccggccggcgtcccggggtggtccccgcgtggggccgggggcgtccgcgcgggcggggcgaggtcggggagggcagccgcccgccctcctcggcgctgggagctttc

SEQ ID NO: 32131 - DNA, 197 bp, Homo sapiens
  chr16:89268811-89269008
  hyper
cgctcgcgttaacaattcgaatgggcacgtttctgcgtttcagaacgctgttcgcttcctcacacttagattgaggtggaactcacgtcacataaaccgggtcgcaaggctcagctcagcggggcccccccaacagtgttgcgggaccagcaccttctcgggctccggaacagcttctacccgagcagagcccgccc

SEQ ID NO: 32132 - DNA, 701 bp, Homo sapiens
  chr16:89323311-89324012
  hyper
cgcgctctgtgcaaaaccgagtcgtgtgcgggcccagggtggcgctcggggcgcttccagcgcacgtcacctcatctgcgtcgtcaccactgtcgcctccgaaagcgcattccgtcgtcaaaatacaccacgaggtcccgggtgccctcaccgccctccccttcctcgccctctcgtcgttgctgttgggacgggctctcgtcgcccgcgctggggcgcagtgactcagtgtgactcaggcctcgcccgcgctcgggctcacggagcagctgggacgacgggcgtgagcgcagaagccgcagagcccctcgcgcgcctcgcgggggtgtggtggggggtggccgcctccggggacgggcgggctgcggggctccgaccccgcggcagcgtctcgcggcgcctgaggccccggtgggcgtgggttccaggctgcacggctggtttgccgtctgggggtggtttgtgctgggacccccgcctcgccgcaaggaccgacgctttccgtatcccgggttcctgcttcggtgtaccggcagaatctgatcacgcgtggcctggagaatgcgcccagggtcgtattgcctggaaggagctctcagccgctgggggagccggaagggagacggttctgccctggacgcgggctgctcggcggccccggctctcctccaaccggccaaaccccgcctggtcccgccgcc

SEQ ID NO: 32133 - DNA, 1292 bp, Homo sapiens
  chr17:10101359-10102651
  binary
cgctgccccccaggagcgtggagctacaggtagcgccggcaagggctgccccccggggcgcccctccgaccgggacgctgcggcatccccggaacgggcaacaggtacgcgagcgcaccgaggaccgcagccccggctcctacagccccggccctcgccccttacctccagcaactgcacgtagctcgccgggaaccagccacggagcccgtcctccttctcgccttcccaccagccgccgtccgggacctgcagcagcgtgatcagctcgcccgcggcgaagcgcagcccctggccgtgccgctccccggagaaggggtacagggtccggcagcgagcgccggacatggccttggcgcccgggttcacagcgcagcctgcattcccgccgagccccacgggctgggcagcggctccgcggggtcccaggcgcccggcgctccgggctcccgcgctctgggcgcgcgccgtctctggggtgcgcgggggtcctcaggcaggcgggggacgcgcgctccgcgccgggaagcagagactcgttggcttcgcagagcgagcggcgacgcccccgggccgggcagctcgcggatcctagctctgggctggggggcggggctcagggggaggagacccaggcgccgcgggctccggagacaacttcccgggaacgcggaacgcgggctgccgccgcgagggctggccggggccggggccgggaccggggccggggccgccctggcgcgcggaaatgcgcagctcccccgggaggtgggacccggagcatcccccgcggcaggactccgcggcgggcggccgtggagaggagctggcggccgggtggccgggcgggggttagctcactggcgagggggcgggccggggcggggccagggcggccacgcccgcggagggctgcgcgctccctcgcagaggggcctgtcactggggagaggggctcccactcgcgcccccaccgccggggaccgcgggaatggaaacgcccctctgttctgtgcctgctttgtaggcctggcggcccgtggcgtgcgggcggcttcttcgaggtgtctgcgagggatcgtttgtggttgtcattgtagtggttgaacctggggttgaacttgtctcaccggaaactgaacaatgggtgaaagacaggtttgaagcctggcgcctgagcccagcagcctggtggcagcgtggcacgctggagggacggaatggagagaagacggggtcggagttgatagaattggaaacagtcgatggggataaatggaggaaaggcgaac

SEQ ID NO: 32134 - DNA, 944 bp, Homo sapiens
  chr17:15244306-15245250
  hyper
cgaaagctttgcagccaagctaaacagaaacgactttgggcggtgagagaacagctttgatctgaatttaaggagctcggtctacaagaccaggtgattgaactctcctccccgtggctgcagatctgaaggctcggctattgaagcagagggggacgaggaacagcgtgcggggcggccagcaccgcagtggaaaggcacagcgctgctaacgggtaattattagaattaagaaattaaacgaattagcacagtgtcgggggttcggatgccccttccctgggcatcccttgaaaacccttgaaaagcatcagaaaggtaaattacgaggaaaccaacgtctgggtgggaggtgcctgtggatttgtacggtttttatttggaaggaaaagtgaagatcgcggggaggaattgcagggtgtccgcgacctcccgcgatcctgaggcgagaagttggagtcctggttggcgaagggggatcctttggggtagtcctagaggcaggctagagtcagcgagaccactcacctgtcggcggatgcccggcgaggggcgggaaggggctgtgggaggaaggggtcgcagcctaccacctgcagccctcgactggggcccagaccagtctggccctggccccgcctttcctatctgtgacgatagcagcgcctgagggccactcagcggccgccccggccggctcgccggagctgactggccagttataggagaggcgggagctgtcaggccaggagggaaacccgtcgggcggcggttactatggacgcgctcacgcttagtaaccgaggctccccgccctccgggagacctccttggtttgggaggtgaaaggggtgaagagtagcccaagggagaggcctcggtgatttcccgacctctcctgtgaagcctgattcggaactcttccagctgcgaagaacttggcc

SEQ ID NO: 32135 - DNA, 735 bp, Homo sapiens
  chr17:1901335-1902070
  hyper
cgcctccgccccaggccgcgatcgatcccggcctctcccggcctcattaccgagggagagctgccggggctggcaggggagccagacggcggcggagggggcggggaggcctccttggctccctggcccggattaaatatttactatgttttgtttggcctttgggggaggggcggggagggctgtcgcattgatccggagctgcagggcgagggcggtgcccagacccggcgccccaaggcctcccgcaggccgacccgagccgagcgcgccctttgggcaccggccccgcccgggagggtcttctcgctctagagccgggggcccgcgctgagagatcggggttaccgcgcggggagccgcggccgcgctgggatccgttccctctcgcgggagccgccggccggggatctgcgcaccccacgcgccccgctcgggtcgggcctcccctccccgcggctgcccccgggccggccaccgctgcccagcgcgcaggtccctgccggatccccggcggctttcctgcccccactttacagacgtgaacgctgaggcggagggtgggggacgtggggccggctcgcctcctcctgggctcgccgggatgtggcctccgaggtcgccgcggcgctttcctgcccaagctggcgctgccggagcgcccgggccccgctcccctcacgggcctcgcagcacagacggggacaggggcggcctcgcgcgcacggggacccc

SEQ ID NO: 32136 - DNA, 879 bp, Homo sapiens
  chr17:19770530-19771409
  hyper
cgggcggctagccgagtcgggggtctcggctcgcggctgcgccaagtttcagaaccacctagccccgtgcctgccgcccggggcccggcctcgccccggccggcgctcacctggcggtgccgcccccggaagaccacggcgaaggccccgtgtcccacgagatccctcttgctgtactcgaagtcacccaccacctccatggccgcgcccccggggcacacagcggacgggcgggcggcgcagtgcggcgcaggtatcagcaccgcggctccgcgggcccggagcgcgccagcgtgcggcgggtctggggcagccgcagccccgggcccgggcggactctcatgccgagagaccggagcggaaactggggaagctgccgcgcggagccagggtcagcgaggcccggcccggcccctgccgctcatggcccggcctgccgccggccgctggctgtctggcgaagcggcctcggcgctgccgggccaggggtgccgtcaccgtcactgtgcgcgcccagagccgcacacgcgctctgaggcagtgaggggcccggtactctccatccccagctcgtcgggcctcctcggccctccccgctcggggcgctgctgcgacggcgacggccgccgccctagaacccgcaccgccgcggccccgcgcttccccgcctcgcggcggcgcccaacgccctcgcgcgcgctacccgctcccgcgcgactggctgccctccgcgacgtccgcgcgccttgaaggccgcagcgccagccggctccctccgccggggaaaggagtgcggccagggcttggcgcccgcagctgggcagatcctcggccgctcctgaggcggggacgaagggcgcgacccgctgcggccacagc

SEQ ID NO: 32137 - DNA, 499 bp, Homo sapiens
  chr17:2658616-2659115
  hyper
cgagtagtttacttctttaggcatcacttcctgggtagaacgggtttcctaagggagtaaggcacagaacgaggcaatgggccgcctggtctctccgcgcgtcagtaggactcggggaaccagactccgcccagtgctccccagaaacccggctcctcggcgcggcggggagagacccggacggggagaggccgctgtcccgcccgttctgcggggccggcgctgacccggctccagccgcctccaggggcggggtctgagcgccgcgccctccccgcgccctccccgcgccctccccgcgccctccccgcgagcgcgccccggacacccgcctgcggcagccgagcctcctccaccgtgcggcccgcggagggcagggagcggccgggcgaggcatggcgggccgccgggcgccgggggagaagcgctggcagctggtgcgctggtgagtgggcgccgggcggcgcggggcctaatgcgggagcgaaccccgaggccc

SEQ ID NO: 32138 - DNA, 511 bp, Homo sapiens
  chr17:2659225-2659736
  hyper
cggtccccaccaccccgcgtccccgcgccgggtctctgcggctctccaaagagatgggcgacggggaccctgtgcgagccgtcaggctttgggggaaccccgtccccctcccgcgggggcgccctttccctgcacttcacctttcacgctcgcacggggcttccgccttccccttcgcccccttcaggtttcccatttgtgcctccctccgttccttctgccacccggggcagggctctggacttgggccccgagaaggcaccacccacagcccccaacccctgcgtggaaaggggtgctttagccccgaaacacaggagcccctgggggtgtgcactctggggacagggcgcagagaagggggcctaggagaccagggcaggggaggggtccccgtgtagcggggcagtcgccctttccccctccgcagtcctggcccgctgggaagtcagagcctgcggtgtcaggttaccggactgcaagctcagagggtttcagacgcagcgctgtc

SEQ ID NO: 32139 - DNA, 778 bp, Homo sapiens
  chr17:2756263-2757041
  binary
cgcagcggccaggcccgggtgggcgcggggagggcggagtggggggcgcccggcccgccaggaggaagcggggtcgccgtgaagttggttattgaacccatgtggagtcaaactcccagggccgggagagccagtgttcgcggggagccgaccccagcccactctgcatcccagctcggcgatccttgcgccgactctgcggggaggcgggggcagaattccgcctcgttcctcccatccgcaagctcccacccggggacccgggcccgggagctgcgagccggggcgggcgccgggctcaggtgccccctgtaagcgctgggcggccgggaggggacggggaccgcgcgcgggcagtttcgtttggacggaggaggacgcgcgtttcctcttggtgcctgttttctctccctctgttttaaaagcagtgacagcatcggggaagtatccggggccgggccggggagggcggcagccgcctctgcctggggagggagctcggggccgccggcgggagtgcgggcggggaccagaaggagcgggcgaggggaggcagggccggggccggggagggcgcctgggagccgggcaggggggtcccgggagcgctgtccgcctcctcctgcgcttcgcccgctccctgtgccccgcgtcctccaccatccgggcggccgaggccggggcgcgggaggcggggccggggcgggtcccggcgcgggcggcgcgtctgagcgggagccgggagccgccggcccgggccgcgccccgagcgagcctc

SEQ ID NO: 32140 - DNA, 1807 bp, Homo sapiens
  chr17:31618626-31620433
  binary
cgggcgcgcggtgcggttgggcagcagcagcccgagccagtggccggcatagtagaggtcccccttggagaggcgcgggaagcgcagcgggttgttgttgcacacagtgacggcggggaagggtaactggcggctccactcgcggtgcacccgcgtgtgtgacgggaagctgagccagtagagcaagcggttcgaggaccaggacagcagcaagccgaaggatgtacagaaggccagcacccacagcgcccgccgctggaaggagcccccagccgccgtgcgcccggcacacatgtgccgcagcccgtgcagtttagcgcggctcagcgatggccgccccctgcgggcgacccctggcccctgcagcgcccgctcgccgcctctgccgcccccgggctgcccggcagccgccaacgccgcgggcgccggctcctcgcgggccatgcggaagcgtcccgggccggtgagcgcggctgcgggcagcccggctccgccaatccggctcattcattcagcccgcggctggcggcagcggcggcggccccggccgggcggagccgccatgggagtccgcagcagcagtggaagcagcagcagcggcagccgcgcgcagcccgcgccagggaagcgtgcgcccgaaaggagctccggtggcgcggcatgcccgcccggcgccgccgctgccgcctccgcgggcgcccgcccggggctgagcgccgcctcagcccgcagcccctggcagtggcctctcccgagcgcctcccaggctttcccggcccctggtcttcctggaggatgcccggcgcccggcactacttctggaggggtcccactgggagccgcctctccagtccctgggtgctgcgcccgccttccctcgtcctggacctcgggggaccctgagccgagtcccccctgccccgcctaaccccagcttttacgctggtcctgggagaagggccactcggccaccatgcctgatctggacatccccagggaccccaccagcccggcccgtagcccagcggtgctgggacacgggagagaaggcgccaaggaacgagcgcccccagaggcgcaccgcggctcctggctgggcgggcggggtgggtgtgtacgggggtgagtggtcgccttgccggctgccgccttctttcccttcccctccaggacccttccttgttactgctccctgggctgcgctcggcagagacctgcttaggcttccccaagtcctgcgcctaagtcctgccaggcgcccgctctcgcctggggctgagagcttctcagggcgtcctgcgggaggctgttcgccgccggggtccttcaaggatgctagccgcagggaagtgtcgcttctcgcctcggctctcccaggtgcctcgcgtctccagaaaagcccagccttgctgtctctcgcgtcttctctctgcccccgcggcgacaagagctggggactgcggggacccgccaacacctcccgggggtgacccggactcgctgctccgcgcgcccttctcctctcgagactccgagctcgcggtggccgtgacgccggctaagctccttccccggttgcccgggagaaccctctttgggccccaggcgaacttgggcagcggccgcgcgacgctggcgcggctgggctccgagcacctgctcctcagctcgctggccccgcggctccgggcgggcggggcggcggcggccgtgagcgccgtgcgctcctggagacgcggtgctgacgcgcccggctcctcctcgctgcattttaattcctggccactgtggccgctgcacaccgagc

SEQ ID NO: 32141 - DNA, 992 bp, Homo sapiens
  chr17:32906886-32907878
  binary
cgcggcgatccgctcgcccaaactgactcggagggagcgggagccgatgcccggcagcatcgagacagcgggcgaacgggcgtccggggacagggtgggggcggcggggaggaggcgtcggagactctgaaccccagaaaagttcaaggtttgtgcaggttcccccagggaaggcgaggagcgaggcggggcagcgcgcctctctgccgagacagcgagaccttagcggggtggcccggagctgccgtgagctgcaggagcccctctgcatcttacagcgtttatggtcatcaagctggagtcgacgtcctgggcaggaagggctcggggcagggcgcattagccggctttctcgctccctcgcttctccaagccccatctacatggggcagcccgttctggccgcgccacccttgccccagccgccgagcggctgcctgggcaggaggcgctgagccggcctgtgtggagcctgggccctgatccagactggagaaagcgcgctggagcggaggagcgagccttgcgaggggacaaacatctggccgcccgcctcgggcatccggtctgggcgtcgcctagggtggtggcgaccggcgtcgccagtttcagcaccgcacggaaacttttccttctccagatggattaaagttgtctggattttctctttctttgagaaagacagcattcatttgcacctgacctgggatttttatgctgggctgctgcaggggcttggaggaagaaagcggcgctatccatgtgcggttactaccgaaaccgaggaaactggggattgcgttggaagtcggcaccctcgagtgagttcggattcgagctgggccgtgaggccgggagattcagcactgggctctaggtagcccccgggacgcccgcggccaccgggctccggactgcacgtgcagctccccccgcgcctcgcagatcctgcagggggcaccagctgggggaggtggaggctcctcccgccc

SEQ ID NO: 32142 - DNA, 1407 bp, Homo sapiens
  chr17:32907885-32909292
  binary
cgcccccaccggctccgagggtgtagccgccagcgcctgggacgccccctccccgcaaagtgtccccgaattgcactctctggtcccggagctgcatctgagacagccgggcgccacggcagccctgagttggatgtgaccaagcccagcctggggccaagtcgtcgtcgactgttgctctctcggacccctcccgcccccgcctcggccatggccccggggatgtcgggccgcggcggcgccgccctgctctgcctctcagcgctactcgcccacggtaagtgtcgcggcgcggactgggggtgaggatgcggcaggcgccactggagggggtacggggaagactggggagaggagcacccacaccccctggactcgcagccgccactccgggtttggcgtctctggctgcagctcgagttaccgccagcccccgagccctccggcgagctcagctgaggggaccgagcccggcgccagaaaagggtggggggagggtgtcgctccagtcctctcctggttataaagaagggttcgaacccgaaggtctggggtcgtgtccgcccacggaaatctagagggatccgagggatcctccggatcgcgtccaggccgccccccgcccccgtctctccctgcagccggccgggctgggggctgttgggatccgccgggatcgcgtctttcctcgccccgggcgcgcaggccggtgcggggccgcgccgcccgtcgcctcgcttcctgcggcggtcctcgggaagggaagtggactgactccgggccggggagccgccgcggctcgcacgcccgcggtcctgtgagctgcatctaaatggccggcttaggcgagcccggagggcgggggtctgggcacccgcacaggccggggcggtgggccgcgggccgcgcgcggagggagcgggctccgcgctctcgcattctgcaatctgttgcgtctgctccccaggctcgccccgggctccgcggtaaagggggtgggagaaggagggattgaggttggcgcgctttggcggtgggacagcgggcatacgggtggggggcagcgggtttttgaacagcccccaagaatgggaaatcagaccagagggaaggaggctgcagcgggccttccgcaagctggagacgctccaggaggcgaggggagcagaccgaggtgggagggagagagctccgaaaggagagtggagaagcggggccctctgctccctcctaacgtgaaaccagccgacctgggatacattttcttaaccagcaaggcgtggcggggttggggggcgggggtgtttcgatgctccacgctgaggggtgagcctcaggcagaatggagggcgcttagatggagggggcagtgggctctccgcattggtggagcgccctcggtgtgcc

SEQ ID NO: 32143 - DNA, 1366 bp, Homo sapiens
  chr17:36101946-36103312
  binary
cgtgtgttcaccgggaagagccgggagagctggttatttttgtttgtttgtttgaaaacacagctcaggttcagaggttccctaacacggagaaaggcaccggtcccgaagagggcctgcggccattgtgtcccaagcgcaggtgtcaaacgccggccgcggcgcccgcagggtccgtcccgcacgctccttctcaaacaatgactttgctgcccacgagcagagaagcctggactccagcgcagtccgcagcgcgttcgttaaggagcccaacttcggcttcttagaatgcagcccactttctagacgcccccggcgcacctgcctcgaggccgcgagaaaggccagctccggccgggagccggggaccgggaagcgcgcagtcccgaccttcctcccctgcctttctcttccaggaggtttactagaactccaggaactccaaaacgcgacttttctttctctttgcttttcgtcttaagggaacacggtgggcaaaagaagggagtgcgtgtgcccgaggcttgggagccccctgtgcagtgacctaggaaccgctagcgatttcttgaaaaattactttaatcaagtccggcgctcccgggagcgggggaggaaaggcagcacccgctcgggacgggagaaaaaagcctccaggtctgtcccgcgtctccaactcggcgagggtctccggctccccagtccctctccctgccctgctggggcctggggctttggggagggaagagcggggctggggtctaaggaccctgggccgggcctggctctccgccggccgggcctgcgggtgtcggcgacccgggggctccgcgggcggctcgggcgctcacagagcccgcgtcccgcgccagagcggtgaggccgcggggccgcacggggcgcctggctgggtgcgcgctgggagcggcgagcagccccgcgcccgcgttttgatctccttcccccctctaagccgcgtttacaacttcaccaatgaataacccgcctctcttttcaacctaatcacggctctttgtgtatctttctgttgatgatttatagaaataaattaataacaccccaactccacgtgctgcagtttatgttacgtctcagctgcggccagcccggcgcggggctgggtgcggaggggcgccccaggtccttccagcgccgcgctagaaagcgggcgcctgcggccgggtgggagggcctaggccctgtggcccccggtggccggcggtgggagcctggttcatccgccaggtcctgagcgacctccccggcagccctggcgccccagccgctcctaggggccactctctcgacccctcttagcctccgcgactcacaccttccgcctcgc

SEQ ID NO: 32144 - DNA, 1103 bp, Homo sapiens
  chr17:39683530-39684633
  binary
cgaatgggccccagggcgggagagtgggaggaggccaaagcctgagagggatgaacactagacccttccggccagagaaacggaatgcaggaggccctacgctgcggtggcagagggggcaagactggccccgggtggaccagatcaccaaagccaaactctcgcatcttcctgcggcagcgcggcccctggcctagacctctgggcactctacagccgggtcccatctcctcccactcttcaggcctcgctgacccgcgtcccttcttcgtcccggggctccaaccttgcccccgccacctccagaggccccacccacttatctgccctgcccagttctcctcccctttccaccaccccggcctctgcatccagccccgaggtcctgccccgcacgtctcctgtccccctttactcggccccacctgtggaccttcccacgtcctaacgggctcctgcccgccgccccgcctggaacctcgcccggcccgcggggctgggtttccgcggcaggtgcactgcacttcccgcggccgggcctccgcccaccttgtcccgcaggtcctggatggtcgtgtagtagtggctgtagtcgcgggagggcccaggcccctgcttctggtaccagtcgcggatcttcacctctagctcgccgttggccgcctccagggcgcgcaccttgtccaggtaggaggccaggcggtcgttgaggttctgcatggttagcttctcgttgcccgccagcagcccgtcggacgcggtcaggacgccgccgtagccgccgccgtaggcccccgaggaggacgaggacacaaagcgggcggaggacacggatacgccgcggccgccggagcccccgtgaatgctgggcgcgcgaaaggcgacccccggcccaaaacgcacggagccgccgcccaggcctccgaaggacgacgtggccgacgactggcgatagctgtaggaagtcatggcgaggcggagcacggacggagcaaccctggtctcagaagctgcgattcgcgggaggagcggcgaggccctcacctggcgccttttatgcccgcggccggtggaggggggaagggaggaatggtgtcaggggc

SEQ ID NO: 32145 - DNA, 523 bp, Homo sapiens
  chr17:42061046-42061569
  hyper
cgctccccggggccgggtcttaggcgcacattggctcgcggtgcacgtccactctcctgtaggctcgtgcccttgacatatccggggctgtcacagtcccatgccccgaccccgaccccgcgcgagtctgcttgatgacgtcgctgtcgcaccccaccggcctccccgggtcctccccaggcgcgcgcaggggccgcgtgtccggtgccggccgggctgagtgttccgaggcgagcggctgctgtttgcgcagctaagtggcgtctgtgtacccagcggggcgcagcggtcgcgcgcttatctcccgcaaacaccgcgcccggatccgccggaaccacggccgcgccgccccatttgcacgccccggccgccggaggcccttatcgcccgcgtttatcgggccatcgctgataagaaaccgagggggcggcggggcggcccctctccttggatccaagaagcgatggggtcgctgttagggggggcgccagccccggggatgcggggagccttcgcagcctcc

SEQ ID NO: 32146 - DNA, 400 bp, Homo sapiens
  chr17:44919021-44919421
  hyper
cgggtaggggctggccgggagcaggaccgggaggaactggaccctctggactggggagtgcggggtagatgaaggcagaggagatggaggttctgcagtgtgaggcaggcggacagggaagcctgcatccagctgagagaccttgagcaaccacgtcctcctctgagctccgcgtttgccgtgtgcaaagtgaaggggtaggccgaccccgcagggcccttcttgcgctcctctgcggtgtgtgggggggtctctggtccgcgagaggacagtccctgccgcgccgagcgtcctccagcgtccgcggccgccgcgagcagcgctgaccggcagggggcgctcctgcagaaggctggccgcggtggcgccctcggcggggcctgggctggcctggggaccc

SEQ ID NO: 32147 - DNA, 476 bp, Homo sapiens
  chr17:45500788-45501264
  hyper
cgtcggctgcgcccgcggcccggggcggagttggccaccgcgcctggctgcgggcggccgggcgaacgggctcggcgcgcaggtggctcctccttcgcttctcccgatccccggccgtgccaggcacggtgccggctgccgagggaacgcctttgtgcccggtcctgggaacccgcgacggccgccgcgcgccccggtccattgtttcgcttctctgggttccaggtaggtgcgggcggcgcgcggggtccgcacgacgtgtcaccccggcggttggggcgccgggacccgcgggcgccggcaggggcgttcccgggcgcacggcggcggtgcagcacctgaagcggtggtggtcggccagcggcggcctcctgcacctcaccctcctgcaccttaccctcctgctgagctttgctgggctccgtgtagacctagacctttacctgctactgccgccgcccaccctgctccgggac

SEQ ID NO: 32148 - DNA, 840 bp, Homo sapiens
  chr17:46832102-46832942
  hyper
cgcgctacgttaacaatgtcgcgtacacgcccgaaccggaggaaccccattccacgctccttctggaaccgaattcacctctgaggctttggggcttcagagccggagccgcttgggcaaaaccagcagaacagcgagagggaacgggctggtctagccctgccctgagcatttctactgagacccccggtcctgcttcttccagcctctgctggatttctctccgacccctctggagcgaagccctttggccctgcgttgcatgcggcacggtgcgggttcgggctctgcgctggagccgggatgccctccggcggagggtgcgcgtaggcggcgcctgggcgtgagccccgcctgcaaggctcagcgtcggggaagcacttttctcgtcgacccggggtctttttccgccaaggagctcggggctcaagaactcgggactgggctgtgggcggggcatggttttcctctctgggcgtcctaatctccaatttcaggcaaattcgctaggaagaaccttcccgagcgcgccttctccaacaggacctccaagccagcctcacgcacgcaggcctggctctctcctgcagaatccccacctgccctataactacccacttcagatatgggggaatggaggagatattccaatcacgccatctacctacagtttccacggccccttctgttgaatggtattttcctttagggtccctagaagcagagcaaatgaaaaggccagggggaaaaaaaaaaaaaaaagaaagaaccggtgaattggctctgagcccaataaacggttcctctttccttctccggtcctttcccttccaacagagc

SEQ ID NO: 32149 - DNA, 507 bp, Homo sapiens; identical to SEQ ID NO: 28666
  chr17:4795549-4796056
  hypo

SEQ ID NO: 32150 - DNA, 715 bp, Homo sapiens
  chr17:48711989-48712704
  hyper
cgactcctggactgttagcctcggtatttagagagacatccccctggcttggcccaggggccgctcgcaggggctgtcgccgtgccaagggcccccccacctctgccccaaagtccctcccagggaggcgctgtcgcaacccgcgggacgggggcagggagaccggacccagaggcactggggtagggctcggcagggcgggtccgggcggagcgcggggtgcggagggcggaggcggctccggcgcccgctctgcccgccgctgggtccgaccgcgctcgccttccttgcagccgcgcctcggccccatggacgccctgtgcggttccggggagctcggctccaagttctgggtaaggcgcggggctccggggtcactgcgcgggggccagggtcggccggcttcgcccggtccccgccgcctgccttcccgcggggccggcaggtatcccgggacggagcccctgagacggcctgggcgcccgggagggggcgatgggctcgggagggaggttggctgcgccgcccggagccgggtcccacgcggtgtcggggacctgccctgctctgcccttcccggctgcagcactggggagcccgggaaagtgaggaagagtgcgcggctggggcgcaaaggcacagtgcgtggctgggtgagtcggctccatcccagcccctccgtcgggtgcggaaggggcgtttcgcaatcagccgc

SEQ ID NO: 32151 - DNA, 746 bp, Homo sapiens
  chr17:52977560-52978306
  hyper
cgcacacctcccctcccggatctctaggacaaaggcaggtcgagggtaaatatttctagttattcagtatattcagtggctaactatttattttgtgggtaccagacaccgacataatcggttacgtccttcccttaattctcataattctgaggtttgtgttattaaccccctattatctttggtctacccagggcagccaaagaggcgcagagaagaatgacaaggtgcccagcaagcggcaggatcaaagcctgggtctctaattcccaggctggagattctgggctgcctgctcctcctgcacggggcgaaaagcccacctgggatccgagcgggcggccgcgccactctcgcaggctccatacacccgccactacccgcctgtaccacctgcagccggcagcgcagcctcctcgcgggtcccgcagggcgcgctgcaggtgcgctgggcgtcccgaagccccgccctcgcgtccctgccccgcgcccagctcctcacgctcggtgcccgcgccccgcagcggcagcgcagaacgcaccgcctctgccagagcccgggaagcgctcgggcgaagaggaggagccaagggtaccgagcgggtggagtcgggagccggagagcggtggaggcggatttcctgggcccggccctctggcgctaccatggcgtttggcaagagtcaccgggatccctacgcgacctccgtgggccacctcataggtaaggaggcgcggggagagac

SEQ ID NO: 32152 - DNA, 1282 bp, Homo sapiens
  chr17:53342198-53343480
  binary
cgaaaatcggcgcgagcggcgacgctaaacacgcggcggcggggcgagcgggccaggcgggcggtgccgcgcgtggccccgcccccgcacgcctatgggcgcgaggtgcgggccctgacgtcactcttgtcagggccgcggcacatgggcggccggatgcgctgagcccggcgctgcggggccgcggagcgctggggagcagcggccgccggcgcggggaggggggtggggtgggacggcgcaccgcctccggtgctggcactaggggctggggtcggcgcggtgtcttctgcccttctgcagccgtcgacatttttttttctttctttttttcaattttgaacattttgcaaaacgaggggttcgaggcaggtgagagcatcctgcacgtcgccggggagcccgcgggcacttggcgcgctctcctgggaccgtctgcactggaaacccgaaagtttttttttaatatatatttttatgcagatgtatttataaagatataagtaatttttttcttcccttttctccaccgccttgagagcgagtacttttggcaaaggacggaggaaaagctcagcaacattttagggggcggttgtttctttcttatttctttttttaaggggaaaaaatttgagtgcatcgcgatggagaaaatgtcccgaccgctccccctgaatcccacctttatcccgcctccctacggcgtgctcaggtccctgctggagaacccgctgaagctcccccttcaccacgaagacggtgagcgctgccgcggccccgctccgggaagggacgacgctccgggggtccccctccgcggccgggcacgcccgctggagcatcccccaaccccgctcccgccctgtcccgcggcgccccggccccgcgctgatgaaattgaggagctcacccagcacccttcctccccttcctcctcctccatgaaaggggagggacccctcctgagctacatttaaaagagcttcgggcacccggcctccctgggtcccgctcctgcggcgcgggtgggaggtgtaacttgacaggtcaggatcgttccctagaacgaggcacacccgcacgcagagcgagcccgcctgcggagggcagagcctcccgggctggggaggagaaaccctggggcctggttctgtgcggggcagggggcgggggtcggcttgagggagggggtttcactgcgtagcctgggttttggggttgtgttacagcttctgttactggttagtatttggaactcacgaggtgtgagagaagactc

SEQ ID NO: 32153 - DNA, 838 bp, Homo sapiens
  chr17:54673516-54674354
  hyper
cggaagctacggtggtacgaactgaggcaatcccttggaatcaacaaggctcacagcctccgggatcttgcaggtccgagccccgaaatcccaggccctcggccggaggtgctggggatatcagggagatttgacactggcctcccctctccccggggacctaaggaagactaagggccatggtttcggaggggtccgaatctgggtgaaaatcaccacctctggcatctgcttttgggaagagagtatgcctgtgctcgggcactttctccccttgaggggtggggaggagggagaaatcggaaccggaatctttgcgctttaagattagataggggcagaaggcacgtaacccattaaagggacgtgcaaaacatcactcccaccccaccccttaaaaagccaactccttgggaccgacgcctgactctcgcatgcgtccctccgcctcagtccccagtggcgcccgtcctcacagctccacgtgggccagcctcctgacactgctcagcgctctctttatttatcttggactccaaagtcgctctcctttgctccctccccacctccctgccacctctccgcgcctccctcccggcgttccttccaccccaccccccaccccccccaaccccccaagtccggagtcccggcgaatctatgctaattatttcaaacctgcgcctggtccccagcgcagtctcaatgcccccggccccgcccgccctgtccctccagcccggcgctttcttccctcccgacgcagcctcgatggctcctcatttcaatagcctggccccggagccgagccccctccccggcgctgcctccgtcagcc

SEQ ID NO: 32154 - DNA, 542 bp, Homo sapiens
  chr17:54674753-54675295
  hyper
cgggccaatatttttttagacagagtttcacttgcgaggggcggaggtggtggggagtggggaagaggaggggtcttatgcgaggggggcgaaagcaagaattttcatgcctggtaaacacgcgaattatgcgaagagagttattcccagctgggcgggcagccaaaactcggagagcgcgccgaggccagcgcccccacccccacgttggcaatgtcattggattacaatgcgaggtcttcccctccgcgacgccccctcctccctccgcgggcccgcccgcccgcgcccctcctccccacccctgcccacttggaaaacccgcccgcagccggcgagcttctcggctttcagagcaggagccggtgtgagctgggaggacgcgggttgcagacgtgaccggcgacagacagaccaccggatgcacagaaccagagagcaggcccgaagccgctgcggccgcgggagaggacccagcgggacccaggcagtcccagaagctaacgaaggaagtgctggtcctggaacattgtgcctaatgc

SEQ ID NO: 32155 - DNA, 752 bp, Homo sapiens
  chr17:5973290-5974042
  hyper
cgggatgtgtgtgtcaggcagtgtgcggctgtcgctgtgagtctgcatgggagagtggcggcgtgctctcctctgcgcggcagtgccccgtgtgtttgtgggtctgtgtctgggtgtgagcgtcatggtgcgtgtgttagagcccgtggggccccggtgaaaggctgtggctctgggtgactggtgtgtgtgtgtgtgtgtgtgtgtatcagagtgggtggcggcgtctctgctcggcagtggcgcgtgtggcccgccccgcgcgcgtgttctcgcgggccggggcagggcgtgggccccctccggcggagccgcgacccctcccccgggcggcgggaggtgcgcaccggcgcctctaggacccggcggcggccggccgctgtccccgggccgcgcgagtgagcatgtgcagagcccggcgcccgctcgcccgcccgctgcccgccccggctccgcgcccgcccgcccgccccgccgttcagcccggacgccagcagccccggggagccaggcggcggcgccctgtgcccgggcgcgtgggtccgcttgccgcgggcggccggagacgtgcgggcgccggggcttctgggctccgggcactgcggggggctgcgggctcggcgcccggggaaggcgggccatgggcgcgggtgcgggcgccccagccggccgcgatcgcggggtgagtcctgtctctcggcgctccagccggacccccgcgcgggctgcgagcagggtgttccccttgccgc

SEQ ID NO: 32156 - DNA, 669 bp, Homo sapiens; identical to SEQ ID NO: 28672
  chr17:64187889-64188558
  binary

SEQ ID NO: 32157 - DNA, 675 bp, Homo sapiens; identical to SEQ ID NO: 28673
  chr17:64298985-64299660
  binary

SEQ ID NO: 32158 - DNA, 445 bp, Homo sapiens
  chr17:64831021-64831466
  hyper
cgccggcccccaactcttcacctgccacccccacaagggtgctcaccccagaggtgctcacctcccgggctgggagaccgcatctgaccggtcccaaaccccgcctgcagctggcagcgccggggtggggaggccccgccctcggccccgccccctgcccgcccctccctctcggggtccggggcgcgagctgcggcggcggcggccacggtcattggcgccgagcggttccggctgactggacggggcgggcgtcccgggcagcctagcgcggtacctcccgccccgcgcgcccagccggcgagggacattggaccagggtcgggggtcgcggccgctccagcgaggtaagagccgggaagaccgggagagaccacctcttccatcctgggggggtccctgggggacggtctcccaccggtgctgggccgcggcgccgggctgc

SEQ ID NO: 32159 - DNA, 1483 bp, Homo sapiens
  chr17:64960741-64962224
  hyper
cgggccgaggggggagggcgagcggagagggaggagcccccggccgccgccgccagcccgcccggcggccgcgcagcccgcactcgtcgccgcgcctcggagtttgagccccagcgctgccggagcgcaggcacgcccggggcgcggggtcggagcgcgcagcgcggcgccgccccccggccctcggccccccaaccccggcgcccccggagcggcgcgcggagggaggagggcgggcgggcgcggcgggccgggccggcgggcggcggactatgaggcgcccaccatggtgcgatgcgaccgcgggctgcagatgctgctgaccacggccggagccttcgccgccttctcgctcatggccatcgccatcggcaccgactactggctgtactccagcgcgcacatctgcaacggcaccaacctgaccatggacgacgggcccccgccccgccgcgcccgcggcgacctcacccactctggtctgtggcgggtgtgctgcatcgaaggtacggccagccccgacccctcgccgccccacacacacacacacacacacacacatatacacacgcgcgcgcgcgcgcgcgcacacacacacacgcgcacacactgcccggcgcgcgggccggggagagggtgggcgcggcgctggctccgcgcgagacacaaaggagccggagctggcgggcgggtcccttcgcggccagctgtacatcagctctggtccctctcggctggggacctccccagcacaccgatcccacaaactctccacgcgcacaccccctcgcccacagacacaatgaaacacaccgaaactcaagcacgcgcgcgtagcccgggacccgagcgatccccaggggccgcgccggcacccccgggggaggtggaggctggcgagggggcgggaggaggctggggttggggggagcggacgggagggggggaggggttgcttggcaaccggtgtctgtgctattgctatgggaactggccatcctggggcggggccggccgggggcggggcgcgtcggtgccgctgggcgctttctacaggctcgggctgaggggtgggggcagaagtaggggcagaagtaggggcgggggcgcggtcggagccggggtaggggctgagttcctagcggatctagggtagctgggtaggcccagcccgacgcccgcctcgtctcccacggagtcaccggcccgctcctcgctgtgcggtggggtggtaaggggagcgacaccgagtctcccccaacggagacagcgacctcggtcgcggcccctcagcagggaggctgcggagacctcagtaggaaactagggtgtgcaggaccgatctgcggaccgggaacagactgggaggggcgtggtcatctcgtcggagctgggcgctgcgacccccaaatgcgactggaggctgagtagtaggtgtcatgaggctggaatgctaggggaccaggatttcagccccgggacc

SEQ ID NO: 32160 - DNA, 1301 bp, Homo sapiens
  chr17:68164458-68165759
  binary
cgactgcgccgtccacaataccagctagtttgctgaattagttcagcgactcaaggaggccttacgaggtttaaataaactgcacaaaagacacatttgatcgctcgagaaaataaacatttaaaaaactcagtggaaagaaagactcctaaaatatatcctgtcctttaggagcaaagcttcgttaggacaccgaagtactcagaaataataggcacttactcttcggtttacacacacacacacacacacacacacggattagtttataaagttccaggatccagacccggttaacactgaagttgctttttaggggtctgcgcgctctcgcctggctgctgggaaggagggctgggaggcgctgaagcgagggcagatctgagtgtctgtaggagttgctattccaaaaaaaatcattactctctaattgttctgattttagatcagcaaagcgtgccgggcggtggtggagagactgagggcggacaaggcgagagggaacgagccgtccacccttcggagaagcctaggcgccttgtaagtaattcgcgaacagtcgggagaacaaacagccaagcggcgctgcagtggccgcacttgcgcgcgtctcaatcctgggggctctgcgcgcccgccccagtccctcgccccattgactcagtggcttctccgggcgctgcagcctccgcggggggcttcgaagggccgaggggctccggcagagagggagtggagagggagacgcgccgggaccgacgaacaatcctgcccctgcggcaaaggtctctacccggcgctggcacctcgcaggcccctcgaggagcacgcagggcaagcggcccaagagcgggggaaccgggaagtgtgtggggctccagacggagtaggaagctttgcccaaggccaggctgcaatcaggcagccgcaacagccgggcgcggagcttcccacctgctgctgtcccagctgggccgcaacttcctcctccccggcccgggcccgactccccggccgggctccgagggtggagggggacgaggcggcggcaggttccctccgctggcaacgcctcgcagcatcctcccctccccgccgcggttcccggggccggccgcgcggccaggcgcgctgcgattggccggcagcggccgggggcggggccaggagagccggtgtcgcacggaccgcctcaaaagagcccaggatattgcagagcgcactggagccctggccagcgcgcagccttcccggcgccggcgggctgggtcttgggaattctggtttgctttggctcactc

SEQ ID NO: 32161 - DNA, 907 bp, Homo sapiens
  chr17:70588172-70589079
  hyper
cgcttggaggcagggggatgactaaaatgacctccaagaagatgtcaattacaagaacaaaaatttcaacccggaatctcgagaccttcgaaaaacgacgcggaggaaaaaaggaaagaaagaaaagaaagtaaatcagatcccttccccgaaccgcagggaaacttacctccagcttggcgacccagctgttaagcagaacaaatcaatccacggatggagaagaggtcgtgggtcttctgagcccagctgatacacaccaagtaatccacgttaaggggtccgcagccccccacccaattccccactttccatccaaggccaaagagcagccagaccctgtcctctgcgctccagactcgcggaggtcgcgggcgggggtcctcaggcggccgccttctcgtccccaggggtgggcgcgcgacgcgggcagggaccgggcgcccggaggaccaagcgagcgcatcccgcctactcgtgctgggacatcacccagcctggacgccgctcctcgcctttcttccccgcgcatcgccagcgccaaccaaagatccccgccgggaaagcctctctgccaagctggaaagcgctgaaggcggatcgtctctcagacttgggtttgcaggttcacaaggcccgggaggcttacggtgggcgcctgcctaacagagggtccttgcggagaagcgcagaacgacaaatgccagaggcggtgaccgcgtcctctggataccagcgccgcaccgcgcacccgcgccgcctgcgcgccctgcagtcggctgggccattcggcccttatataccaggcggacccgcgccgggacggggcggagcggggtgggcggggagggggtggggaaggccgaacggcttcctgggagtcgtagttcgactacgtagtcctgtc

SEQ ID NO: 32162 - DNA, 678 bp, Homo sapiens
  chr17:72352836-72353514
  hyper
cgatgaggtgcaggtgcagggcgttctcaaccaggtactcggagttgcgccgctgcaggtcggcgtgcgccaggaagtcgccggcctcctcgctgctctggtggaagctgtaggcgtggcggaccagcaggcggccctgctggcgcgcccccaccagcaccgtcttctggaagctcacgcccgccgcgtcgccgccgctgctggccggcgtcaccaccagccgcggtcggccgtcctccgggcgcgcggcgggcagagcagtgcccgcggcgtccgcgtaaacgggccgcaggctgacgggcagccagcgcggcgagaagagcacgttccaggtgacccggcggcccgcgtcgtggccactcgggcccagctgcgtctggaagctggtgctgcggtcgtcgcgggccgggttgttgatgacccacggggcgccccaggcgggcgcgaggtagttgcggggcaggaaggcgctgccgttgacgtcgaagaacttggcgtagtgcagcggcgacgcggcgtggaactggtaggcctgcagcaggaggtcggccaccgcggggccgtggcgcgccagggctgccgagcgcgcctgcagctggaacagctgtgccggtgggatcatggggtagcgtatggcgcgcagcgcccgctcggccacggcagggggcggccgcgcgc

SEQ ID NO: 32163 - DNA, 1911 bp, Homo sapiens
  chr17:72427030-72428941
  hyper
cgcgggcgctcagggttgagcaaacactccgggccgcccgccccgccaccagctggctccgaccggcgcaccgctggcgatcccccaggcaattcggcgtcatgagaaccggcaccccgagactcggcgccctgccctccctccgcgtctccagggccctggccaggcccaacaacctctccctcctctgtgcgcctcagcccctacgggcctctggcgcgggctaactaggcctcgctgcgggcccccaggactgcgcaccccaccccccgcgaggccagcagccccgggggaaggcggccggaaaatctcttgtttatcgggctggataagtaccagcctggattcgcttcccaatttctgcggtccagcttcagcagattcctggggccggaggggaaagggtggcaacccacagatccaccccggaacagggagtggggggtggggctggtgggaacctgacctcctggaaaggacggactcggagtcagagccaacgtgtcccggagcgcagaggcccagggggtcgcgctaaacactgtacctcggggaacaaaaccgtgaaggctaattaggacaagtcggagcagggaacggggacgccgggaggggagagcgcgctccgagttgggcagaacctggaacggtcacaggaaacccgggcgcggggtagtcgggccgagggggacctttgcccacggtccagagtggtctggactcggcccacgcgtgagaggagcgcttggtgacgatcccacgtacgcttggtgactggtggaggtcccagagaaggaccgtgcgtgcaaaaggcgaacctcggtgtgcggtgtgtccacgtgtgcaagctggggaggggagggggcgcagaaggcgtgacaaagacggactctgtcttgagtgtgcgcctcgctccggcccgctcccagcgaactgtgcctgaagtgtgtctcacgggagggccaggacgaaggtgacaaaggctaggtgtcccccacggagacgcgccaaggtagccccgcgcgtgtccgtaggcgcgctctctggaagacgcggtggggggtgcgcagggctgcaccctcacaccaattgccccggcgaaggccgagcccagaaagtgagtgcgcgtgagtgtgcgcgcgcccgcatgcgggggcgtggcagtcaacagcaacaacccacacgccggcagggccagaaactcccatctccctcaccagccggaaagtacgagtcggctcagcctggaggtgagtcggggcggggagggccgggcaggctttgttcctgtgtaaacggagcgcacgtacctggagcgcggcgggcgcccgattagcgccctgaatggaggtgatgtaacggtgatgcaggctccagcccaccctcgccgaaagcaaggagccctgcctggggacaggcccgcgcgagagcgagcaacccagcgcgcctggctcagcctcggtcccagggagaggcaggccctgcgtcccggcccgggccccgccatcccagccaggaccgggcctggcccagcgccccgcgccgcgtccctcccacccccgcccgccccccgcctggggctggagttggccccaaacgctgcgctggagcggggccggcggcgagtcccaggtaagggctgctgccttcccgctccgccgcccggaagagtcgggtcgggacggcggggagtgggcgagggcagaggcggggggactggacatcctgcgggctggggacgccgcgccaactccgctcggtcgctgaaagttttcaaacccgagccggctggggactgggggggtgggggagcccggcgctgcggctcgggctggagggaggggaaaccactccataatcggggtctccaagaggagcccctccaccgcctgcctctcggtgggagtccgc

SEQ ID NO: 32164 - DNA, 712 bp, Homo sapiens
  chr17:72449954-72450666
  binary
cggtggcttgcctcacccccaactccaccgacggcaggagagggtccgcgggggcccgggcccagggaaggttttacgctccgtccttaacccagcgtcctaacctgacccggctgggagagggggcggggccccggaaccccacccgcagacagcccactcccccgcacgcacctgggttgggggaggtggggggcggtggggggcagtgaaggtggggggaggtgggggtgggcccgagcagccggcgcgcccacgtgcctctcccgcgagggcccggccaccccagctccagccaacccgaggccgcctctcgtgccccaccccaagccccgccccggcccctgcaacccgatcctcgccgcggggcggcggccgaagccagctgtcccagctcctgctgtagcctgggggccgggccgccgcgctccgcccatccccgccctcagagctgggcctcgcagccgctagggattgcgggggccgcatttatccctgtgtctctcaggccccgcagagacgggggtggggtgggtgacgccagggaagcaggccccttttcccaagggaagaatccccttccggaggcccgccgggccatggagtttccgcgggtggaggtagtgaggccaagggcacggggagccctgtcgctgccttacgtctggctctaggccggggttcctcggctccaccagcgacatttgtggcc

SEQ ID NO: 32165 - DNA, 429 bp, Homo sapiens
  chr17:72667260-72667689
  hyper
cgtggtgacggagatgcccgttcgctcgggatcaggaacggtgagctcctgggaccgcaatgccctgagaacgcagccgggtgctgagcctccggagtccggtagctgaatgaaatacgcagggatcaccagccggacccaaatcttgcgtccctgccagcatcctggagtcctaagaggcagggattggagcggacaggatctcagaactctggtcccgggcgcacaacggcggagtcgctgttcctggtgctgaaacgctcagtcctggaagaacgtggccgcctgcccgcctggtaccgcgccgcggccgctgcggggaactgtccagtgctgaaaacggatgcggcccggcccgcagagctcagacccaagcctgccgcacccagcggagctcgaaccgagctcctggaagcgctgacgcagagc

SEQ ID NO: 32166 - DNA, 928 bp, Homo sapiens
  chr17:74070390-74071318
  hyper
cggggcccctcatccgcctccgccccgcgtttcctccccccgatctcccaggggtcctcttttgagggcaccccagcccctcgacggtcccgggatatcctgcacccctgccaggctgcagggaagcgccgaggcgcgcggagtgcgaggtccgtgctccctgcggcgcggcgcacacgcagggtccggggtcgacccctccaccgctccggcgtctgccggggaagtcagtccgcctggtcagcccagaacccccgactgcgggggctggagctcggaagcaggtacaagcgccactctccgcctgcgccgtggaatgcgcgccgggaccactccgcagcccttcccccagcgccgccggccgctgctggggacaacctcgccctcctgtctcttgctcctcctcctgaccccagcgcacccccatccccgccccagatgaggcaaggctccctccgccttcagcccggcagagtcgcactaggagttgcagcggccgcagccccgggagcttcccgctcgcggagacccagacggctgcaggagcccgggcagcctcggggtcagcggcaccatgaacgtctcgggctgcccaggggccgggaacgcgagccaggcgggcggcgggggaggctggcaccccgaggcggtcatcgtgcccctgctcttcgcgctcatcttcctcgtgggcaccgtgggcaacacgctggtgctggcggtgctgctgcgcggcggccaggcggtcagcactaccaacctgttcatccttaacctgggcgtggccgacctgtgtttcatcctgtgctgcgtgcccttccaggccaccatctacaccctggacggctgggtgttcggctcgctgctgtgcaaggcggtgcacttcctcatcttcctcaccatgcacgccagcagcttcacgctggccgcc

SEQ ID NO: 32167 - DNA, 1458 bp, Homo sapiens
  chr17:75206857-75208315
  hypo
cgctcttgtccatgtttcaagaacttggggtgcagtgtgtttcgtgtgaatcgggggcatctgtagacatccacatggtaaaaacctccgttctgctttgggtattaaataaagcacagatccgagatggcaacaaactgaaaggaaggctgaagcggaggcccccactgtgaatgcaggaaagaggttccgtcagcacagggggccgaggcctcaggatggagctgcctggggagccactttgctgaagagggggccgtgccacgtggtgccgcctgctgttcttagacaggacccttgtacctcactgaatctgctgtggaaggacattctgaagtggcgtttcagtggtgaggtggcagtggtgggattaaaggggcccggctcgtagagcagccacgcgctgaagggcacagcagacagcgtgcatgggctgagaggggccgtgggcctggctctgctgcttccttaggtggagttttcagtgactgcagaactctgcacagctgcttttcattctcacgtccgcccccgcccaatctttgaaactaactttgattattccctcctgggtagctctgtcggtgctgtgtaagtttggttttcaattggttctcagcacccagggggtgaccacctcaaccccatctctactatgccaggggctcatcccgctcacccagcctcgccactgttctctcgtgtgagcctcacacggcaggcccggttccatgcccctgcttcccccttgctgggaacgctgtcctcaggctcccctgcctgctctttctttagctttcaccttctccagggccttctgttctgtccagcccagggcagtcctctgaaccactcatgtacgagctcacagtgtttggtgtttctaagacctggcctcttagagtgtgtgtgaagatggtgtatgggagatcttggacctctaggtgcaggtcacaaagaacacagagcttggtgcatgacatgtagcaggatccagcggttgaatggatggtggtgtgtgactctggggaaagagatccgtccatacgcattcagcgtttccctccccagcttcagcacctgcaccctggatcccctggagagcacgatgcgctcgcagcatgccggcctggtgctcgtggatcgtggctgcctaacgctgcctctttttcagattctcattcagattgtggatgcctcgtcagtcatcacttgggatttcgacgtgtgcaaaggggacattgtgtttaacatctatcactccaagaggtcgccacaaccacccaaaaaggactccctgggagcccacagcatcacctctccgggtgggaacaatgtgcagctcatagacaaagtctggcagctgggccgcgactacagcatggtggagtcgcctctgatctgcaaagaaggagaaagcgtgcaggtaaaatcacacacaggtcaaatcgcgcatcc

SEQ ID NO: 32168 - DNA, 282 bp, Homo sapiens; identical to SEQ ID NO: 28691
  chr17:76167747-76168029
  hypo

SEQ ID NO: 32169 - DNA, 148 bp, Homo sapiens
  chr17:77774625-77774773
  binary
cggaaatgcgggcgcccgccctcctagggacacctgcttcccaaacccctaggtctccggccctgttccgcactcttctggcgacctgggcgcacggcccgcgactgcccttcccgacaaagggtctgcgacctgctcccgggagccc

SEQ ID NO: 32170 - DNA, 751 bp, Homo sapiens
  chr17:77776554-77777305
  binary
cggttgggccacgtgggctcgctgggaaaacgcgccggcgtcccctcggagcgccgaggccgggcgagctgagggtgcggtgccgctggagcacgcgcacagcgcccgaaccagcacgcatgcgcgccgcgggccggccccatttccgccccccccccacgcgcccccccatcacacgcacacccaatccccggactgctcgctggtgctgcttgtgagacccattcctaggagccccaggcgcccttggggagcagaaagaggcggtccagagttgggccggacaaccgcaacctggaaggagtccgggagtccttgggtctgggcgctcagttctcacggtctggggagaaggggctcagacgggacggactaggcacagccaggggcggggactgcgagaggcgaggggaggccggcagggtgtggcggcagagcagcccgggacaagtgagcggcctagagatcaaggccttggagtcccgtccgagagcaggacgttatcagaaacctccagccccaacccctgcctggagatgcccggggcgcgctgactctgttctcgcatcaccccgggccctggctcaacgcgtgagcagcctgtggttccagataccccgagtggagagtttgaccccagattctgcctgcactgacaggcttggcctggcggttacgagccacggttgatgagcgcccctcctcccgtgacccagctcatgagaaaggcggggagcaccaaccctcccac

SEQ ID NO: 32171 - DNA, 931 bp, Homo sapiens
  chr17:77788305-77789236
  binary
cgatcgtatttcctggggacagctcgacccccaggggagcacgtggccaccagctctgccgccttcctcctcctgagaccgaccctaggagtcctcgtgccccagtctacctagactcccaggagcgtccggccggaagagacagtgggagatgaggaaactgagattgggagggggacgtgatggggtaaggccattcctaaggcttgtggcagagctgcctcttcaccccacccccatttctttcagatgcggagatcaaagcccaggctcactggtgggtcgggagctcactcctccaagtacacttggccaacctcggggagcccggcggcggcgggaggggcgcgggcacctgggggatgggggtggggagcggccagtctgctggtccacacctgaaaacggggtttccccgaccggatgcctgccgtccccccgcctccactctgcggggtcgcctgctagggtcgggaaaggaccctccaccgccaccctcggggttcggtcctcccccaccaacgtctgccagtccgcgtggattccgagcccggctccggaaaccagtctgaccacttcgcccatttcccaagcctccccgggcggcggccggccagcttccatggtgcggtgagccaggctcggccgccgcctcggccgccctgcgatgaatggctctgcccagaaggccggcgtccaagcgacgctcccgcccgcgcgcccggggcctccaggccgctccccgccccgtgtccccacattgcgaaacggacggtcggatgctccgctccagggccggggtcgcctgtcccctgccgacctggcgcagagccgccttctgcacccggccccgtgccgccctggggttgcttacagccgggctgtgccaccgagctgagcccggaatcgaatggcgggccgcggaaaaggc

SEQ ID NO: 32172 - DNA, 996 bp, Homo sapiens
  chr17:77814391-77815387
  hyper
cggctggtggagctgctgcgccctatgcggcctgccgagggcgccgccgagggcccgcgagctccgtggggtcggggtggggggacccgggagcggacagcgcggcccgaggggcaggggcaggggcgcgcctggcctggggtgtgtctgggccccggctccgggctcttgaaggaccgcgagcaggaggcttgcgcaatcccttggctgagcgtccacggagaaagaaaaagagcaaaagcagagcgagagtggagcgagggatgggggcgggcaaagagccatccgggtctccaccaccgccctgacacgcgacccggctgtctgttggggaccgcacgggggctcgggcgagcaggggagggaggagcctgcgcggggctcgtgttcgcccaggaatcccggagaagctcgaagacggtctggtgttgaacgcacacgtggactccatttcattaccaccttgcagctcttgcgccacggaggctgctgctgcccggcggctgctacccaccgagacccacgtggcccctccccaggggtgtaggggtgacggttgtcttctggtgacagcagaggtgttgggtttgcgactgatctctaacgagcttgaggcgcaaacctaggattccctgagtgttggggtgcggcgggggggcaagcaaggtgggacgacgcctgcctggtttccctgactagttgcggggggtgggggccggctctcaggggccaccagaagctgggtgggtgtacaggaaaatatttttctcctgccgtgtttggctttttcctggcatttttgcccagggcgaagaactgtcgcgcggggcagctccaccgcggagggagaggggtcgcgaggctggcgcgggaagcgctgtaggtggcagtcatccgtccacgccgcacaggccgtctgcgccgtcggaccatcgggaggtctgcagcaactttgtcccggccagtccccttgtccgggaaggggctgagcttccc

SEQ ID NO: 32173 - DNA, 892 bp, Homo sapiens
  chr17:79008842-79009734
  binary
cgggggcggtgatgcgggcgcaacgggggcgggacgcaggggcggggactgccgcggggcggggcctgaggcggctataaaggtggccgccgccggacgccgggctctgtggttcgggtccgctttcgtctccgtcctgctgccgttaccgccgctgctgccgccgcttgcgtcccccgctccggtctgtggtgcagccgggacccaggaccatgtctctgtctcgctcagaggagatgcaccggctcacggaaaatgtctataaggtgagcgccccccggcgccgagctgagcccgctccgtgtgcgcctgggtcgcgcgccgcccgcgcgcccgagcccgaccagggcggccccggggccgcgcgccgggccaggaggctgggactttgggggtcttcccggcgcggccacccgggacccgggctgctggggtggtgagcccggcgccggccgctcacaggtggccacccccgcccgggcccccccatcccatgcgcgccgcggcccggtcagtccccagccccaggcccggggagcactccccgctccgacggccctgctcggcccccgcgcgctcgccttggcgtcggcgggaacggagccgcgcgccgggccccggaagccctcggaccggtcggggtcgtagcacacccgggcagggccggggcggcgggggcggcgggcccaggggttgcggcggccaggacggcatgggggctgtctgaaggccgcggtcggcgcggtggcaccgtggggctcctccaggcgcggttgcgcgagcctcgggcacttcattctcaacaggctttcccttcccacaactcctgcccggcgcccatgctggggcctaaggtgggaggtcggagcgcgggcaggctggatgggtggac

SEQ ID NO: 32174 - DNA, 387 bp, Homo sapiens
  chr17:79317848-79318235
  hyper
cgggtgtgcgctccgagcgtctttcggcgggggggaggggggagcaggaggggcgaggagacttgcgcagtcagggagccgcgaaccccgagtctcggtcctcgaaggcggcaggagaaaccgcgcgctgtgccccgacctctctcgccctggccaaccgcgacttgggacgagctggaggagcttcccccgggctccggacgcccgcgccgaaaaccgggccatgggtaccaaacccgactctaggcggtcattcactttgtccccacccaaactctgatgagctatttgggagtgcgcggggactgggaagtgagggacttttataacattcttctttcgactccggcttccgagcccaccacccatcttgcctccttcgcctcc

SEQ ID NO: 32175 - DNA, 1325 bp, Homo sapiens
  chr17:80655520-80656845
  binary
cgaggtgttcgcctctgcgcgttcccccttctcctgggttcctgcccccgcctttctttccccggagccgtccaccccctcgccgggcgccggctttcaagcctcaaacttgggggatccccgggctgcctgcctgggagctctgggcgctccggcctcccctcgccctggaacccgctctccggccgctgtcgtggggggtcccctcttccgcacgcgagtcacctgtgctccttcctctcccccggacacgcgggacccctggcctcgggaccggaccctggtctcccctcccctccgacccacgcgcagacccagcacctgggcgcctgctcgccgcgctccgccccaggagccccggagctcgcgtcccctcccgcccctcctgccccgcggccgaacgcgcacttgcggactcgagcccccgccccgggtccccacagcagcggccccaggtcgggaggagcccagcgcccggcccagccgcgggctcccgctgcgcgcagactgcggagaaggatggagactgcgccgcggggcctcgagtggaactgggggtgcaacagggacgccgcagcacgagggccagggccgggcggagaaaggcccgcccgcgaaccgcgctcctcctcagccccgcgcccccggaccgggactcctaccctccccggccacgcgccccggcctcttcccgacccctgcccggtctcgcgtccccggacccggacccccacccgcaccccctccccagccccgcgcccctccccggccccgcgcccgcaccccggcacgccctccgcccgcgctcacccgccgggtggccgtacggggactcggccgcgccatcctgcaggctcgccaggatctcgcccttgcccacgtcgctgtcgcccaccagcaggaacttgagcagaaagtcgtaggcccggaccgggctgcccagggcgctcatcgtgacggcccggcgcccccacccatgcccggcctgcggggctgagcgcagaggcggcggcccggccccgagaggcgccgcgcgggccccgagtccttgctcgcctccggccccgccccgccgcccagcgctgacagcgcgcatccccgcccggccccgccattggtggaccgcagttgctagggcagctgcgcgctttcactggcttggttgtccgtccatcttactctcgtcaccgcctccgggctgtcgcccacccgcccctcctgaaaggtcgctgtcaccacagccaatggaggcccggagacggggcaggggcggagccagaacaagcaggaggcggggactctgctcccgcagccaatggcggggc

SEQ ID NO: 32176 - DNA, 861 bp, Homo sapiens
  chr17:80692978-80693839
  binary
cgtgtatgcatgcatgggcgcgcgtgggcattcctgtgtctcaagtccctttcccaggacatcctggaatcagcagccccaccctgggccgggtcagcgcgtgccatcggagcccccacgtcagcctctctctccgatcggcacctggcgtcccagtgcgcaagccccacgtcatcacgggggccgctgggcccggcctggtctgcagtgtgggaagccggccaggcctgtgaccagcgcccgggccgagggccggacctgcgtccgctgcggggcagggataccgggtccctgcagggagctcaagccccagcgcgcccgcgaagagctgcgcggactcccggctgcttcccccgaatcccgggcgcaggaagcgcgaagccggacgaacgcggggagcgcgcggcgagcccgcctgaggccgcccctcccgccgcccggggtcacgcgccgcgcgctcccgccccgccccgccccgcagcgcctcagccgacaggggcttccgagcgagcagagtcccgcgccccgcactccatggagcagctgctgcgcgccgagctgcgcaccgcgaccctgcgggccttcggcggccccggcgccggctgcatcagcgagggccgagcctacgacacggacgcaggcccagtgttcgtcaaagtcaaccgcaggacgcaggtgctggcccgtgcgcaggcgggggctctgcgggtctctgcggggcctgggaaggcggaggggtcgggggcaggcgcatttcctggggctgggcctggggaggggtcagctttggcccttgggaggtggcacctgctgggtgagcccggctcaagcgttctgtgaaggtttgtgtctgcacgatcc

SEQ ID NO: 32177 - DNA, 443 bp, Homo sapiens; identical to SEQ ID NO: 28702
  chr17:81036717-81037160
  binary

SEQ ID NO: 32178 - DNA, 1219 bp, Homo sapiens; identical to SEQ ID NO: 28703
  chr17:9548277-9549496
  binary

SEQ ID NO: 32179 - DNA, 871 bp, Homo sapiens
  chr18:10454592-10455463
  hyper
cgcggccaggctgcccggccggcggcgcgctggaaatatgaagagacgctgcagctgcggtggcggtggcggccactgcagctcagagcggcgcacgcggcggccggggcgggacgcggggccgggcgcggagaagtcggggcgggcggcagagaggccgggacgcggaccgggccggggcgcccacagccgcccgacggcgcccagagagcgcgcgccccgcagccccgcgcctagcccgccgggcatggggcgcgcggcagccgcctgaagccccggcctggcccggccgcacccggccggaggcggagggcagagcgcgcgcccagttgcccgggcaccaaatcggagcgcggcgtgcgggaggccccagagcaggactggaaatgtcctggccgcgccgcctcctgctcagatacctgttcccggccctcctgcttcacggtgagttcccgagggccactcgagcgctcccagccggcggaggcagcccgggcgccgcggagcccgcggaggcgtcgggtctggatcgcggcacggcctacactgtccccttggcggggcgggtccgaggggagccccgcgcctgccgtctcagccctgggagagggggctctgcccactttccgaggcttgggaccgctctcccccagggcgcccggagctctttgctgcgggactgttctttttggaagggtggaagctctcccacgcagacaccttttatgtccagaatccgttgcatccagtccgagggaaactttcgtccgctctgctggattttccaactgtacactgccatgaaatcgccggctctgcgagcctttttccaaaatgccagaatgcagcaggctcttgatgtgttccaagc

SEQ ID NO: 32180 - DNA, 958 bp, Homo sapiens
  chr18:11751872-11752830
  hyper
cgacggctgaggaatagcagggcgcgagccggcccggcaggtgcccatcgtcgccctctgggaccccggtggcgcgctctgtcctccgcgccacgctcagccaccaccccggctgtttgggacccggcacccagccgagcgcgccgccccctcggggacccgctgggcggggctgagcgaggcttggagtgcgggcgaagggacgtggggcgaacccggggcgctgcgccacctcggctgtctccagcggagaccggcgccctcgccccccgtctccgttcattgtgctgtattcatccagcagattttgaaacaattctcgtgtaaaaaggcattttactccgcgcgtcttccttacagccatttagttgggagtttgcggtgggcagggggagggagaagaaacgcctgctctgaatcggaaaacaccgaagagaccagaccatctctttcagcagcaggaaagagaggagccgtcgcaggagccgcacacgtctccaactctctattgctttttgcgcacattcctaacttcctgacgtccatcccagcgggcaggcatggggtgtttgggcggcaacagcaagacgacggaagaccagggcgtcgatgaaaaagaacgacgcgaggccaacaaaaagatcgagaagcagttgcagaaagagcgcctggcttacaaggctacccaccgcctgctgctcctgggtaaggccgaggggcgcgcggcggctcccggccccagcggagcgcacagccaggagcggcgagcgccaggctgggcgggcagggccgggcgagggtcgcgcgcacctctgggccgcggagcccagacggcggccggggcgagctcctccagccaggaacccgcgtgtaggaaatccccgtgctgggggaggaggattgctcagacccggctagtggtgagagatggcagcgatatccggacacagatcacagc

SEQ ID NO: 32181 - DNA, 1478 bp, Homo sapiens
  chr18:18821658-18823136
  hyper
cgagttcacgcttggggctcttcagccgccgtccagtgaacagagaaagcaattgcgcagaggcgagagcaggctgaatgaacgcgggctccaggggaaataatttttcctcctggcttcgcgcgtcagcacactggggtgcagccctccctcacagaagaccccccccccgcacgaccccctgtacacccccgcggggctgcgcgttcgtctgtgcggcggggtttgggaatggaggcgtgaggaccgcgcatcgagggctccacaggctgggcggggggcgtcgttggaggggggtaggggagaaatgcgcgcccaccaccctcacagagggcgagggacccccaaaagccactcgcggacgccgaggcagcgggaaggcgcgaggcggggcggggggagggggcgcgggggtccccgctgcggaggccagggcgggcgggaggggcagcacctgaggaatccgcctccggctgcggcggccgccgcctcgctccgccccggggaactgagcgcgcggaccgcgcgcctgccagagagacgccagccgccggcggcgctagcacctcggagtcgggcggccggagcagcggagcgcagcgcggcgcagggaacggcactgggggtggggagaccagcccggccgagccgagggccaccccctggtcctctgccctcgcgccccgctagggccaggtgagcggccgcggggactccggggcgcgggcaggaggtgagaggtcgcgaaccgggcgcgggagctcgcctgtgaccggcaggagctgccctttggcgggctggacgccctggccgcgcggggaagcgccgcagcggacttttccggagggatgggaagctcagcgggggtgtgagcggagcgcgtgcgggtggcgagggagcgccagtgccaacctgggagccgtgcctgccttccctgccgcctcgcgtcgcccaccgaagggacccggccgtgctgtccgcgcccagaggccgaaggcctgtcaccgggctctactcgctgcctttgtggcgggagcgagacggcccgggggtgggacgagggagctgcggcgcgccgagtagcgcggggtcccccggcggaggcggcgagggggcacctggttcgtctccccgagcccaggggcagtgagggggtgccgggcaggcgggcgggcgacaggtagggcgccgcggaggtggcggggagaggatggatggagttcagcctgggaaagttgagaacgtccagaggtggctgggcgctcgctcggcgtctgtgggtttttttcctcaacaccaaatgtcacttcgtcacgagcgggcgcgcgtgtcttccggccagcatgtccatttttctgtgcatggctgaggaccactcttattccgaatgagacacaaagagttgtgttgacagctgaccctgacacaagcagacagcgagtgaggtgcgccctggccggggagggtgagggagactc

SEQ ID NO: 32182 - DNA, 2283 bp, Homo sapiens
  chr18:19748747-19751030
  hyper
cgtacatgacgacccgagttaaagttcccaaaggtcagctggggaatgttgtcttgaggttcccgaaaccaccacgacctgagccgtagcatcccgagatagggtcggagaaagtttaaggtcggtctcacacaacttcagggcaaaaagcgcatttgctgtgaaggggctaggcgggggttggggggcgggggggcgcagagcacgttcccccttccttctgggggcgtgctgacccaaggtctggagcgcccctcccgccgcggcggcggcgcgggactgtgcactgccaactcctcccgtgccaaggctccctccccctccctcgtgtgggtgtgtgtgtgcgactgcgggagcgggagggtgcaccgccgctggatgggtgcgggtcgctagccaggtcaggcgttctgtggcctccgcccctcccccggggtccctgggctcggtgccccccgggtggactcgcccccactccggggacagggcttgcggctcagcccacgcccgcaggcagcgcggctctcattgtctgcctgggcggcgcgctcccctcccccctcgccgtcccctccccaccctcttttctctcctcccctcgatccctcctcctcctcttcacctccagcgcccagctgctcgctgagcgcagttccgacccacagcctggcacccttcggcgagcgctgtttgtttagggctcggtgagtccaatcaggagcccaggctgcagttttccggcagagcagtaagaggcgcctcctctctcctttttattcaccagcagcgcggcgcagaccccggactcgcgctcgcccgctggcgccctcggcttctctccgcgcctgggagcaccctccgccgcggccgttctccatgcgcagcgcccgcccgaggttcggctgcttcctcctcgcgcgatctccccgctttcctcccctccacccctactcgtcgcgggcccctggcctccggctctccggccctctccaggccgcggtcggctccgacggtgtttccctccttccctccgggcgggctgaggcggctcccaggctcccgggacaccgcggaccaacttctagtctctttttctctcctcgaagcgcttatctgcgcgcagccttatctccgagttatctcggcgcaaaggggcgggagccggtagttaggcaggcagagaaacttctttcttgctatctagccaggtctgtgtgtgggcattaattttagtgtggtaatctccgatgagccgaggcgatttggaagagcagcctggaggaggccagcccggctgcatttcacctccctcccccactcgctccgagtctccctgtcattcttcctgctctcccatttggggtcgcctcggctctggggcggtctcacgctcccccctccccagcccgttgcgttccccctccttttctctgctctccgctccaccccgctacgtccgattccggaacggtccggcgtttctgctgctggagatgaccgcggggtgggccgggtggcccggccggcgtgagcgcgcacgctggtggctgcaggcgcgggccgtgtctaaggtgtgcggcgccgcggggacgccggtggggctggcgattcccgccccacaagctctccgcattgcctctgctgggaaggacccagactgctgcccccgccctggcgtcccactttccctgggccgagttgcatttctctctggggctcgcgttcgggctggtcagcgcagtccgggaagctctgggagagccaatataggagaacgcggcggtttcgttttcggggacaggttgccttccttacgcgaagggttttcccgtggggaaccctcaccccgaggcatttcgggagaggggcatccgcagagaggcgggatgcggcggtgccgacacgcacagctacttaaattcttttgtgtgtcatcagcccgggggagacactttagggcggaaggaaagcctcagccagcttctgcagatcacccctgggatctggcgcgcgcacggagaaaggatgcggccgagggggtgggcggggaggacgcggggaccggagcggtgcctttgagggagggctggtatcccagcccttccagggccctgtggcggctgcgcaggctcccttcccctcccttattgatctccacgcccggggcagaaataggatctttgagaagtctcaaatgggatctttgagaagtcagatcccatttgaactagaaaaaggagtggaggcgaggtagcgtgcagcctacgctcttgttaacccgtc

SEQ ID NO: 32183 - DNA, 469 bp, Homo sapiens; identical to SEQ ID NO: 28713
  chr18:19928416-19928885
  hyper

SEQ ID NO: 32184 - DNA, 1230 bp, Homo sapiens
  chr18:21269079-21270309
  hyper
cgactcaacacttggctgggaaatcgaaatgtctttgatgtgagttctgtaggtagtggcagtttcctctgctctcaaccaaattcgtttacaagcctcctttactcttaggtcacaggtggcttttctggctttgacctgagcggtgagtatccagagaggagaacgatctaattaatttctgtcctggcgcctggagggttcgaagatcccaggctcccgttcccgccgcctgggtgggagcccgggaacgcctctcccattccccgcccgcgaagtttgcagcgcgcctcgcgcgggagagacgccgtctgctggcgcgcggctgagcgctgtcagttcctgatccggctggtgcccgctccagccgcggcaggttccagagctgagaggccacccccacgccgcgggcttccagcgcgtggagcaaggggagcggccccggcgccgcccatatccccggctgcgctagtcctggcgctgcaggtccgggaggcgcaggcggagagcggcggtgcccccgagcccctctgcggacggctcaggcgggaggaccccgcgcggctggatggcggcggccgcgcggcctcggggtcgggcactggggccagtactgccgccgacgccgctgctcctgctggtactgcgggtgctgccagcctgcggggcgaccgctcgggatcccggggccgcggccgggctcagccttcacccgacttacttcaacctggccgaggcggcgaggatttgggccaccgccacctgcggggagaggggacccggcgaggggaggccccagcccgagctctactgcaagttggtcgggggccccaccgccccaggcagcggccacaccatccaggtgagggcctcggagagagccggggtgggcgcgccttttccttcccgcgccggccagacacccggagaagggatcgggccctttcctcacgcgcgctagtggctccgggcgactgggaagggcagcccccatccccgcgcgcgagggcccacgacccaggagcgatctcgtggaagcaccgcaccggcaccaccggcccgaggcgaggagggggagcacgcgaggtgacatgaggctgtggtcaggttcgggctggtggaggggaaagtgtgaggctgcgctctaagagatgcaggcgcctcggcccttcccgcctccgtcacccacggagcgtcccgccaggcttgagtcctcgagggttcaggggc

SEQ ID NO: 32185 - DNA, 867 bp, Homo sapiens
  chr18:21851454-21852321
  hyper
cgtccaactattcttggatctactcacatccctggatcaagtctggccgccctccccgctccgtcccccggcgtcctccgtggccccaggctgccccgcaaagccaccgagctgcaaatacacccacctacctgggccagatccgaggaccccggctggcgcgctccaccctgcgctcctcgcaagctccagcgcgaatgcgctcggcctgctcctcctcctcccctccagtcgagccgaggcgagccgatccgggaggcgcgacccagggcggcccgcaaggtctccctaagtcacctttgcgcagcctgcccctggctccggccgggcagcagcgccagccttccccagcgaggtcgggcagaggcgttgcccgccagcggcccaggactcccgcgccgcgcccgcccgggccgcagaggtctgcgctgcccctccgccgccgctggctcggccgcagacccgccctccggggctcgcggggagagcgcgggcgggcggcggcaaggcctgcggcgggcggctccctgcgcgcggcgggcagcgtccgggccgctcctccccttccccagcgccgctggcgggcggaggcgcaggtagggaccgccggggaagcctgcacggccctccgaggagaggtcggggactgctccttgggctctacgtgagtgccgcgccgaggcgcctgcgaggtcctagagctgctgtgcgctcggccctctcctggagacaccggccctggcaactttttttttttcttttttctttttttttttttttaaccaacccgccccttgggaaactctggaaagcaaaggaatcttctctccagtcctgcctgtcacttactccggctcacgctgaagc

SEQ ID NO: 32186 - DNA, 1421 bp, Homo sapiens
  chr18:22928980-22930401
  binary
cgagtgaacaaaactgccaatcgtgcaaactttaataaacttttttttttttgaaaagaaaaatccctcccaaattccttcacggggtttcagaagcttcttggagccctttccaccggacaggcactaaccgctatcctacttcaactcggaaagttcttctttccaagtgactaggaagaggtttgtcctggtacttcgctcagcgttactttcaagaaagccggggtctcgggcaagtctcgccggcgcgagcctggtccaccgttaccctgacacccgcgcacgcccgtggcgtttcttttttcactgtcgacacttggatctttcaggccctgggtctaggtttcccccagaaaaatgaggggcccatgtgacggaaaccaccagacacactgtgtggagacacatgccaatgattcacctcgttcccgaactaaaacttctgcgctttaggaaaaaagcaagcgttccaatctgcgaggccctcccccaccccgtcccttcccaggagaagaaagaaagggctttgtgtgtgcggtgagggctccgttcatcgagttcaaaaatgcacagcggccgggggccgggaggcgtggggcgccgggccctgcccaccccttttccccgggccggcggcgagtcgggaagctggtgcgggaaccggggccacggggcgccgcggcccggcagccaggaggaagaggatgctgcgccgccggggaccagagggcggggccgggccgcgcggacctcggcgggacccagcgggcccgggcgggcgcaccagccgccctttgtcctccgcctccgggtcgcgggggccgcggccgcctccagcgctggccccctggccctcgccccggttccccgtcctgcccgcgcgcccctcctccggccctcgcgctccgccgcccgccctccccgctctccgcctcggagcgccggacctcgcggctcccctcggccgcccgcccccgatttcctcggaaggaggctcgcgaaggtggaggaggcggccgaggaggaggaggaggccgccacgtgactctcctcgccacattccaacacagccatcagatcgataacttcagggacccccgcccccgccgcagccagctagtgcgcccccaaaatcccgcacgcacgccccgcaacttccctctccaacagggacgacggagagctggaccccaccgcgaaacgcaaaggactccaggggcggcggggagaagtaggggcgaggggcggtcaacttctgggaatggccaagaggggtgctctgaggcccgagccggggtccggtgcccgcggccggcggccggggtctgtttactccggcgacgtgcggagaggacccaagcaggacgcgggcgggcgggaggcggcggccgggaccccgggccacgtttgtcacgagc

SEQ ID NO: 32187 - DNA, 920 bp, Homo sapiens
  chr18:22930420-22931340
  binary
cgagatgacttttttcttcttccaaagaaaaggaaaaaagaagcaccgcacggttttgcatatttattctttgcgaaaacacacaacagaaactttttcctccagcccagatgtagatctcagacgggatatttttttttcctccctctccggataatttcgtttctttctctctctctctctttttttttttcggttgttgttgtcttttctcgcccactttctaccgccgccccattcggggatcctcctcccgtcttcgtctccccccaccccgacacctcaccctcactccacctaggggctcagcggggaggggagcgcgcgcgcccccgcactcacactcacactcacgcgcgcacacgcctcgcagccacgcagccctcgctccgctacccacagtgacactcgcggatgggggaaagcggggagcagggggttcctccttacctttgagggatctcggtttcgcttgcttgcggcgagacatcctaaaagcaaacagctgaagttgtttcaattcagccctgaaagaaactatacttcctcgtggccgcgcgcccctcgggccgcggcgcctcgcgccctccgctcggcctccctcgcgccctcgctccgcgctccgctcctcgctccggctccggctcgcgctcgcgcgcggggctcgcggctgcccgagctccgcgctctgcacgacggcggcggcggcggcggcggctgctgcaccaaactttcccagccttcgacccccacccccaatctccaagaaaaaaaaaaaaaaaggaaaaagaaaaaaggaaaggagggaaaaaaagctaaaaaaaaaaccccaaagacaatgtttgaagagccgtcagctacactaaaaagagaaaatccgttactatttccacctcaatcaaaattcacatagttcatgc

SEQ ID NO: 32188 - DNA, 973 bp, Homo sapiens
  chr18:25756118-25757091
  binary
cgagggtatgaaaagtacggaaggctccaggcaaaggcgcccccggggcgcatatagggcacaggcagccggacagagaaaggagcagccgcgtaacggaacttctcgcccgggggagatactaggcgtgagaggccagactcgttctacaggcaggcgctgaccggcagagactcctccgggcaagagggccagattttctttccaggtgggacgaacacagaatattgtgagggcaagagaagaagaaaaggaggcaactccagactgggataaagacaataggacagtagagcccttgagcaccgggaggcgcacgggtgcagggtggggtaaggtggaggcaagtcccgtaactaagacaccagagtgagaattcctactgtaaactcgcgacccatccctgcagaaataaacaaaaaaattggagcaaagtactatgcgaggggcgaaaggcacagaaaactgcaaaacctgggagttatcctgcctcaccctcctgctgcctggggacaccccccgcgagcttgctcggccccgaagaaggagcagaggggacccgcaatccagcccctagagccccgccaggaaaggcgcgagagacctactggccccggcaaccctgccccggcgcccggacggagcccgatgcctgcgcagctaccggccgcgcggcgcggcgcggcgcggcgtggcacctcccttcccgggtgcgcagcccggccccgcagcggcgcggggaacaaagggacccggcgccgcccgccccaccccgcccgtggcccggcccgcggggaccgccgcgtacctgaagcagggccgccagcagcggcagcagggtccgcagcgctcccgctatccggcacatggaggcggagaggggccgagcgaagagccggaggaggcggcggcggcggcggcggcggcggaggaggaggaggcagcggcagcaccaacagcggcgcggagaaac

SEQ ID NO: 32189 - DNA, 964 bp, Homo sapiens
  chr18:25757146-25758110
  binary
cgctgctctccgctccccgccaatggagagcgagctgatgacaaatagcgggccgcggagtccgcgggactcgcaccaggagtaataaaacagacccagagatcaaggagctggggagggggcgggggaacagggagggagagcgtgtgagcgtctgcgagtgtgtggaggcggctgctgtggcagcgcaggcggctcggctccggcccggagcgcagcggaagccgcgagggatgcagcggcggggaccttggccggtggaggatgtggaggtggaagtggagcggatggcgctccccaagagctccgccacgcgaggtttcgggctcgtggttttgcttcctccgggtccccgctccagggccgctcggcgcgacgaagacgccggggacagcgccgcggggagggcgctccgggtcgtgcgtgctgcacccacaaagagcagcagtcccgccactccgcgcctccgctgcgtgggggccgaggggcgcttctcggctcctctttccggtcccccggcgagttggagactgttctccggcctcggccgcaagggggtgaggcgaggggccggcgcggtctctcccgccgcggctccgtcccgcgcagctgctgccgcagccgcccctgctgcccgcgcaccggcacccgcccgccggtcctcgccctgcgccgctcactcgcgcgcgccgccctccgtcgccgaccgcgcaccccgctcggcctccgctgcgcgacctgggcgagccgccgccgctctccccgcgctcgccccacgcgctgcctggctgcgcggcccgctcccctctcctattcctcccgccgccgccgccgccctcgcccccgcctccctcctccgccgagcctccccgcccgcgtcgtggccaatcggaggccaccaagctgcggctgtagccggccggatccgcggcagccgcccgcccccgccccgccgaagcgcccc

SEQ ID NO: 32190 - DNA, 993 bp, Homo sapiens
  chr18:28621776-28622769
  hyper
cgcgcagtcctccccggagccggagtaagtacgacgcaaccccaccgcatccatcatcccccaccactgtcaccctctacccgcctccacacctcggcagcatccccaaaacacaacacgaccccaacccccattctggcccggtcttcccacactttcgcgcccccggcacatcccgcccccagctgggtggctggcgggggtggaccgcttgggtgagcttctgaataccctttaggggagataccgagaaacccacttctcaggggcagccccaccaagggacccagggacacagccccggctccactcactaacgaaccaatccgggtcaactgcgacccagagctggggagggggcagcccctaaatcccttttcaagtctgtgctttgagctctcagggatcctctccacccaaaggcgccctccaaccaccatcaccaccagctccaccacctggggagaagcgtgaatcccaaccccctgcccaacccgcgacggcgcccgccagagcgcagcgaagcctgagcgcgactcagaattccaacaatcgaacaccttgtctcaaaacaaaaagctcagtccagagtcgacccgcaaacacacgttttctctcctcactcctgcaggcccgaacttggggctgctaccagacccgcagcattgatctgagccgcggttgtcacgtttcggcccgctttgtccccagctccgtgcagcgtccagggcggatccacccccgtccccaccccagccctatccggcgagatctggcttaccacgagggtcagcagcagatgcaggcagacggctccgcgcacggagcgccggggcccagcggcggccatcgggatgccgggcagggccaggagaacgcgggcgccgggagggtgccgagagcgagacctgccgaggtgcagggcgcgggaggtgcttttctcgccgctgcttgtttttaagtgtatttggcctctctcaggcttgcctgccc

SEQ ID NO: 32191 - DNA, 886 bp, Homo sapiens
  chr18:29077773-29078659
  hyper
cgcgctacccaggtcgagccccgccaggaggctccctcctcccgccattctccagagagtagggggtcgggaaggagagaacggcggggcggggcctgccacccacagtccccaacccaaggacgtcacggtcccaggtgcgagtgcgagcgggcgggagtccaccccgcgcctccctcctctgctgaactccccacctctgtaaaagcggcccgggccggcccccggctccattttctcgcggcggccacacctggagccgcgcctttgggttgggctgggctgggccgcgcaaccgccacgggaagacagccctcggggcggggagggagagggtggccgggccggggggaggccggggccagggaggagccgagtgcgcgctcggggcaggcggcggcgcggagcggtgcggcggcgggaggcggaggcgagggtgcgatggcgcggagcccgggacgcgcgtacgccctgctgcttctcctggtaagtgccgcaagcgggacaggggagccaccgccggggagggcgtcggtaggcgaggtctagacctcgcgaccagacttgcccgccgcccttgtgcgcgttacctgcccggcgctccttcctgctgcccgaggggggaaaagggccgggcaggctgcggcgagatccgacctggggcttcggaaaatcctcttggctggagccaggagagtaagttgcgacctatcgaagttgtgttttccttcccgcgtcacccaggccccagcgcccttttctgtggtgtgtgggtgtagtgagccctggggcggggaacaccattgctgggggtcggaggctttgttgagagtctctgggacgagaaacgtggaggcaatagggaacaacctcgcgcttcttccac

SEQ ID NO: 32192 - DNA, 1255 bp, Homo sapiens
  chr18:31157891-31159146
  hyper
cgaggtgcggggcggactcctacacaagttccaaaggccaccgtgtccgcggctttcggcctgagcgggacagcgggaagcgggtggaacggcctgcacggagtgggcagcgccccaggaatttgggggctgagttggagggagaggggtctcgcgagggtttcagggcgtggctggagtagggggcgcgcggcgagtgtgcacgggtgtgcgcgcgcgagagggcgagtgtgagcgcggcgagtgtgagcgcggtgagtgtgcggccgcgtcgccattccccgtgacgtcagagtgtattgttgtgagcggggccgagcggagcatccccggagctgtcaccgcagcggccgcggcggtggcgcagcgcgagccccgcacgagcgagcccggccggcgccgcccccgcccctggcccgggccccgctgctgccgccgcccccgcccccggcccgcccgccgcgcgccgccgccgccgccgtcgcgcgcccccacccactccaccccaccccctcgctccatccctcccacccgccgccgccgccgccgccgccgccgccgccgccgccgccaccgcccgcgcgcctccccccgcggagcgagtgcgggtcaccgggtcactgggtcattgtctccgcgcccgaaccccgagcaccccgtggaatcccccacgtcatcatcagaaccatcaatgagatgcaaacatgaaagacaagaggaagaagaaggaccgcacctgggccgaggctgcccgcctggtacgtaccgccccccacacgccgcccgcgcctcccgccggccccgccgctcgccccgcgccggtccgcggcggcggagacggccacttccagcccgagccgccgcccgctcgccgggctcctgctctttgttattctgcgggagtgggctcgcccgggggcccctgtgtgtgtgcgtgcgcgcgcggaggggcgcagcgattatctccgggagccccgcgtccgggaccgcccgggacacttctccccgtacttcgctctcggggctctgctgtgccttctccacgggtgaatttccgagcgctcggcgcagctcgacttccctctctgccgctccggagacctttgtgtggcaattaccactccctcccggcccctccaccccccggaatttcatcaataactctgtgcacagtctgtgtgtatgttcggcgtttgtgagttcaaacattttacacgtgcatgcatggtgtgtgtccgacacggacttgtggggc

SEQ ID NO: 32193 - DNA, 625 bp, Homo sapiens
  chr18:31739025-31739650
  hyper
cgggttgctgtttctacttcagcggcggcggctggagcagcgggtacaggtgaggttgccctggcggtgtccatagcaacgctggagggggtggcagggagaaaggcgccctccaccctgtcagcctcctcctcgcctcccccgacctgcaggcgcgctaagcgctccgggcgccgcgctccgcgagggggagcagtgctcccaacccgcgaccctccgcctcagacatcacagttgccgcggcaacggccggaggaggaaggccaaggcttttctcccgctgacgtcccccgccaccagtacccagagtgctggggcctggatgagatctgcgtccgcttcacccgagcatgagcttgggtctctcggaggagcaggagacgcgggctcgaagccgcgggcctgaccctgatccgtggatgccgccgccgccttctcctcccctgggtggtgggggacagggcctgggaggcacggtcacgccgagtttgagcacgtgaccttccaagagcttgagagtcccctagagagcaggccccaccccaatccatcccgcctcgccggaggggtccctctggctttagtccttctcttctaattccctgtatgtcccgacccgaccaac

SEQ ID NO: 32194 - DNA, 977 bp, Homo sapiens
  chr18:31802468-31803445
  binary
cgctagcgctacattcgggctttatgccaataaggagacactgtagactatcgatcagactcgtctgctctcagagcgtgcggccgggcttccagcctggcctttaggcgcggtggcggcggtgggacacgcgccaggcgcccagagaaggacatgggacaatggcccagcccgaggacgccagacgccgccgcccgacccggggaaggaagctcctgcagccggtccgggaacccgaggcggggagggaggccagctctggaggtgcgctgccgctttaaaataaaggaccacaaagactgtacagtggggaaaacgcgcctggctaatgcgagtggggacgacttggggagggggttgaggaaggtagggggcacacgagccaacggcggctcacggctccccctctctcccgcctctctccttcctccctccccgccgggctgctccggcagacaaataacagaggaaggcgagtcactcaccgtggtcttgacaggcacgtagagcacttgcttggcgccgccgcctcccccgcggacctcgtccggctggcccagctggaagcccttcgatttgacccagaatttaaatttggcgttgtccgtggagctcgactcggagccattgaggagctggacgatccgttcgtattttttacgggtcaccgtcttggtcttgcctgagtccccgtaagtcctgaggcaccagtcctggaactggcggtacatgtcgcgctcgctctccatgttccccgcgctcggccgctggccggatgctcccagcgcacttcgcacctgttcaccctaggctcatgaaaaatgcagccccggccacgttgcagggatgcgaggtcccggccgcagcgggagcctgctttgggtgggggaagggatgggaagaggggaggagggtccggttgggcaccagcaatcaatgccccgtgctaccaagtctggtccattcgtaattgcaac

SEQ ID NO: 32195 - DNA, 995 bp, Homo sapiens
  chr18:35064866-35065861
  hyper
cgccccatctctctgaacccacaggagagaccgcgcagacccttgacccgaagaatacttcttattttatggtgatgaactagcctcgataatagccatggctgatatcacacccagttaggggggccataaataattctcttctcccccgcacagaagctataaaccagggccgaggcgcgatagtttatcaaagacgagggctggctccttaaataaaccgcggtgatctcacttgcggcgccccctcccacgccggccccctcctcccccactagagcggcccgcgtcgactcgatgggcggactcgatcgcgcacgcggcccgcgggcccggcggaggcagctcccgctccggggacccgggacgcgccgctcccccgccccaggctgcccgcgcaggaacttcacggccacggccaagtggggcccctgtcccggatcccgttgggcccggacggccgagagcccagggatttgggggggcgcgcgggctcccgagctcaggcggggcggcgggcgccctgccgtcctctccccgcgcgccgcgccgccgcccggcctcccgaagtcgccccctgtcggcgcgtcggccgcttgcgccacggcgggcgccacttaccccgggcagagtcttctgctcgtgcagcgcgctctgggccttcagcgctgactcacgctcgcagtaggtgaggaaggcgcagcctggggaggaaagcaagcgccaagaagggtcagtggggcgcccccgggcccgccgacgcgccctgccgcccgccctccaggctcccgcccctccctgccgctcggtccctgtccccacctctctttctctcccgtgcactgttctcggagcttctctgcctctcggtgttcccggctgtctgcctctcgtacctccctttgcttttctattttgctccctccgcggagtctccccaccctgcatcttccccccaccacacccccctctccttacggttctctccttacccc

SEQ ID NO: 32196 - DNA, 936 bp, Homo sapiens
  chr18:35145982-35146918
  binary
cgtttaaacaggctggaccggttcaagttcccagccagaccaggggtgggggtggcgagtgtgcgcgcgcggaggagggcgcggggggccgggaatgggcgcgctgtgggggcccgcgccacggcgggcggcggccgggggcagggcggcgtggggcggcggccaccgcgcctcccccgtcggcggccccgcgccgtggcgatggtacagtccgagacggcccccggctataaatagcgccaggcgcatggctcttcgggaggcgctgagattccgggcccggcggccgcggggagcgggtgtccgtgaggagccgggcagccggcctcctctctttgccttttgggggttctttttgtaatagcagcaggtgcaactttttgtattttaaaaatagtgatttttattttcgtgtgggtatgtaggggggctttatccaccaagctatgctctattagggcgccaggcgggcgaagcaaaggcagggatggcgggcggggcggcggcggaggtggaatgggcgcttttttcttccatctggctttatttatttatttagactagaaaagcgagccggcttggagggagtccgcccggggatccgagcgcgcattcatcagtgtcgagagaaaaaaagctacataaatatatattatgtggataaatctatagacaagagctctctcgcgcgcgctctctccctgtctctctgtgtgtgtctttctctgtttttttttcctcctcgcacccccaacctgccagagcagccccacatcttcctcccgcccggcatctaccgccacccaagccacctgccaggatggggctgggagctgtcgggccgcgccggggggcagagggacggggagtagagactcggggtccgacccccgccccaacccgcttccgaaggcggaaggtgggggtccccgtccc

SEQ ID NO: 32197 - DNA, 1433 bp, Homo sapiens
  chr18:43913838-43915271
  binary
cgcgccccgcagcgggccgcagcgattggccgccggcccccttccagccgtcacccctccctccctccgccacccgcgcgcccgcggtccccgctgtcccccgcggttccggcgaggccgcgccgcgctgcgctccgctcccattggctgcgcgcgcctttgtgtggcggcagctgcggccccagcgcctttgaatgtcgagaggggccgggaagggagcctttccatgggccatctgtctccccgccagccgccgccccaccgccgcccgcgccccgcgctccgcctcccgccccggcggctcccgcagccccgccgccgcccgcgcccgcgccccggagccgcgccacaaagggcccgcgcgcagccgccgccgccgccgccgcgcgaggagccaggatggtcctggtccacgtcggctatctcgtgcttccagtgtttggctctgtgcgaaacagaggtatcgctttttcctttcggggtctgcttcggagcgtggatcgccgcaggcaccggggcgggggcgggcgccgcgggcggccgggggctcagggcacacccgcgaggacgcagggcgagcggtggcttccccccaccccattttagggggacccccgagggtgggggcggccgccctcgtgggagcttttgtagtgaagttagggtttggcgaatttgggtcccttcctccccagccccattttttattttttgcggcggacgtggttcccccaaatcacagccccttcccctaatacctagccctgtatgatcgaaaggagaaagatacatgaccgtgtgtgtgtgtgtgtgtgtgtgtgtgtgtgtgtgtgtgtgtgtgagagagagagagagcgcgcgcgcgagagcatgcttggttttctgtggtttgctttttttgaggtatatgtgtgttttgtgttatgtgtgttttgtattcattttttgttcattagtaccgatggctggctagctgggacctgggtctctgccctatcccatgccccagcccccaccctctcgtgggcacttgcacgattttccatcccatccttttttcgtctttaaccctttttgtgcatcgcccttgtgctattgccctgctcaccccgccccccgcaactgtctttgtatgacagttgcatacacgggttcaagatgcttgggcgcgtgtgtgtgtgtgtgtgtgtgtctgtatgtgtgtgtgcatgtgtgcgagtgtgcgcgcgcgcctcggagagtcagacctgcgctgctgtgccctccttgggtccggctggagcggggcgtccggcccttgggtgttgtgctgtgtgtgaggatgaggtgggaagctgcccccacgccaggcctttgccccgggcagcggttgacaaagcagcgggccggcgcgggctttgtttttaactgtgataaatggggtgtgtttgcac

SEQ ID NO: 32198 - DNA, 1389 bp, Homo sapiens
  chr18:44772992-44774381
  binary
cgggctgctgctgccgccgccactcgccttctggggggccaggggcggcggcgggggcgggggcaggtccgagccggggtccccgagtttcccgtcttcctgcagcagcctggaggagttcaggccgagcgggaacgcgcccgcgacggccggcgcgcggtcccggctgctccccttctccgacggccctcggccctggaggaaccggccgcccccgactaaggggtcgccgagtaggacctccgtctcctcgtcctcttcctcgtcgtcgtcagggtctcgaccttcctcctcttcctcgccctcggggggcttgtggccctccacgtccacctcctgctcttcttcctcgtcgtcctcgtcctcggagctgtcctcgctggggtagcagcagctggttcccccgggagacagaaggcctcggtggtgcgggtgctgggccagagggggcggcgggggcggcggcggcggcggcggcggggccgggtggtggcgctcggaacccggctcgtcgggctgcgggggcagcagcagaagcggcgacggcggctgcggggggtggtggtggtggtggtggtggtgagggtggtgatggtggtggggatgcgtctgggccgagtggggcgcgcccgccgacgccccgtgcagcttggccaggctctccgcgtcgtccttgccgcccactggccggaaggcgctggaatggtggtagctgccaccgcccgctttgcgcccctccagaaggtgcggatggtggggcgccggaacccgggagcccgcggggccagacccggcggccgcggcccctgccccggcagctgccacagagtccgcgggcggcgtggagcccgcgctgcagtccccgccgctgccgcccgggggcgactcgaagagcgcgtcgcgagagccggcgcccccggcaggaggaggtgggccggagcccgggccgttggccactacctgcgggggctgccccggcgggggcgcggcctcggcgctcccagcagcaccgcctggctcagccaggtccaggaaggcctggcgcagcagggccgggctttcgcctagcgcgcagcctagcgccgagggcggctgaggcgggggctgcaggtaggtgggcaccgggagcccgccaggggtccgcggcggccagaacatgcagaagggcggatagaaggcgtccttgcggcccgcgggccagaagaggccggacaagccggccttgggcgccgcgcccgcgccgcctgcgcccgcgccccccagggcctcagcggcggcacccgcatcctctttcttatggcacaagctgaaggcggcggccgcggcagggaaggtgtaggggtgcgggaagagcccgccgcagcccgggaacttctgcaggacgccccc

SEQ ID NO: 32199 - DNA, 701 bp, Homo sapiens
  chr18:44777611-44778312
  hyper
cgactcccaaaccagtcaccacggaagcccaccgctgcccctcaacctaacgcggaaaatcctaccgctggggatctcaaataggtgcccagcaagctgtgtgccggattggggcggccggttccggcaatacctggtaacctctgggtgtctttaggcgtgtggctgccggcccatcttccgagggcgctcggaggcgaagcatccaagcgggtcctcgtatccagcgggcgggactctggcgggctccgcgcgaagatccgggctctggcccgagcgaatggcgctcaaaccccggcctggggagaatgacggcctgaattgcggcggggcgtcccctccaccgcagaaagtgtgggtacgcagaaacccgcggcaggagagccccaagtggagcgcagtctgacagcgtctgtctctgaactcgtgtcggaccgaggggacgccacccagcgggcagggtgacgtcaccgtctccctgacactccacattaaagggctggcatgttacagggagggagggggagagcgaaagccagcgcgagcaacagagagatcctttctcagcaggcacgaaagctaccaacctaaccaactcgcaattgacaacaacctcctcagccccggagtaaactgcagcaatggtgctggagccgcagatctgatttaggagtggaaagcgaacagtctgcctgcatccc

SEQ ID NO: 32200 - DNA, 341 bp, Homo sapiens
  chr18:44786792-44787133
  hyper
cggagacggggctaggggtgcacccttcgtcccggtcagctcttgcggctgcctacgttccttcacctgccaggaccgggaagttactaggctcgcccgcgggagtcgctgtccgagcttggcagtgctgaaaccgccggcgtgagctagggagctgcgggctgcggaggttcaggggcaaaaatctggatgctgtcctaagctagggagccgctttccacagcgtctccaaaaagtctagtttgccttctctccctagctctcttcatatcccccccaaccccccgcccacaagtgacaccagaacgttgtaaccaaaaattaattgccttaatcaaatc

SEQ ID NO: 32201 - DNA, 607 bp, Homo sapiens
  chr18:45534410-45535017
  hyper
cggccgggagtcgggtctctgccagcccagcgctcggaatggagctttgtggggctggggaagcaacctttgccaatgggaagggggtgtcacagcgcctcattccctcccagcttgcgctcctcggaataatctccaacagcgtgcctagaagcacagctgcttttgtttcgggcgtcggtgcttcccagaatcccggtgcccggacccagccgccgaaccgaccccgccccgccgcgggctttgttccctgcgctgcgcactgcgagcggcggccacgcgggggcgctgggccgggggcgggggccagggctgggggtggggcgcgcccccgggccacctcccccgcccctcccggctcctccccgctcctcctcccatgccccggcccccgcctcgcagctgggctcggactcaggcttagccgcagtctgtgagcctcctccccgcacctggccggccaggccagcccagcctacttgtctcgctgcgcccggctgctgcctccgctccaggggtcggcgccgggacctcctcctccgccgccggcccgcccgcgtctacaccgcacacccgtggcgcgccctccaggggcggtttttctccc

SEQ ID NO: 32202 - DNA, 1351 bp, Homo sapiens
  chr18:45662239-45663590
  hyper
cgaccaataagtcgctggagtggggcttccttctgcgcgaagctgggtaccagctattaaaagaaagaaggcagccgcccgctgcccacccgcctgccggcacagacacagccaggacaacggaagccaggaacagaaaggagcgaccctggagccctcaccacagagcacggcgtgggggacccgacgctggatgctccgcgcggggtgggcggcgggcaggggggcgtgggtgctgggttagggggaagctctctccatcgtccttcccaggccagccccgcggccgctgcgcccgcctgcaggaactcaggcgctccagtgggtgacgccggcccgggcgcccgcgggagtggggacgcacggggtcagtccttttgcgccacccacaccgggccgtctccggagctgagagactatagctcgactcgcctgctcgggtgggagtgctccccatccactcacccccaggttggagtccagggaagagccccccacccacccagctcagcgcgcgatttgagcccagggacctgacagggctcccgccgcgcgcctagctggacttctgccaatcgctcctttaatttctgcccgtatcgccggccctcgacttttgccaagttgccatggcttttgtcccccctccctcccgtccccaagttttgcatctgactctcaggaggaccaagcattcttgggggagacaatttaaactaccaaggtacacccgcaactccctctcggagtgcccttacgttccttcggctggcccctcgccccaaaggagcccgctggcgtgggccggcggcaatggggcagtggcgagagttgctctctgcagagttccagatcctctctcctatttcggaagaggtgcgtggccccacgccccgcaggagctccggcgaggctgggggagttgaacgctttgcggacgccgccacccgcgccagccagagccgccccgcggccacccggccacagggtccccgcagcgcgtagcgagaatgcccgcagcgctctcccggccgcccggaagggcttcctcccccaccccctccccacggcccggccgctgggctccccagagccccgatcctagcccagaggcgggccgaggccgccgcagacccacctggccgccccggggacgccgcgctcgtgcccgggccgtgtcctgagcgccgccagggtcccgggctgggaatccacgcggccgcgctgctcgcgggagcctgccgcagccggcgggaggttgtcattgattcgtgctgggcgagttaagccattccaggagtggttttgagagagcactccctccccaccctccaaccagaagtatttggcc

SEQ ID NO: 32203 - DNA, 796 bp, Homo sapiens; identical to SEQ ID NO: 28739
  chr18:45687770-45688566
  binary

SEQ ID NO: 32204 - DNA, 2659 bp, Homo sapiens
  chr18:45934527-45937186
  binary
cggccttgcgcccgcgccgcggaaggttgggtaccagcctccacagctttgcagattgcaaagataacgggagctgccgcttcgcttttctttggctcctcctggccttcatcctagtaaaaccagacaagcaaccggaaaaacaaagcagcacagcggccagagacaattcgctttcaacggagcaagagacgtacacaccttgagagaagacgcacgcagttcccgtgcgtgtcgctgggaacagacctcgcactaccccgcgcggcgacaggcaccgggccaggctcggcttcacttgtccgaggcttggaggaactgtgtgcgtgcgcccatttcccccagcttcccgacttgacagcagcaaggatctttgagtcctgcatgagcgacacctcgggcaaggactgtactctgctcagatctcatcgagaggtgctggatcccagcctttccagctcattttccaattttcaagaaaagacagcgcgaagtgagactgcaaaagtcccaggaaaacgtcactcaccaaaacgctcccgcgccttccaggcagaagtgcggtaaaacttttggcagaaaccacctgtggctgccgacgggcccgccccgctcgggcccgcaggcgccgccgagccccgggccgcacgcgcccgcagaagttcctttccagccccgcgcgccacttcgctccgggccgcggtgccagccaggaggcgcggcgcccgctcgctggctcgctctccgctggctctcccctccctccttccctccctccctcctcccgcctcctccgttgcatggctgccgcacggagcccctgaatagccaccgcagccccccgcctcctgcccaccgcgcggagggcgcccctgctccagccggcgccccaaggcgcgcggaccgccggcctcctagcaacggcccccgcaatcgctttccggcgcagcccaagcaaagccacccgcccgccgccccgcgacctcccgaactgcctcggctgccgaggtgctgtggagatcgcgaccccggcagccggcgcccgagcccggcgcgcgaagccgctcacctccgcgcgccgccggccctgcgcgcctcccgcacttggctccgggacgcagtcctggcgtcctccttcgccgccggtgtccgccggtccctgcgcgcccgagcctcgccggccgcgccgctgtcagagtctcgtggcggggctgcgccggcgggtatggagctgagcggcggcagcgggcgagcgggcagctcctccctccccgcgccgcgcctccgccctccccgcgccccgcctcccgcgccgcggctgtcagccccgcgccccgcgccccgcgcccgcgccgccggctcggggggcgcacagggctaaagggcccggatgtgtgcggtcgcctgtcgctcgcgcccgccccctccccgccgcgcggcacatgcacttgctgcgccgcagcccccgcccggctccgctaatttctattttgacagtaactgtggcgagtgggcggcgcggcggggggcgcccgggactggcggaggctgcgggcgggagtcaggacccgacgcggaggcggagtgggggggccgggcaccgccaccaaccgctcggggctccgcgtcttttctctttctttccttttttctctctgcctcctccaggatttaaagggacagccccggcagaggcgagggggccaggcggccgccgtttctccggtctcctgacgccctctgcggcccggccggacccgcccgcacccccagcgcaggcttgggaccgccgggtatttttaggtccacacccgacccggggcagcggtgcggcagagatgggctctgccgacccggggcagcggtgcggcagagatgggctctgccgccccggcgcacggctatttttacagagtccgatgggggaggaaataaaacaactcggcaactgcttttctacccgaaagtcgggagcaaggagtgggggcgagaagttaagtttcccaaatgctctcggcactccagcgagcgcaccaagacgcctagccagcacctgaaaccgcaagcttgccgcaccccggggcgccgaatctcagcgggcaatcgcgctcggcggcgctgcggcccggagtccccacccctctggagccttgggccccgcactccgcaccccacacgccggggagcagccgctggccgcccgtcactccccgggtcggcctggaaggcggccttccgaagcgtccaatcaccgcgcaacaatgccaacgggcgggcccggggagggcttgtccccgccccgtcccgccgggccccgccccctcggagtctgtcggggcaggagaatctcgctgggacgccgagtgctcagcggtgctggaagccacgaagggccagtgcgaggggaggaggaagggtcctggccctggagagggcgtgagcgttctcgggcgaggcgacacttgggcagatgttccctccagctacgggccggggaaactcgagctggctttgcctcctacctttttgcagtccacccctctgcgctccagacagacataggaaccctcgccctccttggtagtacatcggaggcagcaccctcgcacgtcagcgggtcctctccggggctcctccctcagaagcgggaaagtttgtc

SEQ ID NO: 32205 - DNA, 955 bp, Homo sapiens
  chr18:47087418-47088373
  hyper
cgctcgctgctttctgccgcaggacccggatcaataaagggaaggagagccgggaggaaatgatggagaacagagagaaaggagatgcttgatttcactcgccaaggagtgagtgctcatcggcagacactgggctctggccacgcgtcttagactccaaatctcggctcactggtccctttgaggaggtcgcctggtgttcccgtagccctccaccccaccgtaggagagcgcctgccacgagctccgcgcctcgctaagtgctttgctacgtgaactcttagttttcccaacatccctaagccgccgatacattatcacccacgtattgcggacgagagaaccgcctcggagaagctggctggctcgcttggagttttgcagctagtggcggagcgagcattccgagcaggtactgtgcgatcctccagcgccggccgcagctcacagccccttagctccgccgggttattgtgcggccgcgccttctgcacctgttgcggccctcgctaggcgggaagggagggagaagaggaggacaaaggggatgaccaggtggctctcccccgacggactcccggcccagggagcggatagaccactcccagagagagtgtggctttgagccttggagaggatgctctccttctccagggatcgcctccccagcggacgcagagtttcagggaaatgtccgcctccgccacttgggatggcagtggggagaggaggatctgggtgtccggaggagggcagtgggagaaagctggagctgctggagtcgcagctgcctgcggagcgggcccgggaggaagcggggccgagcgtgcggcgtccacgcggtgagtgtgcagcgctttcattcaaactttctccagtctcggttccggcgtcagcaaggtgtgaccaatcagagcccagagacgggaataaattatgcaaatcaccatctggc

SEQ ID NO: 32206 - DNA, 1775 bp, Homo sapiens
  chr18:47719964-47721739
  binary
cgggcgggtgtcccgggaatcgcatacccacgcaacgcgcgtggacaccacacgcacacacaactctgcatggaggcgtgtgcataggcactgttaaacgtgttttggccacccaagaagacgaacaggaaaaccaggcattggactatccaaaacttgttttcttaaaggtgcatagggcacatgtgaagaaaaggcctttgcccctctcactactgactccaggttgaaactcgaggggtcccgggcggctgcagcgctgccgcgagctcccctggaagcggtggcttgtccctaactttaaccacagcaactgctgcggaacgcgggcgtctccgcccgggctgcacctgttcccgattcggagcacccagcctcacacatcccttctgaccttgaaggcatcctgaaactcacaccctgctcccggttcgactttactccaaccccctccccgcagtcactgaagccctctttgtaccaaagaggccgcgtcaaaacatccatccccagcaaattcacaatgctcttccctggggtctccggagataacggcgcacccctctacccattgcttaccctcactccatccagccgccgcgccctcacgccaggttgtctcctccctctccaccaagtccagaacccccacctctcccaagtccagggttccctgttgtgggtatgcgggaggaaaggacgcctcggaggcgcgccctcgagagccggcgccgcagagcccctggggtggggtccacggcggggacaggggacagcagcgggagcaccgcgggggcccgtcccgcgcacggcgctcagagctggcagggtcgccctgccgttcggggaactcggttggagccgagcccaggcaacgaaagtgaggggcgcggcggggagggggcgacagccctggcttggtgctgagccgtggcgctgcggaacctctaggagccgggtggccggtcagtgcgggcgttcccggaaccgccaaactttctccgccaaccgaagttagggactccgaggacagtgacgaggaggacaccgcggaggggggtctcccgtcacctcccgcctccagtagccgagggagaaggcgaccctgagtactaggtggccccgagcgcgccaccccggccccggggcgcctccctcgcggccgcgctcacctggctgtagagctcgcccaccgacatggcccgggccgggcggggctcgggccccggctcctggctgccccgcggctctcagtccgcggctggcccgcctggcgccatgttcccgggctggcctggagtttctcgatcttctcgctcttctccgacctgccccgccggcttcccgcaggcgccgcggccggctcgctcccggcggcgcgacctttactcccgccgcggcggcgcagctacggccggacaggagttgcgagcgccgggggaggaggccgcgccgcaccactcccctcccaggtgtggggaggaggcgagggccggcgaggagggaggacccgctcgcgtcagagcggacggcccgtgcgccgccgcgcctctgagccctgccggtgcccggcccgacgcgccctcccgcgcccccgctgccacctgggcctccgggccgggggcggggcgctcagagaggagctccgggaccggcgcgggccgccccctgctggacgccgcgcgcgcgcaggcacaggtgcgccccggcgcccgcacctgccctgccgcgctccgcttccacccgcaccgggccccgcggagtccggcatgaac

SEQ ID NO: 32207 - DNA, 992 bp, Homo sapiens
  chr18:499804-500796
  binary
cggcctgcagaggacaccgcgcagggggcgactaaccagctgaggtgtgtcaccccaaaacaccagtgggcacaccccaaggcgggcacgtggaagggacgcggaaccgagggcaactattttccagtcggtgaatctgatggagaaagatgccaaatgcacttcccgagccagctgaactcctcgggcacctaatcattgccagatgtggcgagggcgcacggagaacatccccagtcccggagaaaacacccggccgccagcgcggggaccgctcgggccgggaaacggctagaggcgggaggagagaggactgggcgagcgtggggagcgctgcggcgtggaaaagcgaccgggagggatggcgatgcctccactctcctcggcaggttttttcaattaaaaagttggaaacgggaatccgtaaacaacgacttagggcttcaaactacttgcaaagacgcgatggggaggggaatacttgcgcgcttcaaaaccccaacctcgaggtctccagccgcgcctgacccgggagccgggtgcgcccccagtgtccgcgcacgaacccggcgccctggcagccccgactccccgggcccgcagcccaagggaaggttcgcgcgggaggcacctccgtggcctcccgcgcgccccgaagcccgttccccccgcccagagccccgcggagctgccgccgccctacctttcatggtgaccgtggggacgcaccgccggccggggagctccgcgcgagcgccgcgcagccgaggaagtcgtcccgagcggctgctcaccgcacgcccatggtagccgcgccgcgcgccggccgtctgcgcccccgtcctccctcgccgccgccggcccgcgctccccgcgctcccggctccgcgctctgctgcctcggggctgccgcgcgcgccgctctcgctctcccagcgcccctccccctggcccgacccggccgagcgagcggccgcgcccacgcccctctc

SEQ ID NO: 32208 - DNA, 717 bp, Homo sapiens
  chr18:5197028-5197745
  hyper
cggtgtacctggagcgaacaccatgatttcttccagccgctacgcccccagattaagagagaaagacaggcagacggaggatgggaagaaggccggacttggcggggtccggtgcaggagggcgcgctgggcgggcggcgggcggggcggtcagcaccccggacagctcccgccgctagatcctggggccgcagctccagccgccgccgcgcgctctgcctccacaatgcggccacagcggcggcgggaggaggagggtgaatccccgctcagtccatccctcattcctgtgccagctcggcgacgtacactgctgcttagggagcaaagcacttccaccgctttcacgcgacgaaggtcggaagagcaagagagagaaaggtaaacttcccggcaggggacagtgaattgcttttaattacctgctgtggctcgtcgccgtggatattggactgacatttaagatagatttgtcaaaaaaaaaaaactctaagagctttctttactctcgaggatgactctgagttctccgagttgggctggctcgaatagaggggcgggtctgtcaagttaataggtcctggaggtccgtgagtcctctctcgcgagtcccagtcctctgctaacgtcaggaagagagcaagaggaaggacacagtgactatggagcgctcgaggagggcgctactatcaggttccgctcccaggtggcaaatcc

SEQ ID NO: 32209 - DNA, 530 bp, Homo sapiens
  chr18:52495540-52496070
  hyper
cgagaggagtgtgtttctcactgcagcagttgagtcaccagcaagacttgcctgaggtgagctccgcacatccgcgttgggacttgcagacacgccttcttctcacacaaaccttacccagccccgccgccgcggcggactccgagggtggtgccaccagccctgccactcgcagtcctgacgggcaggggctgcggaccgcccggccttggacccatccggagccacaggttggaggagataagtagctgtccccgtgctcatcgccctgtggagcagatcctgtctccttgctgacggtggagcccgggagttccagggcttgggaaggggaaggaaacctctctgaaatctgacacctgctctcccggcaaggaaacttcgcaggctggtgagttgggaaggcgggctgctgctgctggaacgcgttcccacccacccgggtgctgcagcgccggcctgcgccgtgggaagtgaggcctctgtgtgtgtgtgtgtgcatgtgtgagtgcgtgtgcaccttcgatcgc

SEQ ID NO: 32210 - DNA, 1263 bp, Homo sapiens
  chr18:55020285-55021548
  hyper
cgggaatttggttgatggggtgtttggggaagggaaggcgtgggggaggggtgttttggcctctccgagactctttgggccagataactgcgcggtccttccactcctctctctaattctcccttccccctccctgttattttttttttaacccaaagcccctagaagccgctgtccaaatcgatgtgattgcatttctcgtattcttcctcagcatcccttccctcatttcagaaatgggggttgggggaggctttcaggagggtgagggtggagggaaagacggtgtgtttgttcgggagggggcggcgagcagagatggacaggcgtgaggggagcgccctccccgcgccctgtccgcagactccgcgggccgggcccggggcggtgctggcggtttaatggcgcaggcgccggactcccctcgcgccctcctcctttactcccccacgcctatcaaaggacacgcgggtttattctcaggaagcccctggggcgttctctctcaaccctttcccccgcagccaccgccccccaccagctttccgggatttctgcaattcccccgccccctgcgggaagcgagcctcggaagggccgcccaccctcgccaggtcggagtcaccgctccgcgctgggccggcctgtgaaggctccaggcgcagcttgacgccgctctgcgagagcccccgccccgctctgtgaccccgggaactctcccagcagggcctcctgacgggcaggtggcaactacaaagtgccacctgtggtccaagctgggaccgaggcgaggaacccagaggagcctcgcctggaccgaggagcggagtaggccggcggcccccgggggtccccagccaagttataggaagtgaaatcggacgtgggtttgggaaggaagaggttaaggcaggaaccacccccagactttccctgggtctccggtttcctctgccctttctccaaaaacaattctatggggctgcaaaggcgtagcgggtcaggctggcggggcggccgctgtccgcggtgctgattccctggtcctcgcagcgccgcgggctccagccctgcgcccggcgtgcgccctgctctccgcatgacggccattttatggtctctccggcacccggagggatggacaatgcagatggggttccctagttttctttttttctctcgggtgtgtgtgggagcagagggtggaccaaatgagaggggctccgggacggaacggagcccgcacgcgtaccagccgccctc

SEQ ID NO: 32211 - DNA, 979 bp, Homo sapiens
  chr18:55102427-55103406
  hyper
cgagccgtcagccaaacctgaaaagtgcggccccgccccctccacagccactggtagcttcccgtggaaggcccgcctcccggggcagctgcggcctcggagtggttgcgcttggcgcccgtcgggcgtggccccgccccaggtccgggagggtaggttggctgccccggcgagcggcagagcccttctggacagctcccgctcacccaaacagaagacgtcggcgccggagcgggctcggacatggcgaggctgcgagccggcccgagcggcggggcccggtgatccctccctccctccccgtcccctcccctctcccgcacgcacgccccgtccgcccccaccccgcccccaccccgggcgagcccgcccgcagcccggggcgcacacccgcacgcgcactcctctccactcactcccgcgcccgcccccactcccgcagccgagccccgccacgcgcgccttgcccgcccgccggccgcccccgccgcccccgccgcccccgggccctgatggactgaatgaaggctgcctacaccgcctatcgatgcctcaccaaagacctagaaggctgcgccatgaacccggagctgacaatggaaagtctgggcactttgcacgggccggccggcggcggcagtggcgggggcggcggcgggggcggcgggggcggcggcgggggcccgggccatgagcaggagctgctggccagccccagcccccaccacgcgggccgcggcgccgctggctcgctgcggggccctccgccgcctccaaccgcgcaccaggagctgggcacggcggcagcggcggcagcggcggcgtcgcgctcggccatggtcaccagcatggcctcgatcctggacggcggcgactaccggcccgagctctccatcccgctgcaccacgccatgagcatgtcctgcgactcgtctccgcctggcatgggcatgagcaacacctacaccacgctgacacc

SEQ ID NO: 32212 - DNA, 762 bp, Homo sapiens
  chr18:5543478-5544240
  hyper
cgcgctcgcccccagcccgaggggcaacttaaaacatggcgccccgggcgggggatttgtgcaaattggcggagaagggacgcggggaccgagtcgccccttcggccagggatcccagggaggcccccaggccggaggccggggctcaggctctgcgcgccggcccagccactactgcgccgcggcgggcggagcgggcggggggcgcggcgcgcaggctcggcccggtgggggtcccggcgagcgggagggcggttggggaccccggccgcgccgggcgcggggctcgggattcgggagaccgcgcggcgccgaagccacgcgtcagccccactgtcccgcgcgcctcgccccaggcctcgggctcttcctccgcacctcgtaaagccgagaccccctcgcagtcccccactccgagaggcggaaaagttacctgggatcagcagggagcccgggcgcgccgcggcgtggggactaggctcgggcgcgcgtcctcggcggcggtgcgcaggagactcgggcgtggggaggaagccgcagcccagggctgctcgccgctgttccccccgccccctgttgcaggagacaccgaggctccgcggagctgcggcgggggcccacgcccagagaccgtgcgaggaaagccaacctcgtcctgcctgccctcccagccgcgggggagggggccaccgcagtacttcaggacagttacatgggcacagcctcctccgtcctggcgcagggtcaggctccgcggacgac

SEQ ID NO: 32213 - DNA, 1838 bp, Homo sapiens
  chr18:5628946-5630784
  binary
cgccggccaggagctccccggcttctgagcaggacgcgccaaagggagttgggaggctcagcagcccccagcgtcgccttctcgggtgacgtgacgctctctctggagcgcgggcccgcctccgccaagcctccaccgcaggtccttacagccgagccacgggaagatgcaacgccgggcgaggggcgcctcccggattttgaaaaacagcctcattcgcctcgggaacgcctcgatcccccacccgcaccctttggccagatgattttaatcctgggattccgcgttggtcgtgggggtaccgggagctggagctggaggagaggagccggcagcgcggagttgccggggtgcagctgcgcgcagctggcggcgaggggaggcggtccctgcggctccgccgggctgggggaactggctcctgcgcctctgcctcccggaggatcgcactcgctcatccttacacaccacacacacacacacacacacacacacacacacactgccgctagcgccccccacgccacaagccggaatgcggaggtcagagccactgtccacttgaaagcaggaaagcaggggctgaaacgctgagatggaggcggaggctctggcctcatctgcgaggttcgcaccttcccggaaggcccccccctcccccgcgtttccccagggcgagcaaggtctagcttctgagactccgctctctgggctagcggttcgagctgcaggggggcggggacggattcggagggagcactagagagagagcccgcgctcactcctgccctcctcgcaaagaactggccagccccactcgcgtccagcccacaactaggctgccgggaccggggagccagaccccaggtcgctccaactccggcgagggcggggaggggagtgacagcagcaactagcgcgcgctggcaaaagcacagagtctcggaataggctaaacggccggcgcggaggggtggaggcaagagggggcggaggaggagttgcccgagcggagagggatgacgtcctccagggccttgggctccgaggaaccgaagactggtgcgctcgccgggccccgcgcactagctctggggttcgcagaggcgccgcgcccggcttccgcggcagctccaacacagcgcgcaggcggtcgatcccggtcagcttaaaccgggcgcaagccctctgtccccctcaaagcacctctctgctcgtccctagtctccaggtgcccgtctgagagtccctgtcgcctccgggcggacccggccaggcagcccccggtcgggccagcctcgccccttcctcgctttctcccccatcgacctcgagccaagggcaggcggcccgcacccgcgcccctgcccacggggctaggcggcgctcccggcctacgcccggctgccaagaagagaaaggcgctcacctgagtcaccgaagccttcctttggggcccctcccggagcttgttcgcagcccgcaggcacaaccttccttggagaaaaaaagtagcgcaagggcagagagaggtagggctgctcacaggtccctccgcaggggctctttccttcgaattctccggggtccagtctcgggctcggcggcgggaaagagctcctggaggctggaaggggccgccagacccgggctcctcccgcagctgcggtggcggcacctccaagttgccacctgcagcgcgcttcgggcgcctgtgacagcccgcgccgctcagccctcgcgggcccgccctccccgtccgctcgttggctgcgcccggtgcccgggcggtccccgcgctctgccccgccctgagcccgcctcccagccgcgcgctc

SEQ ID NO: 32214 - DNA, 981 bp, Homo sapiens
  chr18:56940873-56941854
  hyper
cgcggcgggatgcctgatgggctcgggaacctggtcgcggcgcacccctagtcctgcctcagtggggccgacgcccttgggctcatctctccccttgcgtttgtctccctctacttcgggcttaccctctcacttcagactaccccctgggggtcacctccctccttggacgcacccctccccagcttcagactcgcccctctagccccctctggctcacctccgcggggccgccaccctggcctgtgccccctggaagcgccgagacccagccgaaggcttcccagccccgcactcgtcgcagtttgaatttcccctcgctggctcccttttcgggacccactcctttcttggctgggttgtacgaagtcccggacctcgcgtttagtttgtccgtctatatctgttgtaactcctcccagtcccctcggacttgagcgccggcagcctccctccttccccgcagcgcccaccccagggccatttatgtccgcaagtccggtgacctctagcgcccgatcgcccagcaggagactgggagccccgagtcggatgtgctgccgggctcaggtcccgcaggagacccacctggagttcctcgctcccgccccttgtcctgcggggagggcgggctcctttactgatgagcagcggtgtcgcactcccgcctccctccaacactccgggccaaggagatggcccagagctggctggggaaggaccttctcccggggaagaggcctctcgcctccccgagggttcaggagtaattggcttgcagttctttctcctttggaccccctcgaggcttccgtggcccacagtgactgatcggccacttggaaagatgattggatagggtgagtgtgtttcacctccagcagcgcggatggacaatggcgctgtgaacgtctcacccctcaaatctgaggcgagacccgaggcgagcgcttggccttccctgaactggtggcctgaacc

SEQ ID NO: 32215 - DNA, 1477 bp, Homo sapiens
  chr18:57363523-57365000
  binary
cgaaagcagccacccgtgtttgctatgccccactgtttacacccaaaatccaatccaatctccttcacagacttccacacaagtatttcagggagcggcaaccatcctcaggatctcagggcacacaccctagacgcaaagtcagttgctcagtgttgctctgactccgatccaaccaaccctcaaagattcgcaccgcgcggcacgcacccagcaggttccagcgtaaaagctgctccggtcccaagcgcgtctccaaacccctcctttacagcgccgcctccccagccagccccggtgcgcagtggcgaacagcccgcagagcccccaggcttacctgtagcatgtggtgagctcgcctgaagacttcagacacgggtatttagtcgtcgcgattttgctctctgagcagatttctctatgaaaaagtgcagaggaaatgttcgattctcagcgggagagcggaggcgggcagcgcgcgctggggaatccctggcgcgtggggatcgccaggctccccgtcccggcgctctgggcaggggctggtccccaaacgcgtacgcggggcagactccggccacagggacgagccacgcgagggtcacgacgaagcgaaccagctccaggagaaaggaagcggggttcacgagctgtgccagccagtgtggcacccggggggaggcaggaacgcggggcgaagggtatccctgacgcgacccacggatggcagggcgcaaaggctgatacccgggagcggagggaagtgtcgcccaggacagctgagcactctccttatccccggagaagtgagggcgtgcggatcgctgtgggagtgggcgccggggaggaccgcccgcaccccgcgagccgggcgcgcatcaagcaggagctcgccctccgctggggcttgcagcgcttacctgtcgccgtcctccggctcctctctgtaggtccacgtgtgtcccaacgccaggagcagcagcagcggacccaggctcctgcccagctggcccctggcagctcctccccggctcggaggcggcggcaccatcagggaagctcccggcttcttcccagcgccgagctccgtccggaccaagcgtcctgctcctccgcggccgccgccgccttccctcttcccggcagggggcgccggagagcaggggcgtttgcaccacctgcacggggagcaggggtccggaatattatggggctggggggaaaatgaggctaggagttggggtatcggatgcaaacccagcagagaagcaggtaaagggggtacctgcggtgtccggctggcgcgagggccctgaggttcaagttgtctcgtcgggacgttcacgtccgattgacagacttgctggactcggcttggggctgcgccctcgcctcttccctctccctcctctgggagaagcgcgcagggtggggaaagcgggcggttgtttgcattttgcaccagggtctcacgacc

SEQ ID NO: 32216 - DNA, 799 bp, Homo sapiens
  chr18:5890711-5891510
  hyper
cggcgcgcgccgctaccgcgccctcgggctcctccggctcccggcgcgccccgcgcatgctgccctctgcgccgcggaggttggtcatgctcaggtcgagctcgcccctcgggatctcctgggagccgcgttcccccggaggcctctgccagctgcagctcgcgccctccgcgtccccgcccctatcgcggcccccttgcaagggcagcagcgcgaaggcgctcagcgaggagtccacgaaggagctggccgtgctctggcgcccccagctctcgggtgggctgcagggcgccggactgctgcagctgctagcggctgcggcggcggtggcagcggcggcccggcgactgcctgccacgcccgagcgctcgcggtagacgctgtacacggcctcggccaggctcgggggctcccgcggacagcgcggggaagaggccaggtccggcggggacgcggcgccccgagggcggccgccgctcggcgccgcggggtgaggaggccacgagcccttggccagcatcgccgccgctccgaaggcgtccccggagccaccgcagcccccgggcttcagctccaggccccgcgactgcacgtagctgaggaagccgttgagcggtatggccccggggggcgccgcggcgggggcagacgacgacgaagaggcggcggcggccgcggcggcggccgcggcggccgccaggtctttggcgcggaggctgtgcacgtcgatgacggtggagtagaggtcccgcaggttgatgattttggtcttcttgtcccggttctcgtggaggaccgc

SEQ ID NO: 32217 - DNA, 864 bp, Homo sapiens
  chr18:59001027-59001891
  binary
cgaaggtctccggagagtcgccggcggtgccaggtaacgcagagggctcgggtcgggccccgcttctggggcttgggactccgggcgcgcggagccagccctctggggcgaaatccccgggcggcgtgcgcggtccctctccgcgctgtgctctcccagcaactccctgccacctcgacgagcctaccggccgctccgagttcgacttcctcggacttagtgggagaaggggttggaaatgggctgccgggactgggggagctgctctctggaagcagggaagctggggcgcaccggggcaggtggaggacgtggcgcgctgggagcggggactgcgcgcgcctggggatggtgactggggatccaggagcgcggcttgtgggggcgcttggcacggcttcaccctcgctggccccgcaggcggtggcgcctccctccgcctgcagaggggacagggtggccgcgtccctcgcacagagatgtgcgccgggaaggggaccagagagccaggctccggggaggcgcaggcacctacggggccgatccctggtccgtgcctcgcgccgcgcccccgccggagctcggctgtgggaggagaatgtggtgggtactcgagtccccgccacctgccggacttcgccaactccccggatttcctgtcctcgggccctgacactcccaaggaaagctctgaattgcgctcgctgtttggtttttgcttgttgtagttactctgggggaagagccgggggcaagggggtcaaatggggctaaagtttcagatttgcaaagagaacgttaccgaggactctcaacgtgtccttagcaatcggagagactgcagcagcctttgcctagctatcc

SEQ ID NO: 32218 - DNA, 992 bp, Homo sapiens
  chr18:67067910-67068902
  binary
cggggagccgggtggggagcgggcctcggggcgcccggcggcggaggcgctcccacccgcgcggagagggatggagcgcgtcttgcgagcgtctccgagcccagccaccccacgggccagggggagggagcggggccggcgcatcagcccgccccccccggcccgccccctccccccgcgccggggagccgcggtggtgcgctccggccagctgtgcgccgccgagcgaggcgccagcccgtgggtgctgccgggggcggcggcgcggtgggggctcccgcagctggcggaggcgcgggccgcggcgctgggctcgcggcggggagcgaaggtgagcgccagaacgcggagggctggcgcggctcgcggcgccgggccccgttccccgtccgcggcggccctgcaggcgaccccgcgtccccaccggcgggagctcggggaagagcgggcggcggcgctgctgctggcggcggccggctggatgcgagacccgcgcagacccggcggcggacggcggctctcgactccggagagcggatcgcggggcgcaggagcccgatcgcgctggccatggcctccaactttaacgacatagtcaagcagggctacgtgaaaatccgcagcaggaagcttggggtgagtggctcgctcggcttgctccttccccggcgctcgttcggcccggctggctgcctggggggggggcagggagaggtgacccgtgcgggtacagggcagagagggacccggcccttaggcggatggcccgcttgttgcttggccaggtgggggcccacacctgccggggggctccgcagacggacctggggactccaggagcgcctgagtccccatcctcgagtgcaccgggctgtcttcgaccgtgcggggaagtcagtagacgaaaggggttgtcagttccaacgaggaacgtgccttggaggaggtttctttgcggtgctatccacgatggtctgttctcaaaagtgtgc

SEQ ID NO: 32219 - DNA, 915 bp, Homo sapiens
  chr18:7116852-7117767
  binary
cgcccgcccgcaaaaacagaaaatgaaaattcgctctgagtttctcttctcaatccttgcaacgcgcatgcaaggtgctcccttctccgctggtccctcgccccggcgcgcccacggtcaatcccgcgcagtgaatgagcgggtttggccacttcgcctattgcacaaaaagcgcgggtcgggaaggcgcatcagtgccctggacgccgcctgcgggtccccctgcccgggacggctggctaggggcgcccttctcgccgcgtctctccccactagcccgcttggctgccaggggccccgaggaatccgccctttcccggccgccgcgacccagcttgcgcagccggacaatgagggcgactcgggagagctctttctccattcatcccccgcgcccggccaacagccccgccacccccgcccgcgcagccggggcactaaaagcaacccccggcgccccgctccgggcgccccgctcccgccacccccagcactgctcgcgtagatggcgctcctgggtcgcgaagtcccgcaaaagccagaggcgaggctgggctttaaccccaaagcccgaggaggttaaagcctaagcctgcaaagagcgggcagcgtccggcaggagcggcgtccccatccagccctccccggcaagcgcgggagacccacgtggccgagacacccactccgaggtggatcaggatgcgcgcccggactccagcagccccaacgcgacgggctttgtccgcggccgcccccgcccgcccgcctgcgggggacagggaccctaggacccgggccgggctcacctctctgccggcactgcgcggcgacacacagcagcaagaccaggagcacgcccccgcgcatctcgcctccgccgccactcggtgggtctggggagaaagccgcgcgccc

SEQ ID NO: 32220 - DNA, 1912 bp, Homo sapiens
  chr18:7566557-7568469
  binary
cgccttccgtgtactgcctgcggctcgcttcgggcccacacgggacaccgaggcatgatgaggacgcagaacagcagaagcgcgccctgcttcccgggcgccagtgctcggggccagcggcgtgtacccggcgggcccggccgggagcgggctggcgatcgcggggctcggcgctcccggctcccgcgccatctcccggcgcccgccaacttcgctccgcccgcggcgtagagaagctcgcagccctccggagcctcagcgatctcctggctcgcttttcccgcagccgccgagcagcgcaggcccggcgactccgggtgcagctggccctgtgcggtgacatcgccgtccggcgccaggctcgaagccgcctggccgcgcccgcggggtcgcaggccgctggtcccgcccggccgcgctcacaaactactcgcggctcgtgacccgggacaaacttctggcggcggcgcagcctcttccacagtcaccctccccagagccagctaccaaaatagaagacgcggccggggcgaggaggtgggcggggggagcccggtggccgctcctccccgcgcggctgacgcccgcttcggcggcggtagtggctgtggccgcggggccgcccccagccgagctcccggaggcgctcgggcgcgggccggcggggcacgggcgctcacgccctctagcgggccgcggcggcgccgggcggccgtgacgtgagcgctcccttcagccggcctgcggggcaccgccagtcagtcggggagcaagagccccgcgcgcagccggcgcgggctcggtcatcggcgcgccgccgcccggggctgggcttggggctgcctgtggagaggcggcgggcggaacgcgcgcggccacggccacggccaccgccacggccacggccggcagctcgggtcccgggtcccgggcaggggaaggggagaggcggcgagctcagcaaccggaaccgagggaagattttggctccgcgggctcgccctccgctccctctgccagcggcgccagacgccgagtggggccagggacaggggaggaggacccaggaccctgtgcccgcgcccctggagccgctggagttcggacttctgcaactgttggcactttgggggcttggcttagcgctctgctgtttacccgtctctcctcgctgcctcggaaccaaagctcccggccccctccgccctcgcgcgcccacccaccgccgccggggagcggcccggcccgcactcagcaccatgaggggacttgggacttgcctggcgactttggccggacttttgctaactgcggcgggcgagacgttctcaggtaagcgggaccgcctctgccgcccccgaggcgcgcgggccggcgcgggacgcccgggacgccgacagctccctggtggtagagccctaaggctggcgtcggggccgggcggggggcgcggcgggccggacaccgcttctgcctgtgagccgggcgctgggcgaggggccgtggggctggcaggcacccagtcctcgggcgggcggagcggacggaccccgagggcgagctccccagccgggactgccagctcggccgccgtccttccgcggcctgggctagtgctcaaggttgggcggcttgcactcttgagtccctggccggctgcaaaaggaacagcagaaaactttgcttgaagttcccagttgcagccgccgggccgcctggcgtaggcgctgcgcggtccccgccgaccccgagcagcggccgggcccaggccgctggtgttcggctgcgcccgcagcgatcgccgggaactggcggccgctccggcggcggcgatctcccggtgccctgccctccctgtcgccccctgcccggcgcggctggcgaccccgggaggtccccgcggtcgtgcagc

SEQ ID NO: 32221 - DNA, 749 bp, Homo sapiens
  chr18:77547846-77548595
  binary
cgcgaaggagcctctcaaatattcccggagcacaggctaatttagaacgtgttatcctgacaaggcggcccagccagggaggagacgccggggtccgcgccgcggggcgggcgcttccccggacccgggggaggcgggacgcaggcgaaggccgccccgggagagcggggtcccgggagagcggggtcccggctgtgggggacgcgggccgaggctgtcgcgaagccgctgacggccgaggcgctcccggttttcgcggcgcacaagggttgcccgagcgctcagagcaggggccgccacgcgggcgcccggtccaacccgcggcctcccgggtccctcctagcggggccgcagacgcccgcgagccgcgtccccggagcgcagaagatccccgcgcacagcgcaggccccgccggcccggtggacccgcttgaggacgcggagggggcgcgtttcctctgcggcgcccgcacggcctctgcccgcctgtcccgcgctcccgcccggcaggcccagctcggacgaggctcagctgccgcccccgttgcctttgtgggtttttctgcggaagccccttttcctcgggtggatgggaccctgcgcgtggaaccccgcacagcccccgctccgccgcgggccgcaggacccattccttctccacggtggcgctggggaggggctgcttccacccaggagattcgcgagggagagaaaacatgcggctcacatccggacggcagccccgcccc

SEQ ID NO: 32222 - DNA, 1095 bp, Homo sapiens
  chr18:78004575-78005670
  hyper
cgggggagagccgggtgcgtgctctgggtctgcgcgggggagcgcgcctggtgcctagatgtttggtaccgagcgggtgggggacgccgggctcggagccggcggcaagtctcctcctggcaggtaacaagcctcctttgcagccttgaaggcgccttggccagggccatcccacggcccgggcccccagagcccccccacggccccgaatccgagcagcccctggccctcaactcgccccggaaaggccgccctcccctccaatgtgtggcgcgccccgatcgcctctcactcgtggaacaaaagagcagctcccgcggagcgggtccagagtctgcccggactgtccgatggccctcggccctctgagcgccgcggctgccgggctttgtgtccgcgcggggggcgggaaggacggccggggtccccagtgcgcgtcccgcggagcggcgcgcggcgcccgaactggaaagttgtcgccggcgcctgtcgcctccacgccgccccagtccccctccgcggggcgccccattcattagccaggagactgggcgcagggccgccggggcgggcggggggcttaccttgctcttgacttccactgcgctgcaatcgtagaatcgcaaggtctgagacttgtgaaaacttcggttcatggtttcggccccggtcagcctcgccgtcgccctcgctcctcaggggccgcagaaagactcccgggggcggcgcccccaggccccggccccggccccggcccgcgctcgcttggccggcgggctgctcccggtgctgcgggcccgagctgggctggccgcgcgcctcagggactccaggggccgcgcgcgggaggagcgcgggggacgccggcgcgcgccgccccacctcccggcgcccgcgcccgcgccccgccccgcccccgagccccggaggacccgcccatatccccgcccacagccccgccccgcgctccggaggacccgccacaccacgcccccacgctgcagctccgcgtcggatcgccagtgggtgcgcgccctcctgtccacaatcccagagcctggggaaaggagcatcgcggccagcccaaggcgtctc

SEQ ID NO: 32223 - DNA, 1558 bp, Homo sapiens
  chr18:811501-813059
  binary
cgaacgcaacgggaggcggagtggcatgattccgtaaaagtggacgctgaatggtaaatttcccaacccccaacccaaaacaaaggaaaactttaaacatgttgcggttttcaatcaaaccaagtaaagccagaaaggctcatccactcgccccacacacccgctcctctccccgcacagctgctaccggcgtcggccgatacacagacccccagcctttaggacccaaaggggccgcttccctcgcccctacttcggccgtaggggcaaaaataaacctctcctccccgtcgccgggcggtccacacgaccccaaagacaaggggtggggagtgtccccacgcccctggaacctcaggtcggacttgggcgggacccggcaggtctggacagggcagagaccgagtcaggggcgagcaggtagcgcggggaacgagacaagcccgccgggcgatccgggggaggggagaagtttcttcccaacttcccgactcgggcccgcgggggcggggaaccgcggcggcggcggcggcggcggctccgggcgctggggcctagccctgtccgggcagaggtggaaccctccgcccgcggggccccaccgggtccttacctgtcctccggccgcgctctcatgagtcgctgctaccgcagctcgaggtggcggagggcggaggcgaggcccgcgggccctctccctcctccacctcctcgtcccggggcgcccggcggcagcaacgacggcagagccggcccgggacgcgttacttcaggaggagggagttcccgggctccccacgcctcggcctcactctccacctcctccgccccccccccccggccccgccccctgacttctagcgggggcgggggctgcgggtacctgcgcgcgccgccgtccgctcaccggaactcgggccacgccggcccggctccggggcccccagccttccggcgcctacgcccccgtcaggtcccctccgcgggctccgggccgctttgctgtggtcaggataggcgaccggtccgtgtcacttctcccgacccaacatggcggcggggtccggggcggattcccgggggcggtgcaggccgagggggcgtgaggaggaggtgcttccctgcccggagagcaggcccgcggcgtcccttcccacccgcgaacccaccgacgctcggctgccgcggagattgaatggagcgctccgattctgcccctctgcctttctctgttccttggcccagctctcagtagtggccagggctttggggcttgcttttgtgggggaggacggggttgagtttttttggttggctgtttgcttctcagcgctacgcttccgcaccctttgtcgttggtagtaaaatctcaagcccaaccgcgtgagccgggggcgttactcacaccctcatcaccatcctgatcgccgtccaaaaaacgttcacgtcttgcctccttccgaggcagggatcctgtccctgcccccaggagcttcctgttgactgtaggtcgaaccagccttgccgggaggggaaccgaagctgagttctgtttggc

SEQ ID NO: 32224 - DNA, 967 bp, Homo sapiens
  chr18:905728-906695
  hyper
cgggtagagccagtgagcttctggccgctggagaaccccccctcccccaacccggcccacaggatgggggcagggcacggcccctagcttggtttcttttacctattcttgggacgagttaggagaacttcagctctggagcctggccgggggttgagcgtgaagctccctcggactttgctttgttactgcttgttctggactatccgggtggggtctctctctctcctccaccctttcttttcatttcattccaattctttcccctgaagagctttctttcaagtgatccgtgttccaactgcattttgaatcccaggctgtcttggggggcgtgcggtggggagggtgttggcccggtgtgattgaggaaaagcgacttaagagagggaagaacaaggacgagactgcgaaggagggggaaaaacaggcgcaaaggaggaggaagggaaagccagcaggcaggcaggaccgggagagcagccctgcctggcccgggatggaggaaccttggcttttttcttaaccccgggtttctaaccggcaggcgcggcccaggttcccggaggcagccccagagtcgcggaccgatgtgccaggctgtggatgagccctgggtaggggagggttcgtaccagcggcgcctggggcagcgaggagcgcgcgttctgcctgcgaagctgccttctccgagccccgcccaggaacattagctctggggggccgctgatcattgatttggacggagagatgggttctgggttctgtattaggattccagcatctgggctcgaggcagggcaatatccagaaagaccccagggttcggggtacccgggccagggctgaggcgcatcgccgagcaaaggctgggtgcgaggcgtgcggaatgatgcgcttgccttgcccgggcctctccaaggatggagaaaaggcgagtgaagcagcgaagtacgactccaacccc

SEQ ID NO: 32225 - DNA, 576 bp, Homo sapiens
  chr19:10024009-10024585
  hyper
cgtcccctacccaggcgtgccgggcagggtcgtgggaagcacaggggtagagggggacaggtgggggccccgggggctgcggcggcggcagcggctgtggcgcgggtaccacgccccccgggagcgccccccgcgcggcggccactcacgattttctcagaggcgcccgcacgggacacggtgccgttgagccccacgagcgagggcagcgtctgcgacatccagttggtgaccatggccatggtgctcagcacggccccgatcttgagcagcggcaccgacatcgcgcctccgcctcatgccccgcggccgcccgccgcgcgtcccttctctggcccgccgcggggcgctcggtccctcgacacccaggcgccccgggggggcgtgggggagggggcacgagcgcgagctgcggggcagggggtccgggacggggtgagggggggctcggggacgcgggctgcggctcggcgcgcctggcgggctcctcttataaagcgccggctcgggcccccgccccctcccgcgcctccgcgccgggcacttccagccgccgtgacgtcacgcctccggccc

SEQ ID NO: 32226 - DNA, 183 bp, Homo sapiens
  chr19:10121047-10121230
  hyper
cggcggttccccatcccggcggggcccacgggcaaggcggggaaccagtcggggcggctgcggggcgcggcgacttctcgggctcggtgcagtcactcgcggcggccgctcctctcagggtccgcgggaaactgcccgagaccccgccctggcctcgccctgcgctccagcgcctggccaggc

SEQ ID NO: 32227 - DNA, 146 bp, Homo sapiens; identical to SEQ ID NO: 28766
  chr19:11466008-11466154
  binary

SEQ ID NO: 32228 - DNA, 798 bp, Homo sapiens
  chr19:11590392-11591190
  binary
cgcccccgggatacgcccgggctgccgagtgggaatccgagggctcgggcgaggccgggcccccggggccctgggggcggggcctagatgggcgtgcccgggcgtggccaggcagggcgtggcagggcgggaggggctgcgcgctcgggagctgaccagctccgtggctgctgaaagcaccgagcgcggggctagcggtgcgggcgagcaggcgggcgggccgcgctcaaggtcacctcgcggcccagagccttggcgaggtggggagcctggacctggcctaagggggctgtctcggcctcccaccccatctcccggggggcggagacccgggagcccagaggtgcccccccaacccgcgggccctcctctcccctccccctccccgcagcccgaggcgcccgcgcgaggctgcggcccgcgaagaagcgccgagaaacaaagggacgcggcagcagcggcggcgggcccgcggggcctccgggcgcgccccctcctctcccctccccgcttgccgcaaggtcgacgggctcgaggacgagacgcccgcctcccgggtgcggccgaggcccggggcgcgcgatccgacgccacccgctttcccagggctctcggggacgctttgtcgctttggcttggcccagcaccagtgatcgggccctgcgtttgcctgggcggcctgcggggtctgggcctggatggaggaagcatccttagccgccgcggcccctcccccatcaggcctgctggagagggggcaatcccgcctccagggcggcgtcggacgcctcccgaatc

SEQ ID NO: 32229 - DNA, 1403 bp, Homo sapiens
  chr19:13617096-13618499
  hyper
cgccgccgccgccgccgctgatgctgaggctgccggggctgggagcgcggcggctggagctacgactgcggagacgctccacggcccagcccatcgggcggcggcggctcggcgcctcgggtcgggggctcagaaggcggctgcccgggccgagccggggatagcagctcgggacatcttcctggctgaccccggagaaggaggggcgggaggagggtgcgggggcggggcgcgggggcccggggaggaggggggaggggagagagaagcgaggcaaaaaataaccgaggaaggaatccaggcaatccccagtccacccactccggaaaaaaaaaaaaagagacagttaaaaaaaaaaaatccacccaacgcacaccccctttaagacgcgaacggtttgcaaaggacgccccccccgggacgcagtggaagcttcaaattcctccgaggtccgggtcaggctggcatcttgcaaaaggagtgcgctcggcccattaaaaaaaaataaaaaataaaaaataaaaaaatatatatatatttaaaaataaagaaagacgaaacccaggtctgggtggggagggcaaaaaaaaaaaaaaaaaaaattaagtgcccttctgttttgctggagttcctagaccttaaaaatgctgaaagatctgtagctccaaaaataaaataaaataaaaacaaagaagatgaaagggaagggaaagaggagggaaggggagtaagacgctccagagggttcctaaggagtcttcacaccgcagggtccaggtttaaaaaaaaaaaaaaaaattttttttcttcctgaatcaccaacggctgcctcttctgctcccggaggaagtgtgagtgtgtatgtgcgcacagcgtttcgctcaatggtgcctcatcttggggttaaattgcagcagtgaaatcctgaaaattcccaacagggggaaaagagagagagagagaggtatgcgccctccgcttagccactcaatagctgcccctggatgcggcaatgcctctccaccctccaaatccctccacctcctccttctctaggttttgctaaaataagactggtgtggagggttgcgggtagaagaaggtaaagaggaaaaaaaaatgggcgcaaaggtctgaaccactggccagcaaacggaaaaggggagcaattgatgagtttaacagtagaaggacccacccagagtgtcgacacatgagggcccgcgaccaatcgtggaggctcgtggaggcgcgggggtaccgggctcagcggagtttgtgggggagagaggggagcgtcgcatggttgggaggcagggaggggggaattggggtgcttcctcctcccctgggaggaaagcctgttttccaccccgttccatttcggttgcagacagccggac

SEQ ID NO: 32230 - DNA, 594 bp, Homo sapiens
  chr19:1491131-1491725
  binary
cggggggccgggggcggacaccggcgcggggccggagcatcgcggctcaggctgcgggaaagcggtgcgcgtgcagcggggtgggtgccctggtccgcgggcgagctcgagcagccaaccccgggcgcgtcggggccatggacggcctgaggcagcgcgtggagcacttcctggagcaaaggaacctggtcaccgaagtgctgggggcgctggaggccaagaccggggtggagaagcggtatctggctgcaggtgagccgtcggcgctagcccgtttcgccgacgggcacaccgaggccatgggcctgggggtcgcagaccggactccttccccggctacggggtccggtccggccggtggagcgcgcgaggtgactgggacctcgaggtccgcccgcagcccttcccttgcccgcgccctgcgaccctgctcccgggccacccctctctagcttccgcccctggccgccccccgacgcctccttccgggcgctgggtgcctgccatgccgaagtccggttcttccagttgcccagtggccccagaggggtcgggatgccagtgtcctgcgcgtttcgccgtcccccttccccc

SEQ ID NO: 32231 - DNA, 372 bp, Homo sapiens
  chr19:15619223-15619595
  hyper
cgctggagtccccgcccagaaccctgcgggagcccggggcgggatgtccgggggcggacccctcggcacggccgggcggggttaaagggttgggccgtgggacggcgcggtcagatcccaggtagtggcgccggtggatccggatcgagggcaggaggctgagacccgcgggtgagtgcgcgcgtggtgagggctgtaacctgagcgcggccgcggcgctgcgctggaacccgaggctcgcgcggttcggtgctggcggggcaagggcgaaggtctgcgcgcggcggcgggcggggcgcagccggccacggggacccccccaggacccaggacggggctgcatgcccggggcactcgtggggagaggggcac

SEQ ID NO: 32232 - DNA, 275 bp, Homo sapiens
  chr19:1675929-1676204
  hyper
cgccgcctcggggttatcgatcgcagccttggaaacgcgattagattatcccggctgggaacggcagcctggcgggggccgcgcgggggaagcgcgccgcttcttgtaaacggttccccgaagggcgctgggccaggggcctgggagggggctcgttcccggtggggggggcgtcccggtgcggcgcggcccagcgctcccgggaacgggggatgggtaactggggcccccattttgtgttttgggtttggaaattgaggcgcagagaggggtgc

SEQ ID NO: 32233 - DNA, 433 bp, Homo sapiens
  chr19:17137041-17137474
  binary
cgctcctcttaccttcataccttggacaactggaaatcgccacccatgatgacagcccgggtcacacgaagggggcgaggtggggcggggggagctgacctcagcacctttagcttttgggagtccctgtacctccacagagccacttcggaaactttagggcgccccctcctcaagacgattcgggaacaagaggccaggtccagcccagcgcggaggctgtgtggccttgggcaggtcgctgcaacactctgagccagtacccgcgacccccaccccagaaggcgaccgacctcctctgtcgccggaggatactcacggggcctgaggctgcgcggcgcgcacgccgtcccgcgccgacagcagcaggagcaggagcgggagcaacggccagagcagggcgccgctcatttttcggctcctggggggcgcc

SEQ ID NO: 32234 - DNA, 76 bp, Homo sapiens
  chr19:1718840-1718916
  hyper
cgggaggagaggaggcggctccgtgctgcggggtgccggggcgcagagcccgcggcgggagctgtcagcgccgatc

SEQ ID NO: 32235 - DNA, 209 bp, Homo sapiens
  chr19:1718944-1719153
  hyper
cgatgggagcgggggcccaggctgcggtttacactgaatccacaaaaatcaccgaagcttgaaaagtgctcaataagccatcgatcgctctctgctgatcggtgccgccgccgcagcggggctggggggaaaggcggggcgagcagacccaggctccctgcctgtgccccacgcgggaccgcggccctgcatctgccccccacccacgc

SEQ ID NO: 32236 - DNA, 774 bp, Homo sapiens
  chr19:1725428-1726202
  hyper
cgggtggtgggaacgggattggaatcccgactgtggggcccctgcggccacctccaggatacagcggaccccgatgaagccctggcctgggtgctgggggaggctccgcggcgcggtcccgcaggcgggaggcgatgctgccgacgctattgctgccattactattacggagagatggggcggggcgggagcaccgggcccttcccggaagcccttcctgagcttattcagtgcctggggccgcggcgatcgatgacagctgggcgccggccgagccccctccgggccgcgcgggggcgcatgcgcggggccgcgggatcgatcggccgcgctcgggcctccccgcacccgcccgaccccgcccccccggctcgttgcccggcaacctctgcccggcgcgctcccattggctggcggcggcccgggccccggccgcgcgtggtcacttggtcagcgcgggctcggcgtggccgggggcctggctccgggcgcgggtcgatgccgcctcgcatctgacctttcccggcgcggggagggggcccgagaggatggagagagctggaccatcttggaagaaaactttattgacccgtctcttatcttggggacgcacggttccagcggcggggggcgagggtacggctgggtgggggcaggggcggccaggaccttcctcccggacatgcacggaccccctgaccgccgccccggccatctccctgggcgggctgctctccattccctagacaggaaaattgaggctcacgagggccc

SEQ ID NO: 32237 - DNA, 1578 bp, Homo sapiens
  chr19:1748599-1750177
  binary
cgctgcagccttgctcgggtcccctagcccggcgcctccgcaaaccaacccaccgcgggccgccgagccccgctccgggatccgccggctgcctccatcccagaagagtgcgcagagaattaaatctagatatttacatgtttaatggctaaaggagcctgtcttctggcagggcagggagggcgctcaggtggtttaactcagcgccgggatcccgctcagctgcgggggccgcgaaccccgccgctgggccgacgattgggcccctccggagcgcggcgcccaacgcgggtttcgttgcgtcggggaagtccgtggcctgcagcgtccagtccccaggctgtcagccgagccctggagtggggcgttctccaggcccccaacccctgatccaggccgttcccctcccgcgcaccctccggcgggggctgcagcccgcgcccctcgccgccaagccccattttcccacagtgcaaactgcagcaaacgaactggttttctcctgagcgcacgctgcggggagacgattccaacggcgtccagtgaggaggggcccaggcctgcgagacggggcgcgttcctgtccccagacccctccggctgcgcctcaacccccagcccggctctctgacctgcatcggtcgggccgggcacagaggaggcaaagcaggcggaggccgcgagaggagagcagcctgacctcccgcctgagcccggacccttcccctcgggcaccctcggacgcccccgccccagcgtgttactttctagatggggaaactgaggcgcggccagggcgatgcggcggaagtcccgcgcccggccgtctcccgcgcctgccagacagagccccgagaagagggcatagaattccctcctctaattgtgtcccagaactctgggacgacggaggccaagctgctgagggaggggacgaggacgcggggccccagggaccaacccctccgctccccggccagccgcggccgcccagcctcggtgccccggcgcaaacaagcgcggtgtttgccgagcgcgaggcgggcggcgcggcccgagagcgatgaggattcgatggagccgctcgccgcggcgggggcaacggagcccgggcgggcgcggggatcgatcgggcacagctgtcgcctaagagcccgcgggagcatccacccgcgggccagagctgcccgggcgccccgcaactgcgggcaggaaatccgggacgtcgggcccgccaggggcgaaaccccaaagtcgcgacacccggggtggggaggtcaggacgtccccacggccaacgtggaaccttcgggagccgcgcgctcagcctcgccgggacccccgccaggccgtaaaagcccagagtctccccccaaatctaaataaaatccccagaccccgcccgaacgaaggcggctggagtccagagggagaactcctgccacacactaggcaccggcggccgggatttggggcgcccgcaggtttcgggggccgggagtgggagcagagcggatctagggctgcggctgggcttgggtggggcgcgcattcattgccatcgtttagtaaaacctc

SEQ ID NO: 32238 - DNA, 2389 bp, Homo sapiens
  chr19:1753216-1755605
  binary
cgcgaaatcggagactctgggtcgaggcccccagccccacctgggcagagtctgtcctcggacccccgcccgctgtcccccgggtacggcctgccccagcgggcgcgggcgggcgcagtggccagggacgccgaagccccaagtctggccgacttcggcctgcttggtgctcgagtggggccggggcgggcggagagcgaggctgcgggaggcagcggtggcaggagcgggtgggcgggggcgctgacgtcagacccgggcccgggcgccggcggccgctcccctgccacatcctggtggccgcgctcgcagccgggccgggccgtgcgccgcgcagcctggcagcctcgcgcgcagccaccggggagcgggcgggagtcatgcagcggccttgagcactaggggccggcgctgaggagcgcgcgcggcgggagggcagccgagcatggagctgagcctggagagcctggggggcctgcacagcgtggcccacgcgcaggcgggcgagctgctgagcccgggccacgcgcgctcggcggcggcgcagcaccgcggcctggtggcgcccgggcgcccgggcctggtggccggcatggcgagcctgctggacggcggcggcggcggcggcggtgggggcgccgggggcgcgggcggcgcgggcagcgcgggcggcggcgcggacttccgcggggaactggcgggcccgctgcacccggcaatgggcatggcctgcgaggcgccgggcctgggcggcacctacacgacgctcacgcccctgcagcacctgccgccgctcgcggccgtggccgacaagttccaccagcacgcggcggccgcggccgtggccggggcgcacggcggccatccccacgcgcacccgcacccggcggccgcgccgcccccgccacccccgccgcagcgtctggcggccagcgtgagcggcagcttcaccctcatgcgcgacgagcgggcggcgctcgcctccgtgggccacctctacggaccctacggcaaggagctgcccgccatggggtcgccgctgtcgccgctgcccaacgcgctgccgcccgcgctgcacggcgccccgcagcccccgccgccgccaccacccccgccgctggccgcctacggcccgccaggccacctggctggggacaagctgctgccgcccgccgccttcgagccgcacgccgcgctgctgggacgcgcggaggacgcactggcccgcgggctgcccggaggcggcggcggcacaggcagcggcggagcgggcagcgggagcgccgcggggctgctggcgccgctgggcgggctggcggcggccggggcgcacgggccgcacgggggaggcggcggccccggcgggagcggcggcggccccagcgcgggcgcagcggccgaggagatcaacaccaaggaggtggcgcagcgcatcacggcggagctgaagcgctacagcatcccgcaggcaatcttcgcgcagcggatcctgtgtcgctctcagggcacgctctccgacctgctgcgcaaccccaagccgtggagcaagctcaaatccggccgcgagaccttccgcaggatgtggaagtggctgcaggagccagagttccagcgcatgtcggcgctgcgcttggcaggtaggagcgtggcgcgcagggccagaccctgggggcgccggctctggactcccgagcacctagcggggcggcggccgatgcccggggccagcgccccaagccccgcccgtgcgccccggcagcccgggaccccctatcaggaagctagaccgcgatccgcgccgctgcccgtttgtaccgttgccaaaagggagaaagggattgtgccgcctccccgccccccggtcgccgcttctgcccctttcgggagcgcgtaggggttctctagtccttgttagactgctgggaggctccgagcctctccccaagcagccctcagggaagctcattgtgtgtgtgcgtgtgtgtgtgtgagcgcgcgcctgttggggggagctgtgtccccgaacgagctgctgttgtcggctaaggtgccactcccctcctccagagtgggtggagaggggctgttgagcccccagccccgggccacagagctccgagacgttgcggcgggcgcctgcagctcagcagcagaggccgagcccgcgctcatccccccacctgccccagcgcgcgcttctttgtagttcggccccgcgatcgataccccctccctctcccctccggccgctggcaaaggtcacccgagaatggcgggggaggggcggccccggggaccctcggcccgcgccgcccggaggccttcacaccccgacccggcgcccgccccgcgcagtttggtcgtggctcgggtgcgcgcgcccctgccc

SEQ ID NO: 32239 - DNA, 797 bp, Homo sapiens
  chr19:1757431-1758228
  hyper
cgtgggggaaccggaggggtgagcgcagctcctggcaccccgagcctcccgcagggcgctggggcgttgaggatgataaacccggaccacgctgcccgcctgctctctgccgggtccgctgcccacgccgtggccccgccgcgcggccccgcggccgcggggttcacgccgtcaaccttgcgcacctgtcgcgtctcaggtgccctgggggccgcgtctacaccaccggactccgcctggggcgtaagaggtggcgggggcgagggccgcggggtcactaggctccggcccaggcctttagttccggtcgctgcgcaaatgaaaagcggttaagtggcggcaaatcgcggcggttagggggagacggccggatgcgtccccatctccacctaacacggcgacgccccaacgctggtgctcggaaagggaactctgcccccgccccgcccccgcaccatttcaaccccgcagcagaggactcgccgccctttctactccggcatccccattccccgctccgcgagcaccgcgggcctccccaggcctcctccaaggagaactttgcgccccgggtctcccgtcgcgcttgcccggctcggggcgggccacgcgtttccgcaggtgccgagtgtcctgccgggcgccggggccaggacagagacggggacagggagggagaaagacccgcaggtgcagacggagagggagggggagacggggagatggagagagagggaggggtcgcgagacaaaaccagagagtggggagggagagaccgggagcgggagaaacagac

SEQ ID NO: 32240 - DNA, 190 bp, Homo sapiens
  chr19:19383975-19384165
  binary
cgctcagcgacagcgccgcgatcttgccggccagcggcgggatgtccatagcggcggctgctggaccccggctcagccccgacgcgttctccagggcgctcggctcctcgttggcggcgagtccgggccgaggctgccagggacccgccccgcacaaaggtcgaccccgctgcgccctgggcaggccgcc

SEQ ID NO: 32241 - DNA, 1027 bp, Homo sapiens
  chr19:19651122-19652149
  hyper
cgaccgctggcgctggaagcgcgcaccacggactgggccctgccgtccgccgtcggcgagcgcgtgcacttgaaccccacgcgcggcttctggtgcctcaaccgcgagcaaccgcgtggccgccgctgctccaactaccacgtgcgcttccgctgcccactaggtgagggcggggctggatgacgggggcggggctttgaatgggcggggctggcgaacgccgggaagagtcgtggtgggtggggctgggaggggcaggaccgtgtgggtgtgggcgtggctgggaagagccgggggacccttaggcgtaggacgacgtcagggggcggggccaggcagggcggggcttttgaagagaggcgctgggaacagcgcggggcccaagtgcaccgtcaggaggcccagcgggtcaggacccatgtccggccccctggaacgcatctccctcccgctgccctcatttgagcatctgtaagagctcagttctgtggagtgtcttgagcccaaatgcgtgcaggatgcagggagaaaagcaggactgatccccgggaccttatgcgggggtggggaggtgggtcggtacctaaactatgtcttcgacaggcgcgcctaggggagcatgggtgggggcgatggcagatctgctctctggagtgtccgcccttggatgcacatatgtgagggggttggggaagaagggtcctttagtcccaggttacccggaggcgcagttcctggggagggcggccacctgatctccgtccctgccttccgcagaagcctcgtggggcgcgtggggcccgtggggtccctgctcggggagctgtgggccaggccgtcgcttgcgccgccgccactgcccaagccccgctggggatgcgtgtcccgggcgtcctctggaggcgcagaagtgcgtgcggcctcggtgtccaggtaggaggggcggggtctggaggctgggacctgtacagaggggaggaaggggaggttaggggctgagcctgggagagagggtggagttagaggc

SEQ ID NO: 32242 - DNA, 801 bp, Homo sapiens
  chr19:290594-291395
  hyper
cggcctttgttcccgggaccctgcgggaggggggcctcgggatgcccattccgccagtgtggcccgcaaacccgccggacaggtttggttctcctggcctcccggccccccgccaccccgttcacccgaagcctgggacccagccttcatccccagtgtctcccccgcccgagccagcagggcggctgggcctccccgcacgtgcacgggttcgaatcccgccgacgcaccgggtgccaggaccgagggtcagccctctccgcgcgcagcgggagcgcccaccccaggggcggaggcgcggacgtcctgccggggtaacccgcggccgcccccacctcccgggcccgcgtgactcacctcccaggccaggcggggcgggatggaggcgcgcgcgcggcccctccgcacagacttcctgctgccggggcgggggatgctggccccggctccccgggcctctcgcgacccccatccccctgggcctgggacgcggggacccccgagcctgggagggcgcgcgcagtgcggggcgcggagggaggtctggtcctcacgcgaggtccccgcctccagggtcctcggagggacgagggcgcgcagcctccgcgttcccctgcaaacttgcgcgcagccgggggcgtgtccgtcccgggagggtccccccaacacccgggtccccaaggctcttaccgaccagtaagcacagcacgtcgagcagcacgaagacccacctccgctgcatggtccccgcgacccccgacgccggtcccagcgcgtcccgtcgcgtcccggcccggccgc

SEQ ID NO: 32243 - DNA, 2486 bp, Homo sapiens
  chr19:30015920-30018406
  binary
cgggggaaggagataggagagacccaaggcgagccttaggactcgcccctatgactatgactacgcgctgcgtccgaaccacatgtccaccccgcatttgccttcggggaccagaccgcgctccctcagatggctggggagggagcagactccgggtgaaggctgggggaggtaccgggatgccgagtacgccagagcaggcgggggatgggttccggcttcctgccgcctcggcatctcgctttgcaccgggcaaagaaggggccacgaccggcgaagagcgcgtggagacacagggacccgcgatccaggggcaggaaccccgccccctcccggaaacctcccgggccctgagtcgtgcccggcgctccccaccccaccccacccccgccgcccctgccgtcactcacggccgctgcgggctggctagcgtgtgcgctctccgcgccgcaggcacctgctcgctgggcgctgtgcgctcacttctccctcgcgcactgcagactcccggcgctgccgccgccacccagcgtagtctccggctgggcacagcgttccgcccttctcgcggccccgggcgcccacccatccgtcatggcccaggcctgggccaaacagcggggcagctggttgcccaaactggggtaaggagttgagggctgggagctgcagagaggaccgagggacacacggggagcagggatgagcggccgtctcgagccgtgcagactgggaagaagccagggagagtttgggtgggaggactcccaacccaagcgggtgcggggcggggctgtactccaaccagaaagacggtggtccctccgagcgacccccgaggagagagggggagcgctctggggcgggggcggggcgggctgtggcaggagaggggagggcgggggcgatgcagcggtggaggcggcttggcgcccagccactgaccgccccctcccttcccctcccctccccctctccccgcctctctccggctccgggtccgccacgccggacccgctctccccgcgctgcgctgggtcggacgccaggtctgcgcgccgcggctgagcgcccactcgccctgcggaaagagccgcggaggaaccggcgggggcggctgcgggagccgaaggaggtggcaatcgggagcagaaccagaaggagacagggaggcagaagctcgcggctccgtggcacgcactccctcggccagggatgggtcccggcgcggcccagcccctgcccggcccgccgggcagagactgaaccgcggatccccaccgtcctgtggacgaccggacagagagaggcactgaccgatcgccagcagcctcccggtgggaccgcgtctcctgcacaccccgcgcagcgccccccgccggagccgcaccgggcaagccggcgagggagcggggctgattggcggccgccggcggccaggggagggggcgccgcgcggggccatggcaggctcggaggcgtcctagcccgagccggagccgatccgagcccacgcggccgccgcctctccgctcccgggcccccgccgccaccgcgccccccgcgggagatggaacagcggaaccggctcggtgccctcggatacctgccgcctctgctgctgcatgccctgctgctcttcgtggccgacggtgagcgcgggaactttgctgccgctgtggactcgggggggtctttgctggggccgccaccgagaagaagaagaaagagaacgaaccgggaagcttcgcggtctccagcaatcccgctgtgcagcctgggcccggaggggtagggagaggcgagcggcgaagggtcgccgcagcagcagcgccgcgcccgagtcgttcccagtcccgccggggccccggctgcggaaaggatgcctgcggggagcgggagtaggcgcgccccagccaggctctggcggtgcggccaggggcgggggagaagcacgagtcgcccctgccgccccgccccatccggagggaagcagtaggcagccgatggccggtccctgcctcggccctgcagccgcttccccgaactttgctagcccctccggccgtgcgccagggagcagctgcggggtggggggcacaaggccagccagccagagaccgactgcctcgctttaggttgccccaggcccccgacctacagctggtcacgcctctctctctctccccacccccagctgcattcacagaagtccccaaagatgtgacagtacgggagggagacgacatcgaaatgccctgcgcgttccgggccagcggagccacctcgtattcgctggagattcagtggtggtacctcaaggagccaccccgggagctgctgcacgagctggcgctcagcgtgccgggcgcccggagcaaggtaacccgccgcccacgcggtaccggcgcgcgcccggctcgcgcccggggcggcgaaggctaacccagggagggaagcagcgggcttcactcgcgcagggcgcc

SEQ ID NO: 32244 - DNA, 574 bp, Homo sapiens
  chr19:30715281-30715855
  hyper
cgaaacgtttgcccagaggacccgccttgcaaagttgccttaaaaaagttattttgtttgataattaagtcctggagcccatcgcatgatgattattctacacccataaggcagagaacctgcgtgacgtttttctcgaagtttaattaccgtatgctaatttccttgcctactacgtgattaattaaaatcatattttcataatcatttggcactagtattgttttagaattatcatgatctcctaaatagtgtctgtaaataaagtcgcctctaatggcaggcgcgggaggcgaggctgaggacctctccgcgtttgtatcgcggcgattggcaacataactgccttatttacattaaatacgccacaaggttacagcgcggatcaacgtcatttgatcgctgatgactcccttaaacgcccgggctgtgactgattcttcgcgtcccgctgtccaccgagattcacccgggagtttttttttttttttttttttttcctcccagaaaagaaacagactttaaatagtttcaggagcaggtaagaattacgctttttcctcgccccttctcc

SEQ ID NO: 32245 - DNA, 959 bp, Homo sapiens
  chr19:30716607-30717566
  binary
cggggcgcggcgcggtgcggggggcgcggcgcgggggggcggcggcgggtgggggggcagcttcggcgtccgggaggtggcaaagtgagtttggactcttggcgcggcccccccgtcccctccccctccccatctcggcgaggcctgccgcccggttccttctcgccccatcgcgattaaaaaatacggtctaattaaatatccgtggctgtgacgttggcgagagaagctgtcagcgggtggggggtggggggaaagaagaggaaaaccgagccggcggctgcggccgggcatcgtatggcgctagagaacttcggcggcgagcgggacctgcgcctgggccgccgcctccccgcccgcggtcccgggaccgttactttgaaaaggagtcccgaggcctggcgcccggcgcgcgatcgggaccccgcgtccagctccggggacccggccggcgccccccacccgcgagcggcccgcgagccactctcaggccccgggaaactttcaagagggtctggggggtggggggagtaaaaaggggagggggtaggctggggccgcggaaacttctgctcaagtgactttccccattttctcctctgcctgggacgggggttcgccttgcgctctttctctggtccgcgctcactgcggggttccggcccctccgcccgtggagagagggtaatttgcaaccttttttttttttcaattaaagttagctgatgcttacaatgtgtcaaacttgcgggcgccgagagccgctgagatctgccattttgtgattgcatcggcctcctgtgccccgggagcctggccaggctgaggccggagagttggtttcagggctgaggtgccagggtccgaacccgcgaccccaggaaaggccgtggcgcctgcaagcgcaggcggcgcccgcagcacctgccccagccgggcctcggcctgggggcccagcc

SEQ ID NO: 32246 - DNA, 2407 bp, Homo sapiens
  chr19:30717624-30720031
  binary
cggccagtcccaggctggagaaatgaggccaatcagagcgaggaagtgcgggcgtgggggctctggaaggcagaggagaggcagggcttgcgcggcgtctgggaagagtgcaatctggggggacgcctcccgtccccccagcgcagatgcatgactggggtaggaatgatctttgctgataagcctttttctgtttgcttcaagacattatttttcgaagatgaattgaggaaaacagtcgtaggcgagactcggggtgtattttaggcaaaaaaaaaaaagttagggttgggggagagctttcctttgatgagtaggaaagtgtccagatctcgacgcgcccatctgttgcagttttgcaaataatttaaaatatagatatctccatatagacggatgtatgtgaagtggaggaaggtcgaaacgcggggaagttagggaaaaagaaagaaaaagggctgggcagagagagacctgtgttgctcactcttcactctgcggagtgaactccggcagggctttctttggggacaggtggaaagttaagtcccccccttttcacttctgtattgtgagtggttcctactgtgtgcctgttggagaacatgtccaccgttcccgagttaggtggaggattggaatgttggggggcggggagcgttggagttgaggacgcagtggccaggggctgggggccgagaaagagcagggcggggtctcagccccgcgtgcgggtggcagcggcggccgggttttgtttgccagatattgttatgtctaacgggtgcctcgccggagacgtgatttgtcagccgccttcgttttcactttagcagaaaatacggcagctgcgaggtgtcccggcctgcggggctcgggcacccggtgcgtcctgggggctgggtcgtgtgcgcgggtgggagccggcggccggcggggccggggcgaggggcgagcgggaggggcggagtgagcgagcgcgcggtacggccctccggttcctcctgcgccttctcccggcagccgccgccgccgccgccgccgctgtgcaatttagcagaaatccgacaggggccgcgtttgctgagcgcatccggcggccgggcagcccgagcgggccgccgggcctggtcggccggtgtagaggcgcggagggggccggcggaggggaccggcggggatgggcgcgggaagcacgcctgaccagagcacgcgccgttccccaaccctggtgtccccggcgagttgggcagccccgcgcgccctgaccttgacgccccagtctccagccagggcttaggtgaacttggggtggggtgtgcgtgcgtgcgtgtgtatgtgcgtgcgtgtgtgtgtgtggaaggggtggtgagactgggaacgcgctgttttctttcccagtttgatactagcaactggatttttactttaagaccggctttgctctctgctggggttgggagggggggcgatcttttcccatcactcacatctttgttcattgttcactgagtggaaggcaggcgacttaaagagacgaaagagaggaaaaaggggtgagagacggagagaggaaaaagaggggggcggccagaagagggaaggagaggcgtggggacagggcccccgcccccgccggggtcgggtttgatggtgaaatagtaaacccacgcacggagggtcgccaggaaagtggacattaccgctttaattaacttcgagatgctccggcggcgggacctggcgtagccgtgacgcgcccccataaatctgcccggcccggggctgctccgagaactcgtacagtagcggcgtcagatccatcccgcgcctcccagtccggagtccatttgcataattggattttttttttttgcctccttctttctccctgaaacttgtttgaaaacccaagtgaaaaccgcgacgatctgcacactcaaaagcaagtgccaagtaagtgccctgcggtggcctcggcgcgccccggggtgagcgcgcaaagccgggagcgaggtgccgcgagctgcgcgccgccccgggccggcctcgcgtgtgggcggctgggcggctgggcggcgggaggacggcctccgcgggctccgggactgcccggctggctgctcgcacaactttttttttttcccccgtctgctgacttttcgggccaggtgaagtgtttgggccacgcgtgtacctgtggcgagactcgggaggcgatcttggggggcgcgcggtcgcagttgggcatcttgcctgggtcgggggcgggcagtcggtcccagtggccgccgctgagggcagagctgcgagcgagcggggccggctgctggtcgcgccgcgccgtaaatgcaagcctgtagccaaatgcttcccccattattctaaggtttgtgtctgcgtgtgc

SEQ ID NO: 32247 - DNA, 2926 bp, Homo sapiens
  chr19:31839508-31842434
  binary
cgccagcatctaacatggacttgacagtcatctgacaatacccagaccctgtgcgctccgggttccaccgctgtgcccagtttgggcccaagaaatgaggaatcaatcgtgttagtactaaggtggccgaggggaccggctcgctcactcgttcgcgctccctggctcggcggacaccaggcagtcccccggcggtcggccgctcggaggacgcggaagatgtcccggggaactcaggtgaccccgcccgccacccacagaaagagccaggccggggttgcttcccattccctctgcagccggagagctgaggaggtagggacctggcgcggctcagcgcgctccgcgagcggctccccaaatgggtgcgagagggaagagggcagagcgcggcggggcgtccggggggcgcccggtacccgaggcgggcgcacgcacccaaacaggagagcggcgcccggagttactcagtgcgggcagaagagcggggcgaggagcggggtcgcgcccgctggaggcgcggggcgagcggaggaagaggaggaggagagcagaaggaaggggaagcggctcgtacctgctgcgcgccggggcgcctgctgcttcctcctcggcatgatgcttctccggcgactgccactgccgccgccgccgccgctgccgggctgaggacagggagggagggggcggcgggcccgcgggggggcgaggcgggcctgctctcagcctcccccccggagagcggccgcccgcaggatgctgctgcgcccaggctctccgcgtcccccccgcgccgcgctccgccgcgaaccccgaacgtgcggagggaagaaggagggcgggcgagggaggctcggggagggaggagcacgggggggaggaggaggcagaggaggaggaggtggaggaggaggaggaggaccgcgctgccggcggaatgggaagtttgacaaatcgctccagaggccagaggaggagggggcggggaggagcggcggccctgcccccccccgccccgtccccagacgaggtgcgcggggttcggggctggggggcggggagagggcgggcagagcggtgggaggaggagcgcgggagcggcccggaccggtactgccccggcccccgcccctaggccgggggtcacggcatccggggggacgcgcagccgccgccgcggcccggggctcggcggtccagtcttctgcccgtggcgcggctggagcggcggcgtcggcaacaggcaagcttaaaggaaaaggagatgatcgtgtcaatcgcccgcccgcgggggcgccgcgcccccgcccccggccccaggcccgcgtgggacccccgccccgccagcgaaaggggtgccgcccctccgcctccgccccgtgcgcacacgcgggggcgcggcgccagccccgccgagcccgtcccggggcgctcgttaccccccacccctattcccacccagcgttcgtccccagccaccccccagctgccccacccggctcgcactcctctccacccgccgactccggagcccccagcgtggtccccgggccggggctggcgtcccccggggaagccagagcccacgggcaggccccctccagggaggaggcgggcgcgggccggggcgggtgggggcagccctcagaccccgcgccacccagctcctcccccaggacccgccgtagccacttcccccaattttttttccccggacaaactttcctgggcccgtcccgggggtcggtgtgggagggggttccttcaagtttcctctcctgactttgggatgatcagggtccctccaccccgcccctcgcccccgggagccgggccgcgccccccatccacggcgcgggccgatcctagggcgggacgggggcgggagaaggaaaccgggctcccctgcccatcccccgccaggggctccccccgagagcctagggggccgccgcgccgtgtcccgcgcccggcctgccggggctgctggactagagggattgattattgattggtgatcggggtcgctgaggctccgggccggcccggccgactggccgcggcaagaaggagctggctgggcggcgtgggcggcggggcgacgcgggctcacttacgggcggcggtgagggcgcgggtgggccggagctcatgcgggcgacccccgggcggcggcggctgagcgggagccggagcccgagcggcgcgggcggcggcgcatcgatgcgctgcgggctcgattgcgtctccctgggccagctctcaggccgggaatggggcggccgcgccggggccggctccgggcgctgccgggcggcggctgctggagcgcgggggcggcctccgggcccactatccccgaggcggccctgcgcccgggcgcgccggctggggctctggcgctctcgcaggccccgaggccgacagtcccggcgagggcgggcgccccgcgctccagcaccggctgcctgagcgctcctggagcagcaaaccccagacttcttcctccttctctccttccttccttccccctccccttatctttttctttttttagtctctttctccctctttttctgccctgtgtcctttttattttttctctacgactgtttttgcaagtttgtttcaaaagttcacagcatgctttcttttcttttagaccgggagacagtgatctcacccacacggtaagatcaaaagtctccgctcgcccagcctgcgggcttgggctgggtccagacgtctcccaggatgcagatgcgccgccgctggcctccccggctataaagccgcctccagcgcctttccgcgcgcaggagcgctcggagttgtggggtacggaccccaggcggggcagggagtccgaggcgggctgcggcggggctctcgggctggcggactcgggggctgaggcgccgtgcgc

SEQ ID NO: 32248 - DNA, 559 bp, Homo sapiens
  chr19:32715384-32715943
  hyper
cgctccgagggccccgccgggccgccctggcagctggaaaagcgcattcctgctcgcccgaggatgcagaaggcaaccgagtccccgggcggcggcggggcaactgcggaaatcacgcagccagatgaagctcataaatttcccctatgaacaattgttttcatttccctcccatgccactagatattataagtggaaagcaaaacacaagtaaatatgttcattccgctcttgcgatcggtgataaaccggaggcggccgaggccgacagaggtcagcaggccgctcgccacgggtctgcgagcggacactgccaccctccggccgcgcgcgggactgcaccggccccaccgcccggctctcccgcccgctcgctgcccgccaatgttcgctttgcgcccttcgctcaatgtgcgtgcaaattacagggacattcgaaaggacagagagctcccatatttaaaataatcatttttgttcatcataacctctcttccagagataaccgctcttattaacgttttcgtacaattatctccagtctttatgtgcattctac

SEQ ID NO: 32249 - DNA, 997 bp, Homo sapiens
  chr19:33685146-33686143
  hyper
cgccactgcggctcggcgggcgcgtcacgtggctggcgcagcgcggcctccaggctccgggcgcgggcgaggggccgggcgggaggactgacagacccacggacgctctaccggcggcacccggccgggcgggctgggcgcagcgcggggcggcccggggacgccggggccgggcgggctgcgcgccgcggggcatgggcgcgccgggggtccccgggcccaggccggccgcggcggggctcccggggcgcgggggcagcggcgggcgggggtcttccctggcggccgccgctgagcccccgcagggcccgtgacgccgcggccgatgtggccgcgcgcgccctacgggcctgcaccgccaccgcacaaagacgcctcgggagccgccgcctgcacccgggccgcagcagccacgccagccggagcccgagccctagcccgagcccgagcccgagccgcagccagagccagagccggagccgcagccggaaccggagccggagccgcggggcaggaggcggcgcccgcgggcggccgggcccggcatggagaagcgcgcggccgcggggctggagggcgcgccgggcgcccgggcgcagctggccgtcgtctgtctgggtgagtgggccgcgcgggccgggcaggtccgggtcccccgcatggcagtccgcgccgcgccctgaccgacctcctctccggccgcggcatcccgagccccccaccgcggtggctcccgcgcggagacccagagaggggccagcaccgcttgcccgcctggccccgggcctgggagggcgactctggtggcgcagccccggctcccgccccgctcggagtagcgcccggagcccgggctgagcgctggcaggaggcccttcgtgcaggcggcagccttcaacccggcccgcccgcgctgagcctggagacgagggggccccgggagctggggacaaaggccaggccggctgtcccctgaagaagaaactgtttccggccc

SEQ ID NO: 32250 - DNA, 2468 bp, Homo sapiens
  chr19:33791861-33794329
  binary
cgggaaggaggcaggaaacctccaaataaaatgacaaggcacgatttgctccccctactcagtaggcattggagcggtgagtttgcatttccaaggcacaaggttatcctaaatactagagttgccgggctcccagctcagccccaagaattctcccctcctcgcagggagaagccaccgcctggccccctcatcttagacgcaccaagtccggcgcagaggaagggaggggacacgcggagcaggccaggctttcaggaggcaccggaatctcctagtcctggctcgcacggctcgggcaagcctcgagatccggcgaccccaaaccactccctgggtccccgccggaggctggcccagggcggtcccacagccgcgcgcctcacgcgcagttgcccatggccttgaccaaggagctctctggcagctggcggaagatgccccgcagcgtgtccagttcgcggctcagctgttccacccgcttgcgcaggcggtcattgtcactggtcagctccagcaccttctgctgcgtctccacgttgcgctgcttggccttgtcgcggctcttgcgcaccgcgatgttgttgcgctcgcgccgcacccggtactcgttgctgttcttgtccaccgacttcttggccttgcccgcgccgctgccgccactcgcgcggaggtcggggtgcgcggcgcccagccccttgagcgcgctgccagggcccggcaggccggcggcaccgagcgcgggcgcggggtgcgggctgggcacgggcgtgggcggcggcgtggggtgaccgggctgcaggtgcatggtggtctggccgcagtgcgcgatctggaactgcaggtgcggggcggccaggtgcgcgggcggcgggtgcgggtgcgggtgcgagggcggcggcggcggcggcggctggtaagggaagaggccggccagcgccagctgcttggcttcatcctcctcgcggggctcctgcttgatcaccagcggccgcagcgccggcgccccgacgcgctcgtacaggggctccagcctgccgtccaggtagccggcggccgcgcagccgtagccgggcgggggcccgtgcgctcccccgggcatgacggcgccgccggggcccgcgggcgcgcccgggtagtcaaagtcgccgccgccgccgccgcccgtggggcccacggccgccttggccttctcctgctgccggctgtgctggaacaggtcggccaggaactcgtcgttgaaggcggccgggtcgatgtaggcgctgatgtcgatggacgtctcgtgctcgcagatgccgcccagcggctccggggcggcaggtggggcgggaggctgcgcggggcccgcgccccggggaaagccgaaggcggcgctgctgggcgcgtgcggggggctctgcaggtggctgctcatcgggggccgcggctccgcctcgtagaagtcggccgactccatgggggagttagagttctcccggcatggcgagcctcggcggcctccagcctgcgcggggcgtcgccgccgcccacccggagaccctgctcgcccgcgcccgcgcacctccgggtcgcgaatggcccggcccgcgccggcccagcttttatacccggcaggccgcgtcgccccctagagtccgaggcggcctctgtccccgggctgcggcggcgcggcgcctgctgggtcctagcgcgcggccggcatggggcggcgaaccagcgcggcacagcgccgcgctccccaggcaggccgcggcgcaacgcccaccgcctccagcgcgcccagcagagccgcggcgctcgctccaagctccgcccccggcccggccgtcgcccccgcgcccacgtggtcggtagcgggggccccctcctcctgcctgccctaggcgcccgtatccagccacggccgggagcccaggagtatcccgaggctgcacggggtaggggtggggggcggagggcgagtcttggtcttgagctgctggggcgcggattctctttcaaagccagaaccaggcctgtcccggacccgcgtcccggggaggctgcagcgcagagcagcggggctggggccggtggggggccgtttgggacgcgcggagaggtcctgagcgcggtggctctgcgtctcctagctctgatctccaggctacccctgtgattccgcgcagaggtacctctcggaggacgccggggtcccatgggcggcgccgcgcagggcgctaggaccccgcggggagcggaggcggcctcggcccgggagcctggaggacctggccggtcgatccgcccgggctggaaaactttctttataattacttctccaggtcggagcgcgcggcttgctaggcgcgcggggccggcgctgttacccggcgtggagtcgccgattttttttcctgcgggaccgcggggccccccagactagcggagctggacgccggggcgagcacggggaggggcgcacc

SEQ ID NO: 32251 - DNA, 2124 bp, Homo sapiens
  chr19:34112228-34114352
  binary
cgcagggcactttcagcagaatctagagccccagggatttgaggatggatgcggacacccgggcctgaggcagctcgcggccttgaccgaattccacgcgagctgaagcccagggatatcccagaatcttcctcaggatcaatcttccgcctttcaccggccctgcgcccccgcagcatcgggtcctgggcgcgcgcccctgccccgctgtggtcaaggcccgccccggtgacgcctggtccttttcccgggttggcgccgcgtgcgacccaccgaggcagtggcagcactggccgcggtctggagcctagcgtcaggccggagtccggctctcctgaaccgggagaccggcgcagccccagccacgaccgctcccacccccgcggccgccggaccgcgcccagcagcgactctttctgagagcgctgccagaggggccgcgggagccgcagagcgcgcgtgggcgcggcgcccgcgagcccccgggagggccgagtgcatcgctggagcgatccccgcccggcccggccaccgccgtagccgccaccacggcggggcggggcacgggccgggggcggggcgccgggcgggcgcggcgctatttccagcctcgccggaggcttcgctctcacttcgctgggagccttcccggcgcgcaagccggatccggcagtgctgcggggaggagagaggacgaggcggcggcggcagcaggaggtgggggaccgatcgcgccgggggccgaagaggaacgccgccccgcgccctctcgctccccgcacgctccggctgccggccccacgctgctcgcccacagatcgcactgggttccgcttggagcgggcggaggcaccgggcccgagctgggtcggaggtcctctccgccgcctgcgcgccccaagcagaggatccgccgcggagaaccgctcccggactggaggcgcccgcggcctcgggtgcgtccgctgcgccaggtaagtggctgcgcccctgccccacccctgttcccgccctgcgcaggctcctggcctgcagagacgccaggaaggggtcccgagcgggccccggactgcaccgctcgccatccccgccaccgcacgcgaatgggagtccgaagctgcgggcggaggtgggcgcgcggggctcgggtctggttgcactttggggaccggccccggtagcgggaactttaattagactttctctccttggatctcactcgctgccgcgcttctgggaactgccgtccctcgggccctcttggtccctgcggactcccgctccgcctcctggccctcggtgctgcccgcggggaggcggcgtcgggcgctgagcagcgagcgccgagggccaggcaggagcgctcggggcgctggggcttcctggcgcgctcggagccggggctccggacgggttgcggcgggcagagactatgggggaagtttaagtggccttggcttcctacccagcggctccgtcgcgcgcgtccccgacccgcaactctccagggcaccggcctgtgagtgctggaggcgagtgtgcgtgcgtcagcgatggtgtgaaggtgtgtgcgtgcgtgtgtcgggagtgcgggagtcggagcctggggcggctccagggggcggggaaatgatccgtttggccgcgggaccgagccgagctctgacggcggctgcaactccggctaccgactctgcagacccgctctggcctcgctggaggccagccgggccaggagggcgatcacgggttttggcagtgcccgatgctggggcttgggtctgatgtgaccccgattccttctccagtgcgggactcccgccgccctaactttcgcgtacatcttgtctccaggcccgcgaccccgacccggagttgaagcggctgcggcgccctcggctgtgggcgctgctgcccggctgtctgttttaacccagaagtaggcgccgatcctggggctctctgtcctgcagtcgtctccggcgtcccagaggactctgcgtccctgggccactcccgctggctcaggagccgtgatcagctccgttaaggggaacgcgcgtcccggcccctctccatctgcttggcgcgatctggcgcagcagcagagcacgtgggagaggc

SEQ ID NO: 32252 - DNA, 91 bp, Homo sapiens
  chr19:34396806-34396897
  hyper
cgcctgccagggtgtccctggggacccaccggatcggagagggggtcgggggcgaaaagcgccaggaggctggcagcccgggctggaaccc

SEQ ID NO: 32253 - DNA, 1355 bp, Homo sapiens
  chr19:34972054-34973409
  hyper
cgaagcgacccagcgcgaggaccagtccccaaccaacccgctcctagttctgggcgccttccccagcagtcagatgggggcttcagaggccggtgcgcggccacatggccccgggccaggcagggggtcgtggggacgcatctgcgctaggcgcacagtattcctgggcgcgggacgggcgaagcgccgtgggttccaagctgagctgggtcggccctgcagcgccggagagcaaggcggcgcagggaagggagatggggcgggatgtggggaaagctgtcgactgcttggatctctccggcccggatggcgccagctgcctccagctcagcctgcggaaatccgagctcttcccagcggcccgacggcccgggcgccccgcagaccctgggctctccccgcggtgcctccgccgcccgcccctgcgtcctggcccggcctccacgcccctccgaggtcccggcgcagcgcggccgccgccactccccccacattccagaggccgcagcgccgtctccttcctcgcattcctgcccccgcaaaggagtccctccgccccgcgcgaggccgcggcgaggagggggcgcggcccggcgcctgggagcttacattcctccgccgcgcgcgccgccgagcagggcgccgcgtcccccggcccgcgcgtggccgccggaacgaccccggcccggcgccggccccgccccgccccgcgcccaggggtcccggggcgggctccgggcttcgggcggacgatgcggcggcccggccggagcggcggcgggaagcggaggcggaggtgacgcgccagggccggcgggccgggccatgcagcgctccagggcgggcgcggacgaggcggccctactcctggccgggctggccctgcgggagctggagcccgggtgcggctctcccggtcgggggcggcgggggccgcggcctgggcctggagacgaggcggcgcccgcgctgggccgcagagggaagggcagcggcggccccgaggccggggcggacggactgagccgcggggagcggggtccccggcgcgcggcggttccggagctcagcgcgcagcctgcgggcagcccacgggccagcctggcggggtccgacggcggcggcggtggcggcagcgcccgatccagcggcatcagcctgggctacgaccagcgccacggcagcccgcgctccggtcgctcggacccgcgtcccggtcccgggccgccttcggtgggcagcgcccgctccagcgtttccagcctcggctcccggggctcggccggcgcctacgctgacttcctcccgcccggcgcctgccccgcgcccgctcgctccccggagcctgcggggcc

SEQ ID NO: 32254 - DNA, 562 bp, Homo sapiens
  chr19:41698802-41699364
  hyper
cgcggggtcaccgccagatgcggggtgtggcaacctccaggcggccaaagtctctgacttccaggttcttctgtttgcttactccctatccgggggcccaaggcgctgtctccgccgcccaagccccgcgtaaacctgggtgacctcggagacatccgttggagcatgagttcccgacatcaggcggcggcggtggtccgggagaaacccggcggcggggagataagcctgcccaggaggcagggggctgggctagctgccccgccccgcgcctgacttcgttggggagggagacgcccggctcccgcccctaactagcccagccgcgcggagcgcctgggagaggagaaggagccgacctgccgagatggaggcgaccggcacctgggcgctgctgctggcgctggcgctgctcctgctgctgacgctggcgctgtccgggaccagggcccgaggccacctgccccccgggcccacgccgctaccactgctgggaaacctcctgcagctacggcccggggcgctgtattcagggctcatgcgggtaaggggctctggggac

SEQ ID NO: 32255 - DNA, 520 bp, Homo sapiens
  chr19:41732035-41732555
  hyper
cggctctggctccgcgcccccgaagccggccggaagcgctggggtggggaggtgcccccggtgactcacgcgggggcaggaatgctgcggtcggaacgggacccggctccagaacccacctccagccccagggcttctccggccggcggcgccagctcccgcgcgctgaccctggcggggccccacgtgccaggtggctggacccgacccaggctccccgcccccactcgggccgcccgcccgggactgtactgtttctcctccgggcggcgcgggggctgcgggcgcggggccttcagggcgcggaggctgcgggagcgggcacctgaccttgtctgggaacggccacctaggaagccgcgactgaggagctcccctaccctcccctttccggcctctgcagactttgcaccattccactccctccgctgacggagaaaaggaaactttgtgtctgcggatggagagcctcccttgccaacgcggtgggaacagaggcgtacacgcacggagcaaacac

SEQ ID NO: 32256 - DNA, 459 bp, Homo sapiens
  chr19:44302742-44303201
  hyper
cgggtcgggtgctggcaagagagcgtagatgcacactcaggcagtggtaccctggcacagtcgtgcgggctgcgcactgcgccagagcccgcgcctagcacgtctcgggggttgggatcctagcgcgccaagagcaggcgcccagcggaggccacgccttccccgaggctgccaggcctctcatcgtccctcccggagcccagccccgctctcccgcgcaccttggctcaggttggggagggcgtcatgagtcatgaggtgggcgttgcatttgtcagttgtgcagccgcgcaccaccgagtagtctggcggcagcgcgtccgcgttcgattgcgtctggcccgcaggaggcccggtccagcagcccttccgcaccagggtcaccggcgcgcgataccctgggggcgggatcggggctcgtgctctgcttcccgaaacccttctccctccagtctcagc

SEQ ID NO: 32257 - DNA, 107 bp, Homo sapiens; identical to SEQ ID NO: 28802
  chr19:4432865-4432972
  binary

SEQ ID NO: 32258 - DNA, 863 bp, Homo sapiens
  chr19:45146966-45147829
  hyper
cggcaaccgcgagccgttagtaagttgctgaatctctccgtgtgcctccgtttcctcacctggaatgtgggcgacctcacacaggaagccgcctcttctagtgggcaccgacggagcgagcgcgcgtctgcagcgggactgagcgccgggagagacctgcgcaggcgcaggcgcgcgggaagggccagcctgggtggcccaccccgcgcctggcgggactggccgccaactcccctccgctccagtcacttgtctggagcttgaagaagtgggtattccccttcccaccccaggcactggaggagcggccccccggggattccaggacctgagctccgggagctggactcgcagcgaccgcggcagagcgagcgggcgccgggaagcgaggagacgcccgcgggaggcccagctgctcggagcaactggcatggcccgagccatggccgccgcgtggccgctgctgctggtggcgctactggtgctgtcctggccacccccaggaaccggtgagtgacccccgcgcagtccggtggcccctgtctggctcccgctccgcatccaggccgggtacttgcccccttgggttcccgaagatgacggccccgccgcggcgccacccaccccccatctctgccccggggttggaaggaacacggtgcgagggtgcgagggcaggaccctcctcttggccacccggagagcggtcggagttgggtacagaaattcctcgaaattggcagcaacacgggtcgggcacaagaccctcctctgggcccctcggaaaggggatggagttgggtgaggaaatttcccaaaaaggcaagtgaatcccggaaaatcagcagatggtgacgcatgcc

SEQ ID NO: 32259 - DNA, 1002 bp, Homo sapiens; identical to SEQ ID NO: 28806
  chr19:45349502-45350504
  binary

SEQ ID NO: 32260 - DNA, 772 bp, Homo sapiens
  chr19:45655296-45656068
  hyper
cggcttgccctgaggcacggcccgacgggggcgccctggaggcgctgttggcccggtgggcagcgtggggggtatcgcgggtaggggacttgggcgggctgggcggcttgagcgcgctgacggctcggatgagacccatgcgccggcggatggagtggtccaggttgaccgtgcagcgcagcaggctctgcgcctcggccacggtgaaggggaagtcggcgcccaggaagcgctcgaagagctcggggtcgccgtccaggtcgagcacgttctgcaacgccttggtcatggtgtgcagctcgcggctgttgtcgcggaaaacgtcccagaggcgcgcgcggccctcgggcgcgcccccggtctgctgccggtcctccaggcactgcagcgcccagctcaggcggcacggccactggttggcgagcaccacccacgccaccgcctggcgcggcgtggggcccccaaagtccccctgctgctgctgctgctgcagcaggcgcacggtgatgggcacggtgttgacgatgcgccgcatggacaccacgttgtcgggcacgtactcgtagaggcagtcgcgctcgtcgtgaaggcagaagagcgcctcctggattcgccgcgccgcctcgtcgtcgatgcggccctgcccgcgctccgtccccgcctgcgcctgcaccgccagcagctgcgcgctctcgcccccggcgtcccccggcagccacggcttgcgcgtcatctcgcggtacaacaggtcgtcgcggctctgcaccgcatc

SEQ ID NO: 32261 - DNA, 258 bp, Homo sapiens
  chr19:460042-460300
  hyper
cgcttccttggccgccctggaagtccctgctgcctcccatctggaatcctggggtctgtccgggcgccagcccctttccaaacaccccttcccgcacccccaccgcaggccagcgtctcgggccccgtctgtcattcgtgaacagctgtccggggggctccggtggcagagacgccccggccgctcgccgctctcggcctcgcccgcccagtccgagtggggggcggtgcacctgcgcatgcgcgcccctcccccgcc

SEQ ID NO: 32262 - DNA, 1684 bp, Homo sapiens
  chr19:460529-462213
  hyper
cgcacgacgtaggagaccccgggccccaggaccctggcgtcggggtgtagccagccgtgcgcgggtttgtggatgaagctgcccttccggatccactcggcggcggcggcggcgtccccggaccccgccgccccccgcccgccccgcgacccccgcgaccccgcgccccgacagcggctgagcgcgggcaggggacagggcgcggcgcagcggggctcgcaggcgcccaggacggcggccgccagcgccgggacgccccccgggcccgccggctcgggttgggggtccgcgccccccgaggccccagccgcccgcgccgccgccgggccgcggcccaggaagccgcccggggccgcgaacttccactgcggcattcggggcagcaacgcgcagaaggtggtgggcgcctcgggctcggggggcgcggggggcgccgggggcgcgcgcccgcccggaccctgcgtcatggccgcggccgcccgacggagcccgaccgggcgctgcgcctggcgcggaggaagccctcccgctccgcccgctccctcccgccccccggcccggtgatgtcatccgcccggcccagcgcgcagccgcggggggctgcgcccctgggaccccggccctcctcgtcccggagcctggccgcgaggctggggaaactgaggccctccgaggacaccgggcgctggcctggaacccgcagccaaggcgggacggggctttgaacccagaaccccgtcagcgaccctccccgctgcgccccccacccccgcccgccgcccaagttcgcagaaggaccgagctggagaagcttagaaattccacatcccttctttcccctatttcctagtggggaaactgaggccccgggaggcgcggccagggaaaagagaaccccagaccctaaggtcagcccctccctctccgttgttgcagctagaaggtaccttagggtcacccctatttcttagtggggaaactgaggcgcggggaggggaaggggcgcggccgagggctcacagacgaagctcaaacccaggagtgccggctcgggggtggggggggggggcggggctaggagcggagccgggcccctgctctgcggcctgtcccggcctcagtttctccggctgtaactcaggggagcgggctggagggtcgcggcccttcttccctcacttctggggagcccagtcccgcaccagctcatctgagctctgggcctcagcctcccaggccggtcgctccatccccagcctcaacctctccgagaccggccgcaccttccctggcctcaagggtcggttccttctgcaccagaaaacggggtgtcactgtcaccccgggacccagcctcctggcccgacttggctggagctcccctgcacctgccccgccccaagcagggctgattgccgggaacaaagggaggggccgggacgcgctggcaggtggggagggagggaggggcgaggctgcccggagcccgatcgataattcaggggatgagatcacagccggcgccgcccgcggggccggggaggtgggggaggggagcgaggcgcgcggtcgcgatcggccgtctctgccgcggcgcgtgtcggactcagcccctgcgcgtccgcgggaggagcagatcgtgggcgcgattggtcgggctggagccgcggctggacctgcgcgc

SEQ ID NO: 32263 - DNA, 434 bp, Homo sapiens
  chr19:46931914-46932348
  binary
cgtggctcccgggtcctgggcaaggctgcaccaaggagggtctaaagatgatgcttcccctttcttggcgtggcctccgaaggtctcacaggccccaacggtctctccggatctgggactgctgatctccctgggacaactgccaacagagtgtcgtaggcgcggccctggcaggcagggaggcgcgtccctcaccgctggcccagaggttgcactcagtgccctgtcgccggactaggacgaggatgtggccgctgcacttgctcccgcggtgacgtcaccgcctccttccgctctgcggcctggcggtctccatggcaaccgctgaagcatccatctcctctgccattggccgactggccgcattgaaatcaagagtctgagggggtcattcggaggtgaggggtcggccaccagccctcagaagcgcccgc

SEQ ID NO: 32264 - DNA, 453 bp, Homo sapiens; identical to SEQ ID NO: 28813
  chr19:47223627-47224080
  hypo

SEQ ID NO: 32265 - DNA, 573 bp, Homo sapiens
  chr19:49242357-49242930
  binary
cgcgcaggtgctccgcccgccactcgccgcttcccacgcccgccgccgcgggccggcccagagcgtcgcacaaagcgaaggcgtccacgcagctgctctcgccggggccaccgccggggctgcctgctaggccgtagcgctctagcgcctcggccacgagctcgcgcgccgtggagcgcgccgtggccagcacgctcttgtagttggcgcccgatgccagtccggcgccgaagatcttgaggacccccggaggcgccgtggcgcgggtagccagcgggggctcgggggccacgcccgccgccagctccggcagcttcttctcgctggcccagcgctgcgcgccccccggggtcccagggcctcctgcgccgctggaccccgtggtcccggtccccgagccccggaagagctgggagatgcgcttggcgcggctaccggaggctcccccggccgccttgacagcgcccactcgccgcagctccacgtgcggcgggggcggaggtagcggctcgctgctgcggctccccgtgtccgacgaagaagacctgggagtccgccggggaacagagtcgc

SEQ ID NO: 32266 - DNA, 867 bp, Homo sapiens
  chr19:49575256-49576123
  hyper
cgcccgtctccacccacgccccgcctctcaccgggccggctgcggctgcagcagcaagccccgtgccgtcgcggtcgtcgcggaagtcaggcagcgtctcgaggcagaagacgacgatggagacgaggatgaccagcacggagactacggcgagcacgcgcgcggcctgagagctctcgggaaactcgaaaagcagccacagctggcgggcgaaggcgcggcggggcagggggcgctcgggcggcaccgggcagccctcgtcctcgcgcaggcgtgccagggccgccgcgcccagcccgtagaaggccacctcttccaggaagacgtcgagcggcacgtgcgccggccgccgcagccgcccaccggactggtagtagtagagcacggcgtcgaagctgggccggtgccggtcgaagaaatactcgcggcgcgcgtcgtcgtagaagcggccgcggcgcgctgggtcccctagcagagtgtccgggaagcggcccagcgtgcgcgcccgcgtctcgaagcgcagcccggccacgttgagcaccagccgctcgcagcagccgcacggcggcgggcaccgcggctccatggcgcgcgcagccccggcgacccgcgaaccgacgtgtggccccgacgcccggccccggtgcggccccgcctcggccgcctcggccgccgccgccgccgccccagcccggtgtccggtgtccggtgtccgcgcgtaaaaatagcccggcagggcggctagggcgcgagggagggggcactgtgaccccggcggggcggagggcgacagggcgaccgcgcgccctctgccgggacgcccgccctgccctgccccgccgccgccgccgcccgcgcctgctctgc

SEQ ID NO: 32267 - DNA, 920 bp, Homo sapiens
  chr19:49652126-49653046
  hyper
cgtgggggtggagccagcgtggggggcgtggcccgaagagaccaaatggaggtggaggtatgggctaaactgaactctccaggccacgggaggggcacggctgagggtcccttccgtccccagacgtgatggtgtggtccaatgagcgggtcatgggttgggtgtccgggctgggcctgaaggaatttgccacgaacctcacggagagcggggtacacggggcactgctcgccctggacgagaccttcgactactccgacctggccttgctcctgcagatccccacgcagaatgcacaggtgagctgccgctgggcccggagcatgctgggcgtccccacctcgcagactgcacgctccaaccgccccctccacctcctctttccaggcccggcagcttctggagaaggaattcagcaaccttatctccttaggcacagacaggcggctggacgaggtgggcgcggcaacagctcagagggctctgctcccagcggctcctcgagaggctgagctgagggggcggggcctgactattaatggtcacggttggaggcggggccaggagaggggcggggttaaaggagaggtgagacccggagaggggtggagtcaaaggaaggggcggagtcagacaaggcaggagtccctcaccggctgtccggctcctatacctaggacagcgccaagtctttcagccgctccccatcctggcggaagatgttccgggagaaggacctccgaggcgtaactcccgactcagctgagatgttgccccccaactttcgttcggctgcagcgggagccctgggctctccggggctccctctccgcaagctgcagccagaaggtggggggctcccaaatgcgacagcccttcctcgcttccctagggtggggcatggaccacctcagtagtcc

SEQ ID NO: 32268 - DNA, 435 bp, Homo sapiens; identical to SEQ ID NO: 28817
  chr19:49660929-49661364
  binary

SEQ ID NO: 32269 - DNA, 667 bp, Homo sapiens
  chr19:50706517-50707184
  hyper
cggtcggcccccccacgccggcccttacaaaggcccccattcatgccttgcgcacaaagcggcccattcaccctggccccttgggcctcccgcccccggccgccccccgcgcctcgctattggtggcgccccgtgcccatcaggcctcggcttccacccccgaccgcgccgcctagctccgcgcccgggccgcgttcttttcccacggctggcacccttcgacaacttctgattggcccagcccgccagccgctctttttgattggcggctcccgtcccccaggggcggggccgtagcttgccgcagcgggcgccgattggcctctgctgctctcttgggggcggggctgtcctggcggacacgcccctctttctccccaggccgaagcctcgggacggccctggaagccggtgagtgcccggggccggcagccctccgggggcggcggaacgggactgagccaggggaagctggagcctgggggctgcgatcggggcccgggagcccgggcaggcggccggggacggcggggaggtgacgcggacactcaccttgggcgcgcagcgggacggcggcgagggaggtgggggggcgggacgtctacactcccccaactccagttgccgccgtgtgcgaggcccggtcggggtcctcgttgtcagcccc

SEQ ID NO: 32270 - DNA, 378 bp, Homo sapiens; identical to SEQ ID NO: 28821
  chr19:50708476-50708854
  hyper

SEQ ID NO: 32271 - DNA, 468 bp, Homo sapiens
  chr19:50919593-50920061
  hypo
cgtgtccaccccggtgccctttccctggctgcccgggtgtgactgccatgtggccgcaggacccgctgttcgtgctggagcacagcctgcccattgacacgcagtactacctggagcagcagctggccaagcccctcctgcgcatcttcgagcccatcctgggcgagggccgtgccgaggctgtgctactgcgtacgggggcaccaggggactgggggcaccctgggggggcagaggagatcaccggcccaccacctgcctcctctcctgcagggggggaccacacgcgctgcaagacggtgctcacgggcaaggtgggcggcctcctggccttcgccaaacgccgcaactgctgcattggctgccgcacagtgctcagccaccagggtgagcggccctggccactgggcccccactggccctcaacctgctctgccgtcaccccagatcctagacacccaccccatc

SEQ ID NO: 32272 - DNA, 225 bp, Homo sapiens
  chr19:51198097-51198322
  hyper
cgccaccgcgggccggggcctgccggccggcccgcaaagcaggaggcggcgcgctccgttacctgtagatgtaccagacgctgcgccgccggggccccagggctggccagctggaggacagcgcggggggcggctgcggcagggagctcccaccggggccgcccccgagacccccgccgccgaccgcagacaaagccatcgccgccgcggccccagccccggccc

SEQ ID NO: 32273 - DNA, 876 bp, Homo sapiens
  chr19:51227617-51228493
  binary
cgctgcatctccaggctccccctccagcatgatccctgtctgtccgcagtgggccgcctggccggcctggacgcaggcctgcaccagctgcacgtccgtctgcacgcgttggacacccgcgtggtcgagctgacccaggggctgcggcagctgcggaacgcggcaggcgacacccgcgatgccgtgcaagccctgcaggaggcgcagggtcgcgccgagcgcgagcacggccgcttggagggtgagtccgcggcgcgcggggtggaaaaaaatgagactatctgggccaggaatgggactggttgagaaggtgaccctaggtgtccggggcgggagagttcgggagagctgctgtgtgctagcggacggggttagagagctgggaggctgaatgcagggagcgggtgggcactccagacccgcgcggacccgactggggcagcaccacgccccctacagtccagctcccaccgcctggccccgcccctggcggaccagactctccacctcctggctcccgcggttctgaccacgcctcctcccagccctccccatgagttcctggccccgcctccctccacccccggatgttttgtcctcgcccccttccagactctgaatgcatgaccccgcctccttctctacccggccccgcccacaggctgcctgaaggggctgcgcctgggccacaagtgcttcctgctctcgcgcgacttcgaagctcaggcggcggcgcaggcgcggtgcacggcgcggggcgggagcctggcgcagccggcagaccgccagcagatggaggcgctcactcggtacctgcgcgcggcgctcgctccctacaactggcccgtgtggctgggcgtgcacgatcggcgcgcc

SEQ ID NO: 32274 - DNA, 844 bp, Homo sapiens
  chr19:51520092-51520936
  hyper
cggaccctggcttctatccgttgcaggcaaccacctcctcctagagctcaaggagaatcagcgggagaggagtgacgggcccagaaatgcggaaaaggaccacaccgccccctggcggccacagcgcaagcccggtctctcctcctgctggaaggacaccggggaccgcacctccagctgtgggagttccgagagaccccgccctgcccgctcctccctggaggccgcctccacagccccccgtggcgtcctcggggatggatctcctcctacttgtttccgcagtgcgcggccgtcagcacccaactctggtccaccaggacacccgcgcagtggaacgagaggccgttgaagagcgagacctgccagggctgcgagccgcgcgcgcacggggagccataggcttcggggtccaagcgcgtgtcgttttgggggagcagcgccgcctctgcggctggagaaagaaaggggacggaatcaaagcacggagggcagggtctgggtttggggttggagctgggctgtggcactggactgcgttcggggacgggggacgcagccagaacgcgagggtggtagggaaatattgggggtttcgcgtgcaccgaagggaatgggaggagaagaagcgcgtgaaagtggaaggaagctgggatagggtagcgtggagtaatgagacagaatagggtgggtctggagggcagggactgaacgcagcgcgcctggagagctggctagaacgtcgctggtcgatagaggggcggggattgaacgcggcggggaggtaagggtgcggggatagaactcggggatcggggagaggaaggggtgtgaataacaaaac

SEQ ID NO: 32275 - DNA, 873 bp, Homo sapiens
  chr19:51521986-51522859
  hyper
cggtagtgtaaaatggagcggggccgggatggggcggcgtaagaggaggagaaagaacgcggcgaagagtccacggaagagcgaggatccgggtggcagaaatcggacagggcctgagtggggcgggtcacccaggggccgagccagaagaagggcccagctgacttgggggcgggccgtgctccggagcgctgggtgggtgctggggtctcgggggaggagaggtgcgcggggcttggtgacgggaacacattctcctcccgcccgtgcctcccaccggcgcctctccccgccccctgcccccgaccttaccccagagttgcgccatcagcagcggcagcagcttcgccagagcccgggcgccagaggcggcggagaggtggaggtgcggagctctcatggccaggatctgctggggtgtgtgcaggggcgggttaaaacagatgctccgttagagacccccacctcgccgcgctcatccgcccagcctgggccaccccagcccgcaagcacccttttgacctgcagccgataaccccaggggctggcagacgggagattcgggctggaacagcggtaatgggcacaattaccctaatgacgcccctcgcggcatcttcccgtcctccctgtgcccgagtggagcgctctccgcgccccagctaccctggctgcagccacgccgcgcccgaggtttccccctccttcacgcgcggggtggggatccgaggctcggagccagtgggagcctctttctcaacctcacagcggggggacttccgcgtcccgcaggtggagaaaccgaggctctaagccggctcctgcctgtggcccgggggtccccacccatcctctcgcaatccaccccaaccc

SEQ ID NO: 32276 - DNA, 178 bp, Homo sapiens
  chr19:51815083-51815261
  hyper
cgcgccgcctctgccgcgatgcccccccctgcgcccggggcccggctccggcttctcgccgccgccgccctggccggcttggccgtcatcagccgaggtaccgcagcgccgggggcggggggctcggccgggacgccagggtcttgggtgggtaatcgggggatcaggggtgggggtc

SEQ ID NO: 32277 - DNA, 619 bp, Homo sapiens
  chr19:51830757-51831376
  binary
cgactaggggtgcactacgggagagtccagagtcctgagaggccagggtgcctggaggggggcggcggtgggagtgacccgaggtacatgaggtgctagaacccgaggcgatgggtcactggggtagggggcagaatgctgggtcaccggggaacggaggagcctgagagtcggggggctggcctggctgggcgctgcggcccggcccctgacccggatccctggcaggctgagcagcggcacggccgaaggcctgaaggtgcagacggagcgcacccgctcgatgcttctctttgccaacgtgagcgcccggcattacggcaactatacgtgtcgcgccgccaaccgactgggagcgtccagcgcctccatgcggctcctgcgtgcgtcttcgggcggggcggggccgggaaggtgggcggggccgggggcggggctagggaagtggagacgccgggaccgcccttcaggctggccctgaacttaggagatggacgctgagactgaaaagcaatgcgagtaagaaaccgatccacgcaatcaatattcattgagtgccagctaagggtttgtcgtgggggacgcagctgtgcacaaaagaaacaaggtttggggattc

SEQ ID NO: 32278 - DNA, 581 bp, Homo sapiens
  chr19:54412564-54413145
  binary
cggctccgtccgccgagtgaggccgcggccgcggggggtggggggtgggaggccgggagggggccgggacgccgggctccggggcgggggcggggggcgcgggcaccggcgaccccggtggcggcggcggcggccgggggaagcctcggggccggtcatgcggctgcggggcccgcggcccggagcgtccgcccagccctgagcgaggtgagcgctagcggagggtcctgggaggaagaaggggcgcccctcgaggtggctgcgagccgggtttggggcaacaagggacccgagtggctccaggggtggtgagatcctggcggtcgggacgcccgaattcgagcggctatgggggatgcagggacacctgggcctggcgatcccggaggacggggtccgagggtcccggagtgggaaactgcactcctcgcgtccgagtcgcagcgagcgtgggctggggagggcagaggccgggtccctgaggaaggcgaggtacggggcgagggcggaggacccaggcccggccagagcaggatgtgggtctggaaaggggtcccagaaagggggagttacggtctccc

SEQ ID NO: 32279 - DNA, 951 bp, Homo sapiens
  chr19:54485370-54486321
  hyper
cgccaacgcgggcgagccgggcccgaagcgggacgaggagaagaaaaaccactactcgtacggctggtccttctacttcggcgggctgtcgttcatcctggccgaggtgataggcgtgctggccgtcaacatctacatcgagcgcagccgcgaggcgcactgccagtctcgctcggacctgctcaaggccggcgggggcgcgggcggcagtggcgggagcggcccctcggccatcctccgtctgcccagttaccgcttccgctaccgccgccgctcccgctctagctcccgctccagcgagccgtcgccgtcgcgggacgcgtctcccggcggccccgggggcccgggctttgcctccacggacatctccatgtacacgctcagccgcgacccctccaagggcagcgtggccgcggggctggcgggggccggcggcggcggcggcggcgccgtgggggcgttcggcggcgcggccgggggcgccgggggcggcggcggaggcggcggcggggcgggtgccgagcgggaccgcgggggggcgtccggcttcctcacgctgcacaacgccttccccaaggaggcgggcggcggcgtcacggtcacggtcaccgggccgcccgccccgcccgcgcccgcgccacccgcgccctctgcgcccgcccccgggaccctggccaaggaggccgccgcctccaacaccaacacgctcaacaggaaaaccacgcctgtgtaggggcgcggcgggggagccgaggggcgtgtccggggcgcgtgcgcgggcgcgcgtgcatcgaggctgccggggtcgggggcgcccccgctttcccccgtgagcgcgctggagactgctgggcccgccccacgcccaccctccccgcccccctccccctccgaagcagggaccccgagggagggggcaggggagggagggggccgctgtgagggagcgtc

SEQ ID NO: 32280 - DNA, 355 bp, Homo sapiens; identical to SEQ ID NO: 28829
  chr19:5536543-5536898
  hyper

SEQ ID NO: 32281 - DNA, 620 bp, Homo sapiens
  chr19:5567499-5568119
  hyper
cgaaagcaagacctgacaccggcaaggccgggtcaggagagaggccgggcgggcagcgcgaggtgggaaagcagtgccggcccgggaggccgccttgggcgcccgcctcccccgccgctctccaggggtccccggccgccgcccccgccccaccccaccccgagccccgcggccacctggggtcgctgacgagcagcagcaccgagccgtcctgcaggcgcgcgtcgcgcaccgtctggtggtcgtccagccgccgcgcgttgtagtagaaggcgcgcttccaggagctcacgccctggcccaccagctgggcgcgcaggtcgctgagcgtgtcccgcggccgcacggtcagcggtagcagcagcgcctcgtccgccaggtgcaccttgatgtggtagcgcttccagcgcgacagcccccgccgcagcccctccatggcgcccgcccggctccggctccagctctggccccgggccccgagcgccccgcgcacccgcccgactagcctggccgcccgcccccgccgcgcccgcgctccgcccgcccggacacgcccggcacgcagtgggcaggcccggcccggcggggcggggcgggtgccacggtcccctcaggcgtcc

SEQ ID NO: 32282 - DNA, 546 bp, Homo sapiens; identical to SEQ ID NO: 28831
  chr19:55677520-55678066
  hyper

SEQ ID NO: 32283 - DNA, 658 bp, Homo sapiens
  chr19:55865800-55866458
  binary
cggatctggttctggctggggaagcgcgggtcgaagggcggcgtcgaccatttccccttggggggctcctgggcttccacatccaacatccacgaaggaggcaactcctgcgagacgggacgggacggggactccgtggggccgagggggcgccctcgctccgacccgtctccccatcctgacccccgcccctgaaccccacccgtcgtgccctcaccagcctgacgttggcggccactggatctgctgtgggatggtcccggggtgccgctcgcttctgagtccgcggggtgcggtcccacccgggtcaggagaaacgcaccccgcggccggattggctaggacgcccgagccccagccaatgggagccgtcgtgcaccgcggggctggtaggggcgcccccaccccaccccttgctcccccgacgccccctcgggggcctgcgcgtgcacacaggcaccgaggtgcgactcgctgagtctcaggctcaagctttaatctctgcgaagttgggcggctccacgggctcgcccccgcccccccccgccccccaatatataaaggcatatccatagttctggtatctaccagagggggcaaatccccccaagcggctttcaacattccgcttcctacagtcggtgcgcacagaaccctc

SEQ ID NO: 32284 - DNA, 513 bp, Homo sapiens; identical to SEQ ID NO: 28833
  chr19:899625-900138
  hypo

SEQ ID NO: 32285 - DNA, 1325 bp, Homo sapiens
  chr2:101435063-101436388
  hyper
cgacccccagtccaccgcgggggcctggcgcgcttggggcaaaggccctaggagaccccttctggccacaaaatcgagtatgacagaaaagggccagcgggggcgctttccttccagggccacttgccggaatgtaagagggacggagagacgtccggaaaaggctgccacgctcggagcgctgcgccaggccaggcacctaggccaggggagcggagacctcgtgggagcgggcagggggacctttcccctctcccgggcttccacccaggcgcctccccgctgtgaacgccgccgcccaggtgaaggggaaaccggccacgtttccggacctcggcggggcacacggtctccggttttcaccggctctgtcttggagccccgaagggcatcagacagcagccccggcacccggggattattcctgtacctctgcctccctccgcttggcgtttgcgggaaccttggtaaaatcctccctgtttctcgcgcgcgcctctctctccagcttctttttcttggattctcgcctgtctcctcccacagaggaaaaaaaaaaaaaggtcacgtatgtttggaaaaatatgtaggtcagtggaacatttcctgcactggtgcaaaaggagaggagggcagcggaggaggggagggagaggcagagtggagctccaagtgcccgctcctggccgcagccccacaccccacgtgcccctgccggggaggggggcaattagccggttcctttccatccttgacccattttccggaccagctacgttcgccttaggacaggcactggttattcctccccagcagtcgctgctgtcctccgccgaccaccgctcgcccgcatcttccccgacccccgcctcccacctgcccccgggccgcacccccgccgctcattgagaaatcgcagtggtccccgcagagacgcgctttgtgccctgggtcgagacctgcgcgcaaccctgcccctggaggacagtgtggagggggtgacagtcgcgtgctcgtcccccttcatcccctgcgcgggacagcagggtggcggcccgcactgcgagggtctacactaggcgggggcggcagattccttgttccccccgagtgacaactttaatgggacctcggctggcagcctctagtccacttgcctctcctctgggccggctcacctggaagcacaacccccccctcccccagccccggcgcccaaccccgaccctgcgccccaggcccgaccccgccgcgcgtccctggcagcccagcagaggctgcggcggcctggggactcgcgggtgtctgcgccgcccagggaagcc

SEQ ID NO: 32286 - DNA, 1023 bp, Homo sapiens
  chr2:101436605-101437628
  hyper
cggaagagtttgccgcgcgagcagccggcctctcgcaggagccgagggacccgcgcggctgcggcccaggagcggcggccgcggagcccggagacccgcagccgcggcggcggcggcggcggcggcagcagctagagcagcgcctcccgccgccgcccgggaggagctcgccgcgcccgctcgccgcctcgtctcccagcggcggcgggaggcgcgtctccccggcccagtccgcgcccggccccgcggggccgctccggcccgctccgaggtaaggggccgcgcctaggggcgcgggggacccagggtgggtagtacgtgcgcgcggggtcgcaggactcggtcacctgctcgccagcgtggaggacgcgcgggggcggaggggcgctcaggcgcgaggctgcgcggcaccggggaccccggacgcgggggcgcggagaggtgggttcccctccacagtcaggccgctgggggcttcgcgtcctgcaggaggtagcaatcgctgggccggtgggctccgggcgcgtctcgacgcagaagacagaggactgggcatccgagcctcggaatttgggggtcctcggggtgtccgacagggtggagaaggatcgtgccccagggcaacagctttggggattgcccgtggttgtcttcgagacccatcgcgctaccctccgaaacgtcgggcgtcctggacccccggagagtgcggcgtgcgcgccctgggcccgcggtctctcggagtccctgggtcggaattggttccgggccggattgggtgcggaatcggtgcccccaacccccgtgtgcgcagacagcgtgcagcctggctcctcacgtcgctgccgcccccccaccccaactccggagctccccaggttggatgtatgcgtatggttttgttgggagatgtgcccctttcccagccgaggagggacgcacctttgacctttctgaagagctgggcaggtcggtaaccagggaagggacaggcaccacccggctaaattcagaaccagtccc

SEQ ID NO: 32287 - DNA, 651 bp, Homo sapiens
  chr2:10183602-10184253
  binary
cgcggtgtattttggttcgcctccgcgccccgccccgccagccgctccctccgcggccgccccgcccctcccgcgccgcgagggccgcgccggggcagagccgcgcgggcgggcgaggcgcgtgccggccgcaggagctccgggttgccgccgccgccgccgcccgcagcccacgtgcggccgctgctgcgcccgagctcacgccccgcggccgctttgttgctcccggccggcctgcacgatgcacacgccggacttcgcaggcccagacgacgcgcgcgcagtgagtggtggggctgccgcggcgggactactcgtctgagcgaggggcgaggcgggggaagtggtgcggcactcgcgcgcctgtaaatgcgggaggtggggcgtgcagggcttcgctgcggccgcgccggtaggggcctgggcgggctccggagccgggcggggcggcggccgcgacgggcgcgcccgggtcggcgggggcgaggagggggcgtgttccccgcgcagctttgtcttgcgcttcctgggcggccccgccccgctggccccgcggctatttccagccatgacgtcaccccggtcctgtgagccggacggccgttgggcgggggagcggctggcgggaacgcggcacgcggccttgggggc

SEQ ID NO: 32288 - DNA, 519 bp, Homo sapiens; identical to SEQ ID NO: 28840
  chr2:102758965-102759484
  binary

SEQ ID NO: 32289 - DNA, 875 bp, Homo sapiens
  chr2:103235763-103236638
  hyper
cgcccgttgcggcgattccacccacagttcgctggctctgggggtggcgggtcttggcgcgcggtgcctgcgcgaagggagggcagccatcgcccccgcggtcactggggccccgcgttccccgcgggctcgggcaggtgcgcggtgtgccggccaggtccccttgtcctcctgccctgcggcttgggcgccgcgcccgccccgcccccgcccgcgggccgccctgggcagggcctgccgctgcggctggagagcagcgcaccggcatgggcaggcggccggcggcggagggcggctgagggctgctgagggtacgcgcagcggcctctcgtcgccctgcacgtgcctcgccaggcagtgcgcctgctcgcagcgaggacctagccctctggttgcagagacccggtgccgcagcagcggcgggtggctgtcgctgccctgccctgcacggggcagggcggagcgggctgagcagcccgggcgcgatgcgttgagcgctcggagggccaaccgccggtccccttggcggcaaccggcggcacccatggaaccactgggcaactggaggagcctgcgggcgccactgcctccgatgctgttgctgctgctcctgcaggtggcggggcccgtgggcgccctggcggagaccttgctgaacgcgccgagggccatgggcaccagttccagcccgcctagccctgcgagcgtggtggctcccggaacgacgctgttcgaggagagccggctgcctgtgtttacgctggattacccccacgtgcagatccccttcgagatcaccctttggatcctgctggcctccctggccaagattggtgagcgaactggacttgtggggaatgggagggggcgatctc

SEQ ID NO: 32290 - DNA, 203 bp, Homo sapiens; identical to SEQ ID NO: 28843
  chr2:10517952-10518155
  hypo

SEQ ID NO: 32291 - DNA, 992 bp, Homo sapiens
  chr2:105459241-105460233
  binary
cggaggtgaggcgacccagcccggcccaggccagcctggtacccagcgctggtcgctgcccctgtggggaggcagcgcggccttcggggctccagagcgcgcgggcccggaacgaggcgcgcggccgctggcacatgcggggactgcccagcgcggactggagaaggggagcgaaggggtggggagggggtgacgccggctgcccaccccgctccgcgcctccctctgtggccctctctcccttcttcccctcccaccctgccgctcccagccgcgtatggaactcgcgtttggaaaaggcacggagcaggcgggcagctgtgcgtgtgcgcgccggtggcctcggacgcagccagcgcgaggacctcggcgcggcggtagcgccccggcgggccctccaagtgccggcctgcagggggcgccggcgcgctcgcgccccgcgggttctccaccgccccgccttcgcccaccgaggaagggtcggagggaggacccggacgggagcaggttcccttcgcgcctctctggagggtcggcggggccctcaggctggtgctcacccgtaggaccgggacggtgttgtcacacttgtcaccaacgacggccggcgtggcgtcgcaagtccgctttccagtctcagcggctggaggaggcctcggggcggcagggggagtttgcctcccggctggctagcttcgctagactcagtcattactaaggggttgggagggggagcttgtctcttctctcctggcagagccgcgggaggcgtcggaaagtttcctaccacttgagggacgaaggtggatggatcgagagccttgtttccctgctgggatggccgaatgtaccagaagtctcgctggcgagcagcgccctcggcttccccggcaatcatcccaaacgcacacccttcccctggccgaaggaaccccaggttgcctaggaaacggccccgcggacctggcgggccctagggtggagacccgggc

SEQ ID NO: 32292 - DNA, 971 bp, Homo sapiens
  chr2:105469747-105470718
  hyper
cggcggcagcgagcggtccgtctcgcacgcgcgggcaccgcgctggtcctgggctgcaggtttcccagatgatggcatccgagaacttaaacaaagggggctgccgccggcgcgcaacggctgcggaaagttgcggtggcggatttccaaggagcgtggccacgaccagagctcttggcgatgcgagcccccgcttcccacccccgccgatcagagaagggggccggctggtgaagggaagaggaaactttgaaaccactggggacacatctgtctataggtattagcttgaatggtacatccgtgccgcgcgctttacaaatctctggcggggcgggggtaagggggtgagcaacccgacgcgtactaggtggggtgggcaggttgctatttttcatgtttcccccttcgttttccttctgattctcttcccccctctcgtccctccctcccttttatctcccctttcttccccccgcccagacctattgcgaacgcccagagccgccgagggaacgccaacgtctgggccggacactaagagttaagatgtggcggagggggcggcgggggaggggcggggaggggaaagtggtgagggggagggaggctggaggacgacagatttccagcttctacgacgctctgcctaaattaaaaagcaaccaatcggaacggccggaaggggggcctcgcgtcctgagccagtcattccgagcctgccaatcacccagcgggtagccaatcagcgggggccctggtgctcgacttccttgtatttgggaaagtgtggtggtgggtgcgcgctcgcggcggagggtaaacattcgacagtccccgctctgagagggagggacagagagcgaactgtcagatcggagcgagagcgggcgcccgagagagggagagagagagagggagggagaggaaaagtgagagagggaaagagagcgcgaacgagggcgcagagc

SEQ ID NO: 32293 - DNA, 1350 bp, Homo sapiens
  chr2:107502865-107504215
  hyper
cggcctgcgggatcacctctccggggccagcgctgctccgcgccggcggcagctgcaagcgcgggcggcggggcacagcgggtggctcggcctcaaagccggcgggaggctacgctcagccccgcgctgcacgcctcattgtttcgggcagcgcggcggcggctcccgcggccagaggaaccgcggccccgagccccggggagaggcggcggttcccggcccacgcaccgaggctgcgccgcgccccgcccccgagctccgctcgccccagagccccctccctctccgcgatccctttcatccttcccgctccaggctcacctagctggcgggagccgggcactgggaagttgggctgccccctccccgcgcccccggcccggcagctcggcccgccggcgagcgcaggcggggcgctccctggctgcgcgcggatttctgcttgtcgcggagagtgactgcagacttgggctgcgtggggcggtgcggggcagcacggctgcctaaaaaggcgtgtttctccccggccgccgcctccatccagccctagttcttccgaaggttacctgcacagtacccgcctggcaccgcgcctggacacctccggggcactcgggtcccgggcggcggcaggaatgcaggaatgcgcacaggctgtgggcggccaggagggagtcccggcgcctgccccggcggaagtgagtctttgtgtaccctgtccaacacctccccccgccagcgcggaaggccgggctacctgcgcgcctggcagcgcctggcagccggctgggtggggcgcaggggagcgcagcatcctccccggctcgctagctccctttgttcatctcgctcaaccaggctccgcactgccgcctggccctcgctcccagagcttctctaaggatatgggatggacttgggagcgggccacctttcatttgggaagggtagctcgccaagtccggtgacggtgctccctggagacccccacctgcccgcccctccacactgccggtccccaaccccaagagggacggaaagttcttggggtagaagccggcgggacaagtggttgaagcagcctccggagccagtgggcggctgcgagctgggcagctggagcctgcgggcggggccgcggggaggtgcccatcgagtgtcggtctggtcgcgtgcggaatgtccacttgtcaccgcggcccttgcgttttctcgagacggcggcagctggtcctaggaccccaaaccgcgccgccctttgtttgctggtaaatactctcctgtgaacttcagcgtgtctctccgcgcgcactcctggcattgggtgccccaccccgctggttctctcgc

SEQ ID NO: 32294 - DNA, 996 bp, Homo sapiens
  chr2:109745060-109746056
  hyper
cgcgcttctcggaaaggagtctgaactgggagcgctccggggggtcgtcggggaggatgcccgggcgtcggctgtgtccccaagctgctcgccggcgctggcgaggaaggcagtcgggataacgccgcccaaactttccttcgcagcagcgttggcaggaaacgtccctctctgaggctcacgaaaagccgaaaaagactcggacgcttggaggaggcagggccaagcctgcgcaggagaggttccccggagccctggagatgtcctaggggaccaggctaatcgccggcttgcgcccaagcgaagggaagtcctgcaggcacggcgcctccttccctgagccccgcagtgaccgtgacctccgcgcgcacccccgcgcacgtgctcgcggccgaggaagaggaacggtcctgctgaatcctctggaggacagcgactagcgagcaggccaggggcgcatggaggtgccgcgggggcggtgcggctcgccagctgcgcggaggagcgtgcacgccgcgccccggcctccccggggacctggccggccgctgcccgcacttcctgccgctggtctcccaggcgcgagccgccgcttgcagcacagaacccgttgagcttcgtgcccggcagcacccccggtcccccgcgcggggcggacttgcggcgggacaggtgtagcccgcagccgcaggcgctgcgctcaggactgggcgggctcggctggccggtccccgccacgcaggccggtccccgccacgcaggccggtcggtgagccacttcgcaccgccacagccctagcatcgggccaccagccggggtgaagaaagtcacggcggagcccggctccccagtcctgatgctggctgccggtggcgggctccacgccggccccgggacctaggcagccgcgcgagaccgctgcgggcgcctcccccatgctgctcggagcgtcctggctgtgcgcatccaaggcggccgccgctgctgcgcagagc

SEQ ID NO: 32295 - DNA, 1769 bp, Homo sapiens
  chr2:110370717-110372486
  hyper
cgaccttggtactattaacgaaaatagttgtaaccacacttggaaaaccgctggcttactaacaagcgagataaatctacaaaagtaactggaaaggttcaaaacagtgaacaaacgcgttcttttagagtacaaaagagtcaaggcgggaaaaaaacggtttaaaatcccaatggaggaaaacttggacgaccacaccatcggataaaacgggagagcttttgaaaagccaggggagccgggctttctcccggcggcagggaggctcggaagtgctcacggctgcaaaagatgaccgctattcaatcagtccgcactgcgccttcaactccgttatagccgtaagagacccacaaacaccgctgtggatgtaacttttggcaaagaccgggaagtcgttcaagaactctcccaccgtcccgacgctggcgccgcgccccgcgaaccggggtccggccgcgcccaggctccgcagaggctcctctcccgccccaggcgcccggccgccgcggaagccggggagcactgggcgggcggggccggagggggcgcgggtcacaatcccgggccggaccagggggccggtgggtcgagggcgggaagtcccgcgggggccggggagcgcggggctggggccccggcgtcggcgggactcaccaggtgccgcgccacctcggaggaggccatggtcgcgggcaggggcacggtgaagcggctgtatcagcccggccccgagcggctggtcccggcgacggcggcgggaaggccggagggcagaagcaacgggcggggcgcgaggctaggctgcctccgcgacggggaagggacaggggcggggccgagctggaggcctccgggggcggggttggggcggacgccctgtggtgcgcgctgagcgttttgcctgcgccaagcgagcccctcacaggagctaccctcgacgcctgaggactgagcgtcagcgttggggcgggctgaaggagagctgggactccaggaagacggcgcgaggaatgcaggcgggaactgcggagcagtgattgcggccctcgcgaggccggaagtgggcgggccttgaggcgaggccgccctaggtaggtgtggccgagacagcggggagcggaagtgggcgtggcctggtggcgtgggcgcggggcgggggtgcggggggcgtgtccgcccgggcgcggcccagtgaggcggtggccgagtcctctggcctcagacgcgtaggctggcagcccgctgagcccgccagactccgccgccgtcgggagccggccgctgggagcccgtcgctatgggaccgcgctgagccgcccgctggcgggggagcagcgcggtcgaggatggaggggccggcagagtggggccccgaggcggcgctgggccccgaggcggtgctgcgcttcctggcggagcgcgggggccgggccctgcacgccgagctggtgcagcacttcaggggcgccctaggcggcgaaccggagcagcgcgcccgcgcccgcgcgcacttcaaggagctggtgaacgccgtggccactgtgcgcgtcgatcccgccgacggcgccaagtacgtgcacctcaagaagaggttctgtgaagggccgtccgagccctccggggacccgccgcgaatccaggtgaccgccgagcccgaggcccccgacggccctgccgggcccgaggcgcgcgatcggctccccgacgcggcggccccggagtcgctccctggacagggccgcgagctgggcgagggagagcccccc

SEQ ID NO: 32296 - DNA, 931 bp, Homo sapiens
  chr2:11051801-11052732
  hyper
cggcagcattctctccccactaatcctctccaaacagcagtgagagagaatgcctgccgcttcaagccaggtcgcaacccctcggtgacccgctgcgcccgaggaggggccggcggtgcgcggtggtggcggcgggcgcggcagctgtgcccgtctgcccaagggttaatccgtcccctgcagctgccgcgcgtgccttgcagaatttcaccagaagagggtacagtttgaaaagctcctgacgtcaggctggaattcctattgtgtttagaaaaggctcgggcaaagccagcccaagttcgctctctgcacacctcgagcacctcgcggacggcgtgggtccgccagctccgggacctgccgccgctgcctgcgcgccccggggcggaggacggtgccagccgcccacgaggagaccccgctcccgcaggaggccgagctgaagcggcggagcgcgccgccagccagccggggtgagtgccccgggcgaggccggcggccgccaaagcccccgcgggctcgcccgggcgcccggatgccagccccgagccccgccgccgggtgcatgcctcccccgcggcgcgcccccgcaggctgctgcccgctgtgaccgcccttccccgcaggcgggcgccggccaggctctccccgagatcagcgcacgggtggcacccgccggacccccagcggcagcggcggcggcggctgcagggggcgcggggcggaggctgcgagggcgcgcgcggggaggatggacgggtccggggagcgcagcctcccggagccgggcagccagagctccgctgccagcgacgacatagagatagtcgtcaacgtggggggcgtgcggcaggtgctgtacggggacctcctcagtcagtaccctgagacccggctggcggagctcatcaactgcttggctgggggctac

SEQ ID NO: 32297 - DNA, 853 bp, Homo sapiens
  chr2:111490007-111490860
  binary
cgtagaagcgcccgctcgcgccggacctcccgcccgggaagccagggcagggcggggccggggagggaggggagaggaaggtgaggagggaggagacgggccgggaggggtggagagggagagggcgtgcgcctggggcctcacctgctgggagctggaggaggcgcggagcgaagccggccctgccagccacgcggagaagcagaggcaggtgagcgcgatgcagccggcgccgggtctggggctcggggactcctccctgcaccgctacctggacggcgacttctggagcctcaagaacgagctgcgcggactcctcggcggcgcccgctcttccggcaaaggtaccgcgctgcggccgtcgcccctgcccgcgcccccgaagccgccgagcgtgtcccctcggtccccggagcgtcgctgcggacaacgccctggcgagggcgaggtggggtgtgcgccgcgcctgagaggcgggtccctgcctcgccgcaggtgacgggctcccctccccaggtgtgtgggcgcagccggccgccgccgacctcttcggccccctgagaggtgccctctcctcccgagctccctcccccacgaagagtcgggtgcagggctgggccccgcggtgacaggcgcggtgtctacgaagaccgtgtggctggaagatcggccttgctggtttgttgaacctgtttcttgagtccccgccccgcgatgtcccacccttggtggggagaaggggacagaaaaccgcgatgggatgggcgcacagggatggagtggccctgtccagggcgtgtctgggcgtcggggtgggacaggcttacaggaccccctcggagtgcaggtgtgc

SEQ ID NO: 32298 - DNA, 1278 bp, Homo sapiens
  chr2:115918676-115919954
  binary
cgacctttaggagttccaccgacgtgacccaagcagctggtaggagaatctgggctggattcggaaggcgcagctacaggacgcccgctgccccggatcggaaggcgcagcacctcaggccacaatctcagacacgccctcgggtcccgacaggtgttgcccgcctcccacggggctccgggaccccggtccccgggctgccccctgccttctggggcgctggagcgcgcgcagtggcggagctggagccacccagtgcttcgcacgggcgcgctccgcttctccgggttttagcggaagcctgcggggggcggggtaaccgcggaagccggcggccgtgggcgcgcgggttgggggctctcgcgccgctccgggctctccccccccccggctgcggttgccgaagagaggccggagcgcggcgcccggctgctccacctggcgcgctgagcaccgcgcggggagcccccgggggcgggcggtggggggcgcggactgcgggaagaaggcacgaggcgtcgccgcagctcggtcaggggccggggccccgccgctcgccgctgcactaacttgccgcttggtctcgcctcgccgccgcggctcgctgcgctttgggtggcggggggcggggagagcggggagtcagagggtctgcggtggccgagggagggaccctacgacggggagcccgcccggtgccgctcttcttcccctccccgcccctccgctccccccaccccgtcccttccgccgattccgggagcgacgggcgcccgtgacctgcgaacgctgccaagtgacggtccccgagtctgaagcgcccgcgaggaagcgagcgccagcgcgggccgccggcgatgacggccgcgaagcaggagccgcagcccaccccgggggccagggcgagccaggcgcagccggcggaccaggtgagagtcggcagccgcggccaggccctcccgggaggggtggctccagtgcgcgctccgcccgcctcccgcttcccaggctgggctcccgcgcctccctcttctcaccctcccccgccccgccccagttccaggctctcctgcttctccacggactctgcgggaagttagagcctctgcgtgcgctccggggcccggcgagaggatgcgcaaggtggagagccgcggggaagggggcagagaggtaaaggctgaaggtgccccggggaaccccggcgggcggcccaccgagggagggagaggcggccgggaccaaggaatggggcctcttggttccccattaacgcac

SEQ ID NO: 32299 - DNA, 432 bp, Homo sapiens
  chr2:119603649-119604081
  hyper
cgagacccgagcctcctgtgccacgagctgtagcttctcgggtggtggccgcagaggccaggatcgcatagctggatgaacattcggttgtgactggaactggggtgaggaagcaggcgtgagagactggagtacccgaggccgggtttgctctccctagcgccgcagcttggcgttctggggcggtccgcggggccagaaggcatggcgcagcccggagttgggtactcaccggaggatggacgatccgaataacgtgtgcagtacacccaggcgggccatacgagaggctgctgcgagtcagttttgaccacgggcccgccgttggctgagcccataagtaggatagccgggttgccgtgctccgggtatttggtgccctgcgctccggggctccccgcgccgcctccactgccgccgccaccggtgtcc

SEQ ID NO: 32300 - DNA, 636 bp, Homo sapiens; identical to SEQ ID NO: 28853
  chr2:120301702-120302338
  hyper

SEQ ID NO: 32301 - DNA, 789 bp, Homo sapiens
  chr2:121103676-121104465
  hyper
cggcgcgcccggagcccggagcccggccctgcgctcggctcgactcggctcgcctcgcggcgggcgccctcgtcgccagcggcgcaccatggacgggctgcccggtcgggcgctgggggccgcctgccttctgctgctggcggccggctggctggggcctgaggcctggggctcacccacgcccccgccgacgcctgccgcgccgccgccacccccgccacccggatccccgggtggctcgcaggacacctgtacgtcgtgcggcggcttccggcggccagaggagctcggccgagtggacggcgacttcctggaggcggtgaagcggcacatcttgagccgcctgcagatgcggggccggcccaacatcacgcacgccgtgcctaaggccgccatggtcacggccctgcgcaagctgcacgcgggcaaggtgcgcgaggacggccgcgtggagatcccgcacctcgacggccacgccagcccgggcgccgacggccaggagcgcgtttccgaaatcatcagcttcgccgagacaggtgggtccggccctccggctgtctgccgcggtccccgctcgctcccgctctccctctccttgctagctccggctgccaccgccgccaccgcagcccgcgcgccctggggcagcctggactcccggcagagctccttcggccgtggccctgcgcgctccgcccgggttgcagtcctcttcccccaggccgcagacccttgcctgctgcctcaaccccccgccgccgatcgcctggccctccacccctgctctcc

SEQ ID NO: 32302 - DNA, 814 bp, Homo sapiens
  chr2:121199626-121200440
  hyper
cgggcgttccgctttctccactgtaccatgctaatttttcgagggacaattttttgacaatgagtcctccagcccgaacagaaaccctttatggggccggccccagggaggccgcggcgctgccaaggcaaacaaaggctcattgctgccgcggaacatgcctgcgcctttcagggccgggttcgcagagcgcgccgcctccagcccgcgccgaggtaacacctggtccgccaactcctggcgcctaatcaagatatcaatcacggcgcgggggcaggggggcgcacgggccccgaaggctccagaacccggcaagtgcaggtagccggccgcctggccggccagggctgcttggcagggagcgccgggatctggggggaaagaaatcaagccccgaagctgaaggcttaattaggctgatatcatcccgcacaaatgttcctccgagaggaaggcttctgggcaccaaaattattttgtgattaaaagcgaaaaggaaggagaaatgattcggcctttggaggagttcggagggctgggggtggcagcaggaggctggggcgcagcgcagcgccaggggcgcgggacccagccaagctccccactctgcccccactgggacagagaggcgcaagagtccaccaacccctgccacttgtggcctttcctgactgcccagggcttccaacaatgtagaagagtgacagtaaatgtccaggtccctgcatataggtgtttctttaatctgcacaccaggccggaaaggccatgcacgtcgtcgtcatcccatttcgtagatggggaaaattagctc

SEQ ID NO: 32303 - DNA, 1485 bp, Homo sapiens
  chr2:121493478-121494963
  hyper
cgaggcagcacggctccgcggactttttttcaaactcccatcaatgagacttcgaggaggagcgggcggcggcggcggctgcgactgcgaacgcggaggaaggccaggagccgcaggaggagccggaggaaagagcttgggccgcgcggcgcgccgcagcctcggggagccgcctgctcgccggcggtaggggctgcgcggcgcccgcccgcctctcggtcccctctcttgcctggcccgccccgccccggctggctggagccccggcacaaggcagccagccgagggtcgccgcgccagccaaggtgggatgggggcccacagccaccgcccggcgcccgagaggccacctgcgtgctagaggcaaacttttgtctctctcggtaaagttgcattggccttcttttgcttgcttttcgtgacgaagcgcctcccacctcggccaagcgcgggccgactgggatgctgcgccgtctcggggggtccctcggccgggtaccggcgcctaggccttgggatcggggccctgggcttcgggggactagaggctagtaggcgcgaccccgcctggggctctggacgagcagggcggggacgtaaggagagtcctggggcttggagctcgtggccagaggtcgatgttgcaccctctccctacctgggggagagcaccactcttctcggggtgcacagcgagccggcctccgcgcgccggcgggggtctgttttttcagggggtggagggtgggatcggaggctgggatgctccgaagctgccgtaggtgggcatgggagcgtgtctgcgggcgtactgagcgcggaggggctgcagccagccacttgagaacttcgaactccacttctccgcgctgcgcgtcccggagccctgcctttctttcttccttcctcaatccttcctccccctcgcccggcccggccgccccctccccctctgctgggctctcctcctcggccccccctctttgcctctcttctcctcctctcctgccctcggccctgagatccgcttgacttcccaaagggatccgcacgtaatcctttgccgggtcctccggttcccccttccacctcactttcatccctgcccccctactcatcgtctctccccacccccgacaatctctcaacaagtatatttgctgaggaatttgaaaaatccactactgcaacttgatctgtatgtgatggatggggagaggcgcggagagagttgggcgccaatcctattaagggtttagagaggggagtcttttccccggacggggcgggggcggggagctgggagggagcgtgtgcttgcgtgtgtgagtgtgagcgcgcccgccgcgctggagagctgggagtccacccagctcggcgccttttcagcccggcggtaactgctgtcatttcctaggaaacccgacttttaccgcgcggggagctggggatggagcccgtgcgcctcaccctgggtgatcggtc

SEQ ID NO: 32304 - DNA, 504 bp, Homo sapiens
  chr2:121499186-121499690
  hyper
cgcctcctccccgcccccgccgtctggaccttcctctccctccgcgccggcttttccgccacgcggagcgctggctggcgaggccgcgtgtccgagcggcgccgaccgtgccgcggccgggggacattccgtgccccgagcgccccgggcccgcggctgcggccctcccacctgcgcgccggcctggtttgcagctcccaaacaatggccacattgtcgcagccgcacaccggccgccgccggcgagtggcgggaggccggactctgctcgtggcgagtcgggaagaaagccaacgggccaggtccccacagccgcgcccggagcgcgcgagcggctcccacccgggaagggcgcgggttccgaggggcgccccgggtcttcctcgaccccgtttcccattggcctgccctcttgcccgcttccccaggaggggcttccagttgcctttacagctggcgaagtgaatgagagcactccacgggagccgggaagagagaggcccc

SEQ ID NO: 32305 - DNA, 749 bp, Homo sapiens
  chr2:127976389-127977138
  hyper
cgtgctgggccgggcacccggggaggcggacgatgggcgaaggcatcggagggcgccgccgcggctcgggtgcagtgcccctgccacgaagggcgcaacggaggtgggcgtgggaaggacagcactcaggctccaagtgggaagcgtgcggaattcgccggccccaacgccctagcgggtggctgggacccctgggttcctcccacgtccctgcctccagtcccggcgcgaactccaggtgtcgcccccaactccggcttagagcctacggcaccccgagcctccgagcctccgtcccctcttcccccgccattacaaaatacaaaaaggactagaaatgaatacacacggtctcggccacctaaggacaccgagctccgcagagcctagaggagctagggaacctagcgctcccctcgggccggccccaggcagcagcccccctcagccccaactccgcgggtcccgccagctctccactcccaggccccggcggcgtccaccaggcgcccgctgcccctccccaagtctcctcctccgggacctcagccctggtgccctccccgcagtcccattcctggtttcccttcgcggcgccccctccccaggttccccaaccaggcaatccctgcctgggtccctccccgggaccagtccctggagaccctgcccgccgcctctctcgggctaccactctccgaaactccatccctgactcccctccccgctacctcctccccaggggtccc

SEQ ID NO: 32306 - DNA, 492 bp, Homo sapiens
  chr2:130737151-130737643
  binary
cgcaccattgtttttagtacatatgttttgtgtatttaaaaaactgtgttgaggcgccctggctcgccctgcgccagaggctcgcgcactcagcaggttgggctgcggcggcggcggctggggaagccgaagcgccgcgcgtgagagatcccggatacatctgcggtttgggctccgccaccctccgtctctctcccgcaggtctctgagccgggtgcggaaggagggaacggccctagccttgggaagccaaagcacacccctggctcctgccgacaccgccctccttcccttcccagccgcgggcctcgctccgtgctcggctactctgccgggaggcggcggcggctgccagtctgtggcgagccctgctgccctccagccgggctcctccagccgggctcctccaccggcccttgcaggggcgcagagagctcggcgcccgcccttccgctcgcctttttcgtcagccggctggaggagcatcggtcc

SEQ ID NO: 32307 - DNA, 350 bp, Homo sapiens
  chr2:130763483-130763833
  hyper
cgcagtcccagcgctccgaacgacggtgcctccggttgacagcaacctgagcggacccgcgcctaggccctccgccaggcctgcgctgcctcgccccgggagaggaagactgagcccggctcaggcggctggagcgcgcgggcccgtttcctttcagcgatcagtcccctggcgtcccagcagcgccttccccgcgatcgcgcgtccccagcgcacgtcgcggctgccagctgctgccctgaccgccggcccagacgtgcccgcggacgccgctgacagcgcctgtgccatggggctgcctactctggagttcagcgattcctacttggacagcccggatttcagggagc

SEQ ID NO: 32308 - DNA, 1342 bp, Homo sapiens
  chr2:133426955-133428297
  hyper
cgcgctcctgtctagacccaactacccacgctcccgcagccccacatctatcgcactctgagcgcagcaacccagcttcagcgtggccgcaggctgcctcgcgcatcgctcacctgtcggcggcgccactcccacggggtgccggaggcgccagacaacttggcagggttcgggagatgtcgccccctctccctcgcccagaacccagcaccgctcggaccctccctcctctcaagcccagcttctcccgacggtgcagccggacaagctgcagcccggagtcccgcaaacccgccgctccccgctctcctcctgcagcgcgggacttggacactttcccagcctcgcgccccggggcaccagtcgcggccgccaactcccgctgggcagccccagcgcagggctggccccgaggtgggcgccttgggggcaaaagggctggcgggtagatggattgtgcgcacctggcctcggctgctggcctctgggtattctcacctggaagcaagaacaatccgcaaaaagttgccgcgatgcctaggacccacattctcccggagtcccggggccgggagagggcaagcgcatcagaggaggcgacagcagcggaggctgccccggctgcagcggctgtggctgccgaggctgctggggcccgcgctgctgccgcggagacgacggtcgtagcttagaggagccgcaggtgccgctcgcggagcctgcatcgcccgcgctcgggctcccggctgcgggtctctgctcctcccgctcgcgctcccgggccgagcaccgcgcctccggagttggcggctgagactgaaggaactactggcgatcgggagcacccacaaaagtctcgccttttctccccacctcccactccaggcatcacgtgacggctgccgagttggggtgggggtggcgggcggggaaggctgggacggtcgcttcacatccccacccccttcctgtcttcctcttctcccgcctccgcacgttcctgggaaaggggcgccggggggcgggagagaactggtagttttctgagatggggaggttgggggagcggcgaggagggcgcagcaggtgccgtggggacctgccgggtgcggactagggtctgaggactgcgtgcccggctggcccttcgcacataggaaggcagcctccccactccacgtcctctgcgccttccaggactggtcggtaccccagcgactgggtccagcccacacaactgaggctgtcccgctgcgggccgcgggagcctggcgccccgggaggctgacaggaagggcgcgcgttcccgtgcgcctggcaaagttccacgcccgcaggctcc

SEQ ID NO: 32309 - DNA, 930 bp, Homo sapiens
  chr2:137522848-137523778
  binary
cgagggtcgtgcgggtgcgcggcagaggcggtaggaggcggaggagaggggggagaaagagggggcggtggggaacagctgccggggtaggcgaggcgcaaggtggctccccgcggccccgcgccccgcggctctcggacgcaccaggcagccaatggctgcgcagaggtgtacagcagatggcgtctgactgcgccgttccttcctcctcctcctcctcctccttctcttcctcctcctccttctcttcctcctcctcctccttcagtgctgaggagccagagtcgccgccgggttgccagacgctggaatgggtggtcttccgacacacaccaccatctttcttgcgctcgggaagctcggggctcagcggctcccagaggttacggcggcggctctggcgagacgggtgagtgcaagcacgcggagccccgagtcggggatgccgggccccctggccggccgactggggcgcggggtggcagcgccggggaagggggcgcgctgccggcgcagactttgctctttcctcgccggacagccatcgtcgccccttctcccagccagacgcgggaacttggaagcggatcttctcggacgcctctggcttggggctgcgggaagcgtgggctgcccggggcgcagtgtgcggagaccctctaggcgggcggggacgccccacgcggcgacctgagcaccgacctcatgcaacgggaccgaaccttgggacccgggcagcaggagctctgttcccttcacctccagcttggtttgagggatactgatgaaggaaaccgggggtttcccgtcctgcgcggagagcctcggcgcccaaaatcgaaaggccgggagttgttctgcaggctttgcaaacaggttgactgagggtttcctttcccgtagcgctgactgcgaaatctgtgcataggc

SEQ ID NO: 32310 - DNA, 858 bp, Homo sapiens
  chr2:142887740-142888598
  hyper
cggcgctttcgccgctccacggacctcgaatgcagcaggtaaggaagttaacctgggagctaagttgagggcggacacgcttaacgcggagaacctggagctcgcaaaagctcgcagttgagggccatcgcggagggaagtctttcggaaatgcgaattctcattccaacatctgcagcgcttagaattcgcggacagaagcgcacagccaagtgcacacactcccggaggggacaaaatggggaccgggaaacggccaaagggaaaagctgtgggggtgccgaggactcaggcacttggttcagaaatcccgcaccgcacctctcacccccgcacagggccagcgcacggtggtcacccggtcccggggagcggagctgcaaggacttaagtttcacactcacttatctgcaagcatcgcccagcaggaaagccaaggaagtcaggggaggggagcggggaggtgttctccttacctcggtcggctcccacggtcagcaccctggcaatcggcaataatcccgagagagtgagtaaggcgaggagaaactcggacattgtggtcgcccggtaaggaagcctgcgctggagactgctcggcggcaccttcggcccggcggcggcggcggcggcaggggccgcttggagcctggaatcgagcggcgtcatttacaaatgtcactggaaattcttcagctcaatgagtccagccagtcagccttctcctgcctggagcaggatgtggaaggtggagggatgcgcgcgtgcgggagagaggaggcagagcgtgtgtgagcgcgagcgagacgcccgtgtgtcttgacttttcaatgcagggtacgtctgatcttacatcac

SEQ ID NO: 32311 - DNA, 726 bp, Homo sapiens
  chr2:14772264-14772990
  hyper
cgtcgcaggagcaatttcaaagacgtctggggaacgaaaagggtcttcgatccaaggaccagcctaggggccatcgggaaccaaggctctgggggatcccagcagggcccagacgcccgcctcgggcaatgtcgctgcctgccccgggccgctcgcagtgcctgggccatactggggtgccctggggtttcttctccatacccagactcagcttccccgctggagtctgtcttcctggaacacggaacgcgggcgggctgtgttctcagtcacaatcagctcggatgagctggggggcgcgggcgcaagcgggcatcggcacctggcagaaagcgccgcgccccccgcgggtgcgcacacctccgctccccggggcggcgcgcggtcgggtgtgcggggtacggggcggggcggagcggagcagagcaaagcgcacaggaggcccgcctctgctcccctcccccgccggcgaagattgacacagctcgagcacccgccccaaccaatgagcgcgtcctggggcgggccctgggaccggctgctccggctacttagagtcgtcggcgcggcggtgggaaagcagagccgagccgggactgtccagtgggagcaggcgccccggccagcgcagacctggaggcgcacgggcgccgcaccgcacgattcggctcggggtagagcggagccgcagccccacgcgcagcccaggacccactcgccaccgcc

SEQ ID NO: 32312 - DNA, 1979 bp, Homo sapiens
  chr2:14773829-14775808
  binary
cgagttcccggaaggggtcggaggctgtgtggtggcgtctgctctcgcctgacctgtggcggcttctccgcccctcgtacccctggggaggcacggaggactcggctggaaagggtgactccggtgagggcacgtaagctagccggcaggtcccaggggcactgcacgtcttggggagggacaccgaaaggggcagcccggactctgacggtgtctctgcctctctgtgcctccgcagatccccgctcctggccctcgcctcgccacctcattgatgggcaaccaactggaccgcatcacccacctcaactacagcgagttgcccacaggggacccgtcggggattgaaaaggacgaactgcgggtcggggttgcctacttcttctcggatgatgaggaagacctggacgaacgcgggcagcccgacaagtttggcgtgaaggcccccccgggttgcaccccctgcccggagagccccagccgccaccaccaccacctgctgcaccagctggtcctcaacgagactcagttttccgcctttcggggccaggaatgcatcttttccaaagtgagcggtggccctcagggcgccgacctaagcgtctacgcggtcaccgcgctgccagcgctctgcgaacccggcgacctgctggagctgctgtggctgcagcccgcgccggagccgcccgcgcccgccccgcactgggccgtctacgtgggcggcgggcagatcatccacctgcaccaaggcgagatccgccaggacagcctgtatgaggcgggcgcggccaacgtgggccgggtggtgaatagctggtaccgctaccgcccgctggtggccgagctggtggtgcagaacgcctgcggccacctgggcctcaagagcgaggagatctgctggacgaactcggagagcttcgccgcctggtgccgctttggcaagcgggagttcaaggcgggaggggaggtgccggcaggcacgcagcccccgcagcagcagtactatctcaaggtgcacctgggagagaacaaggtccacaccgccaggtttcacagcctggaagacctcatccgcgagaagcgccgtatcgacgccagcggccgcctgcgagtgctccaggagctcgccgacctcgtggacgacaaggagtagccgcctaggggctgccggcccctctgcctcccccgcacctcgctcccttcccttccccgcacccggacttcgcagtcagcggttctcaacctctgccccgccccgccacgcgcgtccgccgccggtggcccgggcccgggctgcacccccgcatccccaagccagcggcaggaagtctcaggaactgccccagggccgaaagggcgccgctgcgagcgcctggctgacagccacagcggtggtgacggtgctgggagaccccgcgtgcgctttccccttgagatgtaaaccgggaacggggaaggggctgaggggagaaaggacatggccttccccgcgagtccatggccagtgactgtggcccgactcgaaaacaaccctcttctcaaaagggaccatcaccgccccgagcgtgcgcacacagaccggtcggaggcgagaactggtctctacagggcacagttcagctcctctgtggatgcgtccccagatcgcaggatttccaagaaatcgagcctgtcccttgtgcacttgggaataattccccaagacagcacttcgggattccgggttatcctgaggctgcccgggacttttccagctctccagccccaggtctcctgacattgtgttccaggctgcgggctaagccagacagtgtttgcctccggttctttccaccgtgggaagcgaacgccacccccacccgcctttgcctgcgagtctccctcgctggcagaagggaagccggcccggtcccgggaggaagatggcgctgcgaattcggtgaggacagccggccccgcccccgacaaggagctcgctc

SEQ ID NO: 32313 - DNA, 767 bp, Homo sapiens
  chr2:150186920-150187687
  binary
cgcgcgcgccgggccaatgagcgcgccccgcggagggctccgctccccccgcgcgcgctgattggtcccgcggccctcgaggccgggccggccgcggctgcgggcggcggccagtgcccggcgcgagtgggagtggcgcgcgcgcccctagccgccccccgcctctccccgctgcgctccctcgctccttccctgagctcccgggctccggcagcgggctggcggggcgccgcattgcacactctgggggcgccgcagtgttcgtgggatggggcagcgggctgcagctggcggccggaatccgcgcgcagcccgggtgagtagaggcgggcttcccgggagagcacaaaagaacaggggattggtgccagcggccccggcttaggcggggcctggccaaggcagggagtgcgctgagtccctggaactacccgatgctagggcagtcccctggggccagaggaactggggtcccggcctccggcgttttgcccctagtgggcagagagccccgcgagtagcctggacgggtccagaggggcgtgtgtactcgtgtgtgttgggctggcgcgtggagggtgggatggaaaggtcaggagctgccaagttcaaggctggaggaacctttcccaggagtaattcagcatcttctcacggcccaacatgcgtccaccaggaactccagccggagggagttcctgggcggcggactggcagcaccccacatgttgctgcggggcggggggcagtggcggtagcccggctgc

SEQ ID NO: 32314 - DNA, 763 bp, Homo sapiens; identical to SEQ ID NO: 28874
  chr2:151341770-151342533
  hyper

SEQ ID NO: 32315 - DNA, 773 bp, Homo sapiens
  chr2:151343045-151343818
  hyper
cgcccccacccagaagggatacaattttcgcccaacagggaccgtgggaatcccttgggaggggcgcagacggcttgtagcgcgcggtttcccgagacccgccgcgcatcccccagcgactggaaacccgccccaagcgccacgcggtcctcccactcttacccgaagtgtcccacaggctcaactctattctttgtgtgtcgatttcaaaactggccgtgtaattctcaaacactgtaggaacgtaattctggatagacaaaatgggcaaaagaggaaggaaagagggcaaagaggttacgtttaaacgcacgacacccattgaacacccttcccctccccgctccccagttaagaaagaaaaccttcacacatcagaccacacactaagcacatggaccctttccgaaacccctgtcctactccccactcaccccacccggctctcacagatctgctgacccgaatctcccaaccccaggttatgcacacaggaacgaacaagtttcaggagctaaccagcccatgtgcaggcgcgtcccaaccctaaaagcttccagcgcactttccctttccccgcagtctaatcaggggaaagtagtaaggaccgagaaagacttttttttttctttttttttttttttaagggaaaacggatgaaagcggggaggcccacctcgggactgggatcccactggccgaccccctcgtggaagccgcggccggccacactcacctcggggaagcagtccttggcgaagacatggagcagc

SEQ ID NO: 32316 - DNA, 282 bp, Homo sapiens; identical to SEQ ID NO: 28877
  chr2:151344070-151344352
  hyper

SEQ ID NO: 32317 - DNA, 967 bp, Homo sapiens
  chr2:154334805-154335772
  hyper
cgaggaagttgatcatgccctcggacttgatgagcagattgcagccgaggaagaagatgccgaagaccacggtgagtgagagcacgcacatgaccgcgatctgcaccacgcgcattatgtacaggctacgctcgtccgggcctccctccgcgaagccgtcgtcggtcaccacggacgcctgggtgcagcagcgcacggctcgctccagcgcctcgctgctgttggccaggaacaggcccgccacgtccgtctggttgcctagggccggattcatcgcaggaacgggcgggcgccgcgagcggcgcgggtccgaggggtgggaaggcggcggcgctggaggaacaggtgccgggctgagcgctcactcgcagactagcgcgtgcgagggctcctcgctctgctttcgaaagtccctgggccgtgggagtttcccaggagcctctccgacgcgcgcagcagctaggctcttctaaagccgtccgctccagccctggtggtgctcgttcccggcgctcgctcgagggggggctgttggaacttggcggggctggaccagcccggccgtgggaggtgcgggccgcggcggctgcagcggcggggtggctgcgctgagcaaacagcggccccttccggccgcaccgccgcgctgcgcgctgctcttgggaggtggaggaagcaaaggggcgaacctggtcttgctttttattgcttgcttcttttgcaaactccaaaggccaggcagaggtcactgtactcttctagcttgatggatgattaaagagtttgtcgggggagggtgcggtcagctgaaagtttcagaggaactgggacacacgagctctgcgtgtcctttgcctgctgcccccctgacctctgggcgaatggaaagtggcgatgaatcgcaggtgccagatggtgccggctgaggcacccgcccactgcctgtgcttgactccgactcgcctgc

SEQ ID NO: 32318 - DNA, 1811 bp, Homo sapiens; identical to SEQ ID NO: 28879
  chr2:159313069-159314880
  binary

SEQ ID NO: 32319 - DNA, 1368 bp, Homo sapiens
  chr2:169312417-169313785
  binary
cgcctccgggcgcacgggaagaggactgagagccctgaaaccccagcggggcaggagccagcattctgagcatgtgcgagccagccagggggctagggcggatttggggggtcgactttaggtcgtcgccctaagcgcaaagcgaaagagcggtgagagcaggggcgggcgacactccccggagcggtgcccctgcgcccagggcgcagcgactgcgccctgccctgcgggtgtgggcgagttggccgcgtgtgtgcctcgctgtttgacgcgaagacgagccaatcagggcgggcggcccgagctgccatgtgacgggcaaggcggcccctttccccagcgcggccagagggaggagagaaccggggctcgccgcgagccttcgagagcagcggccgcggaggaggcggcggcggcgggcgggagcagcggcggcggcggcacaggctcggggccagccgggcgcgcatccccgggcgccctgcgcggtggagagcttggcgggctgcgggtgccgcaggacaggagtggacaaagcaagatggcagggatcttagcctggttctggaacgagaggttttggctcccgcacaatgtcacctgggcggacctgaagaacacggaggaggccaccttcccgcaggctgaggacctctatctcgcttttcccctggccttctgtatcttcatggtgcggctcatcttcgagaggtaagaagggctgaagcccctcctcccctccccctgcgcacacacacgcgcgcacacactcgcgcgctctctggcgcacgcccccgcgcccccaacgctcgcgttcacgcctcccaacctttgtgttcggggaggggttgctgacccccctgccccgctggctttctgggagccagaaagggtctggcttgccacggatttcctcccgggcgccggggaggagccgcggagcgttagggtcgccccctgccctcctcctgggccctgctctcctcccggcaagggcaggcgaacaaaggtgagcggtggtcgggctcaggacccgccgcattccgcggggctcgcccctctccgccggcgcgccacgcaaggctgccaggcagggcttcccgccggggcccgcgccacccacctgacagccaggaacgttccggacgcgcggcccggagggaggaggaaccgcgcacacttcaatctttatgctccggcacacggattgtaggggttgtgcttcaaaagaattcgccagggacttcctggcttctggtcgctgtttggtttttatccgtgaaactatcaggcccacagtcctggcaaataggggataatagcatttcaggttatcagcggtttctttaaaagaggatgtgacaggac

SEQ ID NO: 32320 - DNA, 757 bp, Homo sapiens
  chr2:171567970-171568727
  hyper
cgattcagtgccgcattagcaccggggaaattctgtccccaccctcccagaacctttagtatagcaacgatttaactaggcagatatgggcaactgcaaaattgagtctccttggcaaggagtggggagatccagccgattaagcaacatcttactgtgaaaggccaaagcattaagaatttgctgaaatgatctaaataatatctagatttttaaaaaatctagcttgagaggggtgactctctggttggatttatgccagaggcatgcgtcccttctagctgcaagaaaatgcccgaggcgaggtaccaagcttgggctggaagtagcaacccctgacttaatcccagagcgcgcagagctggtccgtcccctgcgcaagtgtcactgcgggttcacctaccggcctcttcctctcgcaggtggcatgcagtcggcgctcgccgcccgcccgcaaagaaacggcaatgcaaacttcccagcctgggaaccccgctgcttggagagcagctccgctgtgccagccgccgccaggagactggtattcaacctccccgccccccgccacggttaaagtttgctccacattcgcagctcccaccccacccccatctccgccccgaggcaggaggaccacataggagttcctgggtccaccgtgcgcaaacacacccaccaacaaaagaaagcccattaaatcttccctcctgtgaactcgcgccccaacggatacctctttgaactgacccccgccccc

SEQ ID NO: 32321 - DNA, 1472 bp, Homo sapiens
  chr2:171570325-171571797
  hyper
cgagctccggcggccactccgcagtgcgctctcgcgagccggggccgcgaggcctccaacgcggttccgcacccctaatgccccagggcggtgagcaccccgcggttccccgcccgcctcttcctccttccccgcccgcgcgcccgggagaggcgatccccgcgtccgcagtgccggggcaggacgcgccctgcgccctgggccaggaggaggcaggtggccctcctcggcaggaggtgagccgccagggagggatgggggtcacccaagcccctgcaagcgcgaccctgcccagagcaaagcacgccccgcgcctggtgaggaactttttctttccaaaggtggcaggaacaagtctgtactgacttttctcccgccttcgggatcctctctcgtatgatttgtggtttgtgggaccacaacaaccaggcttcctcgaccgcgccttttttccagtagctcctggtctgccaggcttgcgagagggcgcgctggcttggcggggctccgggcgagaaatcaccagcagcgctggggctttcggccccccacagcccagcccgggcctcctgggtggcctggggagaagggggcgggacagcacagcttcttcccctcgggtgggcatgacgggtcgccttgggtgtcctgccgagctcagctttgagggtatgcgcggcgcgggtgtttttcccaggtccactctgcaaaagttgtggcctgaggaaaacttccaggtcgccagcaggaacgtcacaggagagccccggtcgctcgtcaggcgggcggccctggagcgtgcgcgccacccaacgccgcgctgggcggccgcccggccccgccccaggtcacagccctgccctcggccccaccgcggcgggcgggggacacgcggcgggccgggcgctgtcggtcccacgccccaccggggatctcgcttgggtccgctgtgtgcgcgggcgggtgcgtgtgcggcgagggtgcagggtgtgcaagtaaatacaggggagagttacactctttgccgtctcaaagtccggcgcctggaagccgaaggcagatttttccagagataacaaagacactttgtcactttgggcgctgcgtcggtgcaaatctttaattgcaagtgtgtgtgtgtgtgtgtgtgtgtatgttggggggggcgggaagagtgtctcgagcaacccaagcgcgggtctccaggcggcaaggccccctttgatcaggaaaatccaattatttgtgtatatacatttcccacatagtgattacttcattaattgtcccgcctttatctcctcccttcccatcccccctaataatcagttcttttatccagaccaacaaacacaccataggagctttgtggattcaaaggatttgctttcgcttctgaaagagccgctattctttgatgattgggtagcggcaaacttcaaagccataaatcttccctctgactggctggc

SEQ ID NO: 32322 - DNA, 1759 bp, Homo sapiens
  chr2:171673109-171674868
  hyper
cgacagcctgcctatttccaaaggaaaaaaaaaaagcgtgttgagtacgttctggattactcataagaccttttttttttccttccgggcgcaaaaccgtgagctggatttataatcgccctataaagctccagaggcggtcaggcacctgcagaggagccccgccgctccgccgactagctgcccccgcgagcaacggcctcgtgatttccccgccgatccggtccccgcctccccactctgcccccgcctaccccggagccgtgcagccgcctctccgaatctctctcttctcctggcgctcgcgtgcgagagggaactagcgagaacgaggaagcagctggaggtgacgccgggcagattacgcctgtcagggccgagccgagcggatcgctgggcgctgtgcagaggaaaggcgggagtgcccggctcgctgtcgcagagccgaggtgggtaagctagcgaccacctggacttcccagcgcccaaccgtggcttttcagccaggtcctctcctcccgcggcttctcaaccaaccccatcccagcgccggccacccaacctcccgaaatgagtgcttcctgcccgccctagtccctgctctccacgggtgcgctgcgcagggacccccccccccccgcctccctcgtcactcttcttatccctgccctccggattcacgccccggggaagcacggaggctgaggctctagttgaagtggggcaagagcgattttcccttgagcttccatgctgcgagcgcctgtccctccaaagggcgcctgggcagcagcagccgaaggcgctactaggaacggtaacctgttacttttccaggggccgtagtcgacccgctgcccgagttgctgtgcgactgcgcgcgcggggctaggagtgaggtcggagggagggtgtggaggcgatggccggtgggcccttctctgtggggtcctcgatctacccagattagcccgcaatctctctgtcccggggccttcgggcgccatcgcgccagcgccgagagtcgagcaggggcgccgcgcaagatctttgtccgccgcctcctgcgcgctgcgcgcaagttcgtttccccggtgacgttccccatgcttacttaccccaccctctctggatctgtaccgcgagaaatctggggtcctcagggggctaggtagaggagaaacgctgaaaccggaccgaaacctcgccctaggcttagcgatggctaaaaaccggctgggataagagggaggcaagcaacattccgactcgctgctttctggctgtctggagtgcaaggtgactgtggttcttctctggccaagtccgagggagaacgtaaagatatgggcctttttccccctctcaccttgtctcaccaaagtccctagtccccggagcagttagcctctttctttccagggaattagccagacacaacaacgggaaccagacaccgaaccagacatgcccgccccgtgcgccctccccccgctggcccacacgccggctgctgagtgcccaatggggcttgtagcggctcggctggaaaatcgctcactgagcgctcccctgtgctcctagcctagtcccccacacccttgcgtcttgtactggccttggacccccaccccgaccccgaccccgcctcgtctcggcgcttcactccaggtcgcgccgatgcaccgccagactcgagagcggcccagggctacgctccctgcgccccagtaccggagctagcgcgcacgtctcctcc

SEQ ID NO: 32323 - DNA, 493 bp, Homo sapiens
  chr2:173037307-173037800
  hyper
cgggcggtggcgggccgtggtccggcgcagtttccccgcggcccgctgggtcgcactgtggccttaggaatgtgggccggggcggggcggcttgggagcgcgctgcagccaacgccgcgttcagccccgggcgcaactgcagccgtgccgggggcctccggggccccgaccgaccgacagctctttcagaccgcagcgaagtttgcacacacgacagcacgtcccggggctaggatcttgcccgcctgcggggctgacctgcaccacccttggggaagcgcgaactgccgccccgctgccgggagttaggcgcccgggcctgggtcgcccccacagacggctcggacggcacgaacgagcggaccccaaggatagtgggctggggaggggtccagtcgtggtcacggaaacgggtggtcctcgcgccgggctgcactcattctgactagcaatatgctggtggaaagtgctactccaatgcctttatcgttgc

SEQ ID NO: 32324 - DNA, 854 bp, Homo sapiens
  chr2:1747990-1748844
  binary
cggaccccgcgcccccggcgtcccccgcggcactcacaggatggaggtctgcggcgccacggcgggcacggcctccagcagcagatgcatgcagcgcacggtggtgcggaagcacaggcagcggctcggacaccctgcgcccggcttctgggccaccacggccagcgtcccccaggcgcagaacagcacgagcgccaacaggcagcggcgcccggggcccctggagcgcttggccatggccgacggcgcggacggacgctcggacgcacggagccaccacggccggctcccgactgcgcccgcccggccgcggcccacgtcccagctgtgcgcggggggcggggggcgccagctgtgcacatgcgcgaggctcctcccggcccctctgaatccccgagggcggggcggggcgagaacccggggccccagcgtccggcctgagcgccctcatcccggtggggcggcccgcatggccaaggcgagcgctcgggggcgcggaggagagcattggcacccctgattctgcgctcgagactcggggctcgggaccctggggcctacgcgaagcttctccacttctcttacccgtggtttctgcctgcgctcactacgggttttttagttggcgccttaatgtttgtaacacttttagagcgcttgctctgatccgggcacgattccaggcgcgcaggcgcgctcctctctttctccttctccctacccgcaaccacgtaggaaattatttaacgttccaaaaaagcccctcattccttttgaggaaactgaggcccaagccccaaagcgcacagcaagggagtctgcgggaagattagacccaggcggtccggctcccc

SEQ ID NO: 32325 - DNA, 953 bp, Homo sapiens
  chr2:177001081-177002034
  hyper
cgggggagagagaaagcagaagaggaaaaaacatggcgcttgcgagctgtatgtgcaaaatccgcaaggaattgcagtaaattcctttttgtttgaagaaaatttacaacttggtaatagacctttttatgacctatttgcggtcgtcattggctgcggctggtcatgtgcaggcgccgctcgccttcacggcctttttcctgatttccccggcgaatttccccccgcattctgctttcccagagcctcaccccctctttttctaacctttgtctctgcagaggtgggctccagtcaccggctgcgggattgcggagtccgccgcggcctcggctcccgcccggcgcccggcctggccccaccgccgctcactcggtccgcatcgccgccacctccggagctggtggggagcccggcgagggagggcctggaaggggccctgggcgccgagtcccccgccggcgccgacaccgcctgccaggagcagccggcctgctcgaggtgactgcagccgcgcggttctggcgcggcttcttcaccaacatgagcgggtctctgcgtccgagagtgagcgcagccgggcagcgcctagtggattacagcagacgcccggaccgaccgccgcctgtagctcggcagccttcgggtaagaatcgccccctccccgctccccagcatgccaccaagaagcctggggcgccgacccccttgggcagctcagtccggctgctcccctacatttcccggggaagtggggggtcgctgtctaagccccttcccccaatcacttcgttcctagggcgtcccctggggcctggggtggagtccggctgggttcagaagtctaagggggcagtattatttcaaaaattctgagatacgggtagccacagacaggatcccactgcctagatggagagcccctcaatcctaccctaggaaagtgtatagac

SEQ ID NO: 32326 - DNA, 1742 bp, Homo sapiens
  chr2:177052607-177054349
  binary
cggaggggaaaatctgctaaaccaccccacaaggcagaaactttatcaaaatctggcactacaacactggccctcatcacgccgccacaaattgcgagggatagaagaaagctgcaaagtcacgttaaaaggaagcctagtcaaaaagtgaaaattttgtcccgccctaggcacacagcactcacagcataagatgtagttccatgagtcctaggaaagggggaagaaaggaaaaaaccaaacatctgctctaggtttagaagagggataacatcagcgccaagcaaaccgaaagcgcagaggactcagaagaggggaagaggaataactttatctgtcctggaggtgggcgaagagcagtctccaccggccgcgcgtcacgctcccatttaaccttttccatgccgcgacgcccacactccgccctcgagggactagccccccccacgatccagagcagaagcggctcgccccgctgcatccacgggccctcacccaagcgtccagtcctgcctttctccccccacctcgcccaatacctgtccgagagcaggcgttctgccctctcgccccgcccttgcccaggcagcccccggtcgcgacggctctcctcggggctcgggggcgctgggcggcggccctgggctgctttggctaacttggctgcggggcaggcgcgaggagcggcgcgccgaccgggccgagcggagaggccgcccattggccggccagcgccacgtggccgcccccgccggtatattaggccactatttacctccggctcactcgccatgggttggagagggcagctcgggtagagagggctggcggagcggcgcagacggcggcagtcctgctcagcctctgcccggctccgtactccggccccggcctgcgccctcagaaaggtggggcccgaaccatgagctcctacctggagtacgtgtcatgcagcagcagcggcggggtcggcggcgacgtgctcagcttggcacccaagttctgccgctccgacgcccggcccgtggctctgcagcccgccttccctctgggcaacggcgacggcgccttcgtcagctgtctgcccctggccgccgcccgaccctcgccttcgcccccggccgcccccgcgcggccgtccgtaccgcctccggccgcgccccagtacgcgcagtgcaccctggagggggcctacgaacctggtgccgcacctgccgcggcagctgggggcgcggactacggcttcctggggtccgggccggcgtacgacttcccgggcgtgctggggcgggcggccgacgacggcgggtctcacgtccactacgccacctcggccgtcttctcgggcggcggctctttcctcctcagcggccaggtggattacgcggccttcggcgaacccggcccttttccggcttgtctcaaagcgtcagccgacggccaccctggtgctttccagaccgcatccccggccccaggcacctaccccaagtccgtctctcccgcctccggcctccctgccgccttcagcacgttcgagtggatgaaagtgaagaggaatgcctctaagaaaggtaagtccgcgggccttggatggggccacctggggttggggacggagcctcccccgcggaaatgcgctgggagcgtggtgtcgctgcctttccagacagcggtttgggttttgtggaggagacgcgttcccgggcgaattccatggagtctgcctcgagtacagattc

SEQ ID NO: 32327 - DNA, 724 bp, Homo sapiens
  chr2:17719692-17720416
  binary
cgcatttaggacgcaaacagcgctgcagtgcaaatggaactttaaaaaatctgcccgcccacgtagacaaagctactttacaaaagcgcacgcgtcgatatcaatcgtaccctacaacagagcatggtttaaagtatcagtgtacattttttcctaaacacaagttgcaagtaagttatctaaaatcgaacaccgccacgaaagagacctccagggtgcaataaataggtatatctcgttgaagtggagaaatggcatcatgaccctttgggttgatgcagattacagtgcggaggctgttctcgagagagaaactagaactcagcgtaaaatgctgtagtaggggaaatcgaccaaagacgagattttgaaagccttttgaaagtcgtttttctagctaaaaagaaaaagtgacttattcaggactgactccccctgccagtcccaggaaacaggagcagcccggcgcgcccgggagccccgcagcgcagtgcgcactgcggctccagagcgaagggctggcgcccgccagattctaaacgtgctcggctgccgcagcccgccggggccgcgcgccgtggtccgcgcgactccgcgctccgggtttccgcggtcaccagcactggcggaagagccctgccgagaggggacagccgcgggcggtgtcccgggagtcccgagagcgcgctccccctttgcgcaaccttcccgaggcgtcctgccc

SEQ ID NO: 32328 - DNA, 487 bp, Homo sapiens; identical to SEQ ID NO: 28891
  chr2:178937351-178937838
  hyper

SEQ ID NO: 32329 - DNA, 982 bp, Homo sapiens
  chr2:182548138-182549120
  hyper
cgcggccccgctcctcctccttattttcttctctttggacttgtttggacggttgcacacttttccccctcctgattccctaagttttttgtctctcccctcgctgcccgttagctgtactcccccagctcccgtccctactgggcgctgcaggctacccagcggcacgcgaaccgcacgcgcggacaacaaaagcctctttcatgactcactgccctcgagcaatgccccaaatctgccgcctcccgggtccccgctctgagcgcgcggcgcgggccgggcgtcccggccgttacagcggcagccggagcgcccgcgggaaggggggcgggaggaggcgtgtggccaggggtggggagaggggagtgtggcctgggccgggcggaggggaagggggaggcatgtgggaggatgggggtggggaagggatggaggcgtgtggcccggacgtagggggtgggaagcgtgtggctggaggcgaaagcggggagcgggaggtcgggggcgaagcattcacagggccaagataaagcgcaggggccgggccggcgtccctggcggtgacctgtttctcagggaaacagatgctcgctcttgcaaagggaggtttgcgttcaatgaaaggatcaagtgtggccagggcagcccggccgacctcgagaggttcccgcgtcctctccccgccctgcctaggagtggggtgtcggggcctgggcgcgggagagcggagtgagggggccgggtggctgaggggcccgcgagaccgtggggctcaggggccgcaggaacggagggctgagagctgcaggtcctgcacaggctgggtagctcggaggctcttgagagcttcgggggatgaaggggggttgatgcgggttctgaccagaccgccgacgcggcgcctccgccccgggggaggcagttgggctcccgggtcctggcctgaggctggagctgcccaggctcgacaggcaggcgaccc

SEQ ID NO: 32330 - DNA, 1312 bp, Homo sapiens
  chr2:183902312-183903624
  binary
cgtaagaatatggaacactcaagttttcctacccacctagaatttcgcccacccaccaccctccctttcctatgggccccatcatgggggcgggggcgccgaggaggggacagctcccggctcccagcggcgcccccaccccgtgcgaggcccagcgcccgatcccgccgccgggagccgggaaatggcttctctgccttcggccggccggcgaaccacagggagaggcgcccgggactccgcattaggccgcggcgcatccaggcgaccccgggccgggcctcgggcggcgacgccgagatttctacacccggcgcctcctgccgcccccaccccacggcctcccttgcccttcatccctcccgggcccgcccgcctccgccgcggcctccccggcccgtgcgcaccttcttgatgttgtagaggcgggtgagcatgccgacgccccggtcgttgaggatggtgagcttctccgccagcttctgctgactgggctgcagcactgagcgcgacatggtggtgctggtgccgccgccgccgccggccgcctcgcgcccagtcacgggcccgcggccttcgcagcagcctctctcgggcctcctcccctcccgcccgcgacctccgccttaggagagcgcgcccatggccctcgcgccccaatcccgcgccggcgacagagcgagccgcggcggactcctcggagccccttctcccgcagcagcccgcgccccggcagcctcctgccttccgcccgccgcccttccgcccccacccccggcgctctccgccccagcccccaacgagccgccttccccggctgctccactaggtgtggcggcggcggcggcggcggcggcgtctccggcggctgagaacgaggccgcttcccgcagccccggacgggccctcggtcacctgatcggcagcgccggcgcccccgcgaggccggacggggaactgcggccgacgggccctcggcatggcctcgccgccgccgctctggccctggccctggcccggaccgcccactacgcctgatgccgggatgggagtcccaagcggggactgagtggggtcgcgttgtgtgctctttccacttcgccccacaccccactccttcaagttcccaaaagttgcttttccgcaccacccttctaaagaaaccggcagaaactctgctgggaggcggggtgttttccaggcgagtttcgcttaagagtgggctggtggctccaagcgctttttcctcccactgcttgacaggcgctcgccgcagaacacagcagatgttgtgctccgcgaggtggggatc

SEQ ID NO: 32331 - DNA, 898 bp, Homo sapiens
  chr2:189156820-189157718
  hyper
cgccaggctcggaggaaccggcagctctccacgcccctgcccgaagcctgacccgactgcctctctcagtgaggtacggagatttatctaggctcttccctggctgcgaacccaggctccctccaggtagcgtggaatcgcttagaagctgatatcccgaggggcggtgggggtggacagctccggccaccagtgcccgggaaggagggcgcggggctgcgcgtagccgctggccagcaggttgtaaaaaattaggacagctaaatgctcagggagtcgtccagcactaaaggaggctaagacctgttgacgcctgctatggcagcgcttgagaaatgactgggggagtccagcgaggtcggggacgcagcggtctccgggctccagaaacctccttagccttttgtggtaactttggtccggcggcggggggccggtgagcaggaactggagggaggcggtggggaaaccgtggatccgtccggctgagggtgcgtggatcagactgggctgagcaggcaagtcatcgtcgggtcacagcgaggcgacccaggagcgaacttccagggcagcctcccttttgttggcgctgggagagaatgtgggcatgggggtggggaggcgcgaagctccgaggccgggccgcggatactttaaagctcagagctgggagggcccaaaggaaggggcggcgtccacatggttacccttctgctgcgcgggtcaagtagcttcttctggagggcgcaaggcgcggcgggggtgatgagcccttgggttctcgctccgactgctaaattcgcttggccgggtccaccttctcgtggcctcactcgccacacggatcagaatccggagcaggcagttctctctattctgaggctcctgcggctgccgc

SEQ ID NO: 32332 - DNA, 907 bp, Homo sapiens
  chr2:190445073-190445980
  hyper
cgtgtagagttgcttgtctccaaagccccacctgggtttccaccatatgctttcggtcaacgacactcaccacagcatcctctctggcggttgtgatctcccgccctggtcatgacactaggcgaccccgctggctcttctgcggctgctatcgctgctgctgctctcgctgaggtgcttgttaacaggagtgcaaggaactggagatagcacctctaaaaacacaacagccttgggcaaaaagactacaacgacgactttggcaaagaacaaaagaaaaggggcccagggattttcttttttccttctttccaaacttagctaacactgtagctgaagttggaaaggcaaagccttatggaagcggtttgggaggctcagcaggtcgtccgagcctagcggacgccctgagccagctctctccgccgccgccgccgccgccgtgggccgggcccagctcttataccgagtcgggggcggagctccctgcgacctccgactggggccgccccgtccccttcagggccgcccgggcgtccccgcggcgcgagacgagctcccgtcaaccttgcgcgccgggccgtccccgcgcccttgcccggaggagtcgcccaccccgggcgcaagcgtccaaccggccgcagacaccctgcgcggcttgcggggaccttcgcctcgacgcgttccactccccgggttttcctgctctccgggaagccgcgagggcaacctcggggggcggccgtggggctgggaaaaggaggaaggcgcgtggagccggcggggcggcgtagggagattctgcgcgaaactaagcgtcaggtgctggaagaaagcgctgcgcaccggctaccccgcagttcagggaaagggcggccgccggacggtcgcagtgcaaagctccagc

SEQ ID NO: 32333 - DNA, 1293 bp, Homo sapiens
  chr2:192109730-192111023
  binary
cggaatgtgaccccaggctggcttcgagttgtcaaatgttgtatttctcattttatgtcagtgagtctggaagcaaaaaaggtagaaagactgccttccgtgggggccgcgacgatcgcccctccttccctcaagcctcgtcccatccaggctcgccccgggtgcggagggtcgggccgcaaacccgcaaggcgcggaggccgccgcgacgctcaccggggggcgctgtgaagccggcaccgggcggacagaggtgagtcggctcggaggcggtggctcccgttcctgcccgcgcgccgaggggcgaatcccaggcagcgaggtcgccgcccccgcccctcggccggcccctccgccagcgggcgagaggggagtggccgggctcctcccgccgccgctgagcactccgcagctgggtgcgcacgggagcctcaaccgcggcgcgtggaggcagtaccagagcgcgcggcgcgcagtcggccggcagccgcgggacagccttggcagaacagccgcggcgggagccccgcagccccgggctgggcccgcgtcccggagcgccaccggagagcgaggacgacgtggaggcggagtggcgcccggcgaggtagcgccaggcgaggtagcgcgagcgctttctctctctctcccctgcccttccctctgcgtccgtcgtcggcccccgaggcgcctgctccgcgcctttgtgcccgcggtccctggccccgtcgcaccctgcgggcgggggtcagcgggctctgccgctctcttgggagacgcggcgctgcggcgggaacggcgcacgctgtaggttgcggagggtggtcgtgactccgcagtggcttcgggggtggcgggagggaagaagggcttgtaaactaagttgctcttactttgccccatgcctctcgtacctgtgggcagagtcgaatctcggctgtcctcgtgttcacccacagcccctccattcctctggcccacagctgtttcctggccccctggaaagacacggtgtggcttcctccgggcaggaaagcggagggagaacaatggggcgtcctggggagtggggttcaggtgcggtgtgccccggcggcggcgggggaggaggggcccgggacgctgtgggcctccctgcgcgtgcagctgcgctcgcctcctttgttccgccgcagcggagggggttgccctgggtctcgtttcctgcccgggatgggattgattcacggtcccagagagggaaggggaagggggcggggctggaatggaaaccagattagagacgggagctac

SEQ ID NO: 32334 - DNA, 969 bp, Homo sapiens
  chr2:19556657-19557626
  hyper
cgtgagcaagttaactgcttgcattaatgagaacgggagcgaactccacgagtttgcgcctgggggagcccagcagcaacccaagaaaatcagccttgacatcgaatctccaacgagtggtgacaggcgtccggacccccgtgaagaggactgaccggcaccggatacttctatagcattctcccaacaaacgagatctaacgaacccattggcaaggcggtcatccggctgcacttaaatgtccgctgcgtcctcggtgatccattccccaatcttaataaaacagcaattacctcgaggagcctgggatggaacatctacacgccgccggtcgctgctagtcccctccagcgcttctcttccctagggggttgtgaacctgggacacctagccttgcacgtggttttgttccgcagagccaatgcgcagctcttagcctgggtgaaatttaccaaattgtggcaacaaagaaacccttgcggctactttacacattgagaacccaacccgctactgcctgagctgctgaaaaaggactaaacgtggtttttcattcttctccgagacatttccgaggagaaattagttcagcaggcagcccttcacccctttcccccttctttctctcctgacggctggattagcggacagtcaggggagtaacagaacttttcctgtccccagcccggagaccctagggctccacagagtttccactagtgctgtgtgtgggtctcgaattggaaagcagtgcttgcgcccactgcattgcctccctgcaccaggacaatcaagggttccgctccaggccttgacgacacagagcaatcatcctatggagaatatccctaagttagagcgcgagtgcaaggcggggttcagactcgcagccctgcgctctcgggtctaggcggcctcatactagagcgcaactcctcaaaagacaaacttgaacgaaagcgctacc

SEQ ID NO: 32335 - DNA, 219 bp, Homo sapiens
  chr2:200322454-200322673
  binary
cggcggcggcggcgagccggggctgctggttcgcagggcggctagctcgcgaggaggcgcggccagagcggtgggaccggtaacaccaagagccgagaagacgcagggacccgggaccgcgcgcgggaggaaacgcggcggccgcccaagctgtcacctccagcctctcccctctcggccgcctctgccagcagccagagccggactcactgacaagcc

SEQ ID NO: 32336 - DNA, 975 bp, Homo sapiens
  chr2:200327598-200328573
  hyper
cgaccgttcaggagccgggtgggcgggaagggaattgccaaggtcggcccaggagctgcctcaggcgaggacggggagctttctgcactgggcttcccggggtaggagatgggcgtcgggtgtgggcactgcctgccctgggggaagaaagcgaggagataggtttcagagctgggggagtcgttggtgggagatctggtgtcccttcggcggccgcgggccgggggaccggggaagacggagggtcctgcggcctggagcaccaccctaccacaccaggcaacgccccccggggcgcccttcattcttttgcagagcccagaacttaataggtgggtccccttctgcaaccacgctgcgagagaatgactgccctgctaatctagtttacttgtagaaatcgactgtaaaccgggacaacaaggcaagggtgggggaagaaaaggaagcgccgaaggagccgccgctgcgtccccgcccccagctcggagctgccggggttggggccccgggtggcgctcccgacccgccgcgttttccttagggaaacaccgagtgaggcagaggatctcaggcccaaggtggctgcgaagagccccgaggcctcggcttggcgtcaatgtcccgccaccctcgagcccgggtcactgcccgggtcccggcccggagccccagcgtcctctcccgacagcgccaccgcgtgggctgaggccgaaaccttcggcgccggctctgccggtcgcgtcccggagccaacccttccgcgtcgcctgcagtccacgggttaaggatgtggcgggggatgggcaggtccctggcccagggtaccaccgggccactcaacacaaaaacgccctggcgcgtgcaaaatacgaacgcccacagtttgtcccaaccccttgaaatgaaaagtacacctggaaagcccaagatagcacccggtccgcaccccaaatttcaggcaggccagcaggc

SEQ ID NO: 32337 - DNA, 750 bp, Homo sapiens
  chr2:210636344-210637094
  hyper
cggagcggggaaagccgaattccgggggctgaagaggccgcgcaggggacgagcgcctgcgatgcggagcgtggacttcttgggccgtacccctgcggctcaagctgccccggattcgcttctccggccgtgcagcccggcgcgggccgctgtccacagtgggaggtgctgaaagcagggagcgggtgcgggggcggcgaggcggaccgctgctccgagcgcccccctcctcgctccgcggctcctccagccctcccctcctcccgcagccatgttccacgcgcggggaggggtggggggaggggagaggcacgggggatcagggcggagagagccggctctgcctcggggaaggaggggatgagagttgggagcagcgggaggaggcggcggcggcggctagcgaggagacagagctgggtcctgcagtaggactcccgggagccaccattatggtgaagaggaagagctccgagggccaggagcaggacggcggccgcggcatccccctgcccatccagaccttcctgtggcggcaaaccaggtgaggggcgcagagggcgcaccgcgggccgccctgggctgggggcgctcctggggccgcccgggtcgccgctgccgccgccgccgctgaggccgcgccacagcctgcagctccctctctggggctggaaaacaagccctctgcaccagcttaaaaacacgcattaaaatatgtatatatatgtatatatttcagtgaagtttgac

SEQ ID NO: 32338 - DNA, 823 bp, Homo sapiens
  chr2:211089500-211090323
  hyper
cgaactgggacacagatcgcagcccgcgctcctgcagccgggcccagggggtgaccacctcctcccaaaacgcaggctcccgggtcccactgcaggccgctgaactagacgggttggattggggctccggaatgaacttctggagaaatctttcggctttccccgacgtgggctcggcggtctgttctcggggcggcacggctgacacccctttttcctccgcccagatgctggttgcacccagtccgcgggatccaggaaaggaggccagctctagcccggcgccggagttggggagcactcccagccgcgcgcgcaccgccctgcttcaagccagcgacaggagtgactcgctgccccaccccacagcctcccggcctgcagccgcggaagtcccggctggcactcaccgcgcggcgggcagctggcgcggcgcacggtggccgcccaggacgcgtagggaccctcggagaaggcgtgcggccatgtccgaaacacaggggcggcggggcgacggaggcgactctgcggctactcggcgactcggggcagggtccccgggagggaggacgatcagctgaggcgtccacctgtggtgtcctcccaaaaaagcgctcgcgcgcgcccttccggagccccaaccacgccacaggctggtcgcgagggaatacgcccgtcttggctgtcagcaataggattttacagcgaaactgctgcctttgcttgcagcattctttcttgtttatcgaagcagctctgagcctttttagcgtcctgaagcgctttgagtaacggatgaaagctatggagcccccaaatacgc

SEQ ID NO: 32339 - DNA, 2468 bp, Homo sapiens
  chr2:213401528-213403996
  hyper
cgtagaaattcctctcggctaagcctgcatgtcggtcgccaatgcctttgaatgggtcaatgtgcataatcaacccattgagggaaaatatgaagggactcgaagtggggagggagataaaaagagatgtatctaagaggccgcttggaatgtcaagtccgtgttggtgtgattccggaggtggctggagcgcgggacctggtatgcgtgaagaatttcggagtaattgggagggtgcaaacggccagcacaaacgcctcacatgtgccattcgaaggtcattttgaaagactcgataattgtaacttgttatttactaggcaaaggaggcggcggcggcggcggcggcggagcgggaaaactacagctagccgttttcttggtgaggtcagaaggacaccctccgggggcctaaagcgctccctatcgccactcccgggggctttatcacctcaagctacttcccacgctccagtcaccatccctggatggtttcggaaatctctctggctctccaaaaggcaccccttggccacgtcaagacaccggtcctcctcagacctctcccgtcccactttcatccccaggaaactctagtgtcagaaactttgagctccattgcactgcaggtgctgtcattagtcctgcaagccgtggcgggccagccccgccgcgctgcctctcggggtcaattagccctttgcctgcccaggtacctggggctcgagctctccagcaagcagtggccgcgcacccatcgccgctgccgctttcgcctcgggtggatccagtgacccgcaggctcggcagcctggccgggcagtaaacagacaagtttgaaggactccggccaatagcaagttgaactacaggaagaactcttcccggagccaaacacggcaaccgacgggaaggccgggcttctggctcaagtgtgccaagcctttttttttttttttaagaggtcaggcaggcgagtaagcgcccctcaagtcaatggggagagggctccgggaagccggcggaagaggcccagaactccgggccccggaccgaggcgcgcccgcctgctgcactccggctgcccgggctgggcgcgagttgcgtctgacgccacaaggctcgggcgactgggggcgcagcggtcgccagcagcacacacaggtgcaaagcccgattttctgagcgccgctctccaccgcccttcgggctcggctcgggagaggcccagccagcaccgccccaggaccgcggccccggcggtgcgggttctgccctcggggacccgacagggacagaagagtctcctctgactggggatttgggtctcccatgtcccgaacaacaggcgccaccagaagggatcccgcttaggctcccaaacaaaacgctcgggaaagaaaagcagggggttaaggagagaaaagagggactcagagtgatttttcacgataaataaagcaaacgcacacatacagggtaagtttcaaatggaaagaggggtgaccgaaagcccagggaagaggccccggtcaagcggtccctccacgcctcccgggatgggtgaagagggcaggggagccactcgaggcagccccgccggcggctgcaggttcggcgaccggagtgccagaaggaacccacctgactgagaatcgctgggctggacggtccccgccgccacgagaaggctcacccagacccaaagtcctgtcgccggcttcattttttggaagtctcagatcccgtgctgacaattacatgtccaaatggcatatccccctttcgggcacgcggaggagatcccccagccgggcgcgcgtgggggtgcgaggggggcgggcgcggcgcgcgcggtgtggcgactcccagggcgggcgaccgagtccgcgcccgcgggtccagggccggggcccgaggagggggcgagtgtgagcgcgtgtgtgcgcgtgtgggagtgtgctcggtgtgtgcgcttggcgctctgggccggactgtgcagctatttccccgcgtgagccttcgcttgctcgctccctcctcactttctctctctctcactggttggtcaacaataaaaaaggaaggggggcgaaaggtttccaaaaaaagttgattgcaaagaggcggtaggtttccggcctctccccgcagccgggctatgttctgctccttcttcagtttccttgcacctccagtccaaatcgggaggggagcggggcggggggagcttctcgcttctccccggatcccgtccttctttttcctctcagctttcctcacacttgtccggcggctgcggtaattaaagctccgagcgtcatttccagcgctccgcggtctccagctgcagcccacagagaaattaataagactccagaaaaaaaaaaaaaaaaggtgcggggggcggtgggaataaaacaaccctccacgcaaccaggccggctctgctcagccgcgcaaacccc

SEQ ID NO: 32340 - DNA, 801 bp, Homo sapiens
  chr2:217497773-217498574
  hyper
cggttagcccagtgccggccacaggggaagcgcgcaaacgaagtcctcgcgaactgaactgagagcagacaaaagcacgcgctcttctccaccgccacgccggtcctacccaaacccgcgagttatccgtattctccttcaggagtcatagtcaggccagaagagtgcggagggacggggcccgggaagagcagggaacccccagagcccgcagccaacgcggaggtgggcgagcgggcgtgcgcgcactcacttgccggcgcgagggagtgtcgggggggaagggagtggtctccaaaagggggaggggagaaggcagggggcggggagaagccggccctttaggacccggctgcggcggcgagggaggaggaagaagcggaggaggcggctcccgcgctcgcagggccgtgccacctgcccgcccgcccgctcgctcgctcgcccgccgcgccgcgctgccgaccgccagcatgctgccgagagtgggctgccccgcgctgccgctgccgccgccgccgctgctgccgctgctgctgctgctactgggcgcgagtggcggcggcggcggggcgcgcgcggaggtgctgttccgctgcccgccctgcacacccgagcgcctggccgcctgcgggcccccgccggttgcgccgcccgccgcggtggccgcagtggccggaggcgcccgcatgccatgcgcggagctcgtccgggagccgggctgcggctgctgctcggtgtgcgcccggctggagggcgaggcgtgcggcgtctacaccccgcgctgcggccaggggctgc

SEQ ID NO: 32341 - DNA, 184 bp, Homo sapiens
  chr2:219826725-219826909
  hyper
cgggaccggaatcctcccggtagggtaccagggactgagttgggcctggggccgtgtccaaggtgccaatgatgcgggccgacagagcgggccgcactgtctgtctgtccgtctgtcccggaaagaactataaagcgctggaagcgcctgcagatggttttgcgccggtctttctttgggcccc

SEQ ID NO: 32342 - DNA, 511 bp, Homo sapiens
  chr2:219827659-219828170
  hyper
cgcggctccgaccctagtctggccgtggccgagaagatccggaaagaacccggggggacctgccaagacgaggcccgggttcgctgtccgtggtgctgaatggcgcgctcgggcggggtcggggcttgtaagggcaggaagagttgcagactcggcctcaactaggtcttccggataatttgggaatagggtgtcatctattctggcggcgagttatagaagtctggctccagaacccaaaaatgtcggtccccacttgccctcccgggacgacaggactcgattcccctggcctcagcccagcgcccttgtaacctgcctggagccggaaatccccagtccagatttgtgaattgagttcccggagggagggggagagctggcggaagggaaggcgggagcagccgcccattggctggaatttggcgcagtcagcgcggtgccgtcatctctcttggtttgggaggagggagggaggatcactagggtcactccgcggctgtcggctgtc

SEQ ID NO: 32343 - DNA, 960 bp, Homo sapiens
  chr2:220416811-220417771
  hyper
cgctcccaccccaggtgcttaccctccacttccagtagagccagggactgggcgggccccgcctggaagcggacttcaccggcgtcctcggcgcgcagctcgctaagcaccagaatgtgtttcttccctgggggtgagggggtcgctagcgaggccggagccacctctgaggagcgttggggacgaaggtgggggcccagcaggcccctgggtcggttcggacgccgttagtgtatgctagggtgggcggaacagggatgcggagcgggaagcctagaggtccgggactaggggctgggggcgggggaaagaacagggacgaggctcacagggccgtggggcggggcccgtcggagccaggggcggggcttgtcccggtggggcgggatctgttcgagcctgggcggggcagcgaggggcccgaaagggtaaccaggcgggcagaccttcctgtcggatgcggacgcgggctccgggtctcagcgggcggcctccgagctcccagcgccccgtggtctcgacctccgacacggtgcactcgaacgtagcgccgtcgccttcgcgggcgctcaccgaccgcagctcggagagtaccgccacagtacgctctggggcggagcccggggcgtgagcggggcggggcagagggcagttaccggtcacgccccctccacgccccctttctagaagcacgcgcggtcatcagggtccggggaagacagctccgcaagtctcgcgcccaaagcagtgcccagcctccacatcaccccgtacccaccgcgcacggtcaggcggaccggtccggcgcgggccgtccccaccgcgcagctgtaggtcccggcgtccgaggggccgcagcgtcgcagctggagaaggcggcgcgtgccgagggcctggagccggagccgcgggctaggcgtaagcgcgttcccgtcctaggggcgggagttgcagagggtc

SEQ ID NO: 32344 - DNA, 1041 bp, Homo sapiens
  chr2:220435308-220436349
  binary
cgtgcgcgttgcgggcgtggcacacgtagacgccggaatccggcagccgagccgccaggatgcgcagtgccaggctcgcgccggggccgtcctcggcgcggcccggctggagcgcgaagtggctgctgtcccacacttcgtccagggccatcccgtccttctcccagtacagtgtgggctcggggaggccccccgcccggcacgtcagcaccacctccgccccccgcagcacccactgggatcgaggccccgtgaggaagaccggggcgccctccccggaccccggcgatggcagcgggcgctcggcgggctgcagctcggggtcggaggccggcggctccagcacggtgacggcggccgccgcgtaggcctcgccggccgcgttgcgggcgcggcacacgtagacccccgcgtcggtgggcagtgcggcggtcagcagcaggccgtgctccgcgccgtccgccgggaagctcaggcgttccgaggccgccagctgctgcccgcccttctcccacaccactacaggcggcggctcccccaggaccacgcacttgagctcggcctcggcgccacttaccacccgcacaggccgcgggaagcgcaggaagcacggggggctcccctgatcccccgagctcgccttcatcgcggcggccgaccgcctgcagcggcgaacggtgggggggcaggggggggtgcggagggcgagccgaggcccggggcggcggggtcggggcgcggctggggactgggcgcggggacccgcggagctctcccgggcctcccgctcccggctcgcctccttaccctcggccccgagctgcagctctgcggcggcggcggcggcgattcccgggcccgaagcctggcgctcagggggcagtccttcctgtttgcctctccagcgagtggccccgcagcctcccctgcccgctgcctggcttcctgctcttaggagcctctcttcccagccccctcccacagcttgggcctcttccccctcctccctcccacctccagccgccaggtccccagccgccc

SEQ ID NO: 32345 - DNA, 230 bp, Homo sapiens
  chr2:222435635-222435865
  hyper
cggatggacggacggatagatagatggatgccggaaaggagaagaatgagagacggatgtgagactagatgcacgcaggccagagcaccagcatacgctggaacagagcacgagcatacactcgaacacacgcgcacacactcaggacatctgcgcacagacatacaatcctccgcgtccgcttccacgcaggcattcgcgcacctacatacacgcagttgcacgcgcgc

SEQ ID NO: 32346 - DNA, 2230 bp, Homo sapiens
  chr2:222435997-222438227
  binary
cgcctctccctgggtttctcagaaactaaatgatcaccgcccccccgccccgccccacctcccgacacagacacacaggcacatacaatcctcccagcacgtccgaacggatgcacagaaaactgagcacccagacgggtcccgtcgaccccgcacgttagctctaaactgtgtgcaattctggggcgaaaagctaaaactcgactgcgttcaacttgccggcgggttccccaagtctgcggggcgaagagctcgggcccctcaggcccgcaatcgcaccctcggggcgctgggcttggcgaggagaaaggtgtctgactccgggtgctagaaatcaggtcactggcgcctgacgagcggcgccacgaccgctgcgctgcggagcaggccccgcagcccggtcccgagaagcgcagggctcgggaaactttgcagaaaccagagctcgaaaggctttcgctagaatccgggagcaccaagccttcactgtgctccaggctgcgttttcccctcgccccgggctggctcaggagaggacgtggttcttgtaattttttttttaaatcccggcgttgtctcccgtgcatcccctcagggcgcctcgagcgggcctctctggcggatgctgataaactttggcctttggttacaaacttggacagacccgccgcgtgcacgggtcaccgcctcggggcaggctgtccggcggttccccgctgccccttcgccgatcccctcgcctcagcccccttctcccgaatcgggacgcaccattcacactgggctccccccgcaccacctggccctgcgctcctgaggacccctcacccgcgatggcccctcgctgtccccgaccacagaaaggccgtcccgctcttaccttcattcgcggggtataccctggaacctgtgacagcgtcgcaaatcccgaagagacacgaaaatagggcgaaatagaaaatcccagccatggttcgccggtgccaacgctgctcctgccgcttctatcccagtggaataaatgcttaagttaggagagcagcgggctgaagacattgccaagggggcgggcccggccggtgacgtgagcccgccagtccggggcccgcggccaatggcggcgcagacagggcggccgagccccgccttcaccgagcagggcccgccccagggttccgccccctccgggctccacggggcgcgcggtctcccggggctctagggggcgagcacggccggtccccgcccccgcctgccggagggagccagcgggatcccccacgttacctcgaaggtcgagcccctggacggcggagggactttggaaaagctcggaattgaccgaggggagccagagaagaggttggaaaccttttctcccaccacgggcggtttaagatggaggaaaacgctcttttattgaaataaaagaagtctaagctgacctgcggttgcttctttaggagagtcgacgtgtctgcgtccagcgcgcccgggctgagctgcagactcgcgcctgccaccgccaccctctgccaccttgccctgttttgtctttatggcgcttccccctctgaaatactctttgcggggagttttgtggctctatcactcgcttcttccctggctccccagatgcctggagagcggggacctacttggtccccaacgtccagtccgcagcagggctccgtcactgtctccagagactgaacgaatgactttctagcagtaaggaagtccccgctggccccgtccccctgcacacgccgtggacctcgcccagggcccaggacgccccgagatggccttgggcagggaaccagttgtggatttcccgggggcagggttgggggcagtccctggaaccgggcctagcccgtctgggagcggtggggtagaagtgaaaggcttaagtgtgggtgcggggacttgcagccgcacagacaaggcagaccgggactgggaagctgcccggagcggctgctgcgactctccgctccgacctagccggggcagccctccctgccccgggagaagacggcgagcaggaggacccgcagagccccgcccggctgctccggccccgggggcactggcaccatcgggctgtggtcttttcccgatgcccgagccgtggacgcggccacctaagagcggtccggcgaaggcagcgcagccggtgtcccagggaccggtccccaacgccactcggtgcatttccccaggc

SEQ ID NO: 32347 - DNA, 947 bp, Homo sapiens
  chr2:223163042-223163989
  hyper
cgccaggatttgcagagagcagcgcgctccatttgcagaaaggaaatcgagtaggtcctcgcccccgactggtgcttcttggggtgtggggtgcccagggaatgggcttcctggaagcaccaaaggagcctgcggagcctggggatggggtgaggcagccggtcccaggccctgggatccaggcggcgcgctgaggccctcccttaccttccagcgggaacccgctacgcgggtagttctgccccgggcccggccgcatcatcctgggcacagcgccggccagcgtggtcatcctgggggcagcttcgctcggaaattatatccaggtgaaggcgaaacggaaaggcgagtgcggcgcggatgaccctcgggaactatccggagcgtggagagcccctccccaaaacggctggagagagagggagggacgcggggaggggggctgtcggttcctagtccagaggccggagctggaacccgggaaaggggaggacggggaggccccggagtccaggatcccgagcccagggcggaaaagtttggtacgagtctgggcaaatgttccagcgactggggtccctgaaaagggggctcagagagccacggcgagccggggagcctggtgaggctggagcgcggcctgcctgagtctcctcctgtggtgacaccgagtgcggggatccgggctcgggagcatttattagttcttttacccaaagcttggtcaggagccctgagctgcgattggccgacgggtagaccgtcccgggtggcggagacacgcgctgattgggcaacagcgaccactttctcttcccatctctggtggtgccgaggcctctgctggccccgagggggacccgcgctgcgccccttgcccaggagagaaggttggcccggtggaaactgagagagacagccccagggagatggcagttgctgagggc

SEQ ID NO: 32348 - DNA, 877 bp, Homo sapiens
  chr2:223175977-223176854
  hyper
cggggaacatttattagcctatattgccatgagaaaacaacttgagacacttcagcctcaaccctcctcctctaagtcggtcgggacaatggcaggcggaagatgaagatataaagtaagaattctaagcttctcgccttcctgttacagccgatctgctctgcatttggaatgcggcgtctttgcgggcgttctgagtcattcctactccgctgcaagccccgcagagaacctcgccttcttcccgaccgccaagtctgattgtacagacttcatagaaggtctggaataaggactgtgttgctgcagaggccgggtcttgggcccctgggcgtgaggacgcaggctcggcccctgggaagaaatgtactaacgcacctcaagactcctaaggtgtttccaagtcccccctccaactttcgtgtccaggtcacgctgccccgccctcggacaatgagagggtgtgtcaagatgctctttgcatctttggaagccgagggggaaataggagactttcgacggggagcaggttttccggagccgtttggggctgagattctcgaacccctgctgggggccgaaagcgccggagaaacctgggactaaacgaaggcgactccccgcagggcgcaggcaccgcacccggcgtttgttttattcttaatttacttttttgggcacctctgctattgttacaaataaatgcgaacgcggagctttcgggcgggctctgggagcggcccgtgggcatcttggaatattaaaaacgtcatccggttgtaaataacctactccccagcccttgaaatccgggacgtcacaggtgaggctgaataccaggttcgcacaaaggcaaaccaaactcagccgggatgcc

SEQ ID NO: 32349 - DNA, 441 bp, Homo sapiens; identical to SEQ ID NO: 28919
  chr2:231902096-231902537
  binary

SEQ ID NO: 32350 - DNA, 1276 bp, Homo sapiens
  chr2:233497794-233499070
  binary
cgttccaatgagtgtttgaaaagcagctcccccgccccacgctccgggcgggcgcctcccactccctgaccccggggagggtgggcaccactcccagacgcgggggacgcgtgggtgtcgctcgggggcgctcgcctcccccacccagcctgtcccgggccgcgagcgcttccagtcgggttacttctgggggacaagaaaggcaccgtctgaacggtcgagacgctttttcccgctacggttttccccggagctgacaggggcagcaaggtcggagttgatccgagggtccctgcctggtcccggggggacggtcagcctcccgcccggagccgcggggagaggaagcaggtcggggtctccgggacgcgcagacacccagacaccggcggcctcctcccaccaggctggcagtcgctgagccctggcgcctccttaaagccgcagctccgccccgaccgccccgcccgccagtccgtcctcagaccctcccaaccgccgggtccccgccgcctcggcggagtgttgtagagcctcgagcctgcgaggagcgcgccgcccgccagctccctgcgtcccgtcccgcgtccccgcgttcccgcgtcctgcgatccgccgccatggccagtgaggagctggcgtgcaagctggagcgccggctgcggcgcgaggaggccgaggagagtggcccccagctggctcccctcggcgccccagccccggagcccaagcccgagcccgagcctcccgcccgtgcgcccacggccagcgccgacgcggagctgagcgcccagctgagccggcggctggacatcaacgagggcgctgcgcggccccggcgctgcagggtcttcaacccctacacggagttcccggagttcagccgccgcctcatcaaggacctggagagcatgttcaaactgtgagctcccgctgcgcgcccttcgcccccgggaccagggagggagcgggagggctttctggtccgaagtcccgggccctgtttgtgtggggaggggtcccggggtgcaggtagcatttggcccaacgcagccagatcttgcgtgctcgggtctatctcggcgcggtgggggacggggccgaagaggggggacaccaggagcaggagctctccgggacggagcccaaaagttctcggcggctgccgggcccgagttccaggtcccccaaccccgaccactggtcccgccccctccgcccgccagtccggagatttgctccgaaagcaacttctaggaaagggagccgtcgccgc

SEQ ID NO: 32351 - DNA, 859 bp, Homo sapiens
  chr2:235404277-235405136
  hyper
cgcttttgtctttccgacaactgagccttccacctggggctgggagggcggacagcaggaccggctcttccactccccaccgcggccccccgacctggtcagtagctctggcgttcagacaaaaggtcccctgagctgggggtggggggcaggtcgagagtaggccggtaaatcagacttcgcagctccttaagtcaccagtcctgcatttgggtgcagagattccgttttaaaaattcgaagcatcgctttggttcgctctttgttcgcgggcgcgggttctcgctcatccatccatccatccatccaaccatccatccatccattcattctttcttgacgcactcgctcgctccccggtcgctccgggcgcattaccgcttcttcttctgcttgagggacttcctgcgtttcaggatcatctcatagagcttgtccatgccctcggtgaggccctcgccgatgatggcgcacgccggctggacgtgataggtggtggccgggataagctcgtgcagcgccagctgcttctcaatctctgccaccggcagcgacttgggcaggtcctgcttgttggcgatgaccagcagcggcgtgccctggttctcggcgaacttggtcaccttgtgcagctccgtcttggcctcctccagccggtccacgtccaccgagtccaccacgtagatgatgccgtccgtgcagcggctgtaggacttccacagcggccgcagcttctcctggccgcccacgtcccagaagtggcagctgatgcccttggccgtgccgttgctcagcttgatcttctcggtgttgaagccgatggtgggcaccgtgttcacgaactcgttgaacttgagcc

SEQ ID NO: 32352 - DNA, 1714 bp, Homo sapiens
  chr2:235859951-235861665
  binary
cgtgccaggcctgttttacgcgccgggggcccagaggcgcccaggtcagacaaagtgtaaacgattccgaccagagcccttcaatctgcattccgcttcgcaggaaactctcctccttttatgattttcagccggactgccttccctgttgttagtttgtaactttcgctccggcccccgcagcctcgcgcctgccttccctccactgtcctcagccaaggtgtagtaaagcgtctccgaacgcggcgcgaccctcgcccacgcccgctcgcggggggaccgcaccgccccaggggtcctcgctaggggttcccggagaaggggtgggagatgggggtgcgggggggcacaggagcgcgggccagcacccagacctgctcggtaccggggacccagacccgaggatgccgggcggccaaggccccgctaccctggccggctccgggcggaggaagaagaggaggcgcccagactggatacccgcctggacccggagccgcggcaccacccccagcccgccccacgctcgccagcctcagacggccgcgccccgccccgcccctctcccgaagccccgccccggcgcgggaccaccccctccgcggcctcagctccggtcctggccccgccccccgcgcccccgcccccgcccccgcccccgcccccgcccaggcgcgggaccaccctccgcccgccgaggcgggggcccagcgcgcccggcactctcggcggtccgggcccctcgccactaccgccgccgccgccgccgtgagtcccgcggagccgcgcgcgcccccggctgggccgagccgctggccgacgagcggagcctcaggagccggcggggacgccatgcgagccaggtaggcaggcggcggcggggagcgcctcgggcggcagggccctgggggccggcgggggcgcggggtcgtgctcgggggctttgcactcccttgcgggcgcagatcgtgccgcgggcgccgatcgtgccaccgccgcctgagttcggggctgcgcgggtgcctgggcgtggggcggcttcggggaagcctcgcgcgcccctcgccgctcccccgggcgctcgggtctccctggtgctggtgggcagggacccggcccggggttccgggcgccgagccgcagccctccgcgtgcgctcgggccgccccccaaccccggctctggccacttcccggcgggcggccctgcggggtggcctccctgggcaaccggacgcgtcctcgggcgcaaatcggggggcgcgctcggctcacgggggccgtgggggccacgggagggcgtggaggggtcggggcgcccccctcgagcggcgctggggaggagggaaggacgcgcggtctccggttaaacttgttggtgacaatgcatatttcaacttcttcggagatccctcctgtgaggatgaaattgaaaactccggtttctggcttggcgatcgggtgaccgagcagccgcgaggtgacagcgccggcggcccgcgggcggggaccggctgggatagaggcgcgttgttctctgagcgatgtttaccgagaagcccgctccgcggcacgggcgggtgtcagttgggaccccaaccctgggtcccgcggctcctagcccggggcctgcggtgtagacgggggttggggacaggcccagctggccctgaccgggtgtcgggcgcccagagatgccgcgcgggaggagccgc

SEQ ID NO: 32353 - DNA, 2184 bp, Homo sapiens
  chr2:236401969-236404153
  binary
cgtggagcaggcagcggcgctcaggaggcagcagcttgagatccacggctcgatttttaaaaattgtaagggagaaggatgcctcgaaagcctctgtggtattttgtcgcatctcgcacccctgtctaaacttcagtccactcgtggagtgtggacccccacgccgcatgggctcaggaggcgcttcgcctttggaaagaaatcgcatgtattaagggaaagcacgtgtgctactttgagaaaggaggcagaaagttaccaaacgcgggaaggggaggctcgccaaccaagcgaggccgtgggacactggcgagtcgcagaggctcctggagccagccgcttggaaacaaacaacaacgcggcgggcgaactcccgggcagcctcccccgtgccggggcgcgggggccgccgcgagaacccgggcaggagctggcaggcgcggggcctggccggcgggagggtcccgcaccccggcccagtgtgaacaccccgcgcacccccctggcccggcccgccgggggcgcggactacaagtcccaggaagcccagaggcaggcgcggggcggggcctggcgcaattccccgggatccggcgcgctgggaagcgccgaggaggacgcagcgccggcggccggagggcggcaagcgcgcgggcaggcggggcgcgggcgcgggcgcgggcgagggcgaaggcgggggcggggccgacgtgggccggagccctgcgtgccagggagggggccggccgggcaggcggcgggcggcgctcggagcgggctccgcggcttgcaaggcgcctgcgactcggtcccaggtcggcgggcggcgcacggcgggctcgcgcgggggccccggcgcgccgggcggcgcagtacgcagcgcgcggacccacgccacggccaggagcccagagcagcgcggccacactgcccaggggtcggccctcggccccggcgctcggagcgcggcggctgcctgggctttaatggctgctccgcggagcagcgcctagggctggaaggcggctgcggctcaggaagtcacccgagcaagcctccttcggggccggccgcacccgccgcggcgcgctccatgggggcgcgctccccccgggcggcccgctgacccgggacgccggggcccgctcgctcgccggccgcgcgtcccggccatgaactgagcccgcgggccagccccgcgcctgctccgcccgcgcctttcttctcgcgcctcctccgcccgccgccggcgggcccggctccccgggggctgcggcgccccgggctcggcggcccgcgggccccggggcgcggggcggcggcggcggggggcgcgcggctccgggcgcggcgcctgcaccatgaactaccagcagcagctggccaactcggctgccatccgggccgagatccagcgcttcgagtcggtccaccccaacatctactccatctacgagctgctggagcgcgtggaggagccggtgctgcagaaccagatccgggagcacgtcatcgccatcgaaggtgagggccgggccgccttggggcctcgggaaggcacggacgcccgcggcgcggcgggggtgtgcgctgtgtgcgtgcgggtgtccacacacgccggccggggcacgcggctgctccgccgagggagcactgcggcgctgcttgtcttgcaaggccgggcgagcgtcgcctgcgccccgccgcgccgcgagctccgccaggaagatagatcgtcagcgttaatttgatcgtggacaatagagtctctcctgcgggaaagtggctcggtgcctccgcgtcctgggctgccggagcgtcccggcccagcagacgcctgggggcagccggcggggtcggcgccacccgacccctgacaggttaccaggccaggcctgggcgtcttgctggacgttgaagacgtgttctgagaagtgctgccgctgggggcgaggcccgggccggcgtgtttgggcggtgcagggctgccctccttagtgtgtttgcttaattcaggggtgcagttgaacttagtggatgccgagagccagccctagccgcgggagcatcgtgtccaggtgcccctgtgcaaacgctggaaccggtagtgtgctttgtaccaaccaaaagtccggggttggattagaggaagaaccctaccaggagggcagggcgtcctccagc

SEQ ID NO: 32354 - DNA, 776 bp, Homo sapiens
  chr2:236577945-236578721
  hyper
cgaggctgcatggttaggaaagatgcctcatttaaacgcgcagcaggtgagacatgcccctcgttttgttcttgcaggccaagccccagagtgggcgtggttttagggtgcaggctggtgctgggctgggcccctcggaggctccggtccgcgctgcgtcgatccatcccggcgcttgggcctgcacgccgccgcgctcgccgccgccgccgccgccgcgctcccgggactcggccagcccggctgggcgcgcggcccgcggtcccttgcacgtcggcccccgtcgcccgccccgccccggcgcgcgtttccattttaaaccgccgcccgccgcccgccacccgccacccttcggccgcagccggtgcagctgtccgcgcgtcccggagcccagggagtggcggaggctgcggaaccgccgagctgtgcagccggagcgggaggatgcgcacgggccccgcgtcgtagacaatgaagccgcgggcgccgccgcctgccctgggccctgcgcaccgcggccgcacctgccggcgagagcgctctagcgcctgaccggccgcctcgcttggccccgccggcccatggctcggcgccccgggcccggaccccggcactcgggcggcgcggcgcacgggccggcgggtgccaggggcgccgtccccgcagcctgagtgcggccctcgcggtcagcggggggcgtgggccacactcccggcccgcctgccctccccgcttggcccggcgccctcccggcccgcgggctcgctggatgcggc

SEQ ID NO: 32355 - DNA, 984 bp, Homo sapiens
  chr2:237081454-237082438
  hyper
cgcgccgacggcgcacccggcgagcgttgcgtgcgcttggagcccgggactaccccaactccacgcggaactcggctcccccggccgggatccagatgtccgagggcgcttgcgggtgtcctagttctttttcagagcagccgtaacgattgaggctggggagttcaagaccactgggggtaactgatcgcccatcgcccttcgtcctggaagcccagcgcccgcgctcaccgcgcgtctctccgggagcacctagccaggcaaagggggattctccgtggggactgaggcgtacgcccgccccggggctcccggcttgggaagagggagcaccaggcgaaggccaggctgggggctcgggtccaagggctgcagctgtgcgggcggaggccgggggtgcgggcgggagtggtgtccccttgtgtcctgcccgggtctggctccggccggggttctggaggccgcgtccgtcggcgaaccccagcccttggagtgttggggagggagacgccggccgccaggcgcttctcacctgggtttatctcctcccatctgctccctcggattcccgaggccccacctttcggggacttcaaacgcgccctgccacccggtgcccggctttcatctcccgcacagcaggcattgtttgcgggacttcacagagatgctaatccccgggccgcgtgaaccgcggcctgggaaccgggcagagggcacggaggggtgagggggtgcgctttggcctgggctggggaccttcgggatggcctctcgggcagccctcctgaggagcccgggtctgctaccgtgcgggcgccgcatcccgcctgcctcgtcctggaaggctgcgggcacgtcgcaatgggcctgggctggacgcagccagcgtccaacacacggagaaggaagaagcagaggccagagacgatggccggcgcttagctgtgagccccatgagcttccaatgctcgccaggagacc

SEQ ID NO: 32356 - DNA, 2173 bp, Homo sapiens
  chr2:237086289-237088462
  hyper
cggcctctggaacatctaaaaacagaccagaggccacccaatggaacaggatgcagtgtgacatttcacaacatacgacgcctctcctgggaagggagagctcgcgagcgcctctactgggtgggcgcagcgccatccccattgcacgaaccgagacggaggtgcggaggccgtgtctggccctggagagtcctccctctgtcgtctgctctcagcaccaagtctggcatcgccagggcgccaggcacggccttcccagggagaagccttttctgtcatttttgattattttactttaaatatgtgtgcaaaaccttagctacattctcgtgggccagggataggcaacgcgtgcacctagacctcttgcttgcccccacactccgtctccccagggccaccccctcaacccccccatgccatcagagttttgaacaccgctggagatggcgggggggaggggggcgaatttggaggcgggacccgaactgccggccaaggaccaagggctggcctcgcccttcgctcccactgggcaccgttctcgccgcgggaccttgccttgagcgcgccccctgcgggccgcggtggggattggccccttggaaagagggaaataggctgcgcgcgccggggcgggagaggcgctgcctccagtcctcccgggtgggggtctcccctccgagatccccgagggaacccgtcccgtgcactaccggatttccggtctctgaccagctggggcttcatttctacgcgtgcttttactgctctcctcctcctccggcggttttttttttttttttttttttttgaaaggagcaaacatccccagctttaatgcggcccaattatctcgtttgcacgacttaaaatgtttctctttaactcatttcaatctagtaaatatgcttcagcaagtagctaatttctcagggatggcttcgcctcgccatttgcatataaagcgcgtcggggcccggccccttctccgagtgcgcgagtcccttcttccggtgcgcgggtggcaggcagccaggcctcctagtccagggaggtcgcctaggtttggcctagggaaggcggagtctggggtccgcgacagtgcctggggaccagggtggcagggagggcagggaaacttgggccggggagggaccaggaccttctgagccccccaactcccccgcctccccggcctccgccgtcccttattccgaggaggggcgcccgtggggtaacacgttggcgcgagggtcgggggcgcatttatccttaagtgcgtttattaaatcgcgtctggagatggatggacgtggatacaggagaggaaatctcagggctcagtcgagcaatctcctggctttaaattccgaataaaagtctcaaatattcccgggtcatgggggcactgtctcattaaaaccactctcgtcctgaaactgcaatgcagacattaaagtgcagtatttttcaattagagctgacgaattcaatcaaaattccatagattaggatgaaatgaggcatgggtcatttacaggggaatttaattgccgagccattagacaaatagtatatttgccattcccgcgttatccatcattttcgacatcaataccggggccgcatctccccgtcccgcggccgcccggcgtcggctgtaaacactcccttccctgtatcttctgattatatctgatttcatttagggccatgggggattataaatgttcacgcaatcaagttcattaggacttcaaatcgcatttctgattgggatcgctctgccgccgtcctcccagcgcctttcaaaccccagcgcttggctttcaaaacatctttttgaatttaaagcctcacatccttttgtcttccgacgccccctcccgccccacccctcccggcggctgcaagctcttcgggcctccttcccggggcaacagccctgaacccctcttgctgccagcgggtctggggagggtggggctgggctccgcaggctgtcggaaccccctcccacgccgcgcagccgcggggcgctcgtgtccctgaagcctgagctgggcgtggaggacaggccccgcgtgttcgcggatcgcgagtgggggccagccccgcacctcccgtcccggccgggcgctgcgggtagggggagcggagcggagggggc

SEQ ID NO: 32357 - DNA, 859 bp, Homo sapiens
  chr2:237145140-237145999
  hyper
cgccttaaacacgtgccgcttgctgaatgtcaatcacacctcggtaaagctgcttttaaagagcattgctagaaccttgtttccttcctctttctcaagactggcgggggtccacgtggccccctgatcccccctctgaactcaaatgacctttcttaggtgggtcccctgcctgagtccctgaatgcccagcagtcccgcctgcctgcgttgctgcccctgctgggcaggacatccaggcaactttgacagtcggtggagaagcagcaagggcgatgcggtttctgagagagccgcgcgggttcccagcactaaacgtgggcgactttccttaatcttcccccagagacagaaggccatgcaatgacaactccaagggcaggggctggagcattttgactaacagaaaagtcaggatgacacaatgcaagccgagaaaccccacacgagtcctgtgcaaagacaggtggccccgctgcctttccgagacccggagcacacgctgggagggcgctctctggggacgggggctgcgggacccccagaccccgcgcccgggcgcgaactagctgagcggccgctgggcctccctagaggccggcacagctccgcttccgagcgggcctggaagccccgcccgaggagctaaccatttatgtcacactgtgacaattattctgcataaaattatcattaaaaaccctaatttttcagcctccaaccccgccagtggccttttagcatccccggcgccggcggctgggctgtgatcaccgcgctcattacctcggcgtggcgcctcccgcgcgcgctcgcaatcaagcgctaattaaacccgcgggggccggggccggggcgc

SEQ ID NO: 32358 - DNA, 820 bp, Homo sapiens
  chr2:239757293-239758113
  hyper
cgtgtggcgcatggagggcgcgtggtccatgtccgcctcccactagcgccgcgccacccacctccggaccggcgcgccagggtaggtgctgcgcgcgcgacgggcgccctccgctgcggggggcgggcggcaggggcgcaggggcattggggcctgctcgtgtctcctcggcgaggccccgcgggccgcgggggcttggatgccgtgcgcttttcctcttagcaaggaaggcgggcgggcgggacgctcacagtcccagggacacccctgagtgcagacttccacgcgagggtgtcagttgggaaccggcggaccggtgactcccccggcgggttctgaagatacttagacagatggtcgcagttttcattctcggtggtgtgtgggtgtccgtggttggcggtggaaggagcgagcatcagaaaaacctcctggggccggctggggactgggatatgaggaccagctgccctttgcgtccgccgcagcgcaggccgcccgcgaagctgcccgagccgggtgttgccgggcgaatggcttcgctttcttcctgggcaagggtagagcgcgtccgtcgggcggacactcagatctacccagctgctcgcgcctggggtccccggccgtcggcgccctggcctgcccagtgggcgtagaggtgcgggcctgcggctccagggtttgcctggggaggacgggaggaaactgccctgcgcttcggggccagagcagccacagggccgggtgtgcccgagaagggccctgggccgagagcgcagagcctggagcgctgaggcaggcgggtccgacgcagccgcgc

SEQ ID NO: 32359 - DNA, 1106 bp, Homo sapiens
  chr2:242498020-242499126
  binary
cgctccggcctggtcgccttctccgggcgcatccagggaactcgctcggtcctccttaagcggggaagctcggaaagcgtctccccgactccgcccccagggttgcctttcccttagaaggccaagccccaagcccagcctctcgccagctgggagtcgcgcgctgcccacctcgctgcccaggcccccgacgccgcggcaggagccccccaagagcgcgggaagccccgtggacctggcgctcccggctcgggcgtggacggggcgggcgccggggcggggcgcgcgtcctcgcgggtctgaatggaagggtcgaggtcgtcgtcggcggcgagcagatcctgaagccagaactccaccccggcgcccgcgccatgcggcgggagaggtgagcgcggcgggcgtggcgtccgtgccggggtgcccggggtgccacgggaacggcgaggccggggacacgcgcgcaggacgccagcggcggaggtgggcggccccgggccggggcggggagggccgggtcctggcagtcgccgtgggggacgcgctgggctgtgccctccgcccccgccgcccacgcactcgtcttcgagggcgggcccggcggccccggagcaaaccgccgtctccccgcggccccaccggtccctggcagcctcggggaatgtctgtagctgaattcgggctctgaaagaaggtggcgctgggtttttaaagatttggggcacaaaaaacgagagcggacccggcgccggctacggcccttcccgagggccacgcccagcccggcgccccgcgcgccccgttccccgcgccgcctccctccacccggctgagcgcttgtgcccgcaggtgcggcgccccccacccgcgtcgccgccatggaggtgctgcggcgctcctcggtcttcgccgccgagatcatggacgcctttgaccgctcgcccacagacaaggagctggtggcccaggccaaggcgctgggccgggagtacgtgcacgcgcggctgctgcgcgccggcctctcctggagcgcgcccgagcgtgccgcgccggtcccgggacgcctggctgaggtgtgcgcggtgctgctgcgcctgggtgagtgc

SEQ ID NO: 32360 - DNA, 936 bp, Homo sapiens
  chr2:26915614-26916550
  hyper
cgggtgcccggcgcggagagcggcgagcgcagccatgccccaggccgcctccggggcagcagcagcggcggccggggccgaggcgcgggccgggggcgccggggggccggcggcggcccgggcgggacgatgaagcggcagaacgtgcgcacgctggcgctcatcgtgtgcaccttcacctacctgctggtgggcgccgcggtcttcgacgcgctggagtcggagcccgagctgatcgagcggcagcggctggagctgcggcagcaggagctgcgggcgcgctacaacctcagccagggcggctacgaggagctggagcgcgtcgtgctgcgcctcaagccgcacaaggccggcgtgcagtggcgcttcgccggctccttctacttcgccatcaccgtcatcaccaccatcggtaacggctcgccgggcggggggcgggaacccagggctgggcgcggggctccgggagtcgtccggggccggctggggctgggggcgggggctcccccgagaggggctgggcgccgaaccctgcgctcgcagaaacccgagttcagcctggcgtgtgtgctccgcggggacggaactcggggaggcgtcgattcctggctccggacctgactctccggccgggccagccctaacttggccctgccatgttgcataggcccccagggactccgaagtgtgtgagaggggcagggacgaccggcggaggctcgggcaggaggggtgtggccgggccaggccctgaacagggcgctgagagtgagcggcgggagagcgccagtgctccgtatccctgaggatcggcttccacagcctagcaggtctacacctgctgggctctggggaggcatgaggatgtcggaatgcggcacttcggggcacttggggccaccctataacggcggctgtgagtgtacgtgtgtctgc

SEQ ID NO: 32361 - DNA, 452 bp, Homo sapiens
  chr2:27341644-27342096
  hyper
cgcgcggccctggctggctgacggcgatgggctcgggtctccggccggccggggcggggtgtcacccacctgctgcggcgccgcgcggctctgggggtccagctccgtgggcgctcctggctgctgcgccgcccgcgcctcgcctcccgccgccagcctcccccgggccgctccacgtggccgctccacgtcgccctcccggctggagccgccgccctggccgggcagagtccggagccagtgccagccgccgccccgcccgccggacctggcccttcgcagctccaccagcgcccccgctgcgcccgcggccggaggggctgcgcgcgcccgtgtgagtgtgcgcgtgtgtgcgtgcgtgagtgcgcatgtgcgcgtgtgcgagtccgcgtgtgctcgtgagtgcgctcgtgtgcttgtgcgggtgtgcacatgcgtgtgacattgtgagc

SEQ ID NO: 32362 - DNA, 1609 bp, Homo sapiens
  chr2:42274305-42275914
  binary
cgcggctgaccccgtcagaccccaggcatcttgaggggtagggagcgacccccagctgcatttggggctttagaggcaaggaaaatcagaaacactttggtaaaaggagttgaacagggcatcctcggcgagctcacgagcattcctctatgcctagagctcctgtcccacgcgcgctcgcaggtgctggcccggctgtgcccgcttccccctcaccatcgccccaatccggaatccggggctgagcgaggagccgccacccccggccccacccgcgagagacggggtccacgcgccttccctgcgcccaaaccgccccgaggcccccagtcccaggagggagcgctgagatcactcggatctccgcaccccggacttagctgctcgtcccctccggagcccgctacccgccggcctcgcccctttatctttcccccactccgcccggccggctccgttatccacctcccaatcccgttatccggccgccccggccccgttatccgccctcgcgttgggcgcggagcccccgcgcgcctcctggccgccgccgccccctcccccgctcccagacggagctcgggggaccgcgggctgggcgggaccgcgggctgggcaggaccggagccgcctccgcgccgcttcccaggcccggacggccgcgggaggaggtcccgctgtcagtcagcggggaaggccgggccgggcggccggagggggcggcgccgaggacgggctcgggccgggagctgggaggtggaggcggaggggcgggggagggggcgggggagggggcgggggcgggggcggggggcggctctgggccttataagcggcgggggcagggcggcagggaggcaagtgtcaggccgatgtgtcgcccgcgaggggccggggtcggggccgccggggccatgcgcgcgggctgggcagggggccggcggggcgcagagcggagccgcctcggagcctgagccgcccggggccggggccggggagccgcgcggggccggccggccggggggaggggagcgatgcggcgccggcgggcggcagtggccgcgggtttctgcgcctccttcctgctgggctccgtcctcaacgtgctcttcgctccgggctcggagcctccgaggccaggccagtcccctgagccttcgccggccccgggtccgggccgtcgcgggggccgcggggagctggcccggcagatccgggcgcgctacgaggaggtgcagcgctattcccgcgggggccccgggcccggggcgggccggccggagcggcggcgcctgatggacctggctccgggcgggcccggcctgccgcgcccccggcccccttgggcccggcccctgtccgacggcgccccaggctggcccccggctcccggcccaggctcccccggcccgggcccgcgcctgggctgcgccgcgcttcgcaacgtgtccggcgcgcagtacatgggctcaggctacaccaaggccgtgtaccgggtccgcctgcccggcggtgccgcggtggcgctcaaggcggtggactttagcggccacgatctgggcagctgcgtgcgcgagttcggggtacggaggggctgctatcggctggc

SEQ ID NO: 32363 - DNA, 929 bp, Homo sapiens
  chr2:43864207-43865136
  hyper
cggccgctgcagcaagctctggagtctcgcagttgggacgttaggggtaccactccaggacagagctccctcctggggcagggactgggaggagccaaagttatagccacacccccggtgacgcccggtggtcggctgtggtctcccattggctacaccggctgccagtccctggaggaggcggtgcccttccccgccctctccgagctcggcttgaggcgggcgcgggctgagagtccggggatcccgggggccagtcgcggccgggacatcgggcgctgcggccggggacccgctgctgagatagacaggtgagaaagcccggggacgaggggccactccagagttcctgccaccctgggatccccgcccccttgagggcgccccgtccaggggggctcgcggggccgaggtttggggcgccgggaggagcgggaaggcggggacgagagggacggagcgggctgactcgggatccgccgctgcacctcccgccacagcccagagtcggcccccaagtctggatgtcgccgggagaggtgggcagggggcggtggccggcggtccctcgcgcccgtgggctcccgtgacgttctgtttggaaacactgggcccgggcttctggcgcggcgcgagcggtcccgggggcgcagcggggcagcccagggtccccgagccgagggacccgcgcggtcagggatgccgcgctcgccttaggcttcgggagatccaccaggatctccggggcgaaactttaaactcaaaactttaaagaagcattttgtacacctcgagttgctggcacgtcaaagcaccctaaggtgacctacccggaaaccactgtccccgaagttagtggggcactttttaaaggacaacactttttacccgtcgatattgttgtgcgtaacgctgtggaaatagaagtc

SEQ ID NO: 32364 - DNA, 982 bp, Homo sapiens
  chr2:45240827-45241809
  binary
cgcggcgtcgcccgcgccgcacgtggctggggcagtcacaggccccgagagctggagcaacggggtcaccgccacccctctgccctccaggccttcaccttgagacccacgcggcagcctggagggcccacaagagcaaacggtttagaggccgcgggctcacgagggatcttgttcaaacgaaaagaacgagcacaggggctcggggccagcctggaggccggcacagaggcgagtcggcccgggtggcgccgggaccaggcgggatttggggcgggtatccgggcccgggcgctggcagcctccctgcgacccccggccctgcgtccccgcccgcggtcccgccttagtcctggagtcccttcctgggccccttcgcctgggtgcggaggggcgcgggcgcggcgggcagggccacggggcgaggggacgggctcgcggctttgggttcagggagccgcggagctccaccgccgggttgttttgcaatggggctttggagaggttgcgcgtcccgggccccatggctccgccgggtctgcacgccagcgcccccacgcggcgggcccagagttcaggccggcggggctgcgcgctcggctccccgcaggcctgtagcccaggagggagaggagggagaggacgcggagagggcccgctggttcttccctcctcaccccagcactgacccgcctgtgcgctggcacggagggctcgaaaatcggggcgcgtccgcgaagagcgagacctcggagacagacacacaacccagaggtgcactaggttgccagacggtctgatcacaggattcttggggggatagacgctggcttttctccatcacacgtttcccctgcaacgtctgggtgcccaggaaatgtttgaatggatgcctgaatgaccaatcgggtttgactgacagcaacagctgggaagtgacccggccaataggagaatggccctcttcctcctctttcctccc

SEQ ID NO: 32365 - DNA, 962 bp, Homo sapiens
  chr2:45396336-45397298
  hyper
cggcgggcgggctctgcgcggggccccaccgagctttccgggagcctctcccgcagccgatgggcatctaggggcgcagaacgaagagtgggcgccgaaacgggtgtaggcgctggaggccgacggggaggcccggggcggtcaggcttctcggtagagagggccgtgcacctcgcggcctgcgggctaaggcggggagccgctcctgcggcggccgggcgcgcggactggagggagggaagcgccacggactggggaaccggggtgacggggagacgggggggctggtggggtgaggtcggcgggcagcagccaagtgttctgcagctccgaaccccgccaccctctgggcgaacggaatggcacccgcggagacgggcggggacgggcgaaagcgggtttgctccgacccgaagctgagcccgggttggagggcgagaccgtaggcgagaatggccgcgcgggctgggagacccgggccggtatggagtgagtggagccgcccgaggtagggtagttggggatggtagttgtgaagacagtcggagtctagctccgggcagacgaaacaccggggcgcgccagggtccgtttcctccttctctctgctttcccaccagccctgtagatacggagccagcagtcgggctagagcggaggctgagggtcgcggttccaagggcggtctctcgccccgggtcaggccccaccccgcggtggcggtcgcgtggcgctgtcctggagttgagctgtccccgcgccgcggcccgcacgcccaggaccgcacaccgccgcccgcaggcagagacgcctgcaacctcgccctctcgcccggctcccagctcggggctgggaaccggaaaggtgcatttccgtgtggggtgggggcgattcccggctgtcggcggtggggctaggccttgcggcggatgagccagaccttcccggctttccagccagcc

SEQ ID NO: 32366 - DNA, 1195 bp, Homo sapiens
  chr2:45398-46593
  hyper
cgcacacggccagccccgcccccagccttctgggcacacacctcgggtccggctctgctcctggctgggggtctccttggccttcttacaggtgtacagccacttgatgatgcgggcgttcctctcgatgaccgaagtggtgctgggcacctgctctatcagctcctcctcctgcagcccctcgtcgtcgccgccgctgtgccgggagaagccgctgccggaggtggcgacgctcacgctgcgcaccttgagggtcacacagtccgaccccgcggtgaagttctccctccccagggcctccaccacctcggggtccaggccgcagtactggaagaaggtgtcagactcggccaaggcagcggaatagcgggagctgaggtccgactgtgagcgctgcagcccccgacgcctcaccacccgcggctctggcccagggggcgcggccgggacactggagggcgccgcggaccgcgcggctggggctggggtctcggggattgcggggtccgccgcggggccaggagtggtcgggaccgtctccgggttcccggccttgccctcgtctcccgtccggggcaccggcgccttgtccttacccggcccctggaagagcttcttcaccaggcttgccctggggccgtcggcgcccgatcctcgcacgaattcgcatttctgccggtagatgatcagcgagtccggtctcaacggcttccgcgcaatagccctgcgcgccaccggggccggggcgcgggccgggggcccagggtcgttccccgggcacttgatcgcccccgggccgctgccctcggaagcgacgccccggccagtccccggccgaccccgcacatacttggcgcgatccgccgccagcctctccactgcgctcctgcgcgccggccgcgcggcgtcggggtcccgggtagccgcggggtcccggggaaggagccgctcgttcgggggcgcgctcagggccgccagggcgcgcatcttcgcggggaatggaccgaccggggttccgggtccagcggagacgcgctcgagtggtagagccagtcagtcccagggccggttccgaagtccgcgccgggtggggaacggcgccccagtgcccagctgcccaggcccggggttggggagaaccggagtctgcaccgattggcgaaactccccagttcccgcccctcccgacctcatc

SEQ ID NO: 32367 - DNA, 1271 bp, Homo sapiens
  chr2:46525231-46526502
  hyper
cggtttgggggcgcggatcagcagctttgcagtggagacttctgcggctcggaggagtcggggatttgcgcgcacggcgaggccaggaggccgagggagatggcctggaggtcggaggtgcttccgcggtgcctttgaaaatctcccagccgccccgcagcagattaccgtggccaccggcgcttggaaatgtttgtgggtgcatgtcctcgactttctctggtctctcattttggggcagcatccacgtctctatttttctctggattcgcggagtccttccaaatgcgctcctgtgcccgcgccgcggcccaagtgggcaaaggggggcgggaggcggagagcggctcagggacacgatcctaccgaggagccaggacccttcagagcgccccgctgccgggctccagaccccaccgaaggttggagaacccacttcctcgtgccgcaccttgactctggggagagtaggtagtgagtgacctggattgccctgcgggggcagatggttcggtgtgtaggaagcggacggcaacactggatgtccctggcaggtccgggtgtctgtctccgaagaggacagagaagggcagccacgatctgcccgcctgccctcgcgagcctctcggcactgggtgagaggcaactctggccatttcttgctgccctctcgccctctcccggccgctcccagtccagccgggcccggcgctacccgagcgagggttcgagccctctgcgcggccgcgcagaagcaggcagggcctcaacttctgcaaatgtgtgcggctcgccgcctgtcccctttctcctcctgtctccacccgtgcggccccagtggcctggagcttccagccccgcgcttggccgcggcttggcgaggctatgctgcgggaagctggaatccaacgcgcggccggctgaaccgcctgagccgcgggaaaccagcggcggagcggcggtatagaggtgcgaggatgaggaggaccgactcgctaagggagggaggtgactggccgggagggctcactgccgaggttgatttgctcttgttccaacttccactacgggactggagccagaaaccgtgtatcctccggtcgaaagcagcggttcccacctcggggcaccgataaggatttgataaacgggagcgaatcgcgcctgtcctggctcggcgcccgggcccttcactgcgggatcgctaggggaggggattgggccctgctcccctttcctggccgtagtcccccctttctcgtcaccgtcgc

SEQ ID NO: 32368 - DNA, 530 bp, Homo sapiens; identical to SEQ ID NO: 28949
  chr2:46665-47195
  hyper

SEQ ID NO: 32369 - DNA, 992 bp, Homo sapiens
  chr2:63285949-63286941
  hyper
cggggttcggagaacgacccctcccgcgttccgcgcccagcggggtcgcagggctgcgagcccggctgtagcaaagctttctcggccgcgtcctccctccggattcggtaggccaggctcgggcgcgcccttcccacaccaacaaaccatctttcccgactcagcagaggcccacaggggcgcagccgctgtccctccgcccttggcccagcggcgccgccctggtacgccaggcctgaaggcagggccggcccgcgccacgcagggtctcccttaggcggcgccttagggtgaaatgcggggccaagcctgacctgccggggtgccccgtggcatctctggtgcggaccccgcacgtgccggggagaactggcaggcggccagggcgaggaggcttccagcttgcgccgcactggcctgggcacccgggctgcagggccttttgggccctcccctcagtgaccctgcctgtagcggccccagggccgctttggctcaggcagcagctgccaatgccgctcgaggcccgcggctccctgaggcgagctctgcggggcccagcagtcctcttggctgctaaatggaacgaaaccaggagacccggctttgcactcgtttggacaactgtgtggcctccggagcaaggtacccaaacccttgggcctcagtttcgtcgcagttgttatttgaacccactcggcctgggacgtgccagagcttcacactttaggtcgcggctgcgggcgggaggggcagatgcgacccctgggccggcccctcgggggcgtctagaagcttcggcacctgcatactaaggccggagggggctggcagccaggcacaccgaggcccggccggagttcccgcccggggaacgaggcttcgaaaagaggcacgtgcttctcccagggcctcccgccaggtgctgaaaccccacggcactgagtggaaaccggaagagggaaggcgcccagggcctgccgggccgcggc

SEQ ID NO: 32370 - DNA, 964 bp, Homo sapiens
  chr2:66653253-66654217
  hyper
cgcttctcccaggacgtctgatcccattagcgcacctgaaatcacaaccttggccacaaatgcgcgcttgttgcgacccctccgagtgggccgccgtgccgcaggagccactctggggccggggtccccaacctctcccccctgcaagtcctaaaaggaatcgtagagcaattgatctcggaggagatgagcgcaccccggggctcattgctgcccctgaggaagagccgtccaggaacggaggcgagaagcttccagaattaggccaagaggcaggtggcggggtgatccggcgtccccgagtccagctggggagaaaggcgccctcggatgctcagccccaaagcagcagaagacagaagccggtgcgccatcgtcgctgcgccccagtccgcgggtcctcgcgctcctgctccggctcccgggctgccacccaccgctgcccaagcctgaccaactcccaactccctccggcacaggctgaggcgacccccaaagagaaaaataggatcgcagtcaaaactggcggggatggggcacactggtgggagaggggaccttttcaccttttgctcttcccaggggacacagtcccccaaacctacgtccctgcgccaaaccaggtgcgagcaaactccgcggaccccgcagctggaagtgcatcctgccgggacccccacccgacccagggagtcagcgcgccccagggtgcaggcaggcccagggctctgggtggctcagggcacggggaccggatcgcgctgcagaacaccgccgggacccggcacccggacgcgcaagggcgacagggcagccctgctgtaaggactgtgccatgagaggttctcattcggtaaacagtggccctcccagaagtggccgccgacctgccagtcaatgaagttatcctccgggagctgggaagaaggggcgcctcgcggggctgtgggctcggttgcgaacc

SEQ ID NO: 32371 - DNA, 951 bp, Homo sapiens; identical to SEQ ID NO: 28951
  chr2:66660936-66661887
  binary

SEQ ID NO: 32372 - DNA, 762 bp, Homo sapiens
  chr2:66803383-66804145
  hyper
cgatgcgctgggtcccggcctaggccccagtgcgtgggcgggcaggtctttgcccagagaccacagctctggtcgcggggggtggcgggggtgggggggctgcacgggcgcctgccttaccctcctgccctcacccccatctgagtctagtctaagggactgttgactttgtctctggagatggggcgaccaggggtctgcgaaggaggttgtggagaggcacctcctgggtgcaggtccgggcgctctttcctcggaacctcacggagtgctttgtagtagcctggagacttcctaatagactttgccacatcgggggccccagactccagagtcccatagtggccctgggagcgcgacccagagagcctgggggctggagggcacatggaacgcgtgcacggcccactaggagggcgttgggaggagagtgcccgagtctggagccgcagccgggaagccgtagacagcaccccgacgccttaggcagaagctcctcaggatcactttaaaagctctgcaaactttccccagcctttcggataccctcaggcccttggcccaccggaaggcagtaaaaacgtaacttcatgctgcaaagctcccgggtaggcgcttggacgccgatggagagaggcgtggaactgggtagtggggcgccctgcctggctgggcacttttccttgtctcattctcgtctcccatgccatgccttacccactggctgctagcggcgcgtttcacttaaggtggccacggtgc

SEQ ID NO: 32373 - DNA, 1034 bp, Homo sapiens
  chr2:7005163-7006197
  binary
cggcccgggcggcttcccggtccgggaagaccacggaactgggcaagtctggcaccaccgggtgcagcgggggctccgggacgggcacgacctgtgcgcagcccacctgcagccgcctgccgtcttgcacctcccagaggcgctgccacagctggccgcgcgggtcggcctcgaactcgcccaagtgcgggcgtggtgcctcctgacaggcgcccagcagctcgagcagcgcttgccgggtgtcagggtcatccagggggtcgcgcagcaggaagccttgctgtgcgccgccggcctggccgcccgggcagtagcagagcagcctgagcagctggcaccgctggaaggggccgcggcgcagctggtgcagcaggcgctggtgcagccgcgccgcccggacccgggccccgcagccggcgtccggggtcacgggcacgcacagcgagtagctgcgctccgggggccccagcagcgccgccaggcgggggtcgggggcgtctgcgtcgccgggggcgtcggcgcctagggcgaagtgagccagggtgcagtcgggaagctccaggacgaagcggcgcggcggagccatggccccagcgcagaccccgcgccgcccgagcagcggccccgacagtggcccgcgcaggagccggcgggcgaaggccatgggcgcctcagcgacgccgccctcggccccgcctcggaaacgaaacctggcgggagccaggcgccggcgggaaacgaaacccggagggagccaggcgccagcgggaaacgaaagcgaagcgttgcggggaaacgaaagccggaggcccaggcggggcaggagccctggggctggggcgcccttccggcctctcctcctcgccgcgagatgtgcgcgataaacggccggcgctcgggagcagacgcttggccccggggccccaggtgcgcggctccgcgggcctgcgcggtccccaggcgccggctcccggggctgacaccgaatgaggccccgcgccgtcggccccaaggtagctccgtgtgcgttctgc

SEQ ID NO: 32374 - DNA, 670 bp, Homo sapiens
  chr2:7057762-7058432
  binary
cgcgcgtcccctttgtgtccgcatcgcccgggccggccgcggagcggggagggcgggacgcggcgctgcgcggccggccttggggctcggggcttgcggccgcgcctgccccgctgggtcctgccccggcgcccggtggcagcgggcggggggcagcgtcccgggcggggactcgcgggctccgttcagaggacgcccgccctgccctgcccgtgtccctgacctcgtccctgctctgctcctgccctgccctgcctctcgcaggcggcgcccgcgccccagggcagtgggcgcttagggacctggcgtccccctgcctgccctgcgcggtcgcgggtctgcgctgcggcgcgggacagggcgccccgggccagggtcccgcgggcgagctggcggcgggggctttcaaggttcgcggccccgcccgcagaccctggggctggagcctcggccccaagaggaggtctgggaaaggacgacgcgtccggggcatcgccaccggcggggaaggtcggaactggccaagaggatgccccgcacatcccctgcgcgcggggtccgcggctgctactgcccctggtccccaccgcgagccctttcccggggaatgagccgccgcccgagccccggagttccctgcgggtcttacccaccccagcctccggccgcc

SEQ ID NO: 32375 - DNA, 1639 bp, Homo sapiens
  chr2:72371599-72373238
  hyper
cgagaggaaagaggtatcccggacagctggacccgaagcgggagtctccgcccccacccccacccccacacccccaccccgcgctcgggagcctctcggaataaatatttccaggctccgggccacgggctggcgagaccccgcggggtggccgcaggccaaagattatttatagcggtaagcggtcggtgcccggaggcagcaactacagatgggggttggagtttcctccgctctccggtgtggcccgcgcagggacccggcggccctcggaggactctgcagggcggggtcacgggcccagagccgcgattttcctaatgcattttgccctggaaataacggagacggactttggttgccgccctggagtttggaacccgagcgcggggcggggcgggaccgggcagggcgacccgcgcaggtaaccagatccccggtggtggcggcgcaagccgaggatggcggggccggggccggccggactctcgaaacggctggcggagccggccgggcgcgggtaccggaaaccgtggagacctcagaggggcgggggcaagggcgtcccgctcacctttgacgtcggcactagttaccccaccccacgttaacccttctcctgccggggcagcacccggcgcaaaggggaggggcgccacctgtctagccgccccgcctgccagcccacgagcgtaccgactcgggctccagatctacccgctcctgcacccccgaggggacaactcagtccccctagcccgggttggtccccctcctcactttccttttttccacagaaaactacttccagctaaatgtgcacacacgccagtacagccgaaaagtgactctgcagaacccggagccctaatcacttttccacatgcgcctccggcccggcgcgcgacggggaacgagctgggagcgcccgcgcagccaggaggggggctgggccgcgggaacgctgtccccctcccaggctggaaggcggggataattccccctgccgtgcagcccttctagacggcgtctacccctttaagaaaaatctaggcggaggtggggtgcgacagaaggggtggtgaggcgagggtttccctccctccgtctgctatacccgtctccctcgctccgtctcactctccgtctttcctctccttcttttcctctgtttttcttttctttcaacacaaaagttgggttgtgaattttccgaggtcgccgccgcctcgcccccaccccccgcctctgatctgcctaactataattaaagtgcgttttttgtggcattaataaagagttatttgtccgccgtttccacggtcttcacaaagagtactttcataggggcggccgctcgggccgcgagtccaatttatacaaaaatgttgtatttttagccctgggctctgtttagatggcgctcggtggaaacggagagcccttggaggtccccccgtaaaatctgataaatgactccgaaaaaataacgctgggattcagagggctctcattaaccccttaggcgctcctgtacacgtaccccctatttccctcctcacctccagatctagggccccgggttggagggatggggaggcttaggtttcctcctccctaacttctgtgcaggttggac

SEQ ID NO: 32376 - DNA, 943 bp, Homo sapiens
  chr2:72374248-72375191
  binary
cgctgccgacggcgccgcaggaacacagttttaaatcggcaattcaagctgccaccagccccctcctctcccgactcaattttcggctcccagcgacacagccaaccccagaaagccgagggcgactgggggcttgcagcaccgaggggaggcgaaagcggctcaggaccggaccctcccccgggaccgcgcctcgctaggcgcccccggggcgctccacgccccctgccaggccagccgcgacccaggcaagtccatcttgggagccccctcaggtccgggaacccctcttaccagccccctgaacctgcgccgcgggcgccagtggtcccggaaccgcgctgccggcgggctggggaagcccgggctgctgcggcagagaggagggaaggggcggggcggggaccagtgccttcaggctcccggcgccccctggccggcccgccgctccgtctgccccgcgctcgcagctagcggaccccggagtgcagcggagcgagcgcgcccttacctgcagcagccagtggccggtctctccgatgagcgggaagcccatggatcccttggggatgggcagcttgcagctcttgtcgcgagtggcggcccagcgcagctgccacagctgctgcgacacggccagcagcagcgtcacggacaccaggcacgcggcgagggtggccagcgccgacaccagatccaagccctcaaagagcatgttggcggccgctcgggggattggctgtgccggccgcggcgggggaggggagggcccgacgggaggggaccggagcggcgggggaggggaggctgcggccgggggtcctggcacctccagccgaaacagagaaggaggaaggggccaagggaaagggagtggaggctgcgaggggagcggagagagggaggaaaaaaattgcctaaaagaagagaggaaacacgaggc

SEQ ID NO: 32377 - DNA, 976 bp, Homo sapiens
  chr2:72376427-72377403
  hyper
cgcacacacggtgcgcactcgcttagtgcctgcttggcttctaggctccttcccttcctcttttcctccttcccaggtcagcggtcccctcctccagctccgagcagtccctcctgggccgaagccccggcagcggaggtcctggccggactgccccctcgactggcaggcgcccaaagccctcgaaactgtgccttagggtcccgagcttccaacccccgggatcccgctggctcttatctccagggacccctgagttaccagtcccaatccccctaagccagatcccccattcccgatccctatatcctcacacctccgatgctaaggtccgcccccgccatatgtctcttaccctacggaacctggaggttctcctgtccccgtcagcgtcccaggctgctgactctgcagcccctcctttcctgcacattgggacccccctcccctgcttttgtagtccccctccaccgcccgcagcgtcggggaaccccgatactggtccggcaagtgtcctgcgcggggacaaacgcggcggccccggtacccagaggcgggagaagacgggcacaaacgttcattgatacaaatgagtaaataaacatgctgggtgagcacggccaccttctcagcgctggcagcagagggcccggcgcgcgtgcctgtgtacggtgtgcgtgtggcccggggccgcacctgtgtgttcgcgcgcgtggccttgcgtcggcccgacgtctgaggagcgacgtggtatgtctgtgggtttgtgtattctttgtagagccatgagtgtgtctgcgcatccgtgcatctgtcatctggcctctcctcctgcgagcctgtgttaacatggagctgcgtacagcaaccccgacattggtctagctaatgtctgcccctctctctcccgtgcatcctgcttccctcagccccccttggctctggcgttcactctcacactcccggagccagagtc

SEQ ID NO: 32378 - DNA, 990 bp, Homo sapiens
  chr2:73144402-73145392
  hyper
cggctcccgcgtgggttgagacggcggcacggccaccagactcagctaaagggcggagtcgcgaggagaagccagtggcgaggggaggaggaggcctggatctccccgcgaaggctccagtccggcttttgcctccgactgcgggctccctccccacccgccgtccctcgccccgccccgccccgccccccaccttggggcaggtgagcggcggccaatgggcgagcgcggggcaggtgcccgctaactcgcgcctcgcagcgctgggcggccggggctgggcagggcagtgcggggacaccgggggctggggtcggtcccagcgggactccgaaaggagggagacgagctcaaccctcgggccttactggcagctcgcagcctagcacggagcccgcgcctgtgcgggcgcctggagctgcccgctccgccgcagcagccgccgcgcctggccgtacgctgtggccggaccccgcggtcgctcgctcacacacccctcgccgctccgcgcctggctcgcccgcgggggccgagcgcgagcgggcgggcgggggaggtgaggggtgcgggcgggtgtgcatgtgcctggctgggtgcacaccccgcaaggcggcggcgccaggacgcggagcgctccccagagcccggctgcctcgcacagctcccgcggctgcgaccatgttccagcccgcggccaagcgcggctttaccatagagtccttggtggccaaggacggcggcaccggcgggggcactggcggcgggggcgcgggctcccatctcctggcggcggccgcctccgaggaaccgctccggcccacggcgctcaactaccctcaccccagcgcggccgaggcggccttcgtgagtggcttccctgccgcggccgccgcgggcgcgggccgctcgctctacggtgggcccgagctcgtgttccccgaggccatgaaccaccccgcgctgaccgtgcatccggcgcaccagctgggc

SEQ ID NO: 32379 - DNA, 681 bp, Homo sapiens
  chr2:75426248-75426929
  hyper
cgcctgcccgcggtggctctgaattcctccactttcaagcttcaggagacgtttgagttcagaagtctggagacagcatctctcttgcggtaaactgaaaaagggaaagaaattccaccggtcacagttctaggaagcaagagatcccccgcatttatgcacctgctgctgcctgcaactcctatttctccttcctccgcagggaaaggcaaagccctgtgctgcgtgaggacttaggagcgaagtgggggcccattgcagcgcgacctgtaaaagttctgagcctatggccaggattctggagcttcgtatccagctggagatttttccttctcttttgctgccgctgccgccgcctgcagtttcgcgggcacctctcggttcgggttgctcagctcgcgagttagctgcgcacgaggcttttataaccccctgcagagacgtcactgggaaggggcagtacctgggctgcgtactcgccagtcccggtgcgcagcgcggcagctgcgccagctgttgacaactgtctcattccaccgccgcagctaccacgccttttgctgcttgctacttgccgtgggagtctgcgagccgggagccccacgcactccgcgagggggcagtaggtggcttggaagtaactgacacagatgcggtccgcagctggaatcgtcgttgcac

SEQ ID NO: 32380 - DNA, 1357 bp, Homo sapiens
  chr2:945810-947167
  binary
cgggagactccgcggaccggaggagggataggacccccgagctttgggggcgggaagggagggtggaaggaggaggggagcggggttggggaaagttggagcttcggtatcttttctccgggccaggccgtcctcggggccctgcgctgcgtctccaagtgctgggaagactccgcggggaaaggtctgaggacgcggccggctggcacaggtgtggcggcttcagagggccggggagaacccatggcttcgaggctgtggactagaaatgtccctgattagaagctgagaacctttggccagggaggtggggcggcggggaggggtcgtcaagccggtccagagcgcgcccacctgcgccacaagggagaagaggtgccccccgcccccctccgcccaccgccgccacgatgcgccgcggacctcggcgacccagcccgggtagaagcgcgcgctcccctcctccagcctcgtgcgccggcccctgccccgccagccccgctatggtcccccatccacccccgcgggagcgcccctgtccccccatcctgcacttcccccagagtcgcgcgccagtttcccgccccgtggaagcgcccctctcccgacttcggctgatccccgctcgccgccctccccgcgggtgcgcgcccggcccctccctcgcccggggcgggtctgcgtgggcggtgctccgggtcggcgggcggagctccggttccccagccctgcgccccggtggagcccgagccggagccggcagaggggcgcgggcgcggacgcggcgcctggcggggccctgggaggctcggacggggtcctggcgttgagctcggccggcccggagcgcggacccagccgcaggggcggcgatgggcaccgagggacccccgcccccggccgcctcccgcggacgccagggctgcctgctggtacctgcgcgggtgagtgcggcccctcagcgccccttcacctccggccccccttccctctccttcgcgcccttctccccccgcccctcctccctccacgccccctcgctccccgcgaccccttccctgtctccggggacggctggccggagggtgggcgccggagccccgggacgcagtgggcacccgccccctggccgctctgctccctccagcccagtgtcttactggaaacttgcaggctttgctcctccagcgtcttctaaggtttggttttgaggcgcccgggcttccctttactgcgtgggaagtagtgctttccagaatttgggatttgagattggcccggcattgcttcccaggagcggctctttcgggcccaggcggtggctcggaccggagcgtcccccctgcagccttcgggc

SEQ ID NO: 32381 - DNA, 200 bp, Homo sapiens
  chr2:95663958-95664158
  hyper
cggccaccgagcgccccactgggtggcgcgtgggctccgcgcgcaggcagggagggcggccctcggtggggtcgactgggcggagccgccgcctcctatcttcccttgaaggcacctgcgcagggggacccgcggtgcctgggaggggagggggactttcgcatgaagcccctccttgtcagtccggtcaccgcgcgccc

SEQ ID NO: 32382 - DNA, 1411 bp, Homo sapiens
  chr2:96011320-96012731
  binary
cgcgcttataggcgtggagcggagctggatttctcccttggctaacacagcgggaaggatgaggtgcgggccgtagccgcgctgccgcgctgagtccgtccggcggggatgcccacagtgcgccgcgcccgctggagggcagcagagggccaggctcccggctcaggtctccggcctcgcggctccaaggaccccgggctccgcccggccacgcctcgtcctcccctattttctccttccttttcgcggctttccctcctctaccagacccggcaggaagaaagccacccacaaacgaataagcatgcccttgccctgcccgtgcgtggcactccgcatccgcttagctcttccccgccgcccgaaggcgggcgtctccccctctctgcggagcaggcggcggcggctgcgagtccgtgactcgaccaaggtcacgcagcaaagtcagcgaccaagctctgttccgcagacgccagggccaaagcccacactttccctaaagccccgagtgcacgcgcgtttccagaacgggagaactttggagaccaacttctgcattttcaaagggggccagcctgggcccagtttaatctccggcggaggaccggggttgcgggaaatgcgccggggagtgagggcttcccggatcccccgccgccgactccgcgcgggccagcggcgcggggcgggccgggatcagcgcctccccgggagagcgcagccgccgccccctcctctcgggctcccggcccctccccagcccctcggcccccatcctgcgcgtgggagaaaccgccgaccgcgcggcctccaggggctggcggagcagcggtggcgacgcgccagactccgtcctgggctggcccgtgccgggcggggcggggccggctccctccgcccttcccgggcaggcgcgggggggccgcagggacgcctcccggagtggccgccgcgcctaggccaatgagcgcgcggggagcggcgatggaggctggggcggccgggagcgcccgggacccccgccgccgcgccgccgccgccgcgcccccgcgccccggcgcccgcggggctggagagggggcgacagaggcgcagcgcccgcgccgggcatggaggcgccgctggcccgcgctggccgtccgcgctgcgtttcgcgccgccgccgccgccgcgcctcgaagtttgccggctgactcggaaagttgcgctcgggctcggccgccgcgtccggtccccgcgtccagcctccggcctgacccgctcgccgccgccgccgccctccacggggccccggcccagccaacccagcagccccgcctgccgggggcatgtgagccgtcgccgcccccgagaggccgtgcgggctgcaggggccccggtgcctccgaggcagcgcgtgggcgaggggtgc

SEQ ID NO: 32383 - DNA, 724 bp, Homo sapiens
  chr20:1206681-1207405
  hyper
cgcattgcagacgcccagcggcgccaagaacccggccaagctgacttggcgactcctcgcagcccctgctctggcacgccacacctcagacgaggctttgaaagtagggcgcagcctgagaggccggccggaccccgagtgctgtaggcgggctgggagatgggggccgccgccacccacattcccacacgcacccggcgccggcgcctcacgccgtgttagctcgcggcgccaagcccggagggtcccgcctgaggaagaaaggtcgtcgcccgcagcccagctggggctggaggcgcgacccggggtctcctcgcccgcacgcggaagaaaatgggcgctgtggcctcagtttccctctgtgagcacccggcccggaactctgaggagtcgtctgtggaggagcctttggcgtccccctgcccctgagcgtggccgtcagctcttcccagcccctgcactttgctttcccctccctcacgcccggaagggtctcgccctgcccggctcagccctctctccccacgcccctctcccagggtccccgcccggtccccttccgaccccttcctccctcccttcgctccctccccgccaccgccgccaccctgccctttgcgggccggtttccacggagtggccccatcccggtggcttcacgttgcacgaagtcagttcaatctggagactgaaaaagcctccgggacgtggggcgggagggtgc

SEQ ID NO: 32384 - DNA, 951 bp, Homo sapiens; identical to SEQ ID NO: 28974
  chr20:13976116-13977067
  hyper

SEQ ID NO: 32385 - DNA, 412 bp, Homo sapiens
  chr20:17209301-17209713
  hyper
cgcgcagaccgaagctcttattagtctcttctgtcctgacttcccaagcctcccgcctctctcccagccaccgccagggctcctccaggtgtgggggcctctccctcctcctaagggcgtaggcagtaccggaatttcgaccccagaagggtctggcgacgagtttgacagaggtctgggaagaggctctgggtccgccggtggcgcgcgggcgggtcttgcggaaaggaacttgttgctctggaaagcgtgggtggagcaggggaaagaaggcgccggcggagggagcaccccgctgtggttttggcccgtggcctgccggctgttttgagagacaccaacacaataaagaagccgaccttccttcttcactcccccccaccccaaacttggcaagacccaggacccaaac

SEQ ID NO: 32386 - DNA, 462 bp, Homo sapiens
  chr20:18039568-18040030
  binary
cgggtgcgcccaggacaaccggcacagcctcttgtgtcgctgcggtcgccctcctccaggaggtcgtcagacgtgtgccagctgccgggtgctgcgggggcgcgtctggtcagggatgccctggagcccaaggctcacccaacagccagcctcacctgtctgtaacctgaccctccgcgctcccagcctacagggcccgggaatcaacacagcggttttccctgttcccttccgccctgaatggcccttggggacacaaccgcctggtaacggatttctcggcgctactggcggactcgcgcggcgcagggagccggggcgcagctctgccggggctgcgggcgggaccggtgcgcggcgcctctaggtctgccctcaaggagtcaccctctctggactgaactctgaactccagcttttctctaagaaaaaccagctaagaacgaaaaagactttgatccc

SEQ ID NO: 32387 - DNA, 1395 bp, Homo sapiens
  chr20:19192506-19193901
  binary
cgggaggcccgcgagaagaggcgaggccagaggctgggcgcgggcagccaagcgcactcgcggcgccccgactccaggtagcacgtagagaggaggctgaagagcccctcggttttccgaaagtttccagcgaatccttcttggtgaagatcggcctctgggaggcagcgtgtgtgcttcccgagagggggccccctgcgccgtccctcttcccctggcacagaagggttgaaggactgcacacagggatccctccccagcccagtctcctcccagcgcgccccctccccgccatgccggccagcgccgggctgtgtcccaggcactgccccccgccaaccctggcccgaccagcctcgccgctgcaggctgccgggagctgcgctagctcatgctcccagctcgctcggtgctccctgttcgctccggcccggccccggcccccatcgcgccgaccatggaataggcgggcggccccgcgaggcgctcctgcagccggcgaggccagagccagtccggggtggctttgccaaccggcggagttggccagcggcgggccctcctaccgtcggtccttccccgctcctcctcctctgccccctccgcccccgcctcccggccgcccccgccgcccccgccgcgccgccgccccaggccgagcgcgggcgcggagcgtgggagccatggcgcgcgaggaggagcgggaccccgagcgccgggaggcggcggcgcgggcgagcggcgaggaggaggaggagggaggggaggagggactgggcgatagcgacgaggagggcgacgacgaggagacgggcagcggcgaggaggaggaagaggaggcggaggcggcggccgggtgggagcgcagcgaggacgcgcggctgctgcgcgcagggctgcctcctgccgctgtccccgccgcggccgcccgcgacaggagcggccgccgcccgccgaggccgccgcccggccgcccgaggatgcggccgtccggcgacgaggaccgcgcgcgtcgccgccgccgccgccgccgccggagggaccttctgctgagccagctctgcttcctggcctcggtggcgctgctgctctggtcgctgtcgagcctgcgagagcagaagggtgagtgcacgctgcctgccccgagtgggcgctgcggctccggcggctcggggctcccggggctgggcgcggggctccttcgggcggcccggccggagccccaggataagcgggctgggttggcggggggagtgggatgccaggcacgaggactccccctgccccacgcagaggcatggaggtggggaccctgagcgccagcagccagcaggcttaggcgtctggccgccctgggaacatttacctgtgcccgcctgtgcgctgcttactcgc

SEQ ID NO: 32388 - DNA, 952 bp, Homo sapiens
  chr20:21081736-21082688
  hyper
cgagcaaaactccgcggttcaacagctaaagagcaatttgatggggctgggatggggaaattacttgattagcgtccatcggaggagaacacggttacagcccctcggccgggaatccgacaggggaacaaaacgcgctggtaaacgcggcgacgtacagggagcgcgagcgagggagggagcgccggcgagggagggagcgcgggggccgacatcgagaggcaatcggggtgggggcagaaataggggctgacccgctagcccccgccaaaccgcgaccaccctcacctagggctcccgggcggactcaagacttcacccagcgctggaggtcgaccttaatttagagcgctgccccggctctggcccggaaagagagtgacagaggcgcgtgcgggggaaaggcccacccacgctgtccctggagtcccctccagtgtccccagggacgcagtccgcggccgccagctccaggggctcgggccccaggttggagtagccacgctagcggctaggccgttccaccgggtagctccgcccttccttttgctcaggcagctaactttggagccgggcaagacgtgttttcccgctccttcgaatttaaccgcccagtgcctgcctcctggaaaagctgtcacgattgggcttgggcttgggcttggccttggtcaagaaaggtttcctcggctgcgccaccgtggggatggaggtgggagttggaacacagccccctagctgagtgcaggggccagaggctggcgggggcacgcgggggtggttgggggcggagtgcggcgaggggtgagggcgcgaccgccttggggcaggggcggcgatggagtagctccgggctctccacggactcgattggacagccccaggccggctttggatccttggaggcggatacgcaaggccagacctggtggcgtggccagttgggcatcgc

SEQ ID NO: 32389 - DNA, 930 bp, Homo sapiens
  chr20:21376222-21377152
  hyper
cgccaacaaagtttccaactttgagagctgtagttaagaatgccgtgtgaacttctccaccttttcgcgtcatttaagaacttctaggaggagaaaatcaccacctcaaagcctcgtggcataatgttacactactcggtttccgggctgtcgctgtcccccgcccccagcaagaggttcacagcctgctcctctctgagaccggttcgttttgaatcgcagtttacacgcgcgagtcggttttcgcatgcctcccccatccgttctagcagtttcttgcagacccttcgggtgcaccaggacctagccccggggcgccctcgctgtcaccacgtcctgccatagagcaggttggcgcccaggacgccgccgctgtactccccggcggccgcgtccagggccgccaggccgccccccgggccgtgcagcgcgggtgggctgggcgacagctcctccagctcaggtgctggcgtcggggccggcggctgcggaccggcctggccgggggtgggcgtgctggcgccgttctggcacggcttgccgtccttgaccagcacaggcaccgccacgcggcgcggggacggcggcggaggcggcggcgggcccaggccgccctcctgctgcagctgctgcgccgccttgtccttggcctgccgtttcatcttgtaccggtggttctggaaccagatcttgacctgcgtgggcgtcaggtggatcatgctggccaggtgctcgcgctcgggcgccgacaggtacttctgctgcttgaagcgccgctccagctcgtagacctgcgcctgcgagaagagcacgcggcgcttccttcgcggagcggctgccgccgccgccgcgtgcagcgggcccagcgacttggcggcgtccgcgatgccggtcagcgaccccatgccggccacattcacgcccgccgac

SEQ ID NO: 32390 - DNA, 1361 bp, Homo sapiens
  chr20:21486299-21487660
  hyper
cgtgtcccttccattcccggacacctttgcaccctagccgaggcctcagcacggagtgagggttgcctggggtgccctgctgtgtgtggggcgttcttgcctcccgggccctgaccccacggtctgggtcggcgaggcgtctctccctggcgtctggactgtgcgcctgccccgcttccaggcgacgaacggcaggagccgggggtccggcgggacccggatccagggcgggcggaaggcgagggtctctccttcccggaacccccgccccggaaacctgcaaccaaaccgggtccctcctccgcatcgctcccgcgctcccgggccgcctccccacgcgggcacccactctccgggccctcgcagcaccgccctctccgcgtccacccgcgcggccgacgccgccaggggccctgagatcgcggagacagcgcgccctggcgcctggtggggccctcccagtggccagagcgctcctggaccagtcggctgtggtctgtgcccaaacacgatggaaaccggggctgggacgggcggtggtacgcacgtggaggagaagaggcatggcgggaaaaccacagccgaacacaggtcgactcgcacctcccaggcacccgccgccgtctgactcgcggctctccccaaggttccgactcgccgccacctcttggcaccactcaccgggctccgacccgggccgcgagtccgctgatgcgcagctgcctccggcggctcccgggctctgcccggacccgcgcgcagagacgctcgggaacgctgggctcgggcgcctcctggcggcggcagcacgcggcacacgctcggttctccggcccgagggggcgcgtggagcgtacgcgggatccgcgcgcgggcctgggctgctggcccacatttccccgcttgctcggatggcggcgctgaggcctattcgcctctttattaataacgatgcctcgggagggaaaaaatagagcctttaaaaatcagagtgcgagagaggagtgtgtgtgtgtgtgtgtgtgtgtgtgtgtgtgtgtgtctcggggcgttggtgaaagcaataaaactcagatcgcttccttggcgagatagcggcggctataatgcgccggggggatcaggggtttatttgcagatcctggataaaagatgatatatcgacacggtttagagtgtcactgcgcttggcctctcagggagccacaagtacatatttcctgaaataccgcccagcacagtatctaatccgcccgccacttaacaccgggaggggaacttcagcagcgcacaagcgcgctcccggtttcctggttctgggtggggagagcccaaatgagaaggatctggtatgcctagac

SEQ ID NO: 32391 - DNA, 989 bp, Homo sapiens
  chr20:21492692-21493681
  hyper
cgcctggaaggtggcggctgccaggtcctgggctttgagcgcgtgacatggtttgccgtccctgaccaagacgggcacggccacccggcgcggcgagggcaggggcgtcacctccatacctttctcggcccgggcgcgcttcatcttgtagcggtggttctggaaccagatcttgacctgcgtgggcgtgaggcggatgaggctggccaggtgttcgcgctcgggcgccgacaggtaccgctgctgccgaaagcgccgctccagctcgtaggtctgcgccttggagaaaagcactcgccgctttcgcttcttgccggcgtcccccccgccgcccggggtctccttgtcattgtccggtgactcgtcggccgagggctccggggacttggagcttgagtcctgagggggcgccccggcagccagaccgtgcactggggggagggggagagagaagcgcgtcaggcgtctggaggccgcgcgcagcctgcaccagactcggagcaccctggatcctccgtgcgaccctggacctccgcgcctggcagcccagccccgctgcctttgccatgacccctgccttcctctacgcctgacgaagacgtcgggacctcccagggtaaagagggaaatccgtaggagtgggggctaggggctcgcctttcaaggggctcacatagtgtgggtgagaatttggggggggaagtggcactgaagatcatcgcgggttaagggctccggcgcccttaagcggtttcctctccggcgagacgtgggcagatttttaaaagaaataccccacaatcccagcattgatcggctcggccatttaaggcaggtttttgggggctttcgtttctgctttcgggccttctagacaccccctgcactgcacaaagcgtcctctatgatcgcgcagggggcagggtgagctatttatacccgggccacccgaagcctccccaccctccacccgtacccggacgaggctc

SEQ ID NO: 32392 - DNA, 981 bp, Homo sapiens
  chr20:21502102-21503083
  binary
cgcctctccagagacctcagtccactgcgcgggccctcagccccggctcctcctgtctgcgactcccaccacttgccctcgtgctcatcaccaccgtcccctcacgtcccagttccgtctgaggagaagcccctgtctccactgggcgccatctccaaattaccttcgggacttctgcctctgtttcaatccccgatcccgagctccctgcgacgcacagggggcgacttacccggtggaggtgggtgcagcggccgccccttcctcaccgcggccccgccagccgaggcgcaaccggccccgggcaatcgggagggagctagccaggcgctccgcgcgcccgctccgccttctactcccggagctgcggcgacagccccgccgcatttcaaggcgcgtctttatctagtactccacctacccggacccccctcgctctgcgcccttcccccaccgcgcgccctaccaggcggggctcaggggaccgcaggcggggaccgccgcgggtgccgcgcccctccctcctcctccgcctcccagccccgcaccttcccagcccctgggacagtcccgctttccctgaccgcaccggaaagtgcgcagcggcgggatcacctggcctcggcggctggtaaaacttttcctgactgcaggcgcgacagaggggccctgcccgtcctcgagtgctcgccactcctgccgtgatccgcaaagtcggggagaacttcggaggcccgcacttgcccacctgctgcgtccggactacgcggcttggggatcgagccgagtcaggacccgggagagcgaggggctcataaccggggtccgccgtgaacccgagctccggcgccgctcggcggcgacgacggtgccccgagacccctctctgctggcaggccgcggtgaccgtgcccggagcgcgttcccgcgccgggcggctgtggcaggaggaccagacagtcagcgcctggcagcgagggc

SEQ ID NO: 32393 - DNA, 798 bp, Homo sapiens
  chr20:21686199-21686997
  binary
cggggaggggggcgctggggcgcagtgacgggaaccaatgagctgccaactcgcgcgtctccggcgtgactgccgagattgacgtggaggacacgtcaaattgattcccgcacgctgcagcctcccggtcagacgaatttctcccaatcggatgaagttcaccctgggcctggggtcgcgggcgtggagagtgtcctgggagggggcagcagcggcggcggcaggccctggagcgggcggcagcgcgctccgctgccgcgcacagcgcgtctccagcccgcggctgggccgccgcggctctcggctctcgggcgccctccctctatgcctctcacgcggcggcggcggcgcccaagctctcccggactgcgccgggcccagccccggccaccccggccaccccggcgccaggcagctggccggcccgctcgctatgggtaaggggcgggcgacaggcagggctcgggagggctgatgaggtgggtcgggtccgcctgcctcccttccctctcgtccgctttccctgggcgacccagtcctgggtcctggagaagctgcattctcctctgatccccagccttcagggggcagttgagcaagtctgggaagggagtgttccaagtagacgcgctaaaagtcgcgaaagggcacggagggctacaatgcgccgcgctccactccgcggctcctctgcgcccttgcccactccaagccagacccaggcggtttgcccttggactccgagctgtctggggacccacaggtcacctttggaagtgcgcctgggtgcagtccctc

SEQ ID NO: 32394 - DNA, 970 bp, Homo sapiens
  chr20:22558954-22559924
  hyper
cgaaccccctgcaaaaaaacccaacgccttgagtctcagttggctgagcttaccaccagccaagcccgcccgggcgtccgagccctggaagggagaaggactggctgggggaggggcggtgagcggacaggagtggggtgcggacgctgaggaggggagccgggcgcggtccccgggtgggcgcgctccctacctgcggcggccggcgggccggctggcgggcgggctgcggagcgtccagctcgcggagggaggaggccgactgctccgagccgaggcatccccgcatttatttgagctcaaaccaagcgactgttgactttagcacacaaagcaaagatttcactgcccgctagtttaaaaatgaatattttaccaagatatcgatcagcgttataaaattcagttaagtacaatgggatcctggcaaaaaaaaaaaaaaaagaataataaaggaggggggaggcaatataatatctgtgcaaatttgctgaagtgtgacgtggcatggaaagtttaccctcctggaattcggatctagaatgtttttttcggttgtttacagactttgtttattcacagatcatggttgcttaaaccggcgcgcggaaagcgtggggaaaaaaggaaaaaaaggaggggggagagtctctgcaccccacaatgagtagagttggggaaagcgcgcagtggcgatttgtgagctcgttatctcggaacccgggctaggggagggatttaagcgggaggggggcgtgaaagacacaagaagcacagaaaagcctccgaaagcgcctgctccccgacatcctttttatgtattcggacagaactatatcttatcggccgggatcagtgaaggggggcgcgctaagtagtttaaaacgaccctcgcacaatgggcgtgccatacgaaacatagcaggttagggcagcgctttcagcctccattgtcccccactcggccccc

SEQ ID NO: 32395 - DNA, 1423 bp, Homo sapiens
  chr20:22563824-22565247
  binary
cgttagcaccgcggctggagggtgcccagacctcccacccaccgcccaggcctccgcgtccggggaggcctccggggagccctttcgtccccgatggcccagtctccggactccgagtctgtttcattcagggagagtcatgatcgatcgcccttgggaaggtggcgagcggattgctgcttgggcatgtggcccgttcctagcccttctccacctcgcccagattctagaacaggggtcccatggagtactcccaagccagcaccccaaatacattcccctaccccagagtctccccaaactctcccaccagcatactgagctggcgccgaggcccgaagtccccggacgccacctccggtcgcagcaagcaacctgcgggacaacgcgcggggcgcctcgggctgcctccagcgaagactgtcccgggccccctctgtccggtctccctccagggaccccctcccttgtcccagggaaactgcaaggcagtgcctgtgcggagtgcgggggcggctggaggcactgaacggggcaatagggaaagaaccgagacctgaaccacacgcggctgagctttgcaggcaaaaactttctttctctttgtccactagtctttgactctgcctccacttcagcccccaactcctacccatcttctcctcctcagctccccaccccctcgccggccgacctcccacccctccccagccgcgcgctgccaaacataactctgttaggatagtgcgtggctcggccacgaagaggatttggaggcgccgcaagtcaatatttgatcacaaagttaatattatctcaaggctaacagtgtgtcgtataaaaaagagacccatttgattccaaggagggcggaaaaggcggctgcccagaaaggctggggttgtggggcggggtgggggggtgccagcgagggaagcggtcctgaggttggggaaggagcgagcgccgccgctccacttccccctggaaaagacgagcgcttacctcgggctctgcatagtagctgctccagtcggacggctcgtgcccttccatcttcaccgctcccagcatactggaagccgagtgcatggcagtttaaaatttaacagccacaacaaacgaccagcaatcaccccccacccccaccctcttttaaaaaaaagtcagccaaagcaccgtcccctcctccctccctctctcgcgctccctctccctgggctccactccctctctctccctgggcaggccggaggcggtagttggaagtgggcgggaggtgggggggggcgaggagcggaggaggcccaggccagcgccccgcggtagggagcacccgccgccgccgcgctcacgggctgccgggtggcggctgaggttggcagtgccgagctgccccgaggcggcgggaagcgcgcggcgc

SEQ ID NO: 32396 - DNA, 831 bp, Homo sapiens
  chr20:22565361-22566192
  hyper
cgcggagcggacaagtgccgcagtgacgtgggaggctggtgatatagcgcggcgcgctggcgcgggcctccaatccccagacccggggcagcccatttgaataatcagctcacacctaggtgagaggtagccgcagccggcgctccgcacctgcccctcagcgcctgccgtccgccccaccgccgcggcgccccgcactcctgggcgggccaggggagcgggctgggcgggcgatcgggcacgcgggatccctggtcgagccccctttcctcccgggtccacagcgagtcccctgaggaaggagggacctgggaggaaaccaccctctggggcggctccggcctccagcccccgccccgtctcatcgcgccgggcgcccggtgcgcctgtcggagggcgcgtccagcctcagtgcccggcagatccctatgaaagccggatttatttatgccgggtttcttcgctctcagtgctcattctctgtcaaaacagcaagtccatgacagccaatttgcaaagcgctgtcctatttagaaaaactacgtacacacctttaactcgcccgctgctgctcctgcgaggcccctccctgttacagttcagacccggaacggcctcgggagaagcgcggggcgcacggtctggccgcctcggctctccgactcctcagacaccggccgccagggacccgcagtggggcggccggcgcctggcgcaagcagcccctctagcagcggccgacggttgggaggctgagatttgtctctgatattcaggccggcgtgtttcaaggttacttttcagtcacaaccgaggtgcccacagcatttc

SEQ ID NO: 32397 - DNA, 841 bp, Homo sapiens
  chr20:23029018-23029859
  hyper
cgcagttggctctgaagcacgggtccacgggctccacacactcgccgtccaccaggtcgtagttagggtagcagtggcactcgaagccaccctgtgtgttgacacagcgctgcggacacggactgggctccagtatgcagtcatccacgtcctcgcaccggtgttggtcggccgccagccggtagccggtctcgcacatgcacgagtaggagcccggctggtcggggttgggaacgcagaagtgctcgcagaggtcgttgcaggactgcgtcgcggatgcggtgcaggagcgcccgtctgcctgcagggcggcgccggctgggcactggcagcggggagccccagggatcgcattgcacgcgtgctcgcagccgccgttctccacgctgcagtcccaagcgcccggcgcctccctggcccagtgcccctggaccgctccgggcggcgcggtgcacattagctgtaagccgaggggagccaccgcggcggagctgcccaccggcagcgcctggaagtccgctccgcgggccgcgaacggggtgccgtaggtgatcgagacggcggcagccgcggcgccgggctccacagccagtggcctgcaggtggctgggaagtggaactcgcagaggaagccatcggccttcacttcgcactgctgctcctcccagatcggctcgctgggcacagtggcctcagcagcggagacagcgacgcacaacgggccgcagaggggagccccattgaggtcgagccgtgcccacctgctatagctggtgttgttgtctcccgtaacccactggaagccgcgcaggggcccgaggcgcttggggtcgccgcagcc

SEQ ID NO: 32398 - DNA, 982 bp, Homo sapiens
  chr20:23030364-23031346
  hyper
cgggaaaaggaaggaagtgcctggtgggaagggctgatgccgcatactcggattgctgggttctctggccgcccttgcgcccgccctcgcgcatgggatcacctcgccgggatgagtaaaccctgccctggcgcagggaggttctcgggcggggccgacaggggcaggcgccagggaaggccagcacccctgtaacaagacgactgtccccgcccaccactcgggcccccacgcgtgcagccctctttcatctcttggtcctcctttctttcttttcatacatgttacagccacttccaaggaaagcctggattgcaagagctctgggaaccggagacttcagagaagagggctttgaatggggagtgggggaggtggtgcacaggacctgcaagacgctgggaggggtgatcggcaccaagggcactttgggaggacctgcctaggacgtggacttccccgaagacaggatcgcaaggagagacagctggatcctgtccgcggccaaggtgcctggctcaggaaaccagcggagcgcgcttggcctcacaggacagtgggtgtggctggggtgacggggcagggtggggaagactggcctaacaccagcgccctctgccccatggctggccagggacccgcgagtccctggacacgcactggccaacgccagaccccatctcatcgggtggggaagtcgcggggacactgtcagggcgccgaagtccggacccggctcagaggcggtggcaggtgaattgctgcggcgccgggtaggggcgggcgcgtgggagcgagtcagcctggccagtttcggcccagcttccgaaggatggtgcttcttgcaccccaacagagtggctggcaaccccccaggggagcgcgcaggatcccagctgatcccacccgggtcggctaaggaggtttccatttcgtccagagtccgaattgatacccacgtgcatagaaacgccacttgctc

SEQ ID NO: 32399 - DNA, 729 bp, Homo sapiens
  chr20:23617984-23618713
  binary
cgcgctgcggcgcagctcgagctggctcctggaagctgatcttaggcgccgggcgcggacctgacgtgtccgtgcggttccaggccaggccagactcagggcattcccggacacgcccgccaagggctcgggggtgacagcgaagaccgggaacagggtccgggtgagaagcccaggcgccggagaggagcagcacggggtccgggagcagcgcggggggaggctgggacggcggggccggggcttcggaccctgcggggggcggcacgcacctgcttgcgggcgcgcaccacctgcagcgcgcggctgtggtacatgtcgttgctggctttgttgtactcgccgacggcaaagtccagtgcacgccgcacaccctcctcctccacgctggcgtccatggggcctcccactaggcgcggcggcttgccgggactggagccggccgcggggctcacggccagggccacggccaggatggccagcaggagcagcggggcgcgcaggggcccggccatggtcggctaggacgcgggacgcggggagtggggcgcaggcgagaggctggagctagatagagaggacccgctgcgataccgaggcgaggccgtgagccccgcgaggccggcgactgcggttttatcccttccggccttcgccgccccaccccaccgcggcctgcactcccttttccggaacgcctcgtccctcccacctcccttctccctcccc

SEQ ID NO: 32400 - DNA, 971 bp, Homo sapiens
  chr20:24449915-24450886
  hyper
cgcgcgggctgcgccctccttctcttccctgccctcctcccccggggcccgcgcccgctgcctccagcacgcgcgtcggcaggctcggcaagcgaagaggagcggctcgccccagggcgcccctcgcccagcctgccggccaggcgagcgcgacgagagtctccccgcaccccttcctctcccgggggccgagagggttgggctccgccccggcgccgcagctcccgactccccgccgctcgggctgccgccgctgccccgcgcccggcgctcggggcagccgggggcgcaggcggagagcgcagggcggggagaggcgtggggagcagagcggcgctgaggggagggcagaggaggagagagcctggcagcggaggagcagaggcgggcgccgcaccgccccgcacgctcgctcgctcgggagagtcgcgggcggccgcttgggcgcacttgccgggtcaccttgtcccggaggtaagtccagacctcccggccgcgggggcgggcggaggggcccgcagtgggcggggtcgcggcaggggccgcgagctggcggcgggagctggaggctgccctgcgctggcgggtgtcctagtcctggctccgcctcggagcgcgcagacccggcggcggcgtggcgcccgcggtaagtccgggtggtcgccgcgacgagacttgggagacacggggtcgcagggcgggagggggagctgagccggcagagaaaatgcccaggaaggggtcgatgctggcctgggctgcaccttggtgccttgccaccccgggagacgcgaaggggctgctgtgcgaattcgatgggagctggtgagaccgagaactgagagcgtagcggagccaggctgcccagcagggccatgagggcgcgcggcgggccaaggctctgcgggttcgggctgcccctcggagtgacccgaaggagaccagccagggctggtgagccgggcggccac

SEQ ID NO: 32401 - DNA, 739 bp, Homo sapiens
  chr20:25064992-25065731
  hyper
cggtgggcgagttgtgtcctgggtcaccttgtgtttcgcagcgtggcggtggcaggagcccagcgcgggaggacattttcatagcctcctacagtgagaaacgccccccacccgacgctgcgctcatctgtgtccccgctgttgccggggctctggtatccacttgcgcgccctatgtggtggggatccacccagagcccagcgtcaagttatacgggcgcttcactcagcgtcagccaagaccagggaagcgcttcttgccgtttaggagacgtctgcaagagataaaaagctagcccacgatccacccacaatcctcgtgtccccggggtgccctcgcagttgccaaacctacgggccgcgtttaggggaagcctccgcgtcctggcggccaaaagaatgggctccttccagcttccccctaccggataccacctgcaaatctattgccagaggcgcagctcccgcgaacgttcccgccccgggcggcccccaggagtcgttttgggtccctaaatccgttgagggttccgaatctgtcttcatcagccaggattacccgggatttaactaatgaataaaggttcctcagctcattattttctaaggaagatttccagcccctctgtcgccgaccgcgaatgtgccttggcagcgccaggctgaggttggacctgctgtgagtggctcagcaggcacccctcttgggcttctcagagccgcggctggccaggctggc

SEQ ID NO: 32402 - DNA, 976 bp, Homo sapiens
  chr20:25565494-25566470
  hyper
cgcgcacaggcgggaggaaaggggcgaatctgcaaaacgagtacaacagataaaattcgcaacagacttctacaccctttcaatcaaccgtcccaagcgccacgaacgcgggtcccgctccgtggggggccgcagccacactggcaggagggaatcctgggcctcgaccagacgccggcggcgtcaggagaaacggcccgcgctgggcaggcggcgggcaccgcgtagctcattaccacggggggccccggccaaggccgcccgcctcaggccgagccttggggctgtgctggacccgggccctcgttcgcacggcgcccgcgccgccgccgtcgggaaaccgggttttcaagcgttcggcccagcgggcgctgtattttagggcgtgacccccgccccgccctcgagggcgaccggaagagcaggcaccacagcagatgcgccgagtctgcgccccgcaccgcgaggagcacccgaggccgcgctcccggagccgggtctggtgactaaggcgcgggtcgcgacgcaggggcggccccggactctcgaccccaccagccgcctgaatgtcccgccggacgcccgggccggctcacctgggaggcgcctccgccgtccgcccgcgcggggccaggagcgcggcaccacccccgtaccgccggccgctctttgtgtctggaggccgcgacgcaacactcctcccggcctcgaggcaccgccccctcggtgtcccggcgcagtgggcgaacagggggcggggcgagcgaacgggagagggggcgggtcgggtccgggattgcggggcggggtgggggcaaggcggcctccgcaaatctcagggcggctctggccagtttggagcctggggtgacccttggagctgacctcgctggtccctgtcggagccctgcgcgctgcggagcttggcggttcgcagctctcggggtagcatcttctggaaacaagcccggaggcc

SEQ ID NO: 32403 - DNA, 350 bp, Homo sapiens
  chr20:36888871-36889221
  hyper
cgaggtggtccaggccttggcgcgttaccatggtgacgggctgccagcggcgggcggcgcggctcctctcctgggcgcggggtctgtgggtccgcgggtccgtctgtctggggcagccctcggtcccgcctagccctggagccaggggatagggcaggcccggggcaccgaccccggcgtcatctcggaggagcggccggggaggacagggagagagactgagagagagacagagagggactgaggctggagacggcgagagacataagggagccgcgggcggcgcgggtcgggccaccagacggggggcggcagcagaggcggggcggggcggggcgcggcgggacagc

SEQ ID NO: 32404 - DNA, 1913 bp, Homo sapiens
  chr20:37356366-37358279
  hyper
cgtggtggtgagtggcaacctcatgtacaacagcttcccggggctgcccgtgtcgcagaagtcctggtccattatcgccacggccgtgctgctgccttgcgccttccttaagaacctcaaggccgtgtccaagttcagtctgctgtgcactctggcccacttcgtcatcaatatcctggtcatagcctactgtctatcgcgggcgcgcgactgggcctgggagaaggtcaagttctacatcgacgtcaagaagttccccatctccattggcatcatcgtgttcagctacacgtctcagatcttcctgccttcgctggagggcaatatgcagcagcccagcgagttccactgcatgatgaactggacgcacatcgcagcctgcgtgctcaagggcctcttcgcgctcgtcgcctacctcacctgggccgacgagaccaaggaggtcatcacggataacctgcccggctccatccgcgccgtggtcaacatctttctggtggccaaggcgctgttgtcctatcctctgccattctttgccgctgtcgaggtgctggagaagtcgctcttccaggaaggcagccgcgcctttttcccggcctgctacagcggcgacgggcgcctgaagtcctgggggctgacgctgcgctgcgcgctcgtcgtcttcacgctgctcatggccatttatgtgccgcacttcgcgctgctcatgggcctcaccggcagcctcacgggcgccggcctctgtttcttgctgcccagcctctttcacctgcgcctgctctggcgcaagctgctgtggcaccaagtcttcttcgacgtcgccatcttcgtcatcggcggcatctgcagcgtgtccggcttcgtgcactccctcgagggcctcatcgaagcctaccgaaccaacgcggaggactagggcgcaagggcgagcccccgccgcgcttctgcgctctctcccttctcccctcaccccgcccccaccagcccagtgcgccctgccgccgcgcttgggaggccaagctttaaacatctctggttcctagtttctgattattcggggatgggggggatgggaggggacagggattcacgatccatcgcgtctgcgtttctgttgtcctttcttttccacaacaccctggttttggggggaggcggggtgcatttgcgggcagggttctctgtccttccaagtggggccccgacactttggttccagtcatcgagggggttgggaagggagggagagggggcgcagctcgcaggcgtggcaacttgaccttgggggaatatttcacatccatccagagctcggaatctacagcgtccagccatttccagcaagagcgcttcccattccggagacgtttcaaccctgcagcgggaaaggctgactgggaaatccattttgggtgggcaatttccttcaacgaagccggaaggcgagaagccgcggcggggccagcttgcctgccggttttcaggaatctaaactctcatcttgtgcaatttatcaggtgtggaactgttctactgtgcgtgtggtgtgctcgtggtgaataagatgaaatgtatatcagaaaaaaatctatctctaatttagagtgcggtacataattatatccgcaaataaagaagagacaaaggcttgcgcggcccggtgtcgggtttgtgtgttcgtaccagccgggatcccctggcgctgggaggcgtgggaactggctcccgccggctgaaaccggagatggtgagcagctgtggttaaagggtccggggagggctctagggagtacaaagattagttggcggcgaggaggctcctcaggtgtgaggaggaagctgaagacggagagtgctgtagcggccccctcagctgccaggtcgaggtttgttcgaatctctcccctgggggc

SEQ ID NO: 32405 - DNA, 990 bp, Homo sapiens
  chr20:39317291-39318281
  binary
cggagctacacggagtgctgagcggtgtggaggacaccgagccggctggctgcaggcgtgtgcagggcctgcccggacgctccgcgcgccccagtggctccttcttcacgtcgaacttgagcaggtcgaagtcgttgacatactccatggccagcgggctggtgggcagctctggccccatgctcagctccgcggccatcgctgaagcgaggcgcagccgccgctgccgcccgggaaactttgcggccggccggagcgcgccgagccaagcgcgggggggaagagcggagaagagctggggaggcggggagcgagggcgcagcgggccggggccgccggccaagcctttgtctggggacgcggcggcgcgccggagagtcccgaggctgcctgcaccgccccagagctctgggctgtgcccgcgcagggaccgggccgggtagagtcgggcggggtggagaggcaagcggagcgcgcggtggggctgaggggaggcgtggggcgagtgcccgttgctcgctctctagctctcttgctcttacgctctctcgctcgcagccgctcgcagctcggcggtgcagctgtgctggatccggcggcgccgcagccttttatcgcctcctgatgtcactggggtgcgggggcccgggcggcccggtgcgcgggccaatagctgcacggcctccgcggcccagcggcgcagggcggggcgcgcctgacagctcccccgccccccgcgtcagctgactggcggcccgagcggccccggagcggcggaggcctggcggagcgctggagcggagtgggacggccagcctgggcccacccccgtaccctgcaggtcccggcccacgcacgctcgcctggagtgcgcgccccacctctaggccaaatcaccgctttcccctcctcgcgcactctcctccctcagttccctttgcaccccacccccatcccgtgtcacccccaaggaggctcagaatgagcgcc

SEQ ID NO: 32406 - DNA, 1364 bp, Homo sapiens
  chr20:39318288-39319652
  hyper
cgcctcctgggccctttgttcccaagcggcccccgcccagtgggcgacgctctgtgtgtcctcgcggcttctggccgtgtgtgtcgtgcgttcctgtttctggagatctgcgcgtatttgtatgttggggagggcgggctcgaggctccgagagttgtgttcagacccaactcttaacctcaggggacctttctcaggccaagcgagggcccctcctggcgggtgcagtcgcagagccctgaggttcgactccactggccccgccgctccccgcgttcaccccaccgcacaatgttcacagtgaaggcgacgggaaaagcagcagcccaaaggctctgaattcctcttccccgccacacgcacggaatcctgagcccccggagcctcggggccgaggccggcccgggacggtgctccgagtagctctccactgctggggagccggccctgtttttgtttgaacgttttgtaacgattaagcagatcccggcgtcagcccgccgcggagaggctcaaacaggcataaagtgcgaccccaagtggccactgtgcgcaaaggcgccgcgaccgcccggcccacggccggaaggcttggacggcgcctcgtacccagccaggtctcccctacctggcccaacccaagccagcccagaacgcatactatgtgtgcaccagagcccaggacaggttcccctcgagcgatgtacaggtcctcgggtcccgtcttcgtactcagccgcgagcctcgagccgcgagctccgctctggtcgccccgttgaaattccgtgccccagcgttcgggggtgcccgtcggctgctccctgggccggaaggtcctgggcggaggaaggccggtagccaaaagtggaagcgccacagtgaagcggcccagggccaccgggtgagaaacctccccggagggcagacggggagaccgaagcacaccgcactaggcatccagactgggcttgggagccgcgcaccctccctacccagatccaggatggctagaattaacgggttctttctgagacctcggctcaggcgccgaaaccggatagatcgcgaattcgctggacccggagacccgacccgcctcccgcgtcaccttcttctttctagctttgggcgcgcgcagcgaaaggcaggagaggcgcgcactgggtgagtgagtcccggccgctgtctgcgctggaccagcccgactgacctcgcgcgtaggggtcgcgtgagccacaccggtgcagacgcgcctagattatttttaaatgttagaaggtaaaatatttgcctccaattaatctgaaaactctctattctcttgcgccctcggagaggctggggtacggcgtggtattgggcc

SEQ ID NO: 32407 - DNA, 901 bp, Homo sapiens
  chr20:39994545-39995446
  binary
cgaccgctgtggacggctgtgccacagcacaggcccggagccaggagcccgctctggctctgcagcccggccacgctggggctcccatggggttgctggggccaggctgactgcgagagggcagcggccgcccggatgcgcagctctatctcctacctggccgggccaggggagagaagggaggcccggggcgggggagccccgcgtgctcagcgcgcggaccgcctttcctcctctccctccacctggtccgctcgcccggagtctgcacacagcgcagctggaaaatgttacttcgctggaaaggtttccgctggcactgccaggatcccaagccgccgcgccaggccccctcggttcctttttcctcgccagccccgcaacctcccggagcgtagggcgctcgcctgggcaggggctcggccccgggcgccgccccctctgtgcagcggcctcggggtgcccggggcctcgacgccccccgcgggtgcgggcaggtgggagcggcgacgcgcgcgggcccatccctccctcttcccgcccgccgcccgcccgcgcttacttgtgcggccccgggcgcagccgcgggcgccatcccgtcgtgtagagactgtagcgggaggcaccgggcggcgcaggccgcgccaggagcggggtgcccctggcctgcgcccccgagagcagcgccgcgacggcgcacagccagacgagcaggcggcggcggcccatagcggcccccgcgcctctgcccggccccgcgcggtgccccccgccgggtgtccgcctgcagcgccgcgccgcccccgccgctggtcggcccgggtcccgccccgagggtcccggggtccccttcggcccccgagctcgctggcccggccgcctggcgcttcgcggcggctgc

SEQ ID NO: 32408 - DNA, 982 bp, Homo sapiens
  chr20:41817869-41818851
  binary
cgcgcgctgcccgaggagctgcccgggagagaacgctccaccccgggcgtcggtgccgctcctcgtctcgccgccccaaacactcaagtggcagattccgacaagtgggaggcagcaagtggaaatattcgcaacaaccgcggaaagttactccagcccggggggccggcaggaaactgaagcggggaacttcgccaaacgcgggctgccgagggacgcgaggggccgggctcgctggccggggcgcgcggggacactgcttcccgcgcctgcaagctgagacccgggttccggccatggggacccgcgcccccgcgagcccacacaactttctcctccgagggccccgcggctgggggcccgcgcgcatccaggagggagcggggagcccaggggagccgggcgggcgcactcacctgcggcgctctgagcccgggcgccgggcagtggcggcagctgcagcctcaggagcaggctgagggcgagcgcggcgaggctcgccatccgggcggcggcgggcagctcagccccttcccgcgggggccggggccgggactggggcgggcgcggggtggccccgcatcgccggcgcggccgctggctgtgcgcgcggctggctccgctcgggctcccggagccggcgctcctgcgttccaagccgaggcgcggcgcgaactgaggcgggaggctgggcgggggcgggacgcggggggcggggggcggtgtcccccgagtcctaacgccgccgccgttgccgccgccgccgccgccgccgcccgcccgggcgctccgcctcggccgtgcacacaccctcacgcgcacgcccgcgcctggcacacgcccgcggctggcacacgcgggctcccccgcgcaccctctccggggccgaccagctcgggccgctggcacagtcacgcgcgtccacacatcacccccgcacccacacgccgggcagggtcctcgcctcttcgccccgcgccgc

SEQ ID NO: 32409 - DNA, 680 bp, Homo sapiens
  chr20:42136049-42136729
  hyper
cgagctccgcggtccctgcgcccccgctgcgctctgctagctgtgatgcaggggttcgggggcaggaaaaatctcgacccgccacgcccgtgcggcaaacctgtcctaggttgagggggcatgaggcgcgcacaaccagggcctcgaaggcaggcaagagggcgcgggcgccacagaagcctgggcctgcgcctgggccgggcagatgtgcccggcgctcgggccccgcgctctgcgtcctgcagggaggcggacccgccccccgaacgcgcaggcgcgcggcgcccggctcggaccgtagctaggcgctgggcggccaccggctggccaggcaggtaagcaaccagcggtgcgtgggctcagaccttgcgtcccctgggcgccgcgccaccccgctccgtccagggcggcgagggctcaggtctgcggccccggcgtctcgctccttccgagcgcctccggcggggggcgcgggctggggaggaggttcgggaaaacgccggggaaagcggtctgggcggagcgcgcagggggccaggcgggtgcgggactccaggcccagccgaccctgcggcgtggcttcgggctgcgatcaggaggggcgaggagggtggaggctgcgtgtttggagatacgcaatcaattaagagtttttttattaatggaaaggtgtggagggc

SEQ ID NO: 32410 - DNA, 878 bp, Homo sapiens
  chr20:4229708-4230586
  hyper
cgggtcccgtcggggtcctgcccaagttcctgtgacgcggagcgcggctgtccgagagcggagctgcctggcccgggcggcggccgggctccccgaggccggccgtggagtagcaccgaagagccggggcccgctacgcgcgcggcgctctgagcgtgcccggcaagcgggcaaagcggcggctccggggccgggcggtgcaggcagcggccactgcggcgctcccaactcggcgcggggggcgggaccgaggaggggcagcgccaggaaggaggagggggcgacccgggccgagagacgggcgccacactccagggtagaagggacccttcgctcaggacaagcgattgtgtcggggtccggggggctgcggcgctggcgcgcgctcgggtcccgcagcagccacccacgcctctccgcaggtgcccaagcccgcgctctcccctagcggtgccctttgcgttccttcccgctcctctcccggaccccctcccccttggccctcagcggcgtccctcttcctcccgccctctcccccgagtctctcggtcactcgctggtgcccttgggcgcgcggtgcgttgaaggcgtgagtcccgggtcttcgggatcccggctttggccgccagagagcagcaagcgcctgggatctgcggactgcggaccggacggcgcagtgccgctgcgggttgcctcctgggactgcccgcatggatctgccgcacctcctttttctcacgccactggccagggcagggtttcagacgcctctgtccagtgcgatggcgtgaagagagcccaggaagggtcggaagcctgtgctgggcagaggctgggtacgatgggctcaggagcagcaggctgtggctacagccctc

SEQ ID NO: 32411 - DNA, 860 bp, Homo sapiens
  chr20:48100185-48101045
  binary
cggggaaatgagctaaattttctggccttttcaaaaggtgccatcctcctaccgcgcactagtgatttcggggggttcccctgagcaccccctgcatgtagggctcacgccttagccccagaatggggattgcgcgtcccctcaggcctcagcccttgcctgcctcccaccccgctcccctccagcctggagctgcggagcccgagcagaccaacaggccgagctgcggcaggcaaaccccctgtccgtgtccccatgcacccccacggaaggccgtacgccccaacactcacccccagggcggccgcctcctggggccagggaccgcgcatcgtcccggccgcccgggcgcccccgcccgtgggcagcggcggtcccggggccgggctgagccgggcctaccccggccgggcaggcaactcgcccgggctgcaggcgccgcggggccggggcgcgctctccgaggcggggggcgccggcgggcgccgggggcgcgggggcaggaccgcggccgcgcggcacctcctccacctcctcctcctcctgctcccgcggcggcggcggcggcggctgcctgggcgagatcaacaagtcggggctgagcttcggctccgcgctcgctgctattctgtcccgcacttcggagcgcccggagccgggcaccaaggcaggacggcgccacctgcgggtcggaagcgagcgcggcttaactcctgcctgcccggcccagcctgccggggaggccgggggcgggctccgggatcgggccaaggagacgcgcgtggccgtgcatccctctccacccaggccacctgcacagctggcctcgcgatcccgccttccttcgtcccgtcaacaac

SEQ ID NO: 32412 - DNA, 1642 bp, Homo sapiens
  chr20:50383675-50385317
  binary
cgccgcgtctcctgttccgagcaactgacgctgcaataagcggccgccaccgggaaatgcccagagaggaccagacgcccgaggaagggcggagcagagcggccgcaggccccgcccaacaccgcgctcagcctcccgcgggctccagcctcacctgcgcggcctgtggagctgcacatctccaggccccgccccccagaactctgattggcgggtctaggcgggggccgggaaatctgcatttgcaccagcgcccacccccgtccttcccacccccgcccctcacgcccaggtaagtctatggcaggcgatacgagagccccgcaaacctcaacgcgtcacgctgccatcctccgaacaggaagacggcgaggcgcaaaataccaacccgtcccctcttcccaaatgcagaaaaacccttgcctgttccgcgcctaagctgccctcggggtctcctactgcgggaagggcacagcaggtggcagcccctgtcccagccgtgggattccttccccgaaattgtggggggagaacacaaggggtagtgtcaccaagcggccagtaggagaccctcccaccctcctgcgactgctggttcgggtccaccccgggcggagggggaaggggccaccggagcgcaggtggtctcggcgcagcctcctggggctgggacccaggggcgctgatggggtaccccgaggcgtaggccgcgcccccctaaaagctgagcatatctgggctcccgagtaatgctccaagcgcagagctcggtgtgacactgaccaaattgttacctcagatattaattacggacagatattaattacggaacaataaaacggtgagaaagcacggctgatccgaattccgcgagtgtgtaaacagcactggggcgggcccggcttctcggggtttctaaaggaaggtgggcaaggaggcccaggcaaccgggcgctcgaaccccaaagggccggcatcaggctaggtgccgcccggggctgaagcgcagggaccccctccccacctccccgcctccccagccctgccccaggctcatggcgccgggcgcggcgcgcggccaacctgtcaggcccggccaggctggcccgagcgccgggctccgggaggcgcggacaaaggaaaacacgggcccaggcccactcacccggcgcggggcctgctgtccatccgcttcttctggcgcaccggctgcagcgggatgttgtccgtcatgtcggcggcgccgcccgccttggccgccgcgccccccgcgccgcctgggccgccgcccggtccggcctccgcgccgccgcccgccggcgccgcgccgccccgggggaggaggcggcggcagcgggcgggccgggcccgcagcgagggggcgagctcgcgagcgccgggccacgcgcggagcgcccgcgcggcccgaccgacggacacgggcgcaccatgggcccgagctccgcgctgcgcccgctcgctccgcgccgcgccgcgcctgccacggggggcggccgggccgtgtccgcgccgccgcgaccgctgcagtgtccccgcccccggcccgcgcccgcgccccccacgcgcgcccacccggccacgcgccccccgcccacgcccgccgtgcgcgcaccctgccacc

SEQ ID NO: 32413 - DNA, 951 bp, Homo sapiens
  chr20:53091767-53092718
  hyper
cgcaaaatcggcccttctcggggaaagggcaggggctgaagggggaggcggggtgggcggcggctggaaaaaagtgaaatttcctctcctcctaaaataagtcattggagcgaggagagcgagcgctatctcagtaggctgtgggcgaggtgcgggggtggcgggggcacgctccgggtccgccaggaggggagggatcggaaggggaagcggggagggaaaggtgggtgggaggcgcggggagcgttccagggcggctgctcacgggtggccgcagcccagtgctgggactcgcgcggctcctcctcttagccccccaccccttcctcctctttcctcctcctccttcctcctcctcctcctccttcttctcctccttctcggccgggaggaggcagggctggatccctcagccgccgccgctcctcctcctggcaggccggccgcggagtcagctgacgccggcgctccagcctcgcctccccgcgccgcgctctgcgctccccgaaagtggctgcaagccggccgcccactgtcagggttggggggacagagaaagtgatgtgcgccttctaaagcctcgcccagcgccgccgaagcagcttcacctctccaactttctcccaccgactgcttgtcttgaccctgccctccaccctccccagagccacttcgggtgcgcgctcttgggtaaagggggggtcaccggctgtctgggatggcttccaattttaatgacatagtgaagcaagggtacgtgaggatccggagcagacgcctcggggtgagtatcgatcctctccgtgttgctgttcgccggttcgattgtctctctcttgagccagcatccctggagggtggacggagagtccccggccgcgcgccggagaattgcgcggtggctttctcagccgaaacccgcgtctccggggctgtcactgtaaggccagc

SEQ ID NO: 32414 - DNA, 1927 bp, Homo sapiens
  chr20:55202926-55204853
  hyper
cgggggaaagtttcccttggaggacgcctattattattattttcttttaggcccacctgggtctaaataaatgctaaagttcaaacgaacccgagaaggaacagcgaggcagtggatgccgccattccgtggatgggagagtcatgtctactgcaggtgcggacaccgtactgataggcattgattattgcaaaatcgtattcagtatcaaatagaaatagtcttgtcctctaatccccacagaatgtttaaatccagcccagggagccagttggggcgtcccaacaaatacgccctcgagaattagcgatgttccccttacaatgaaagtcaattgctgcataataactgggccaaagaatttcgttagtttaaattttaaaaattagtattgcactttgctttcaagtttgggtggcaagtaccgaaggggagagggaagcagcgtttgtgtggaaggaagtttcgttttctgtctaaacatgtgggacctgggtgtctacctctccagtcgagagctctctgcaggctctctcccaacttcctgcacctcctcaccctcaccttacccgtggcgctcgggttttattcctgcccggcgcttctttcccagggcgagtagaggcttctgagtgaccggcccgccagaggcagctgcagagccggcgttccgcagggcagggcagggccgggccgctgggctggtccagtgcgcgcgggttccccctggcctcagccagccgcgggagatgccacttcgggcgacagcggcgagacgccgctgtccgcaactcctgggcgggtaggaccgtctgctgcctctgcggcccttggggcagactccccaggagtcccttcctctctcctcccgcccgggggccgggaccgcgctgtgcccacggagggaactgggcgtctctggcgcactggggctccagctgcatgatcccagctcagaccttaagcctcagtggggtgtaggtgggatgggatgtgtttttaggagatgaggagaccccggttgttgagtcgctccccaaatgcgcagtttcttaactccaggtgacatccgtcttttggaggaacgagtgaaggccgtttaggcgaaagaggggtgggtttcagtatttggatcccttcccccagctctgccaatctcaggtgtgtttacggtggaggtgacagaaggaaggcgcgtcgggggacccaggcctcgcaggtcttcggctgtcaacgaggcaccgcccactgactccgcgcttcgtccctcacagcgtggggctcggcgctgcgccaggcccgggtgcggggcggagctaggctgggactggctgggggccgccccgcccggcgcctgggcctccgcgccggcccccggggaggagttatgataatttccttctcattaaggcgctcgggtcccccggctatcgccaggacacactgttcgggcgcggctttccccgtccgcggagcggtcttgacactcgcggcggcagcatctacgctcgcagagccgccgatgcgtgtccagtgacccggacagcaaggcccgcgcgcggcgggggcggcggcagacgcctggtcaccgtgaccccgattttggatttaccgcttgggggctggggggatcctggatttaactggcgactgttttgggggacgccggacgccatgttgtggaaaataaccgataatgtcaagtacgaagaggactgcgaggtgagctggggctccggggtgcagccccgccccgccgaggacagtccgggaggcaggggccactggaccgaggtcggggacgagggcataggagccctggcctctcggtgggacgggatccacttctccggacaccccttagtccatttctgcggggcccctttcctgtatagggccttttcctaaatagcctcccctcgggaac

SEQ ID NO: 32415 - DNA, 1483 bp, Homo sapiens
  chr20:55204896-55206379
  binary
cgggcgctttcctaagcggcaaacagccctgcttcccgttttctcggaaaagtgccccgtctgcaaccctcagacgtggcttttacgcacgaagtctctgtccaaaggggtcagatgaggctacctgctagcgacaccttggcggacactcctccaaggccggcttgtcacctgccccgctacctcctcggggaagcacgaaaacaaccgaagtttggctttcaaaagaagtgggggctggggagtggtggtgggggtgcccgaggccagatggggccgtaagagctcgcgagtgctccagcctgtcggacaggttgagctagagtttcggagagtgggagggaagaaggaggcggcgagcgggaagaggaagaagacgcaggcagcgctaggcgagctcaggggcgccgggagcgcggagctcgggctacggactcgcgggagttcactgcgcctccgggccctggagggctgcccctgcccgcaggcccgggcgcttccgccaggaggcgacagcgccatgttcctccaggttcccggcgccccgagacccctgggcagatggggacgcatcctttagaaactgagtcgggccgcccaggggcgagggaacgtgcgcgggcaaggctgcccaatttccagggttcttcatgccccctctgcgccccgacgtgcgagaacactgcccttggcagtgcagggcgcccccacttattactcccctcggctgggcccggccagcagggagggccgccctgtgcgcgcgctccctcttcacttcccagggcggcgcagggtggcgggccctgctttccgagcgccgcccgctcggaggtctttgtcccgagggcgtggaagggagggtcccgggggcgggggaggtgcgcatttcccgcgccgcgcactctatccgcgcctgccgcgctgccacctccagcagtccctgcgtcatgggcgggctccacgagatagctctgcaccgggcgtccggctccttcgccccgggctctggctccttcgccccgggctccggccacggacttttctggcccaagacccagggttcggacttggcgcctccaagcgcctcgggcttgggagcagcgcctagaccttcgccgccgggctttgagaactcgttcccccaggtctttcaccagactctcctccctccccgcactctttgcttacaacgaaatcctcggggcgcattgcccccgggtaccttccgaccctgggcaagccccgccgggcggggtgcggttggtcccccggggccctctgcgtagcccggcgatgccggccagttcgcagtagcggggtttcgcactaacggggtctcctgtttttttttttccctccaggatcgccacgacgggagcagcaatgggaatccgcgggtcccccacctctcctccgccgggcagcacctctacagccccgcgccacccctctcccacactggagtcgccgaatatcagcc

SEQ ID NO: 32416 - DNA, 748 bp, Homo sapiens
  chr20:57875361-57876109
  binary
cgcgcgtgtgcgtgtgtgcgcgcgctctcgtggccttccggcagctggcagctgtcccggcccccaccccaccctaccccaccccacccagccgcgccacgccacgccgcccccgcccctcgctgtcctgggtgcgcctcgggccgctgcgctcctggccagctccccccagcgcctgggaggcgacccccagtgcgcccgggttcaaaggcccggcgaggcagttccagcccctctggggggcggggaggcgacgggggtggtgcagaagccagaaaagcccgagccacagccggccagctccgcgcagggatgggcagcgcgctctgaaagtttatgaccgccgcagccaactcctggccggagctggagacgcagcgagcgatcggccggcctcgaacccccacagctggagggcgaggccagctgtacccggccccagtgccctttcgcggccacaagcggccgtcctcctggtccggtgctccggcgcctgatctaggttcatggagccggggctgtggctccttttcgggctcacagtgacctccgccgcaggtaagcgcacggggcggcgcgcctctcctggcgcgagcgcacacaaaaggacccagggcgggggacccgaggcgcggagaagatgtgcgtcgcggggagcaaactcttgcctgggctctgcactcgtgaagacgcctgggggagggctggggagcagaagcggcgcgcaacgactacccgcacgggctcc

SEQ ID NO: 32417 - DNA, 778 bp, Homo sapiens
  chr20:58180008-58180786
  binary
cgcctcggatgctctgattccacgcggctcgctctaacttgcccccgcgccggccgggcccatggccgcgtcggaggacgggagcggctgcctcgtgtcgcggggccgctcgcagagtgaccccagcgtcctcaccgactcctcggccacctcctccgcggacgccggggagaacccaggtaacgggctgggcgggggcggcgggcgggtcggggaggcccgaggcaggtggcgctgagagcaggaccccgcgaggctccgcgccccgcctgcattcggggagccgcggcaggaacccgcgctcggccccgcggttcctatccccagtctcgcagggctggggcgcctcggagccctttgtccataaaagagctgatttcctgggtagagccgggcgctgcagcttcccctcctctccggctggtgagctctgccgtcccctcgaaggaggcttcctttcctcgggtgctgaccggctgggggaagagaggcagacccgtggccgcctccgcccagcgccggttctgggccattccctccctccccactgccgggccccagctccggacgtccccgcttgggcatctgctcctggaaggcagcgctccgcagctgaggccaccgcgctgagggcttccaccaggcgcctgactccagcggggcctggcgcacctgggcgcgctagcccccggacaggtgtgctgggcagagccgccggcagggagacgaagggcgtgcgccaggacagagcccggtttcgtgacagcgtgtggactcc

SEQ ID NO: 32418 - DNA, 1927 bp, Homo sapiens
  chr20:59826892-59828819
  binary
cgacctgggttcaagcccgggtcaggggagttagcaaggagacacctgaaaaataaaaggacagaatggaagtgcacactcccaccgcgggcccgggcgggaagtcggactaagaccgcggcgggaccgccccatccagaaagggtgccccgggtgtgggggcggaaaccccagcgctgtcttcagtctccacacccgcgcctttttcccctggaaaacgagcgtccttggcctcttcggccgcaaccgggcggctccagacgtccaggagggcagaggctgggctggtgcggcgcggggggcgcgggcgcgggctctgcgcctttaaggcccgcgtcggcagagcgagcgcaggggccgggcggcggggcggggcctcggcggggcggccgcggcttcacctgcagctccgagcgcgcggaacagaggcgcgggcggctgcgaggccggcggacgcaccggcccgagggaacgcgccgccggccggacttggcctggctcccggagccggggcggcgagcgcggcgggcgcagcggggctggaggctccgggcaggcgcgggggagcggcggcggcggcggcgatcggagcggcggcggtggtctcggcggcggcggcggcggcggcggcagggagcgggctcccggtgccgggcaccgggcgggcggcggggaagatgaccgcgggcgccggcgtgctccttctgctgctctcgctctccggcgcgctccgggtaagttgccgcctcccgcccccgccgttcggaagccccgggcagcgggaggtcgtccccggatcccgcggggcgctcacacacccggcggggctctcccgggctcccccgccgcgctccccgctgcatccagcccggcgcccgcgctcggcgaagctgcctgcggtcggcaggagcgggaagccgcctgggcagcggggagcggcggagcagggtgggagtggggctcggtggaggacccggggagctccgcctgcaccggacccgccgagcctccctcgaacgcccaaagcccgtagccgctacccggagctcggcttgcctgcatggggcaggcttccactggcggagccggcgcgccctccatcgcccgggagccgcgcgccgcgggagttgccgagcccagccccggccgtggctgaaggcgtggggcgcccggcggctgcgggccagggatccgcgagtgcggggcgcctgcccgacctctcctgcccaaggcctgggggtccgtctagcggcgccgctcagttctgtgggtgccggcaggacccgcgctgcgggtgggcggcggggtaggactgcggggcactctcacccccgagccctcggcggggctggagcctgcgtgtccggcggggccccgggggctgggagctgggccgggcttgggccgggaagccggacgccgggcgggcgcggcgcgggagggcgccccgggagggcgagcgggtctcccgctgcctctgcagagccccgcgggccggattgccagctttgctctgcgcctggcgaggtgcgcggcccgcgggggcagagagcgcggcggctccgggggcgcccctgggcggaggcggaggggcggcgggagttgcaggaaccccctctcgtggccgatcggcctcgctgccttctcccgggcagcgctgttgtaacctcggaaataaacaagtgccagcggcgggaggcccgctccgaggccgcggggcgctgggggacgcgctgggcacacgcttcgggcgggcggaaactttcctgggcgagttgagcctcccaccgggctgcgggtgcgatttggagcttcgtggccgatgaagaaagccgcggtttagagcttttcgtaaggaatgaccctgcgtcccgctctcctccctcggtgctgggggtagaggggcgccctccgcggtgccggcgtc

SEQ ID NO: 32419 - DNA, 331 bp, Homo sapiens; identical to SEQ ID NO: 29011
  chr20:60563069-60563400
  hypo

SEQ ID NO: 32420 - DNA, 1195 bp, Homo sapiens
  chr20:61339538-61340733
  hyper
cgcattcacagaccaggcacgcccatgactgcggccagattttaaaaggaatcaccagaaatgtaatctccagtggtcctagagccccctgggcacccagcttctggcaccctgtggacacccaggagtgggggtcggcccaaccagctgcgcagccgcccagccctgccagcggggagcttcctccctccctgccctccggatacaccctcaccccaactgagcgagcccagggttgggggaggtgcatagttcccttcctagccggtgcgagaaattgcggagaacagggaagagggtggcaggaagggtctggtgcacgatacccgccgcgcccgctcggaatcctggttccctggagcgctcaccccagcccgccctgccccggggagcgcgagggggcgacccgccaggctgcacccgggcggggcggggatggcggcgggggctgcctccctcctccgccgccaccccccactgctgggcgcgccgcgcggccgccggctccgtggagacgcgcagagccgggagggcgcgggcgcggcgggaggtgtgcggggctggggtgcgcggagagcgcgagggaggagattctgagcgagggaggggagcgcgcccgggcagcagtgcgtgcgctcctcccggcgccacaagctcgccccgcgcagcccgagccgggctgggcgctgtcctcgggggcctggggaaccgcgcggtttggagatcggaggcacctggaacccgtggcaagcgccgagccgggagacagcccgaggaaccacgggttctggagctaggagccggaagctgggagtccggaggagagcggagcccggagcccggagcccggggcggcgcgtctgggtctggcgcttcccgactggacggcgcgcccgctggtcttcgccacgcgccctcccctgggctcccgttcatcggtccccgcctgagacgcgcccactcctgcccggacttccagccccggaggcgccggacagagccgcggactccagcgcccaccatgcgcctcaacagctccgcgccgggaaccccgggcacgccggccgccgaccccttccagcgggcgcaggccggactggaggaggcgctgctggccccgggcttcggcaacgcttcgggcaacgcgtcggagcgcgtcctggcggcacccagcagcgagctggacgtgaacacc

SEQ ID NO: 32421 - DNA, 1489 bp, Homo sapiens
  chr20:61637169-61638658
  binary
cgcgagttcccgggcgcagagtccagcgtccggctctcgagctcaatcccgcgccccgacggccttggcgcttcccgctgcgctaaactgtccaccgcgcacaggctggaagcgaagtcgggccccctcctcctggtctgcagggtccctccaggcctttcctgtccgggcagagagacagtcacaggggcgatcggaggacgcgtgcgggagggccgggggcccgcgcggtcacggcttctcgtgacagtgtttgcaaagcgcggagggcgtcccggagaaggcggcgcacttgtcagggcagggccccagggcggcgcctgcggagaaggggcacacagtggcctggccgaagggcgtcaagggcgcggcgtttacgggcgcggccaggccctggccctggttgaggaaggccaccaggcgccgcatctcgtccagggcctgcgcctgcatgaggatatagttcttggcgagcagcagcgtggcgatcttggagagcttgcgcaccgacgggctgtgcgcgtaggggatgacggctcgcagcccgtccagcgcgtcgtttaggtcgtgcatgcgccgccgctcgcgcgcgttgatgctgagccgcagagaccgctgctctcgcggccgccgccgcccgtccgccgcgctccctggcccgcgccgccgccgccgctgctcgaaggcgtcgtcctcgtccccgctctgttcgccgctgctctccgccgcctgagctggggcgcgaggtgcaggcgccgcggggaggtcgccgcccgggcccggagtgccgtagccgcgggccgcttcgggttctcgcgccgccccgtaggcgagacccgcagccgccgccgcgtagccgtggcttagtgccaggtacgcgtcccccgacagcgacttgagctcggccatggccgcgccgcctgggctcgggggctcgccgggtgggcggatgctcatgtgggtgagcagcccccgaggccggcccgagcccgccgctgccgctgccgctgcgatgaggctcccggctctgcgcgtcggtctggcttgcctgcgggtcccagagcctcggcgcccgctgcctcctccgcctcttccttctctcccacctcctctccctcccagccgcgacgcgcagggggcgggctctacctccccctcgcccccgcttcggttttaagccgcggaggcgcccggtgggacctcgctgctgtccaatcaggggggaccgggtgagctcctcttcctggagccgggctccaccagcgccgcaggctcacaggccgggggtgggggctctggaccgaggggcggcgcggggcggcgcggggcggcgcgcgcggtcctggagcgctagtacttgcttctcgactccccggccgccgcctccggccgccccggggattccgccaccaaacgcacgcgtcccaggtgggcacccgcctcggtccgtctttgagtctgaccctagcgcaagagtccctggcgacac

SEQ ID NO: 32422 - DNA, 1485 bp, Homo sapiens
  chr20:61809102-61810587
  binary
cggggttcccgcgcccttctccgcccagggcagcagcgcgcggggcccccgggagccgaagagcaggcgggaactggcggcggcgcgggaggcgcagggagcggaggcggcagcagcggctcccgccgggactggtaattacgctcggggccgggccggggcgagccgggcaagcggcctctctgggtctccccgtctttctctccacgaacagctcgagcgccttctcgcgggcccgctgcgcgcggagaggacgagctcgctgggttgtaaaaagagacgagttttcatctttgagcatcgagattcgttcttttaaccgcattcggtgcgcgctcctgggtcggcacgggcagggcgacggcaggggaaggcagctgcggaggagctcgcgccgcccagtcggagcggttctgcgcccctcggagccccgcgggaggcggccgggtgcgcacgcgctcaccacccccacccccggaatccgtcttcgcgattcccgggcgccccagctccaggaacgcccggagggacgcacttgggggcccactctctgccgcggaaaggggagaagtgtgggctcctccgagtcgggggcggactgggacagcacagtcggctgagcgcagcgcccccgccctgcccgccacgcggcgaagacgcctgagcgttcgcgcccctcgggcgaggaccccacgcaagcccgagccggtcccgaccctggccccgacgctcgccgcccgccccagccctgagggcccctctgcgtgttcacagcggaccttgatttaatgtctatacaattaaggcacgcggtgaatgccaagagaggcgcctccgccgctcctttctcatggaaatggcccgcgagcccgtccggcccagcgcccctcccgcgggaggaaggcgagcccggcccccggcggccattcgcgccgcggacaaatccggcgaacaatgcgcccgcccagagtgcggcccagctgccgggccggggatctggccgcgggacacaaaggggcccgcacgcctctggcgtcgcggggcgggtgggggcggccgagggcggccgaggggggagcctgcggccggggccaggctgcggccagccggcccccggccacgtgtgtccgcagcgcggagcgcccaggcgcccgcagagggcggcggggcccgggagacaaagggagggtccacggggagcggcgggcgggtgcgtggggcggcgggctagggtgcggcgctgtccgcggtgctggcggcggggcggcccccgcgggacgggagggcggccaagtgcggccctcgcccccacagcgggcgccctggacagttgccacggcaacgtgggaggaggtggggcagggtctgaggtcaccgctaagtctgcccttcctcgggccgctgcgccgcggggcggggcggaggcggcgctcgctgtggccccagagcagcccccgcagcccaggaccaggcttgcatggggac

SEQ ID NO: 32423 - DNA, 408 bp, Homo sapiens
  chr20:62463400-62463808
  hyper
cggcggccgcgcgtgggtccctcccgtcgtgttgtctgcgggggacgaatggctccgggagggggcgggaaccagcggcccgggcctcgccccagcccgtgtgcagccccgatccgaacggcctgggacgcgtctccaccactcggcgcccggactctgcgcgtcgcttctcgcctccgccgtcctcagccctcgggcgggtagagtgggaagcgcggccccgcattcctggccggcctgcgcaggggtaaaggccacctcgcttcctctccccgggcgcggcgggaagggaggtgagcctgtggccggcagccgcgcgagggagtcgagcccggcccggccaaccaatggggaggcgcccgggccgtccagcctgcctccctgcgggcccagcgcagcggattcctc

SEQ ID NO: 32424 - DNA, 284 bp, Homo sapiens; identical to SEQ ID NO: 29013
  chr20:62578699-62578983
  hypo

SEQ ID NO: 32425 - DNA, 870 bp, Homo sapiens
  chr20:644483-645353
  binary
cggtcggcgaaggccttgccgcagtgcgcgcagccgaacggcttttcgccggtgtgcgagcgcatgtgaccctgcagcagccagggccgcgagaaggccttgccgcagacgccgcacttgtggcgcaggttgtgcgtgagcaggtgcatggcgagcgcgggcatggacacgtaggccttgccgcacgtcgggcatttgcgcgccagctggctgtccaggctgcggtgcgtctgcttgtggcggctcaggttcgacgacgtggcgtaggtcttgccgcactcggcgcacgcgtgccggtgcccgccgcccgcctgcgcccccgcgcgccccgcgcgccccccggcgccccccgcgtctcccgagccccccgcgtccccgccgcccccgccccgccgccgccgcgagcgcccgtccgagatgaagaaggcgtccatggagtagctgtcggtcactgccgcctcccctcggaagtagcgcgccgacaggctcgactgcgggctttcggggtcgctgtactcctccggcgccgccggcgggtacgcgggctcggccggggccagctccaggcccggcttctggtccgcatcgtagctgctcgggggcaggcggtgcggggcgtaccctggagggggcgagaagtggaggggcggtgagaggaggcgccgaagagggtttcccgctttgagcgcgtcaccctttgcgccttccagcttggcgcccctgtggcagctccgacagtggtggtctccgacctgcacctcagctcttcctgtcaggcagcctgggttcaattccttcctccatcgacggcagtgcaaatagccgccaccccaacccacggagcatggggccagcacggttgtacagagc

SEQ ID NO: 32426 - DNA, 1654 bp, Homo sapiens
  chr20:6747996-6749650
  binary
cgggcccagcggggaaataagaggccagaccctgaccctgcatttgtcctggatttcgcctccagagtccccgcgagggtccggcgcgccagctgatctctcctttgagagcagggagtggaggcgcgagcgccccccttggcggccgcgcgcccccgccctccgccccaccccgccgcggctgcccgggcgcgccgtccacacccctgcgcgcagctcccgcccgctcggggatccccggcgagccgcgccgcgaagggggaggtgttcggccgcggccgggagggagccggcaggcggcgtcccctttaaaagccgcgagcgccgcgccacggcgccgccgccgccgtcgccgccgccggagtcctcgccccgccgcgctgcgcccggctcgcgctgcgctagtcgctccgcttcccacaccccgccggggactggcagccgccgccgcacatctgccgccacagcctccgccggctacccgaacgttctcggggccagcgccgagtggatcaccggggaccgcgaggcacccgcgcgccgcagaccccgcgcgggctggagcacccggcagagcgcgccacagcgccgtggcctctgctgcccgggctgcgccagagccgcggacgggcgcgcagagcgccggggactccggagccgatccctagcgccgcgatgcggagcacctactgcaggagatcgggggcctgggacgcgctggccgaggtgtgatcggaccccaggctagccacaaagggcacttggccccagggctaggagagcgaggggagagcacagccacccgcctcggcggcccgggactcggctcgactcgccggagaatgcgcccgaggacgacggggcgccagagccgcggtgctttcaactggcgagcgcgaatgggggtgcactggagtaaggcagagtgatgcgggggggcaactcgcctggcaccgagatcgccgccgtgcccttccctggacccggcgtcgcccaggatggctgccccgagccatgggccgcggcggagctagcgcggagcgcccgaccctcgacccccgagtcccggagccggccccgcgcggggccacgcgtccctcgggcgctggttcctaaggaggacgacagcaccagcttctcctttctcccttcccttccctgccccgcactcctccccctgctcgctgttgttgtgtgtcagcacttggctggggacttcttgaacttgcagggagaataacttgcgcaccccactttgcgccggtgcctttgccccagcggagcctgcttcgccatctccgagccccaccgcccctccactcctcggccttgcccgacactgagacgctgttcccagcgtgaaaagagagactgcgcggccggcacccgggagaaggaggaggcaaagaaaaggaacggacattcggtccttgcgccaggtcctttgaccagagtttttccatgtggacgctctttcaatggacgtgtccccgcgtgcttcttagacggactgcggtctcctaaaggtagaggacgcgggccagggcccggggtgggtggtgggtgggagggggatttgggcagccactgcggtagagcccttccttacgtccaggccagaagtaaacagacccctctccagtccacgtgcaac

SEQ ID NO: 32427 - DNA, 955 bp, Homo sapiens
  chr20:8112636-8113591
  hyper
cgtaaggctcctggggacccctagcacctctgcaaccagggcacggggcatgctcagagcgaatgcgggaggcaggcgttggctgcaatggggctcgggagccaggaggtgccgctgcgtccccgcttcctggcgcctgacccagcgtgcaaagttgggctgggagccgcggggggaaggaaggacccagcgagcgagggtggcggggaaggggggcgggggggaggaggagggaggagggaaaagagcggttagggggggcgccgggcgtgtgtcactcgctctctccctctgtgtatagaggatgtgctgaatggtgcgctttgaggcggcggcggcggaggagcagaatccgccgcgactggcagcctcggctgaccggctcggcttctcttcgccttccgaggctcctcatccaccgcgggctccagacctcgcgtcccgcccggggcatggccgggcgctgcgcccccgcgcgctctgcctgctgagcggcgccggagggaggtgcggaggccgggaggccggggaggccggcggggagcagagtcgagcgcctccggagcagagaaaggagcccgcgccccgcgccccgcgccccgcgcacggtccccagtccctgccgcgctcgcccgggccgcccggagcccagatgagcccagatggccggggctcaacccggagtgcacgccttgcaactcaagcccgtgtgcgtgtccgacagcctcaagaagggcaccaaattcgtcaagtgggatgatgtaagtattggggcggcccgagtcggggcgctggctcgggcaccgggcagggcgggcgtcgtgggggtggggcaaggggcgcgttatgcaatgggcgcactgggagcgggcaggggcagcctcgggcgcacaggttggcatctgccaaagcggatgtccaagggcagaagctttgcgcgcgctcctgtttcatc

SEQ ID NO: 32428 - DNA, 956 bp, Homo sapiens
  chr20:9048825-9049781
  binary
cgtttagaacactgcaggacgcattgtaggcgctgtatgggtttatgaaaccgaatataaacaaataagcacgtcccccacccagccaacggctttgggggccccgttctggccagtcctgagcccctccacacggcccacggcgggctgcgggtctcccatccgaggagggtgccgcttttctgcccccgctccctgggttctgcgcccagcgccatcccgtgcgcccccgacccttgggcatggggcacatgccgcggggagccgccagggagaccccagaggagcgcgccgcgggccggcttccccggatgccccacccacctcctcttggcgctgcccaccacctgcctcggctgctcggcccccggctcgcgaggctgcgcccccgacccagtcggcgcccactcctcgccctgcgggctcgcggcaactgggcggccggcccggcccctgcccacccccagcccagcccggcgcgccgcactgggcatgctccgtagcctgggcaggttggggctgcgaggcgacagctcgggctctggagccgggaggcgagaacgaggagggaggctcgggggcaggggaggaggaagcggctggccgctgaggggcggcggggcccggagcgggggacgcgcagggcccggcggtgggcgggcgggtcggcgctgccccgtgggctcgctggggagccacggcggagacccccgccctcaactgaggtaaggaccgcgcggcgcggagacggggaggcggggaggccagggagggggtgcggaggcaggcgggagggcgggactggggtgcgccgggagggggcttggcggcggctctttatggcgaggagggggtggtggcgccgcgccgggagcagtaagtgagctgcaccgccaacaagatctctcacacacagacacacacacgcacacgcacacacgggcgcgcacacacac

SEQ ID NO: 32429 - DNA, 751 bp, Homo sapiens
  chr20:9496745-9497496
  hyper
cgcgcatatgcactcaaaatgctctttgtaaaggtaactccgagcccagcgggcagaggggccgcaggctccgcgtgggtgtgggaagtggcggcccctaggtttaagaacccagacgctgcggggacgattgaagcgcacctccccggctcaacaggaaagccacaacatgtccaagggacctgaggcgacttggaggctgagcaaagtgcagtttgtctacgactcctcggagaaaacccacttcaaagacgcagtcagtggtgagtggaggctggcatggctggggagggagcctgggaactcgcagaacaggcttggagagagaattcctcaaggttttggaaaccgtcccacgctttgaggtcccaggccaagtcttccctcggcttgctctttagggcggaagaggcgggagcgcccatgagtcttctgggtctcaggccttgtagatccgccaggaaccgcaggcgtggggacccaaacgtcacccgtggcctgatcctagataagaagtcccttgaaggcctgtcgttccctggtgcttcaaaacgacctcttatgatttggcctttgaaggaccacggagaagggcaaagctgcattttaattttcttccgcatcctggttttgtttcttatgcgctaaaactgcaagggggcagtgcgactttccttttcagtcaggatgtgatggccttcagtgtctttttgcgcatggcagcatggctcgcacgggatattcagtcatc

SEQ ID NO: 32430 - DNA, 874 bp, Homo sapiens
  chr21:28215837-28216711
  hyper
cgtagcaggaaggaccggcagtgactttcaacagtgcttgagagcagaattatggccgcgagagggagtgcaaactgggaggcggggcaaacccgggaaagacctcccaagcaggttctgcgaaggggccccaccgccttcagcccgcctgggtcagccttataagggggaaaggggacagaagtctgcagaacagagatcctagcgtagccgctcagggtaccttcccaggtcaccattgctcctctgccctctccacatccgccctcccgtgagcgcaggatgcacgcacaggcagcggttacaaaactcagcgcaacgttgcaacccgcacaaaaggcgcacacaaaatcattaaaaagaaatacacagagtggaaagaactcgcacaagctccaactcgctaaaggtggaaggagtcaggttacaaactctccctccccggcctaaatgctttgctttagtttgcagaaaatcgtttgtcagtttttttcttggttattcattattcgggcaaatgcaagtatgttttctagctgagttcaccaatccaaacctcaaaccacattcctccactccaggcctccgttctgtccgcggacttatgatcctgcctgccagcaggagtctaccctgaagtcgcgtgggatagataaagtgaggagaggaggatgaatggacagacaaacgagagcaattcttctacctgtgggctgtcctacgccttgcagtgccgggtcctgcggcgaccactgagccccttcgtcctcgccctcagtcccttcgtcctcgtcttcggtctccgctttcccagtcggccggggctcgtcgtccacgaccccgcacgtgccgccgacgtcgccctgccgattcc

SEQ ID NO: 32431 - DNA, 868 bp, Homo sapiens
  chr21:34395008-34395876
  hyper
cgccatttgtttgcagagttctgacttctgaggggtcatgtagcacatgtttggtagccaaacgctgtcattcacgaccaggagcgatggctgcaatgcctttttctttgctttgctttccggtgccgggagccttgcctcccgccgccacccctggtcagctctgcgcaagaacgtcgttctgtttggcagccaggccgagacgcagcctgaatgtgagcaggaactcggagaagggaagggagagaatcagaaagaaggcccgggagggacccgggaagcagtgggaggtctgcgccctggagccccgcgagagcccgccggtttggcacgggctcctcccgggccgcccggcggtccaacaaaggccggccccgacacgcacccggtcttttgtgggagagaaacacaaagaagagggaaaaacacggaggaggccaacagcaccaggacgcgggggccaaccaggaactcccggagccggggcccattagcctctgcaaatgagcactccattccccaggaaggggccccagctgcgcgcgctggtgggaaccgcagtgcctgggacccgcccaggtcgcccaccccgggcgccgggcgcaggacccggacaagtcctggggacgcctccaggacgcaccagggcaagcttgggcaccgggatctaatttctagttattcctgggacggggtggggaggcataggagacacaccgagaggtactcagcatccgattggcaccagggccaagggagcccaggggcgacacagacctccccgacctcccaagctactccggcgacgggaggatgttgagggaagcctgccaggtgaagaaggggccagcagcagcacagagcttcc

SEQ ID NO: 32432 - DNA, 960 bp, Homo sapiens
  chr21:34442159-34443119
  binary
cgtgagttgcagcctgaccagtgcgaccagtcctccttcaacagccccgcttgccttgaaaaggcgcccttactccgctcagggggcctgtcccgcgcggctggcacaggcgctcacaataacctcctaaagcggtgccagccgcacctccgcgcggccccggcacaagcagccaatgaacacgcggctgcgcccggcctcgcgcctccattggctgcgccccgccacccgctgccccgcaggttcccaagccgggtttaaaggggtagggcgcgggccagggccccaccatcgtttccccgcgcgcaggtccgcggggaggggcggcctgccgaccggcccaccccagggcgttcctgaagggcgtcctcggccgcccccaccgcctcccagatgtactatgcggtttcccaggcgcgcgtgaacgcggtccccgggaccatgctgcggccacagcggcccggagacttgcagctcggggcctccctctacgagctggtgggctacaggcagccgccctcctcctcctcctcctccacctcctccacctcctccacttcctcctcctccacgacggcccccctcctccccaaggctgcgcgcgagaagccggaggcgccggccgagcctccaggccccgggcccgggtcaggcgcgcacccgggcggcagcgcccggccggacgccaaggaggagcagcagcagcagctgcggcgcaagatcaacagccgcgagcggaagcgcatgcaggacctgaacctggccatggacgccctgcgcgaggtcatcctgccctactcagcggcgcactgccagggcgcgcccggccgcaagctctccaagatagccacgctgctgctcgcccgcaactacatcctactgctgggcagctcgctgcaggagctgcgccgcgcgctgggcgagggcgccgggcccgccgcgccgcgcctgctgctggcc

SEQ ID NO: 32433 - DNA, 789 bp, Homo sapiens
  chr21:38071764-38072553
  hyper
cgagcaggaacggggctccggttgctgcaggacggtccagcccggaggaggctgcgctccgggcagcggcgggcggcgccgccgggttgctcggagctcaggcccggcggctgcggggaggcgtctcggaaccccgggaggccccccgcacctgcccgcggcccactccgcggactcacctggctcccggctcccccttccccatccccgccgccgcagcccgagcggggctccgcgggcctggagcacggccgggtctaatatgcccggagccgaggcgcgatgaaggagaagtccaagaatgcggccaagaccaggagggagaaggaaaatggcgagttttacgagcttgccaagctgctcccgctgccgtcggccatcacttcgcagctggacaaagcgtccatcatccgcctcaccacgagctacctgaagatgcgcgccgtcttccccgaaggtgaggcctcaggtgggcggccggggacgctggggagcccggcggccccggcccaggcgggaagcgcaagccagcccgcccagaggggttgccgcggcctggcgtccagagctggggcgtctgagggaggttgcgtgagggtcttcggcttcggcgctggcttggggcgaggggccagggccttggcggcccaggcgaccaaaccctctcctggtccagggctgggtgagggcgaattacgaattgttccaggggcaggcagtcccccagcccgcacggccagcgagttctttctggttttgttctttctccctttcctccttccttccttc

SEQ ID NO: 32434 - DNA, 1297 bp, Homo sapiens
  chr21:39288014-39289311
  binary
cggcttctccctcgcctttcggctgacttgggcacaatgtttctcatgagagtggagatgcctgcggcgacggcggagctggggaaggggacgcggggacccgagagcacggaacgcctcgcccaggtggacgccagctcctcgcctgcgagcagctcagcgcaccgcttacctggctgcggacggggtggcttcactcaatcatgatctcctctcttgaaacggagcaagactgaacaattcactacacgacggatggcgagggaaggaaatgcaaaaaagaaaaggaaaagaaaaaaactggaatcagatggtcaaatttcacatcagcaccgagaggctgttaggagactccattctgctcgcggctgctccggctccaggtccggcttcccggcgtccgcgggtctccacccctccgcccgcccagcctctccagccaggtgcggccgtctccggactggctccctctggccgagcgcggagagcagggctgggcgctggggccaagggaggggcggaggggcgcgcgtttgggcagggacgggggagggagactgggtggaatgaagtggggaaagataagagtggcagaagaaaaaaaaaatccccggttaggagaaaagtggtggaccacgcagagagacgtcatgaaatccgcagattcaatgaatgctactcaattccagccgactggctgagccccgctggcagcgcacgaagcgacgcggctccgagataaaagcgagtgcagcgccgcgtgctggggaaaaagccgcacagcgccggcgcggtccgggaggaaggggcgggggcgagcaggacagagccacagacccagagacgcccaccccgccgcccatgccagctagcgtgtcagcgcgtcgaggaccgggcttggtgggggcgggctgggcacaaaccaacgtgcatcccccgccactggaaacgtgggtgctccatgctgggggaatcttttgggtttcggtccccgaccccccagtcccaacctttctcccagtgccactaagtaagttattcccggagaaacgcctggaaagcaggaaagagccgaagctcggggagcagttttgtctgctggttgtaggggttcggcttttagggttttgtgagataaggaaaaagaggctctgggcactgcctcccaccgggctgaaatccgtgagaggcagccccggcgcgggagccggagcctgcaccgcccagagggggcgcagcgagcggccgggacggaggggaggggccctatccctgagctttgcttgcacctggtggc

SEQ ID NO: 32435 - DNA, 630 bp, Homo sapiens
  chr21:40032283-40032913
  binary
cgagccgtccctcccggcgctggacgccccacctgtcccggcgccgtcggaagagccctgcagagtgagcccctagggccaccccgctgccttcctccccgtccccgcagccgctgtagccagcgtgggagccgggcaggtcgcgtggggcgctggacttaccgagaggttagcgccgccgtcgggggagggcgtgtcccgcacgtgtgtgtccgcgcgtgtccgcgcccgcgtgtgccagcgcgcgtgccttggccgtgcgcgccgagccgggtcgcactaactccctcggcgccgacgggctcagcccatggtgtgggcgccgggttcagggaggctccggctcccgccaatcgcggagcagggcggccgccccgacgcgcgacttgcgaacccggagtgcgcgccgggggcggggcagggacgcgtgggcgggaatgcacgcgcgtggccaggtgcgcgtgggtgcgagcgcgcgggagtcttcgagtgcgcgcgtgtccgtgtgcgcgtgggtgtgggtgtgctcgcgtgtccgtgcgcgcgccctcggggccaagagcgcgggccgcgcgggcaggtttggacactacgcgccctgctcgggtttaggacgcggctggcggctcc

SEQ ID NO: 32436 - DNA, 619 bp, Homo sapiens
  chr21:40032971-40033590
  binary
cggaggagcagaggctgggacggccggaggagagagtccggccccagcaggaaaggaacccagcacgcgactactggaggggcgaggagcaagggaaggaccagaggggaggagagggggtcaggggagggaaagtgtgggagggggagccgcgggggtgcgcgctcctcctaactcggggtcgcttttagcgagaagtgatatttttccagcctcattgaaaaccgttgcaaacattgaaaatagtaaaagtgaaaacggttgcgacactaagacgtttataaaatgaccgcggactgccctcgatgctgatgagaactgggacgacgtcgcgcagagcgtccggagggagaggcgcggtgcccgggacctcggtcgtggggaggagccggatacagccgccgggacgcggggatgccgagggcaccgcggcctggtctgaccgacgcacgcggtgacagccgcccttgggagacgacggcgtctgcaaccagcagcctccaaagggtgcagccaggaggctcagcttgtccgcctccggggctcggggctaagccccttccagaagttttcgtttctacgcgaattccgaccgcaaaatccagcttacctgagcgcc

SEQ ID NO: 32437 - DNA, 1404 bp, Homo sapiens
  chr21:42879178-42880582
  hyper
cgagccgggcaggacaggatgaggtggaccgaagcgcccaggtgccccgccttccccccaacccggcacggagcgcaagcggaggagccagaccggctcctcccgggcgggttcctgccggtgccgggtgtccaggaggccccggccctgatcgccgccagcgggtcgccgcaacggggcctgagtcgcgagcagtccctccccgagactgactggccgttcgcacctcgcccgggggccctccagcagcctggcccagcggtccccgccgcgccggccgtatcgttcccggcatctcagcgagtttccagtttctccctacctcagtagggaaccaagaagcagaaggagttcaggtaacactgcgggactgcagagatttcccccaaacaaagaagccaaccgacagcactcccagtcctcctccccaaagagaaaaggcgcaccggtgctcccaggcgggggccgtggagggcaggcggactaggagccagctttggggaccccgggggactctcttccaccaactggctagggactcgcaggaccacctgccccaacctcgcgatgccaagccaacaggggcggcgagggctctcggccgtgcgcaaggggtcccaggcgcccagcactctcccagcaccccgggaggcgccctgcccggctggccccagcgctcgaccctcgggcgcactcacctgccgcgccgcgctcctcacacccgctttcacctccgggcggggcagggggcatcggcgggtcccaggcgcccaggttcccctccccagcccggaccccgagccgggaccctggtaccggcgccgctcacctgccgcgctccaggcggcgctccccgcccctcgccctccgcctccgcctccgcctcctgcttagctcgcgcctactcggcccggcccgccctggctctcgctttaatctcaggaggcggtgtcccagggtccagggcgacacccccaagcgggtcgcgggtcaccctgggcgggcgggggcgggggcggcgggaggaggcgtttcccaagggaagtccgggacgggttccctgcctggctcaaccccggctgcggagggacccataagggactctggggcgcttcccgggcccggccacagcggccaacctgcccctctccggtccgcggcgcagcgctgcccgagggctcgagtttgggttaaggaaggggattctggggagcgctcctggagtcctgggtgagcccccggagctgctacctcacgagctcctgtaggcggccggccccgtcttggcctccggggaacccactgtagcctctgggcaaggacccagggtaggccttggggactgctggcccaagcacgagtggcggggacacagcgccggacgcccaagaccctccccagtcc

SEQ ID NO: 32438 - DNA, 1061 bp, Homo sapiens
  chr21:43186321-43187382
  hyper
cggcgaggaagcgctgggcggacggatcaacaccccgggccccgtgccggaccccactgccaggcccgagccccggagctccaccgcgcaagcgccgggcgcccgggaagcctcgcccgagccaagccgaagcttccgaccgaaataattacagtcttacaccaatttgtgttccaacgtaaattactaagtaagtcgaacggaggctaactccactcacaaagcccagaggcccacatggcaatttttctaagccctgcgcagaccgcagcgccccggtgggtcccgggcgggccggacgcgcctcccaagggcgcgggtccgaggcgcaaggcgagctggagaccccgaaaaccagggccactcggggagtgtcaggaagcacgactgggcgccttaggacgtccgggcagacgcggcccccgaggagccccagaggagccccagaggagccgcctgacccggccccgacgtgcgcgatcgagcccgggctcgccaaagcccccgcgcccctccggcccggacaggccgagtggacattgtcggagccccgcggcctcgccggcaattggtttcccccccgaagctgctccgggggtgagttcgggagagagaggcaggaccccgggaccagagcaccccgaccccgaccccagcccgggccccagccgccccagcgccccgcccgggccgctcacctgtcgtcgacgtgcaggctgggcgagcacttgatggccagccaggtcttccagtggacatggcgcaccttgtacacctgcccgaagccgcccgagcccaccttctcccagcccgtgaactcgcccgcgtcgaaggtgcgcagcagcgccagggcccatggggtcccgccgtcgccctccatcgcgcacgtctagccagcgccgcggcggctgcccaggtgcccaggtgcgcgctccgccctgttacgtcacttccgtaggtcgtcccgcccccaggccccgcccacttacccgccccccgggcgccctctctgccagcgcccggtgactgcggacggatgaatagacgctgcgggtcactgc

SEQ ID NO: 32439 - DNA, 220 bp, Homo sapiens; identical to SEQ ID NO: 29040
  chr21:43290534-43290754
  hypo

SEQ ID NO: 32440 - DNA, 236 bp, Homo sapiens; identical to SEQ ID NO: 29041
  chr21:45628864-45629100
  hypo

SEQ ID NO: 32441 - DNA, 599 bp, Homo sapiens
  chr21:45875419-45876018
  hyper
cgcgggcgcggtcgcaggggcagcggggtggccgccgcgccaggcgtggagctgggtctggcgggctccgagaggcccgggagcggcgcgcagagcagcctccggccgccgccgcgcaggtaaagcccccgcccagccctgggagcgtggattcccacccaccccatgaccatccccccgccgcgagtgctggggtctcgggggtcccaggttccgggggtcctagggccggagggtctaaaggctggaggtcctgggggtccgagcctctcccggccggctccgcgcgcggccccgccgtccacgcccagcgcgggccgcgcgcacagggcttggcttctctgttttctcggtttccttcttcaggcagttgaaagaaaaggcgcggttctgtgcccggtgcgagccgcggctcctttagggctggcagggaagggcttgctgggttatgacagtttttaggggttgtcggagtcagccaggcgttggctgctggagtagcccctggcgcgcgagcgcccgctggtgcccggccacgtgcccagcttgacccgcgctccaggttcgggagaagctgcagccgtcaccgtcctcctggc

SEQ ID NO: 32442 - DNA, 878 bp, Homo sapiens
  chr21:46438215-46439093
  hyper
cgccctcagccgttcgtgcacttggtccaggcgggacccggcaggacccccagcagccccgggaagcgcccggacgacggcacgggggccccagggcgccgcgaaggaagccccccgagggcgaggccgggcgaggccagggggccggggccagaggcggtcgcggcgggggtgggtgtcctggagcaggagcggcagcgggaaacgaagacacgcgcttcttcctactggggggatggctgggaagtaagaccggccgggccgccgagcccgctgcgaggggcttcgcgtggcggccgcacctgagcccgagcgcgcccttgagaggcggcgcccacgggggcagagacccacggtccacgcgcagacccggagaacccgcgatgtcgccgcacgcagcgccgctgtgaaggacggaggcggggcggggccctgggacagggagcgggtgggggcggggtggggggagggcccgtccgggcctgcgcgggaagccctgggttggccttggtgctctgtgatgcccacgctgggtgcaaatgttgctttggtaaaaataacaacaacgaaaggaaaagccaagccggaccagccccacccgcagggccccggccccggccccggccccgcccttggactcttccccgccccacccccacccgtgggcgagcgagcccggaccgtgaagggagggggcggggcgggggcccggaggggcggggaggggccgggtcctcccgcgcggggtcctggaggtcgcggcacgcgctccctgcaggcgaccctggggcgcgtctgtcccaggcccgggcaggacccccgcccgctggttgtctgcgcggctgccccgcgcccgccgcccccggccgctgtcgcgc

SEQ ID NO: 32443 - DNA, 804 bp, Homo sapiens
  chr21:46825149-46825953
  hyper
cgccgaggtgaggccggggctgcgggcaggggttgggggacgccaagatgcggctgcgggggtcgcgggggtcgcggggctcggccgggtcctgcgggggtcgcgggggtcctgcggggtctgacccgtgcctgtcccgcgcaggtgcccctggccatggccgcggcggcggcgcctcctggacgtgctcgcgcccctggtcctgctgctcggggtccgcgcggcctccgcggagccaggtaagacccgggcgggacgggaaggttcgcgccggtgcccgccggcctcgccgccctggctggggtccccgcccggctccctcacccccgccccggccgctctgggttcagccccggccctgcccacgcgcgcaggaggcgccggagccggacggagcggggcggggtggccggagtcccgcccattcattctccccgcggggtccgggccgggaggggtgcgcggtgcgagcggccggagtccccgcgcggggaccgaacctccgcggccggcggggtcgtcggtgccgggagggctcggggcggggccgcggggtctcgggagacgcggcctctgtcgccgtcacggcctcgtccccgcagcgccgggtcccgggactgaccgcgggcggaaggcggcggagcgcggggcgtcgtctccgcgtttccaacctgttgaggctcctcgccgcgggccgggccttgtgcgcctctgtccccgccgccctcaggcctctgtccccgcgcccgccgtggtgtcgggttgcgcggtcccctttgatgccaaccgagcgccgcgcggtcc

SEQ ID NO: 32444 - DNA, 1174 bp, Homo sapiens
  chr21:47063290-47064464
  binary
cgcccactactagtgaccggcccgcccgttcgaggccccgcctcctccccgcccaatgctcggccccgccccgcgcgtcattgggccaggtccccgccccgcccccagccccacccccgcccctttgactggagttggctttttccagagaactttccgggctcggattggccgcgccggttgatgttccgccctttcattggcccgcggcgcccgctttcgcgagcctgcccttgggcgggggcggggccggcggcggcgcgcggcgctagattggttagcggcgcagaggggcgggcccgcgccgcgcgcagcgctcgggctggagcgcctgaagccgcgaccgccgcctcagccgcctcagccgcggtcgccgccgcttcggctgacttaggctccgccgccgcctcctcacccgcctcgccccgaccccgcccgggcctcccggcctctccccgccggcccgcgggctcgccgtccggcgcagggcaggtgagtgagcggtggcgggcggggtcggggtcgggcgcccttgcgggttacggggacccagtccccgacggaggccgagtgacggggcgaccccgggccgcggcaaacttcgcccgagccggggcgggcgggggtcccgggctgggtcgcgccgtccccgaccgccgccggcgcctgcggcggcccggggcagcgaggggactcgcgctccctcaaggtgcggtcgccaggcctggcccgcccgcctccgccccctccccaaattcggaagttgcggcgggaagccgagaacgtctcggatgtgggtcagaaaacgtctggactacttgaggcttcagtttcaaaacggcacaaatttcatctcttgattgagaagagatctggggaacaccccggagcggccgcggcggctggagggcggcggggcggggcgcggggcctcctccccctggacggccgccgggagagcgcggcctcacccctcggtgaccctgcggagagccgcgcgcgggcggtggggcgcgcgcaggtctctcttgttgctcgctgtgttttattttaattttgggggtggttagaacgtgtttcttattgtccccacacgtgttctaattggaagtcttgtttcgtgaaagagtttttttcttttttttgcctggtgatgttttccaattccctccgc

SEQ ID NO: 32445 - DNA, 890 bp, Homo sapiens
  chr21:47517760-47518650
  hyper
cgacgggcggccgggcccgggacgcgaagtccgagcagcagcgggcaggggctggcgggggagctcggcccgggctgcaggggggtccccaccctctccacctcctccagcctcccgccctcgagggtccccgcttccctcccatccccctcccgtgcccccggccccctcctcccatccgcggggccgcagcgcttcctggcggcggggcgggtcaggccggcggggcggggtataaagggggcggcgccggccgcggttccctccctgctgcttactcggcgcccgcgcctcgggccgtcgggagcggagcctcctcgggaccaggtgagcgcctcccggaccccgcaccctggaagccgctcggcccgcggggggtgaccccgagtcctgggaaggcggcggcggcggctccgtccctcgggtccccgggaagggggactccagccccagggacggcggggggctcggcgggttcggggctcctcctcgcggggctggggccgcgcctgcccctgtggctccgcgtctctgggtccgaccctcgggcgcgcgacttggggccacctccccgcggcctcctctggggcggagccggcctgggcggggtgggggggtccctgtctgcgcccgagctcggtgctgggacccccgctcccgagacgaccccggcaccgcacgccccgccaggccccgcgtctgcgagcggttcgggtccggctccggcccgcggggaagacgccccggctggctgggacctccgggggcgcagggcctctccccgggccggacggaaggggcggcggggcggggggaggaggggctttcggtgcccgagggcgggactgggcggggaggggacgcgggtggccccgacgccccatcgctgc

SEQ ID NO: 32446 - DNA, 826 bp, Homo sapiens
  chr22:17082732-17083558
  hyper
cgccgcccgcccgcccgctccccgcccggcccctgcgcgcgtgcgtgtcctgctcgctccatgttgccgcctctcccggtacctgctgctgctcccggggcttcgggaaatgcgagagtctgagccggggaggaggaacccgagcagcggcggcggcggccgcggcggcgggagccccccaagaggaggaccgggatccatgtgtctttcctggtgactaggatgtcgtcggaggagaacaagtgcgtggagcagccgcagccaccaccccccgaggagcctggagccccggccccgagccccccagccgcagacaaaagacctcggggccggcctcgcaaggcgcttcccctttccagagagccagaaagaagtaagttgagtgcgagggagccaggccgggagccagcggcggcgccgggccggagctgccaccgggcgcccgccccgcggcctccacgccttggcgccccccggcgggatgggggcggggcgggcccgcgggcggcggcagctcccggccccggccccacgcccctcggtagccgcccgcgcccggcctcccccgctccgcgccgcccgcccgggctcccgtcggcgcccggcttcgcacactttacttttcagtcgggccttttcagtgggtcttctccgcgactcttcttttggagaaatttctcgtagccgcgtcttggcctagctggatcattgagaaaacaagcccggagcgcgcgcaggtagtccccggacggactccgagcgaaccgccgagccgtgggcgctcgggaaactcggagctgtcaaaacgcccgggccaggtggtctc

SEQ ID NO: 32447 - DNA, 1541 bp, Homo sapiens
  chr22:25348202-25349743
  binary
cgcgaggaggcgccagcaccgcgcacagaccttgcccgcccccgggccggcaccagcagcccaggcaagtcagtgggcccacatttatggagcgcctcctgaaatcctgggttgcattaggctctcggggtcgccggctgggcagcgggtcggtgccggtggcgggggatcctggctggtgactggggaacatccagggaacgcgggagggtacccggagcaaagttcccaattggacagagcggggtcgggcctcgaggggcgggagcgcttccggcaggggtgtccaagcgagtcgtgacctctgacccgccggagaggtcccaggcccaggcgccactgcggactcgggtcctgcctgctctgctcccctccgcgcaggcgcggccggcggcagttcccatggtgacgggggcgcgtccccgctcgaggccccgcccccagcaggctaggctgcgcggggctgcgggctcccagggcaggtgccgcgggctgcgggcaggtggcggcgcggcgcgggctggcggtggctccacggtaggttgcgcagcggctgcgggcagtgggggccggctggccgcctcctgtccccggccgacgaggtagctgggggtgacggcggctggcgagggccgccaagtttctgcccggccgaggccccgggagaaaagttggcaaagttggccggggaagaggcggggagccggaggatttccccagactccgggtctgcagggagggaggatcccggtttgggagccggggaatccgtctcccgagacttgagagtggatcccgcgggaagatcccgcacagggcaaccaatggatcacgtgccacctggttggcgacttgggagtcgatccctggaggggatcgggcgctggaggcctggggtcccactggatccccagtcaggggtgacggcgaagggtgattcgagactgggagcgagaggatcaatctcctcccatgccagcctgagccttgggaatggattcagagagatcccgtggctaggagctgagggatcgctggagatctgggttactcagcctggagctgctagggtctggacatttgtgcgggttggaggccccggaggtggaagtgggaagcaagggcggcgagcgagacggaaccctggtcgaggggagcccggaggacagcgcggtggttcggggggcgtgagaggggcggcgcgcggggcccctcggacgcggaggctccggacacgtcctctcggcctggcctgcgccccccctccgctcgtcttcccagggcggaggcgccctgatgggattaagcctcagtccccctgttaccaggcaggcccgcgtggtccccgccccgatggcggcgcggcccacccgggctcacgggtggggccctcgggatgggaagcggctcgttgacccccacccgagcctgaccttttcacaccctgctggcacaaactcgcctgggagtggggacgccgcgccttaaaaccctgctgtttgtccagtcccggagcaggcgtgtgacctccaccgcgcgac

SEQ ID NO: 32448 - DNA, 984 bp, Homo sapiens
  chr22:28197306-28198290
  binary
cggcagcgggtgcgctgcgttcggcgcgcagcttcgcggccacgtccgccgcctgccgcttctgttctccgccgttgggtgtctgagttcgccggagtctccgcgcaccgttgcaggcgcgggagggcagcgagacgaggggttgggtcgctccaaggctccggttccctgcctccgcgctgaggtgcttcgcgagtccctctcggacctgagggaggggggcgtacgcgggtcggggggccacgccgggcgagcaggctaaggcgttcccgctgcgctctcagagcccggaatggggggaggggggcgcgggggcagctctggggggtctgcgcacccctctcccgactagcgggggggctctgcgtggggcgttccgagggtctcggctcccctctctgtgtctgcctctcgcccagcgccgggagaagcagcaacaagttttgcatttcagcaatcaatttcagccattacatttgcaccaatcagcgccgcccaagttccgggctcggggcggggctcgctcttaaggtggtccggggtcctggctgccgaagcccccgccacgaacccgcactaccccagctctggggtcccctgcgcccgcctctcctcggggtccggcgtcagtgcgctgggggcgcgccccggcctccgggcgcatcgagctggagagggtgcaggcggaggagaatggcgggagcttggctttgttcacccccttcccattcacactgttcccaactccccacccccaactggagcgagacccaccgggtgggcagggggcggggaggtgggcggtgagcggtacggggcgctcagacaatgaggtcgccaggcaaagaccctagactcgccacggaaagtcgctaagtgtctactgcacttcggctccggggtgaacactccgttctccgctagcggcgcccaagttagccggccctgggattttcttggagggtaaagcagacggggaacctc

SEQ ID NO: 32449 - DNA, 703 bp, Homo sapiens
  chr22:31198444-31199147
  binary
cgtggaccatccgagggcccctcccctgctgggtccaggcaaagggccggccctctccagcctcgattggggcgcgatagcgcccttagtgtcgtgtcgggttccaggccacgctcgggcattttaagaggctgaggtgcgccttccgctgcccgcctgcgtcccgccacggagagctcgcctttatctagccctctgggcgagagaagaaggctaatcccagcctgggacaaggctggctgaggcgtgccggatcctccggggaccgatcggtggcctcgcgcggctctcatcgctctccgagcagtgctccagggggcggagggagcctcctcgggcggtggggaggaggctggaggaatgaggacgcagcacggcgcgcccttgcagcgctcaggctgacgggcgggcgggcggagcgggcgcacggctcctctaggtccggctgctctctgagctcgcgggctggacgctgtccgcggtgctgaagcggcgcccgcggcagggaggcggacccggagccgccgggcagcacacacccaatcccgggaccgccctcctcccaggctcggagaggcggtggcagccggcactgcacccagatggactgagagcgcggcggcgggaaggcggcggcggcggcggcagcagcagcagctgcaagagccctcgcagcctcggggcaggacccacgtccacaccc

SEQ ID NO: 32450 - DNA, 616 bp, Homo sapiens
  chr22:32571858-32572474
  binary
cgacttggggagggcggacggcaggaaacgcgggaggcgaaggcgaggctgctcagcggcggctcgggatgcctccagcaacggggactagccctgcgcgcccggggagggggaggcgctggcgctgtgacggccgcggggagggccaccttcccagcacacgcacacatacgcccccggccctcagccgctccggctgccgctgcccgccgacagctgacctccaggcaccgcagcgcccgggaacagccatctgggaaccgcgaccgcgcactgacacacgcagtggccgccgccgccgccgctccgccaagcgctgcctgtagcacctgcacggtggtttggaggggaaggtctgggcaggcgaacgttccacgagggcgtcccagaggcatctgcagcctccgctctcctgttctgctctggcgcccaccagcccctgaccgagtccagagggtcaccgaagacgccccccagtgctcgaacgcccgttggtgccaggctgcccggccctgagggccttgcctgaggacacccctttcctcccctccggaaggggcgaccgccctttgccaaccccaggcaaagctggggccccaaccttatgtgcgctacc

SEQ ID NO: 32451 - DNA, 992 bp, Homo sapiens
  chr22:33197380-33198372
  hyper
cgtggggccagggcgcagacgagaaggggcacgagggctccgctccgaggacccagcggcaagcaccggtcccgggcgcgccccagcccacccactcgcgtgcccacggcggcattattccctataaggatctgaacgatccgggggcggccccgccccgttaccccttgcccccggccccgccccctttttggagggccgatgaggtaatgcggctctgccattggtctgagggggcgggccccaacagcccgaggcggggtccccgggggcccagcgctatatcactcggccgcccaggcagcggcgcagagcgggcagcaggcaggcggcgggcgctcagacggcttctcctcctcctcttgctcctccagctcctgctccttcgccgggaggccgcccgccgagtcctgcgccagcgccgaggcagcctcgctgcgccccatcccgtcccgccgggcactcggagggcagcgcgccggaggccaaggttgccccgcacggcccggcgggcgagcgagctcgggctgcagcagccccgccggcggcgcgcacggcaactttggagaggcgagcagcagccccggcagcggcggcagcagcggcaatgaccccttggctcgggctcatcgtgctcctgggcagctggagcctgggggactggggcgccgaggcgtgcacatgctcgcccagccacccccaggacgccttctgcaactccgacatcggtaagcgctcctggtgccccgcccgagccccacgctgcagccaggactgcagcgctgcttagggaggcagggcgagccccactcctttcctctgccccaggagaggggcagacggggttggggcggagtggagaaactcgatgtccttgggcgggggcgctggcatagctgagaggggaagatgccctgcagaggaaactcacagtggctgagggagcccctggccgcctttgctttcctaacttaggtcgtgaggttcctacc

SEQ ID NO: 32452 - DNA, 828 bp, Homo sapiens
  chr22:39953450-39954278
  hyper
cgccgccgtcagtctgtctgtcgcctccacgcctcccccctccagcgtcccgcgcctgcagctttccccgaagacatttggtgtcagtataaggacggcttttcctcgcacgcagcgcggctcggtctcgccgccgccgcacgtccccgcaccgccaggcgctcgggctcctccgcagcccccgccgcgcgcagaccccgcgcttcgagccctgagccggaggcgcgagcagagccgaggcaggcgagagaccggcctcagccccgcgctccccgccgcgctggtctctcccgggcacttgccccgctgctcggtccccgcagcacccgcgcccccgccccggcccggagcgccgcgctcccgcccgccgcccgcccagagcctcgccgtccctccagcccgccgcctcctcctcctcccgccatggcccgggcccccgggcccgccgccccccgcccgccgccccccgcgccccgggggctcagctgatcctgaattggcggggggtcggctggcggggctgggggtccctctcgatcgccggcttcgggtggggacgcgttgtccccgcgtctctaacctggacgaccccccgcggccgggccacgtccatgccaaggtaggtgggggctgggtgggtggggggaaggaagggagggcttcgcttcgatgccagtttcttggcgcgttggcttctctcttcactggggcatttatttatttatttctggggatcgatcctccccacccgcgcgtacccgtcaggtgagccccccatcccgcgccttcggggccatgccttgggaggaaggacaggaaactttgacc

SEQ ID NO: 32453 - DNA, 192 bp, Homo sapiens; identical to SEQ ID NO: 29052
  chr22:40812801-40812993
  hypo

SEQ ID NO: 32454 - DNA, 578 bp, Homo sapiens
  chr22:44257996-44258574
  hyper
cggcccagcagaagccccgggcgcgggcgcggcgtctacgcggccgcgctgcagggctggggcatggcgtggcgggcgcggtcggcgcggggctcaccggacttggggtaggtgacgatccacacgtcgctgggccgcaccgggaagttggcgatctcctccatcttcccgcggcagaagggcggcagccgcacgccatggaactcgaagtacttgctctcgaactcccccggggtgctgggggtctcggcctcgctctccgccatgccgccgccgtcgccgtcgccgccgccgcctcccggctcgcagcccgcacgcgcccgcgcccgcgcccgcgcccgcgccccgcacacgctcgcgccccaccggcgcgcggcggcagctccgcaggcgtgacgtcatggcgccgccgacgcgcggcggaggctccgcgggtatgacgtcatggcgccgcccggcacgcggccgcggcgctgcacgggcgtgacgtcatggcgccgcggagccgcgtcctccccgccccgcccccggccggggtcacccacccgctgccggggctgacagagaccctggcccgc

SEQ ID NO: 32455 - DNA, 966 bp, Homo sapiens
  chr22:44726971-44727937
  hyper
cgcgtcccggcgcggtgcgccccgaactgctctcttcggaacccagccccttcctctccaaggttcagcgaccccgaccttggtgagcgccggcgcggaccccagtgccgaacaccggctgtcccgcacggttcctgcccccggacccttccccggtcgtccccagcccctttctaaagagccccggacccccgtcatatgccccttacccgcctctcccaaagcgcccacccttcaccccttctccggagccccgcgccgcagaccccgccccccactcgcccagaccctcctccgccaggagctccgccccggcccctttccccgccgctctcggaccccggcccaggcgcgcccctcccccgcgcggcccccgccctgcccgccccggggctcagctcacctcgtgcccgccgcccgctcgttcctcgcttcgtagccgggagccggcgcccgcgggagccgcctgctggggtgcgggggctgcccacgcccccgcgatgcccctgccgccgccgcaacagttgtccgggttctgggggctgcggggacgcggggactccgggctccctgatcggcgctcggaaggcgcccgctcctaggcgcgccgggcgcggcgcggagctggggccggggccggggctggggctggggccggggctgcagctccggctcggcgtccggctcggggtccggctgggggtccggcggccggccgcatgccccgtcgccgcccgcggctactcggcggcccgcgccgcccggccgcccgccggccccgagccccgcgccgcgcccgccgccgccgccgccgcgctcatgctcgccgggccccgcgctcgccgccgccgccgccgccgccgccgctgcccacttcactctttggcgctcgctccgcgccgcgccctctgctgccccctcgcccgggctcgccgagctcccgccgccctgcccgccgcgtcctgc

SEQ ID NO: 32456 - DNA, 649 bp, Homo sapiens; identical to SEQ ID NO: 29056
  chr22:44893737-44894386
  hyper

SEQ ID NO: 32457 - DNA, 924 bp, Homo sapiens
  chr22:45064141-45065065
  binary
cgtcttcccctccctccccgctccgcccgcggctggaccccgatccccgggacagggactgagtctgaccgtctgatttgtcctcccggcttctagcgccccgctcaggtcggggcttggggagggggcgctctctggacgtttgcggcccgccgaggggtggggtgagggcgtcacgggccgatccgggccgccgggtgacccgggacgccccctgccccggcgggcgccgcccacagcctgcgcagtgctcaggggcggaggccgggagggggcccaagcgccagccccccagctccggcggacccgggtgggcgtgcccgcggacccgcttgccgcacttaggcgagtctcccctgcagcgccccgagtccctgggggctgcggcggctgcgggcgcccccgcgcgggcccgaggggcgggacgcggcggagcggggcggggcggggcctccgcggccccctcccccggccccgggctccggctccggctccggctctggctctgcgcggtggcagcggcggcggcggcgcggggaccgaggtgagcggcggctacgggtccggaggcccggccggagaggggaccgggtggctggggttggggggcggcacgcgcgaccctgcggaagggggggccccggggcggtgccggcggagcggcgcgcgcgtgtgtgtgcgcgcgtaggtgcgcgcgcgcgcgacgccgactgcggggccctagggtggggtaggggtcggacggaatctgcggggcaggggcggcccccttgggtgaaggtccagcctctcccaccccagcctcccgggacctcccgagctcgttctctcccagcctctctcgctcgccccccgccccgcccccttccctctatctctgagtttgtccgcgtctctgtgggtgggtctccgtccagccgcccc

SEQ ID NO: 32458 - DNA, 1220 bp, Homo sapiens
  chr22:45097777-45098997
  binary
cgtgtgggcgcgaccgcagtgctgggcggggggcgggcgcttgggcttgggccctgcgtcctgtgcgtgttggtttcctgtgggcacgtggggccctcggaagaggggaggagggtgagcacgtcctcagagggcagacccagcgaggcgtcgtggcagctgcggccgcggagacgccggctccgcctcttgcacacgccccctcgcctgaggccccgccccgcccgcgatgcccccgcccccttccccgccccgccccccggggcgccgagacccgcccctgggcccgcccccgggtccgcccccggcctccgtttgcgccgggtctgtgctggccgcgcgcctggcgctccacgctgagcctctccgtgcaatgattaacccggcggggcggccggcgcgggacccgagacggaggcgcggggccggggcgggaccccgcaggaccgctcggcttcctgctctcgccggagtttccgcgtagagggcgcatcgccggcccggggcccttggtgcggcgtggcgcagggcgcggcgtggggcgcgcgtgggcgcggcgcaggcggcccgggtcaccatgaggactctccgcaggttgaagttcatgagttcgcccagcctcagtgacctgggcaagagagagccggccgccgccgcggacgagcggggcacgcagcagcgccgggcctgcgccaacgccacctggaacaggtaaggccgcgccctcccggccacccggaggccctggagccgggggaggggacccctgagccgtccgcgggctaggggccgccccgagccaggaacgctgccgaaggcggcgcggcgcttcacagtttgcaaagaacttgccccgccggagtggtgcgggcctggaggaaagttcagtgcagcgtggttccagaacccagggaagggagcgaggcccgccagcgcccggggctggcccagaagcgcccggcgggtgggcggcggggtgggccgggaagccgcgtgcccgcctcctacccggggtctttccacgtctccactgcggtgctcgtgacaacctgggaggctaacggagcaggaagtatttttcccattttgcggctgagcacgggagcctcggggctcagtgggtgggtcgcgcaggcttcctgtgtctctttaagctcccttcggctttcccttgagaggccccctgtcctccagctgtcagcagggggtgcggcagctgc

SEQ ID NO: 32459 - DNA, 812 bp, Homo sapiens
  chr22:45148213-45149025
  hyper
cgtgcgggacggggacgcggcccagccgggaatcggggtgcccagggtgcgatgtgcgaggggctcctgagcgcgtgtgctccgcccgaccccgccctgtccccccgacacacaggtggacccagggtcagctcgtgcacctgggaaatggctcccgccgggtagcaggggcggaggggcggggctgggcggaggggcgggggggcggggcctgcccgggagccacgtccggggaggggccaggtgagcggcagacccggcacgcaggtgggggccggcggggtccgtggccaggtaaggcgggcggcggcgggagggagcgcgcagggaggaggccgtgctcggggtgggggggtgcgccgcgggggctcccagggcgtgtacggggacaaggggccgctggccgggtagggacgcccaggcgggcgcgacgccacgtgcggccggggggagaccctccggccggcgcgcagcctccgggtcccctgtgggttctagactccctctcccttcacctcctttctttcccgcccccccacactcccctcctctgctttttcccctgtcctgttccttctcaccccgcaccgccttccccgccctcgcctctctcagcctgcgttttggtctggtctggccggacggtgtcagctcaaatgttccttttttgcttccgtcctggggtctcaggttaggtcgggtcagcgcctgggggaggcacctcccccgcccccacacaccccaaacctacaaggtgggtgaggtcattcccgtttcatagatgagaaaacggaggccggggcaggtgctgc

SEQ ID NO: 32460 - DNA, 880 bp, Homo sapiens
  chr22:45402803-45403683
  hyper
cggaaaagggtcttccgacccctccccctccaaaaatggcatcaaagcaatcaaaatggtaatgcagggcctgggtcccctccccccgccaactccccgacttcgccggggccgcgcgccgggcccccctccggcgggaatggaagcttccactcccggacgggggcgcgcggccgggggcgggggggccgcggcaccaactgaaaagggttagcgcatttgtcccaagccttcggtccagcccggcggcccagaccaggcgcgggccgcggcactgccatcttcctttcagcaagcccggccccccccaaaacccgccactcgcgcacgccccctcccatcactttttaactttaaagactcgacacgaacgcccggcctccgaattctctctcgccagggtcaccggcagccgccccaacctcgtccacgtctctcccctacgccagaaaatcccccgggggagggggcgtccgatccggcggcccgggctggggtgggagcgcgggggcaggcccgggcgggggcgcgcgggggcgggcccggagctgtccaagtttggcgctggcggctgcggccggcattccgaaggaaacgcgatcgatggccgggggcgcggcgcgggcgggggcggggcgcgaaggagggagggagggggcagcggagggagggaggggcgccgccgcccccgtgcccgccacagcggtgcccccagcacgccattggctgcgccgctcaaagttctcggctcggggctgcgcggggaaggggcgggtgtgcgagcgcggggaaggggcgggtgtgcgagtgcggggagggggcgcggcgggggaggggcagcggaggaggggcgggagccagggggcgggggcgcgcggcc

SEQ ID NO: 32461 - DNA, 879 bp, Homo sapiens
  chr22:45898349-45899228
  hyper
cgagggtgcggggttggcggtaaggcctgccccagtgccccccagcagccgggcctccgactgcaggcccgggtccccgctcctccgcgcggagtcgggcggggataacctttgatcccgagccctcccctcgagagggggtggggggaggaggggatcgggtttcacggagtgttgggggataggactgggggcatccggcccgaaggcgccccctctgtgccccctccggggaagtctgggatccaggccctcgcccccagccgtgggcgcgcgcccctcgcagccggggtccggggagggagggtcccggcagggggcgccggggagggaggaccaggagacccgcggccccgcctccgccgcgccctcctcccgggcgggataattgaacggcgcggccctggcccagcgttggctgccgaggctcggccggagcgtggagcccgcgccgctgccccaggaccgcgcccgcgcctttgtccgccgccgcccaccgcccgtcgcccgccgcccatggagcgcgccgcgccgtcgcgccgggtcccgcttccgctgctgctgctcggcggccttgcgctgctggcggccggaggtaggggcgtcccgggtccgccgccccagcttagggtcccgaccccctcggcctcgcgctccctgcgagtttcggaaccacggggactcggagtccgtgcgttgccctgcgcggcgcccccggactgtcagcgccgaggcctcggcgacgcccccctcccccacggccagctccggtcctcatctcctccccggcctggggacttgtttcaaaaccggattcccccacccctcaaacacaccgtcctaccccagtcctagcaaatccagccggctccgggggcc

SEQ ID NO: 32462 - DNA, 971 bp, Homo sapiens
  chr22:46262409-46263380
  hyper
cgggtgctggggaggtggagacagcgcgctcccgagccctggaccactccctctgccccgcgcggggccgagctccacggcacgtgctttggcttggaccgggaaggcccgcagtcccacagtgcccggggaggacggtccgcgccttccacgacttcgcgccgcccgcgtggctgcagcgccgtggcccggggacgcgaggccacagcccgggagcgaggagcgcgggaggaccggcctgcctgtgcccggcaaagggggcccttccgaggcgggctcccttccccgccgctcccgtaagcgcgggagccagaggaccccagacccgccgcggcccaccccaagccccgatcaagtcctgcagcgcgggagggacccctgcaggcgcggggccagacgggcgacaaagcggcggactgcgagggccctgaggaagccggcggcgcggggtcaggagcaacctgctattcgtagggtcaggagcccacgcgtccccactgcggagggcggggtcgcagccaggcctccccgtttctagctgtgcggcctggggcgaggtgcttgacctctcggggcctcagtttccttctctatgaagcggagctgatcggccgcgtcccggggctgctgtgacagtccaaggcgagaacagcagctccgcgccgcccctggtgctggagaaccgctggggcctcgggagagggcgcggcgcggcggagcggccctggcagccggagggcgcgtgtggccagggccgatcctgcactgccctctgcgggatggcccggcccagtcctcgacccccagcacctccgccgcccggcctggccaccacctccgctccacgcgcccaggccgctcccgtcgcgggtctcggagattctcccgcgcccaggggtgtcccgcagccccgggcctcagcacccagcgctcccttctccacgacgacaatgaggcggaccctccccagc

SEQ ID NO: 32463 - DNA, 1492 bp, Homo sapiens
  chr22:48970857-48972349
  binary
cgttttcagaagccgcgggaccagcctcctccgagccctcccagccgctggtcgggcccggctggggcggtacctgggcctggggtttccctgtctctcctggggccttgggtgcgagggaggctgggcgccactcgaggccccgcgtccggtctcccgcgccagcagggccggctctgcagtgaggcccctgcgcacctaggtggagcccgacccgcagttttcggctgggccggccccacctgacccgccggcgcgccaggcgggggcgctgcagggcggggtccccggggtccctcgcggcccagtgcgcatccgcggctccgcggccgggaggagcgcagacggcggcgggcgcgggccggagtccgaggctgcgcgggcccggccacctgggccggcagcgactgcgccgcgctccccctcccgccgcctcccccgaggagccggcgccgagccgagcgggcgggcgcgcgcctccaggccggagcagcggcgtcccgcgggcggcgaggcgcgcagcgtcgccggccccacctgtaggcgcggcagccaccggcaccggcaccgacaccggcagcggcggcccagcgtgggcagcccaggggcgcggtgggcccggacctagtcccggccgcggcggcggaggcgcgggctgctgggagcgcagaggccggcaccgtccggtggggaccggcccgccagccccgggccgcgcaagttcgatcgccgcgggctcggccgggccgcgcggaccccggcggcggcgatggtgcggcagccccgcgcccggcgcgcagccccggccccgagcctggcccgccgcggcggcggtggcggcggcggcgcggcggccccctgagccccgggccggagcgagcgcgggcggcggaggaggcggcggcggcggaggaagaggaggaggaggaaggcgacgccgagcagcgggcggtgggggccgacaggcggaggagggggccggggccgcgccggaccccccccccccccgcgccgcccggccgttgcgcaatccgcggcccgccgtccgggccctgctggcggtgcggctccgggggcggcggcggggctgattcatggggccgcggcggccgccccccggcgccccgcagccagcgatggtggccgagtggtcggagcggcggccgccgcggcccgagactttctgctaacctccccgcccccgcccgccccctccgcggcgcccccctccccccgcccgctcccctcccccctgcccagaaagacacaaatcgcctcccggagtggcgcctccagtcgcggcggagcgcggcgttggcggcggatggagggcgcgagcgggcggccgcggaggctgcacccggcggggcgctgatgcggcgcctggaccttcgctgcgcgacttcgggggcgtcggccgagttgggactccgcgatgcagctcctgaaggcgctctgggcactggcaggggccgcgctctgctgcttcctc

SEQ ID NO: 32464 - DNA, 683 bp, Homo sapiens
  chr22:50496696-50497379
  binary
cgtggcctcgggctgtgcagcggcggcggccccggggcgtggggctgcgcgggcggcggggggcgcgggggcgcggggagctgcggcgtgcggggggcgcgggccccgacgggcagcagtcatcagcgcttgggctgggcccgggttggggtccgggtcccgggctgctgtcggagcaggcgcggctgcggggtcggcggcgcgggacggtgcgcgccatggtgtccgccgggggagggcccgagtgtagccccgggtcacgcgctgcggccccgcgcccccctgtggaggtcacactccatcccccaccaggtcacaaagacccgcgggtcacatcctgcccctccccctcgggccccccaggcccgccaggccttctcgccctccccggggccctcatgccgccctctgtccctgggcccttccccgacgcgaggctggagcggcggggtgaggaggccgcgggcgctgggctcctcccgggctgcgcgctgcgggtcctggcggatgggggcgacggggtgaccgtatcagcgccccccgtcctgcggcggaacttgggagggccttggtatccgcagaaccactcgtggggtcccacgccgctgccccccggggggttctgagcccacccaggtccacacggcccctgtcgtttccccccgcaccccgcggatcacccc

SEQ ID NO: 32465 - DNA, 1775 bp, Homo sapiens
  chr3:110789469-110791244
  hyper
cgcggaaccaatgtggcagtggctccaaggtcaagctgccggtactgtgcgaggcgggaggatggagagggcagggcggagagccacctgggatgagcgagggtcatggtggaccacagacgctcttcttatacgggcaaatgtttaatacttcccgaggtcgcctctctgccatcaaacgaaaacaggcaagaaaataaaactacacatacgaacatgcaaaggaaacaaaaccaaagaaaaacaccaacgcactcgttgggggaaatccatggcctcctgttgccagtcgcccggcgcggaaagtggacagcccagcggccagtgagaagcaagagcaagaaagcaaaccttctgaagacccctctcctcgcccagctccgccgaccattctaccaagctgccctcccagaaaaaagagcaggaaaaatgcctgtgcaaacgtgccttggcgagcggggaataagtgggctgggaagaagggaaggattcggagagcacagctgtcccggggaacaggaaggaggagaaagtctctccctcccttcagtgccccgcgccccagcgaggaggaagattactagtccagcaggctgcgtccagcttcctacacaggaacctttagcatgggcaacggaagggcagccccctcctgccttcccctccccaccccaccccctcgtcccaggtccccgccacagggagagcgccgcccgggagaggagaaggccgagcgtgattgtcccgcagccctcgcctcagtcggcgccggggcccccgtggacccgcgaggggtggagtgggcgagaccattggaaaggcagggaaggggggaaaccaggcaggaacgaggggcggggccgactaacctattccagattttcctgtcccttttaaatctctgctgtgggagaaaccccgttatcaaagtggatgaaaagaatatttttttttgaaaggggaggagcatgtgtaggagggcggggtgggaggagacagggcttgcgcccggggatcagacgggaggtggagttgcgcggggagggcgggcgagtcgggcgcccgctctgagagtcggtttcttttccccctcttgcgtggggcggggtggtgcgttccgagttcccaggagttcgacgcgggcgggtgccgaggggaggggagtggcggcggcggcgggcggctcccgcttcagcctcggcagtggcgtcggcgacggcggtgtcgaggcagccgccagcgttcggccaagtgtcagccggcagcgacggcgctagagctgggagctggggacgcgcgcgccggaccttccacagcctccgcccagagcctgaggcgccggggccgggggagccggggggcgggcgggcgagcgggccggggggagggtgggggatggcgcggaccctgcggccgtccccgctgtgtcctggaggcggcaaagcacaactttcctccgcttctctcctcggagccgggctcctgctgcagcccccgacgccacctccgctgctgctgctgctcttcccgctgctgctcttctccaggctctgtggtaggtgaacctcggcggccggcgtgggctgagggagccgccactgagggtgcgggcgccgcggccggctctgccagccgttctctggagcagcgaggcggttggttgtgcgagcgagtgccgaggactttggctggaaacttttcgccgcgcccggggcgaggccctggaagggccaggccagcgaatgctgagccggcggcccgctgccctcccccgc

SEQ ID NO: 32466 - DNA, 614 bp, Homo sapiens
  chr3:120003757-120004371
  hyper
cggttccaaacaaactgcccagattctggaaagggagagaaagcccctccccctttccactttcacttaataattaagtgtttgaagttttgtggatccttaaggtcgctgtgctcacctcatcagcgtcggaccgccgagaagcgccaagcccgctgctatgtgcaggacgcccacggtcccccggcgtctcgcgcgttcgcggggctggaaggggcgggaaggggcgggccggggcagagacaggggcccgcgcccatcgccgcgccgggagcctggcgtggaggcggcgggacggcggcgcaggcctctgaggtgtgcgcggggcgccgggcgcctctggccggggcactggctgagccacgcctgcccgcccctccctggcgccgcccgcgtggcgcgcctcgaccctgctctcccgcgagggccgggagggctccgggaccttgcagactccacgcgcctcacggctcctccagctcctcggatctttctccttgcgtcgccgccgagtcccctggggcggccccgcctccggccgtctcctcagagaccttccctggggggcgccttcccctcagcgccccttcccgggcctcgagccagcggctgcc

SEQ ID NO: 32467 - DNA, 813 bp, Homo sapiens
  chr3:12045813-12046626
  hyper
cgcccgctccctctccgcgagcctcgcgccgcgcgggttgcctggcccagaccgccgctgctgtctgcggggtctggtgccggggcctgagtctctgctggctaagccgacgcctcagccgcctcagtcgcctcaatctcgccttccgccctcgctctccctccgcgccaccggaccccgtagccccgcgcgcccccagacctttaagccagatgatgaacttcctgcggcgccggctgtcggacagcagcttcatcgccaatctgcccaacggctacatgaccgacctgcagcggcccgagccccagcaagcgccgacgccgccgccccccggcccgggcgccgcctcggcctaggcggcgcccccgaccgcctcgccgggaccggagcggacgccgccggccgcctaggcgcccgcgccgtaagacgcgccgaagaccgcgcccccccccccgcgcgaacaccgtcggtgggcagcagcttattcagctcgctgtcccaagcggtaaagcagacggccgcctcggctggcctggtggacgcgcccggtgccgcgccggcagccgccaggaaggccaaggtgctgctggtggtcgacgagccgcacgccgactggtaggtgccgggcgccttcgccctcgggggtcggggtccgccggcagccgcaggccaggagaggacggtcccaggtcgccgaggaaacgtttcagaccaataaaaaggagggtccccgaggtcccgctgggaggaggtgcgggctgagcgcgcgcgcgtttgcggggtgagggagggcatccatcagcccggaaaggc

SEQ ID NO: 32468 - DNA, 1308 bp, Homo sapiens
  chr3:12329055-12330363
  hyper
cggtctccccagaccggccctggccgggggcatccccctaaacttcggatccctcctcggaaatgggaccctctctgggccgcctcccagcggtggtggcgaggagcaaacgacaccaggtagcctgccgcggggcagagagtggacgcgggaaagccggtggctcccgccgtgggccctactgtgcgcgggcggcggccgagcccgggccgctccctcccagtcgcgcgccgccgcccccgcccccgcccccgcccccgcccccacccccacccccacccccacccccagccggcgcccgcgcccgcccccgcgccgggcccggctcggcccgacccggctccgccgcgggcaggcggggcccagcgcactcggagcccgagcccgagccgcagccgccgcctggggcgcttgggtcggcctcgaggacaccggagaggggcgccacgccgccgtggccgcaggtcagagtacgggtgcccgcggcgctcgggaaccggctgctggctgggcggggagtgctcagggagggggcgcggagggctggggccgagggtctgggggctagggccgaggaaacgggaactgacggggtcccagacggatgagagctggggagaagggggtctcggctgaggggtccggggctgaggcagggtcatggtccggcaggacccggactgacgggtcgcgggcgggcggctcacgggtgaccgggtgaaggggtcttgggctgagggcacccgggctgagggtcgcgtctaccggagcgcgcactaggggcggagggcgcgggcacagagagccgcggccggtgccgactcgagtggacgcgagccggtgcgtcccggcttccaggacagcccccctcgggagagcgccgggtgggcgcggagccggggacacggggacctccgcgtccccggcggaggtgcgcaagcgtcgggagccgctccgggggaactttggagcagggtgtctggacccggggaagcgaagatccgcgtgcgtccgtcctgaggccgcgcggcacccctgctgaggaggaggtcccgttcgctgtccagagcccaggggcgaccgccgcttggggaccgggggaccgttcagcgaggggcgcgcttgtagctggccaggccctgtgccctgacgcgttgtgctggccctacgcccggcggaggggctggggacggggactgggtgcctccgtgcctccgcggatggagcgcgcagccaggacccccagccgcaccccggggggctggaaaggcgaagtcgctgctttgtgggctcctgcaagtgccaggc

SEQ ID NO: 32469 - DNA, 1299 bp, Homo sapiens
  chr3:123751654-123752953
  binary
cggaggaggtggccgcggggccgggaggagcaccggcggcgcgagcggagaagctgagcgcgcagcgcccgggccgcagagccccctggacaagcctggcgtgtgccctgcagccccgggctcgcccggcggccccgccccctccctggcccgggcttttcctgcggagctcaggaagccggcctagcacagcctcgaacaatagctcgggactcgggctccgctccccgggaggccggcgcggggccgctgggactgggggcgtaggcgccgccgggggcccgcagcgagccctcggccccggccggagcttcaattcagctcggcgctcccggggtcattgttggccgggactgagggagcgggagccgggggaggagctggggaggcggctgctgcggcggcggcggcggcgggagccagagggggagctagagagcgagcgagcgaaggagggaggtagcgagtgagcgagtgagcgagggagggaggaggtagggagacagggagggtgggagggaggaggaaaaataaagaggagagagcggagcagggctgaacaatagagacaggcagacgggcgagcaggagagccagctgccgctgctgggggacagcgggcgcccaggcagcccgcaccccggccccgggccccggccccagccagacagcaggcggccagcgccctggggaaggggtaccatgggggagctggcggcaggcacccccagcccgccgcgcgcctccgcctgagggaggctcagcgtcctctgccccagccccgccgcccaacgcccgccctcgaagctccgcggccgccagctctgcggccgcagcagctgcgccccgcgccctccgcccaccgggcgccgagcagccctcggccccaggcttcttcggctcccggctgcccgcggacgccctcccacagtcatgaacccccctgagggagcagcggaggaaggaggagcagcagactcggacgtggacgcctttttccggacaggtaagccgggcagggcgcggggggccagggctgaaggctactgcctcggacgcggcgtctcggacaagtttggggaaggagggctgttgctgccgcgtgcgtgttggggggcagtgccccctcggcgtcggggctggagttgccgagattctggttgttatggcagtgctggctgcgtctggggagggcgtgggggctgggaactccgcgcccctccgccttcaccccagttgcgggagtctgtgttggggaggtgggaggcggtcccctcggaccgccttctcccagagcgc

SEQ ID NO: 32470 - DNA, 461 bp, Homo sapiens
  chr3:125986265-125986726
  hyper
cgctggggcggtgcgctggccgtgggtcgagaggtcgctgcgccctgcattcctggccgcgcgcgcacaggctggaatccgtacattccattcataacattcccgcaagcgaggggaggagacgcaaagccggggagtgagtgattaaagaaaagaaagaagggcttcttgcagctccgggctgtgttttttcctgcgcgccctggcgcagtccccggctcggaaaggcaggagcacgtgagcggtttgcagagcagcccggcccagccgcgcgcccgtggccggaggctccatttaccctccgcggagggcgctgtgcggcggcacttaagcggcagcttcctctctcccaggcggcctttgtggctgtggccgggacagggaaaagctgcccaggccaagagggcgggggcgtcaggggcagccagcgccgcctttgcgcaactgaagcggatgaagcc

SEQ ID NO: 32471 - DNA, 679 bp, Homo sapiens
  chr3:126373462-126374141
  hyper
cggacggctgacctcaccgccgcagcccgggacccgcgggcgccccggcccggacccgccctgccccgggtggcgtccgcgtggcgggcccggtcgcgcgcggtggaaccggcgagggccgcgcctacccgagtactatggggacagtagctcttgctgaagatcaccacccggctgcgctcgatgaggcccacgaggtggcggcgcagctcctcgcgggcctcggacgagcggctgggcccgggggacgacaggcgggcacggcgccccggcggcgacaacacgcgcgcccctcggacatggcccgagcggcggttgggggcatcgcccgcctttcccggcccgggcgactgcggcggcgaccgctccagagtctcgctctcgctcctggcccggccgggcctgctcacaaaccgaaacgcaggcggctgcggcgccgggacggggcctgaggggcggcgaacgctgccctcgctggccactctcaccacccgcgcgaatccgcgaggcagccgctcgccccgccccccaacaccgccccgcgcatgcgaaattgggtcccccgcccgcccgcagcctaggtgtcacctgcccttcgcaaaggggcgggtaccaagcgcgagcctctttatctccaggttgtgcctgcgtccggagaccacccaatcttggcgatggc

SEQ ID NO: 32472 - DNA, 751 bp, Homo sapiens
  chr3:132756962-132757713
  binary
cgaaaacagagaccctttgtgcccgcctcgcacccgctctgctaggtagcaaccgaacccccagagacatcggagcgggcgctgccgagggcaatttggtgattggctggtctcaccacgtgaccggcgctgagccttccgtgcgaccggattggctgtcgcggacgctgacggacaaggccggggcgggccagagcctggtcggaggggcgcgcgcgggggcccgaggggcgaaggcgcgagtgcgcgagagcgcgtgcgcgagcggtggggctttctcctgagccgtcggagggagccggagcgcttctcccgaggtaagcggcgctccggggcgtccccccagtccttcccatgctgggtcccggcaagcgggttaggctgggctgggcggggctcggggaggtgtggggtcagcttgccccgggagcccagcttcagggaggatgcagccccggttgccttggtttcccttttcctatcctctcaggcaccttcccatcctccccactgcgtgacgggtctgcccgaggggagttgcccacctggcagccctgcctccgcctttgtttcccgcctggagggttgctggcatgaaccccctccccaggtggagggtgcgggtgatggggcgcgggcgtcaggagcgctggacctgggctggggccgaggaggaggtggctttaatgcagggggacctgtcacatggggaaacgaagaagaagaaatgtagtgtcactttggccagccc

SEQ ID NO: 32473 - DNA, 572 bp, Homo sapiens
  chr3:133748382-133748954
  binary
cgcacacacacgcccagcacgcgtcgcccggggatgagatcggagcgcggcacaggagggagcccggggctcccggagcctcctggctccggcagacagaagcgggtgcccagccgaaggtgcgccaggcgcggctccggcccggaagaccccgcggactccgctcaccttaatgttgccgaagaccgagcgggcacagcggccggctcggctagtagaggtgtcgctgccctgggacgcgccgagcttgggcaggagccccatggctgcgggcggctggccgggcgcggagtggcgcggggtcggggcgcctcgggctggagcggccgggcgggtgagaggcgaccgcggcggcagtggccggaggagattcgcggagcggagactgagccagcgagtgcgcgcctagaagtttttataagtggccgccgccgatgatgaaacgcgctctccctcctccctcttttcctcgggtgtcaaaggcgctacgagcccccgccccgccgccgccgccgccgccgccccctcagacaggtgtgacgccgcagcgacccgcgaggcttgactgcccc

SEQ ID NO: 32474 - DNA, 382 bp, Homo sapiens
  chr3:134032175-134032557
  hyper
cgggctgggagcggagtggggcagccgccggggggcgcccgcaagggctagggctcggggccgggtttgggggcgggtaggggcgggcaggggcggggcaggagccggggctgcgagctggccgcggcgcaaggaatgcggcctttggctggtcccgggccggcattccggccggcgcaggaatgtgagcagggtgttcactgcgcgctctgagcgcacaagtttgttctcctctccttggagaacgccggcccgctctgtgccaccctctccccaagcccccggtacgtccgtctgtccgggtggaggacagggccccgagggccgcgaccaggagggactcgcaggaggcaccggacaggggtgcggcgagaccagtcgc

SEQ ID NO: 32475 - DNA, 837 bp, Homo sapiens
  chr3:135684609-135685446
  binary
cgagagtccgcgccgcggggaggcttggaggcaagcgctgcccgcgagctgagccgccggaggaggagccgcgggcaacgaggtaggcaaaggaacactggccgcacggcctggagccttcagctccctcgtcccggcccgagggggtggcgaggctcggggcggcgcgcggaggccggggcgggcggggccgggacctgggggcggggaccggcctggccagaggggccacacggagctgattgggctgtggaagtcggaattccagtcggtgcggtgcggtgcggtgcgttgcctcggcgcggccggccggtcccgggacacggcaccagggaggtgtggaaattgcctgccccaggggcgcccgcggaggagggtaggcgggggcggcctgggccctcccacttttcagggctcctgggccagttcgcccgcacagccctcgggaacttgttaacaggaaagcctggcagagaaacaaatgccagcgttttggaagaactgagagtcacgtcgttaggcgctgaggctttcttttccttccccgccccctgcccaacctcggcccgacttggccaaagaaggatgtgtcaccagctccgggccgcggacgggattcccggcccgccaggagccggggtacctgaaacaaaggtaaacggaggccgggcggcccctggtcctgcaccgcggccgcgctggagcgcctcggtgggtctctcccgcgccgacctggccgccgccgccgcggaggggcgttctcctgggggacctctcgatggaaaccagctggccgggcttggagttgatgttgcatccgaactctgttgtgctccc

SEQ ID NO: 32476 - DNA, 461 bp, Homo sapiens
  chr3:137481789-137482250
  hyper
cgcgtctttctaattttaggaaggggaagcaaagtcttctcctcaaacttgatacactacatgctagagaaagatcctcccttccggcctcctcattccctgtcaccctcccccactcctagcccctcggagccaacggagccttgcgcgtttctggccggtcctcccaagagagaatggtgcaaaagccaataagcctggaacacacgcaggtcccgccgggcctgggacaatggtttccatttaataaatatttcccccaagggcatttcacatcgggcaggcaattattcaaaggaaacaggcgcgcaggttggctctgcgggttatttcgtcctctttacccgaagaatgctcatttgacgcaagaaacgagtctcgcagcctccctgggtgggaagaggcgcccagggacaaaccgaccctggttgcgatacaccgtgagactccgctgtagggcc

SEQ ID NO: 32477 - DNA, 1058 bp, Homo sapiens
  chr3:138066795-138067853
  binary
cggggggaaaatgacgccgctggagaggagttagcggaactgaaacaatgaaatggtgcgcgagtgtcgcctgtccccgtcgcatccatcccaacgaagtttgggccctggaacggtgcacccagaaggcctgcggggagagacgctggggcatgatctggaagaaagacgtctcaggattcgaagggaatgcagctaaggtggcggcggaggttcgcctaggactggggaggcgtccctaggctcagaagttggcccggccggagcggagatttaaaggttggagcgcagaggctcttaaagaggccgagtcgaattcccactcggcgtccaccttaaagccagctccccggcaccacggatctgacccgggtaagtgctgggccgcgggagaggctgcggcgccgaccccagcccctggcgctctagcgcgccctgccgggcccaggggactcggcgcgggtgggctggacttcgtaggcgcgcgtcctgggggccggggtgcacgcgggggcgacagggtcgaggcacccggcccgggctccccactggcgcgcccgcagcggcgctctatttttagcaggcgctgtggcaatataaggaatgcgcggcgcgctaggcgctcggggcgcacgctggcggcgcggtcgctttaaggaggcgccggggcggggacggaccggagtggccggctggcggggagccgtcagtccggcggccgcggggcccggcgggcgcgacgctgcctcctcaccggcgcaggctaggagggggcggcctgagtgccgtagccgagccggggctggagcgcgcggtgagtggtcgggcggccttggaggggagggggcccggccgcgccgcctctcgccccggccgtcgctttgttccggggcgggaggtgtggccgccctccgggctcggccgcgctctccgcttgcggggtgcgccctgggaccggctgtgcgtggcgttttgcccccatcgcgggctcccgcgtaacggtgtgcgttcgtgaaatcggccacgaccaagaccccagtggggagggcctgcgcgcc

SEQ ID NO: 32478 - DNA, 975 bp, Homo sapiens
  chr3:138664571-138665546
  hyper
cgcggcggtggctgggctggcagggctgagctggcccggcggcggcgcggcggccccgtggtgcggtggggcaggcggcggtgcggcggccgcgtgcagatggtgtgcgtgcggatgcgggtgggggtgcggcggaggcgggggtgcggccggcgggcctcccaggccattgtacgagttcactacgccggggggcagcgccatgctctgcacgcgtgtgtacggcccgtacgaggcggccgggcccgccagccccttgaccacagcggccgcgccagggctaccggggcccgcggctgcagccgcagctgctgcagccgctgcggctgccgccatctggcaggaggcatagggcatgggtgagggaggctgcggtagcggccacgagttgttgaggaagccagactgcaggtacttggggggcgccaggtagccgtagccgtcggccccggcgcccgccacgccgcacccgcctgcggcgcctccggccccgaagagccccttgccgggctggaagtgcgcgggcggcggccggaagggcctcttcatgcggcggcggcgccggtagttgcccttctcgaacatgtcttcgcaggccgggtccagcgtccagtagttgcccttgcgctcgccgccgccctcgcgcggcaccttgatgaagcactcgttgaggctgaggttgtggcggatgctattttgccagcccttcttattcttctcgtagaacgggaacttcgcgatgatgtactggtagatgccggacagcgtgagcctcttctccgcgctctcgcggatcgccatggcgatgagcgccacgtacgagtacgggggcttctgcgccgggtccggcttctccggggctgtcccgccgccacccccaccgcccttgcctgggctcggcggcggcccttctggctccttgactgtgcgaccggtctctggggccagcagggcccccgccgcgtcctcgggctc

SEQ ID NO: 32479 - DNA, 1973 bp, Homo sapiens
  chr3:13920068-13922041
  hyper
cgcggccggacaacttgcgaaatccccgctccagagacgtggactggggaagtgacggggtaggggggtagtagtgacaaaacacaaagggtctgccacgcacatcccctcgccgcagcccctgcggtccacccctcctcaaaagggatggtaatgggttcactgctgggggctggaggggcagggtgtgtgagacctaccaagcgggcccttcagcgccagaacctctatccatgcccagatccccccgcccccacaccgctccgagcctcacacgcgttgtcttaagtacaaagggtgaccggctttgcacaagcagctccaggacgcgtcccgagctgccccctcccaccttccagccagagcgcccccgagccccacctccacagaaacgctaggtgaagccggagggctgctcgcgcgcccggccgcctctgctgcccagttccagggggcggggtgtcccgcctctctctagcgcttgtctccctctgtgtctcagaccgcctctcgtcccacctttgtgtgtgtttgttgggggtgggacgtgctgtccccttggcccgggaaggggctctgggagtctaagggcccctggaaattgggtggtgccaaggctccgagcggcggtttatgtttttgccagcgaatgtccttcctcctgggtacctgttccctgtttgcacggaccggccccgccagccacctggggactgcccagtctctaggaacggctgtgccgcgcctcctgagagagttcgtctcgggctccggggactgagctccccgagattggctgtggtcctggcttgatgttcctgctagacctgctgtccctatgcccgggtccgaagggtccccgggatgggctgaacctttgcagcagctagccctcccccagagtccctcaggctggagcgtccctaccggctgtctctggtcctgggggattccagactcagacgtcctcaggatggccagtccccctgcctatatctcctggggtgtcctgcggggggcctttgtgcgtccaccgctcccacaccgcacccacccggcctctcagagaagctgtggaagttggccggcagaggctcgcaggcggcacacctccctccccgggccgtgccaactttgtcgaaacacgcgcggaaagggcgcaggcagcccttacccgatccggaggtagaccatgcccaggctgagaaagaggtggcccaggcagcgccgcgctttccggttcatagtcccgattggccgccggggccgcgggccgggctgtgctgatcccgcgggccggccccggcggggcaatcaacatagcccgcccgggaggcgcgagccgaggcgtccccggggccgtctgtcggtgcgcccgtccgcgcgctccgcgcctgagcctcgccaggagcacgggagccacggagcgggaggagggagggaggagcgagcgcggcgtggggcgacgccgggctgcgcgcgagcgaccggtgcaagtgtgcgagacgcggggagtgcgggggcgctgctgcctccagcccccgcccctccctcctttcccccgtccctcccccgccccctcccccgcccgcctccccggagcgcccgcccagcgcccctgcgcccgcgggacagggccgcctgcacaaggcgcgcgctcgcgcctttccatgcgcgctcccgggggccccctccctgctccggggtgcaggtggcaggctggggagcacagcccggttggaggcggtaggagcccgctcgccccccacccgtcactaacttgcagattgcagggcgagtgggcgtccagaggctgccctcgggtggagtggaccagactcggccgagaggcctagtgccttggtctgctgccctgctccctccagcccggaacagggagctggggctgacagggcacaccccagttccccaaccccagcttcaggggagggcgccccctttcgcggagcgac

SEQ ID NO: 32480 - DNA, 632 bp, Homo sapiens
  chr3:13936742-13937374
  binary
cgacgcaacccgctgtgggccgaaacgggagctaagccagatggaacaaacgacccccaacccgagcccggcggggcgaacaggacatcccgcgttgttccacctgccaaagagggcgagcgcgcgggccgatcggagcagagcgagagggcggggccaagcggagcggatggggccaagtggacgagccgagggagtggggcgcagccgaaagtagccgagtgaagccgaacagagacgaggcgcgggtcgggtggtgccaagcggaaatgagtggggccgagcggggcagggtggagccgagcggagccgggtggagccgagcggagccgagcgagtgagaagccggaggccgagagggccgggccgacttgaagaggtggggattgctgagggctggtctgtcggctctggaaatcctgtcatactgtcacttttggattccgccgtttccgtcccaacggaaaactggggctcctggattcccctgacccgagttgtaaccaccgacgagaatctttttcactggcggcctcggcgtcggcattttataaaatgagagcggggagggcggccgaagacgagtgtgcggagccttaggccccccgctcgggtccgcttttcgtatattc

SEQ ID NO: 32481 - DNA, 758 bp, Homo sapiens
  chr3:142607211-142607969
  hyper
cggagcggctccctaggcgccgcgccgctagggttgttccctagtttacgtctctgggcaaagcctctcggggaaggaaaaaaaacagcggtaaaccaaaatccacatatttgggccccagtgcttccctctggccccatagacacgaggagaggggagacacaagtcagattaagccccgccacgtggtggccaagccagctgcagggccatccggcaggccgggctggggacccaggagggagccccgcgagcaaggatgggtcccgaagtcccgggcttagcctacccgagggtggcggacgcctgcaccgcgcgggagcgcagggtcgagcgctgggtcacccaggcgcgccgaagcgggttgagtaaagcagcaggcgaggctgcaggggtggaggaagggaaaggagagaaagggagcccgggcaggggtcgcgttacctctctggggactgctgccgcgagagctgggtggcggcagccagcagcaggcagagtggcgcccaggcgttcgcgcccctcatggcagcgtagacgctcggggtttgcaccccacggcgcgcgcgccggcacacacgcccctccgcacccaccgcgctcacaccgccgctcacactggcagcagcgctggctcacaccggcgctcggctgcccgcgcgctccctctcacgcgcgcaccgccgcggggcggcccaggtagccgggggatacgcggccggcagggcggaggcacttttaaaggcgattatggtgcc

SEQ ID NO: 32482 - DNA, 1412 bp, Homo sapiens
  chr3:142681815-142683227
  binary
cggtagcagccacgggtggtggaagggcacgtcgccgccgctcaggaagaacagacggcagaacttgctcaggaacagcagcagcgggatgaagtgcgtccagaagttgagcgtctcgttggtaggcttcagcaccgaggctaggcactcctgggccgtgcacggcagacgccggtagcccgacaggatgaagcactccacgaagtcgtcgggcacctcgtcccagcgcagcagcggcttggcagacgctggggggtcccgggaggcggcagagtgggagttccgggcggcccccgaagctgccggggccggggccggagggccttttgtgcccgcgccccggggctgcaggcgccgcggcatggtgcccggggctcggctagggcgcgcgcaggcgacctctggcgccggctcccgggcgctgggcagcccccgccggccgccgtcggagcctttgtgcccacgccgggggcgtcgctgcaggtttaggagaagacccgtgcctccgagcagccgctcctaaaaattaaataaatcaataagagaatcaattaataggcagcgctgcgaccgccaggagcgcggagcgcgcgaggctcagcggcttcctcgccaagcccctgctaccggcgcgcggccgcccgcgctgcggcagcggcggcggcgcggctgactgcggcggcagcgcggcagcggtgactgggcatcgcgcggtgcgggtgcctccgccgccgccgcccccggagcgggaggtggggatgtgcgagccgaggcgcggagggagggacgggcgcaccgaggaagggcgggggcctcccaggctagggtttcgcggccgcttcgggggatagagttgtcccctgtctcgagttccgtaccatccccctcctcgggccgccgcagcccgggccgccccgttaatgattgatgcgggggccgcaggctggtcggcgacgcggcggcgcgcgcgccgagtactagagtcggccctggggttcgaaacccgacagccacgcgggcgttctggaggacactggggagccgcgttcgcggggggcggggagctgcggctgcggggggaggggagggcgccggagccgggcagggcggagagatgcgccagcggtaatctccggaggtcgccggggaggggggcactccggaagtcggggggctttaagcccgcgtccggatcggggccgtgtcattgtcagctacctggggatgcgcctctcgctccctcactgtctttgcgtgtgtgttagtgtgtgtgtgtgtgtgtgtgtgtgtgtgtcggcctgtctacgcactacacgaaggcttagttggtcttctttcgtctagtgggcgcactcaggtgcgtcaccattctgccgtttccctcgcccttgtcctgtccgaaagaaccgtcc

SEQ ID NO: 32483 - DNA, 856 bp, Homo sapiens
  chr3:145878430-145879286
  binary
cgggcacgctgagttcaccgagaactccaaggagtcaacgagggcgggtgcccctacacttccccagggaccagcgccgcccgaccgcaattctggggaagaccccggcggtcctggagaggagggacaggcccccactactcacctggccagccccgcggaagggctggtggatgaatgaactgcccccccgccggccgagcctcgcgggacagcggcggaccgcggggtgctcacctgtggggatgctcgagggcttctccgagtccgcacccagacagggattccaggggtggaggacgagcgccaggagcagcagctgaggcttcaccgtgcatccccccatattcggccctcgagggccgcgcgggctcaggcgcccacggccccgcagcgccgcgcttctcgcgagaacgcagagacccgggtccgccctgagccgccgattgcgggcgggagccggcgggcaaggcgcgcggccggcagccggagcggcgcgtaacgcagctgagtgaggtcgtcggtggaggcacggagcagcaggcgcccggggcgctgcggaggccttataggctccccgaggggaggcgacggggcgggccgcgccctggctattggccgccggctgacccgccgccgctgcgcgcccggtgcggtcgcctcagctcgccctcctgggccccacgtctggactgtttgctcagcgcggacgctatttaaggagctgcctgcggctacgtgtggaggctcacgcagcgcttctggctggaacggggaagcctgcacttagctttgggagtgggtttgggagagggaggaggagccgccgggagtctggcgggagggcggtgttccc

SEQ ID NO: 32484 - DNA, 673 bp, Homo sapiens
  chr3:145968334-145969007
  hyper
cgtttttacctgcgagtggcctggcctgagtccgtgagagccgcgccgtagaaacgccagagacccatgagaaacccaatcaagcgagacctgtcacgcagagcgaaacgaaagggccgcccccgtgaagtgcagccaggacccccatccctgggcaggaaactgctcgctcccaaaccctctgcgtctgcagtgcagacgcgcgcccgacaccacggaacttctgcaaccacctgaggatgcgacgcgagcgcagtgtccgggaactgctagcgcaggacgccgcgcaacctccgcgcctgcccgcaggcaccgcggcctcgggcctcccctgacgacgccctcggccccgcagcccgggcgcccgcgccaccctgtcctgctctgcgcccgcctgtccagccccactcaccgcctgccccgcagaatgctgggcaccggggacgccagacgccgggtctagttgtactggcagaggaaagggaaaggaaaggaggcagggaagggagacggagaggatttttcaagttataaacaaagtaagcgcgcggaagggagggctaggcgcgggttctgggggcgggtccggcacgcctggaccctccttccccgcgcgcggcttccccgtctcggaccccgccccgcgctgggagagccgccagcccgggggagc

SEQ ID NO: 32485 - DNA, 788 bp, Homo sapiens
  chr3:14644015-14644803
  hyper
cggcgggctggctggagggagcaggtgaggcacgtggccgcctcgccaagccagggctccctccaggagcccgacccgccggccgggccggtggatgccccctcgagggctcagacccttcgctccagcccccggcgggcgccctgccccgggtcccacactcccgcgccccgtgggccccactgctggctttccgggaccaggctccgctccgcagctcgcgtcctgaggtgatcctccaggctccccactttgggaccccctcctgcgcctcgggtgccggcgcctgtcttcgcctcccgcggggaccctccccggcgccccaggcgtgtgcgccccgggccagctcagctctgggtccgccctccgcaccccgcgccgcgcgcgcgctcaccggccgggcagcggccgcgtcttaccttcgtccggcagccgctgcaggcagagcgcgaggttcctccgccagccccgcatccccgcggccgccctgcggcccggcccggcctcgccagcccggccccggccccgcccccgccgggcagggcggcgcagcgcagcgctggggagggccgcgggcccagggagccgcgggcatggacggccgccgagggtgggggtgccggggcggccgccaggcgctccgctccggctcccgagcccgcggctgagcagctacgcttttcgagcgcgcgctttcccgggcgccgggggcgggatggcggtgggggcgggcgcggagaggacggctggaggggagcccgaaggcgccccagccgtctcgcaccctc

SEQ ID NO: 32486 - DNA, 1163 bp, Homo sapiens
  chr3:14851829-14852992
  binary
cgctgagttctcgtccttcgaacccccagcgcctcccgcggtgcccatggccacggcccctttaaatgtgcgcagggacgccccggccctcgcctccctgaatctctgaccgagcaggggaaaaaaaaatccttcctcttcgggagcggaggaaatgtctaggagggggtggaggcgcggctgcggcgcaggcagaggcgcaggcggaggcacggcggccagagcgcagcgcgcccggagccgggagcggacgcgacgcccggcgctgccccagccgccgcccccgcgctcgcgccccctcctcctcccccgccccgcgcccccgcccggcggccccgccccggaggctcgcggctcgcgcccccactgccctgcgcgccgcgcggagtccgaggcgcgccggggccgggcgggcgccagggggtgcgggccccgcggggcggccgcggagggaggcggtgtgcggagtcgcactgggacccgcggacggactgaaacgccgacggcggcccgggccccgcgcgctgaagatgaacagagcaggtaggaggcccggcgacctccggcgccgaggcacgagcgcgagggaccccggccgggcgctccaagttggagctcccggggagcccggggctagctgcccgaaatcctccgaccttccagtgccgctcggcctcggccaaagcatgcgcggctccggggtcctctcgccgaggaggctgagaaccgggggtccccgtccgaagcgccctgcctcagggaccttctcagccttggcgaggccgcgccctggccgtgcgcgccagtatcccactcgcacggcgttccccggagtgagggtcccttccacgacgaagaaagacgcccctttcgcaaaagcgacttcgtctggccccaaaacctttgccctccattccccagcgtcccggaccggtccttgctcatctctcaggggcaacacctgacccacggggcccgtcccggagctctcttcgactccgggaccagttcccagcccttcagtactcggcataccggaaggaggattcctgctcccttctctcctcctagaccccgaggcttggagcttactctccagatgagactaaaaagccctaaattaatccccctatagcgcacccctccctcgcagcgccctggtc

SEQ ID NO: 32487 - DNA, 1451 bp, Homo sapiens
  chr3:149374946-149376397
  hyper
cggcaggatcttcttccgccacgagctaggcttcggattcatgacagagttgaagagggcttcgaggtctgtgtctaggtcctgcgtgacgtggatcacttgctgcccaggcggcgggagcggagggggcgccgaggccggattcatcttctgcaaaaagaaggtcagatcagccttttatttaaagtcggaggaagtgggtaagagggttacagggtgagagggcgagatggtgggagaaagaatagagggaaaaggaaacgaggagacagataattgcccgcctggagatcccagacactcagcggtaagaccagcaggatgggggaggggtccctcctggcctcgagaattatgcaactttcttgaagcaaagaagttgcctggaggaggagaagatagggcgaggggtggagggaataactgcactcggggcttgctgaaccgcaggatggcaaaggaaaggtcgcacgattccaggacaggcagccccccgaaagaagttcagcccgagccaactccaccacgtctcgactccggaagcccgaggagcctggagccctggagtggtgccggatgagcgcgcgagctccagcgggcactacctgggcgggcagcgaagctgagcctgagcgcgcggcggccgccgtcccgcccgaacttgccgtcgggcctgggtcgctcgggtgagtcccgagattgcggagctggagccgaggcttggctgacaaatcccgacccgactctgtgcctggcagtctaagggcttcggctctcacatcccccgagctggcctaaggcgctagtgctgggcgaaaaggaggcgcaggagaagcagacagcgcggccgcagcagctcccggactgtcccataaacaaagtttggagcaaactcccacccccaggaaagaggcgggcccgaaagttgagctgttgaattatgtatgacctcctagtccctagccggccagcccccgctcgcccctcctcttcctcctcctcctcctcccacctcggctccagaaaaccctgggcgtgatgggtactttactgggtaagaggagacgggtgccccccacccactcctcccggccgcgcggacctctcccgctcagacctgcatctgcattcctttgagtttaccacggacttggggcgggatcaaagggaaagtggcctgagcctgtttcatcaaggggttgtggaccgaaaccaaggccgggggtggcggagggcacgcggatgaggggctcaggcctaggaagggccggtcctggacaccgcgccctcccctgcagccaggcgccgaggcctgcagcacccggagcgccgcactgacccgcgattctgcccgaaggccggcccgggtgcgccccggcgcggggagacaccaacaaggccagcttttccacgagaggctgcttagctcttgtgaccatatttggtctggc

SEQ ID NO: 32488 - DNA, 1420 bp, Homo sapiens
  chr3:152552403-152553823
  hyper
cggtcccggcaaagctagacgctctgcaatgacaggcgttcccagctagggactcctggctgcttggagcttgaaaacacctggcgtggttctcgagggccctagaggctcctgctacggactggtcggctctggggttgtaggcagaaggctctaagcggtcggaagggtttcctgtgtgtcagcaacttcactttgccgagatagctggcggaagagggaaggagcgctcgcgggccaatcgcctgccagcagccaccttggagcgcacccctctccctcgccgccgactccggtagcagcgtgccggcagaggctgaacacactcggcctcggcggagacctgctccccagaagacgcctcctgcttcccactgcgccctggaggacgcgggctggctgctgggcgagctcggcggaggcacgcccctcgcctccccgcggagtgcggactcgccccggtgcccaaactccgcccaccctctagggagctccgctctcccgcctaaccccggcactccggacagagctgggcctggggaaggggttcctgaactacgcggacgccgaacgggacgcgctgcagaagcgcacgagtctgcggccacgcgcgctccgatggctgccaggagctgagctcagggtgggcggaggaagcggttagacgccccgaaactgagctgcacgtttctaaggtagggaggaggaagatgcccccaattaagttgatctttgagccaaggaggctggggagcagcctccccaagctagagccctgcagagcgagtttcccttgacctcgctgcgcctctggcgcgctctgcagcgcggacccgcggcccctcgggaaagcgcagtcggaaagttatccgcggcggttccctgcgcgccctgttgtgtaagctcggcgttgccagcggacggagaagttgctggcttgcccgatagcccagttcggtggcggcccggggcggatttcatggcccgcggcgaacgcggggccagagctggcgtgggcgagcccctgcgcgccccctcccgcggggatccagttcgcctgctcccttccgctcgctggcttttccgatgcttgctgcgcccctggccgccgctgccctctcgccgcctcctacccctcggagccgccgcctaagtcgaggaggagagaatgaccgaggtgctgtggccggctgtccccaacgggacggacgctgccttcctggccggtccgggttcgtcctgggggaacagcacggtcgcctccactgccgccgtctcctcgtcgttcaaatgcgccttgaccaagacgggcttccagttttactacctgccggctgtctacatcttggtattcatcatcggcttcctgggcaacagcgtggccatctggatgttcgtcttccacatgaagccctggagc

SEQ ID NO: 32489 - DNA, 1690 bp, Homo sapiens
  chr3:153838787-153840477
  hyper
cgttagaactctgcgctactgcccacgcatctcacaaagtctactacgccgcgcgttctcggtttcaacgcacctccaggattcagggcttcctaagctgcaattcagcagggctcccttgcttgttctcactctgtgcccccggcaacgaccccgcgcgcctacactcccgtgccgcctcagctactagtccgcaacttctagccccaaaacgctggagctcagaacccagctcaggtgcgctcgtcggtttcccagggagactggggctgattgtaggcacgcgggggcgggaagacagcttcttgcttctggctgcgatggaggcggatctgggcggggccgaaacgggggcggggccaagtgtgggggcgtagtcaggcgtgggggcgggccggcgccggcgccgcggtcggcggcagcgctctcctaagctctcgcggctgcgcttcggtcccggacccgggccacccacggggtagtgggtgctcctcggccccggacattgcaagccccagaaggtaaatttgcgtgggagccgcgcacctggagcgcgagggtacccatgatgagggcgggaggctggatggcgacagaagggagcgtcccgcggcgagtttcccaagaaagctgaactcgtcccaagtttcttgtgcctcggcttgcactcagtgaatgggtggcgggctcatttgctgcgggtggtcttttggcgcgggagggacgcggaggtgattggattaatccgcctgggcggcagcccagatttctgccgggaaccgcgcaccgcagtggtgcagtttttgcccgagaaagggcgggtaagtgcggtgcagtcgtgtcctgcgcagcagcagggggaccgccggtctgggagcacgcgagtcggccaggcgtccccggttgtccagaggcacagtttcctaacttctttcctctttaggcaagactaactcggtgttgctcctcccggcgctgacttcgaggcccggctatggacggcgagagcgaggtggatttttctagcaacagcataacccctttgtggcggaggcggtcgattcctcagccccaccaggttctgggccggagcaagccgaggccccagtcctaccagagccccaacgggttactaattacggatttcccggtggaggacggagggacgctcctcgcagcgcagattcccgcccaggtgcccaccgcctcggacagcaggacggtacataggagccccctgcttctgggcgcccagcggagagcggtggccaatggtgggacggcatccccggagtacagggctgcctctcctcgacttcgacggcccaagtcacccaagctccccaaagcggtgcctggcggctccccgaaatccccagcaaatggcgcggtgaccttgcctgcgccgccgccgccgccggttctgcgccccccgcggactcctaacgcgcccgccccctgcacccccgaggaggaccttactgggttgactgccagcccggtgccttcgcccactgcaaatggccttgccgctaataacgactctcctgggtcaggttcgcagtccggccggaaggcaaaggaccccgaacgggggctctttcctgggccccagaaaagttcttcggaacaaaaactccccctccaaaggctgccctcccaggagaacgagctcctcgagaatccttcc

SEQ ID NO: 32490 - DNA, 385 bp, Homo sapiens
  chr3:158288800-158289185
  hyper
cgaaaagctccccggccggcgcaaggccagacttctcgcctccactgtgttgattgcggttgccagggcagcggcgcattgctccccgcctcgtcctggtgacgtcacagagcaatgtccaatgggaaagcagctcggtgtcacgcacctcctatcccggcgggcaccgcctgcgccgcggcgagtgaggcgtcgtccgtactggaggctagctcttgtcgcggccgcggcgagttaacatcgtttttccaatctgtccgcggctgccgccacccaagacagagccagaatgttcaggatgctgaacagcagttttgaggatgaccccttcttctcgtgagttacgggagccaggagtccggggtcgcgcgggaattaaggtatc

SEQ ID NO: 32491 - DNA, 965 bp, Homo sapiens
  chr3:159943217-159944182
  hyper
cgcctcccgcagcctccgcgcgccgcgggctcctcctcccgcccaagcgtggccaagtgaggactgctccggccgcaggtagctgaggcgcgggaggcggcgcgcgcgggacccgagcggagcgccggggaggggccgacggacgcgagggcggacggactccccagcctcccgtcccggacgttagccgaggtctgcgcgggccatgtggggacccggggtcactgctgagggcctgtcggtggctccggcgccgccgcctctgctgccgctgctgctactgctggcgctggcgctggtggcgccctcgcggggcggcgggggctgcgctgagctggcgtgcggcgagcgggagcgctgctgcgacgcgaccaacgccacggcggtgcgctgctgcaagctgccgctgcacgccttcctggacaacgtgggctggttcgtccgcaagctctccgggctgctcatcctgctggtgctcttcgccatcggctatttcctgcagcgcatcatctgccccagtccacgcaggtacccgcgcggccaggcgcgcccgggacagcggcccgggcctccggggggcgccggaccgctggggggcgcggggccgcccgacgacgacgacgactcgcccgctctgctgcgcgacgaggcggcagccggctctcaggactcactgctggacagtggcggcggcggccggggccggggaggcggcgggcgctcggacccctcctgcgcctcagagcacgagatgcgtgtagtgtcgccggtcttcctgcagctgcccagctacgaggaggtcaagtatctgcccacctacgaggagtccatgcggctgcagcagctcagccccggggaggtcgtgctgccagtgtcggtgcttggccgccctcgaggcggggtcgccgcggagcccgacggcggcgagggccgctaccctcttatctgagcgctcggggatcggc

SEQ ID NO: 32492 - DNA, 981 bp, Homo sapiens
  chr3:171527569-171528550
  hyper
cgtattgtgaggaagaagaccttttacacactccctgctgctggcccccggccccctcgccccacctccgagtggtcacatcacacggcgggagccgcggtcagcagctgtgatcacacccccaggaccgtgctctgcgggctgggctcgaagccttgggacgcggcacttcctggttggtacgggatgccggtcccatcgcccccaccagcccagtcatgccaccgcgcacccgaaccaagggcgcccggatgacctggggacaccacacacactgcacccgaagccctgtggcggcgaggcggtgcatcctgcagaggacgcctgggcttcagcctgagcctgcgcggctctgcgctccaggcagccgcccgcgcggcaaaagtgcgtgccagagttgtcagctttcaccctgcaggaattccacccgaaggcgtgcgagggaggcccttggggatcgctagggagtccgccgccgactcactcgctgaaatcccgtccaagttgggcggggagcggccagctgcccaggttgggcggaggagggacggagggcgagggcagtggaaacccggctcccacgggcgcccggtgatccgggtctcggcgcggctcctacctgcagggcgaaggggccgctagcacctgcgcgttggcggcggactctcagggctcgggtgcctctggcacagctggagctcagcgggagggagggagagagggcgggccggagggggctctgcgctgcgcggccggcaggaactctccgcccggattcgccccggattcgcaggggtggagcgaggcggtgccaggtcccggggcgtcgcggtgccggctggaggccccagcggggcaggtctcgcgactgggcctctgatcgcccgcgttccttgttctcttttcccaaagtttcataactcgaccgcatcaccctagggaatgctcgctattaggaccattatcaggtcctctcgagcc

SEQ ID NO: 32493 - DNA, 876 bp, Homo sapiens
  chr3:179754482-179755358
  binary
cgggttctcagagggtgctcctgagccccctggagctccgggtactcggccggccggcggccactcggcagcgctgcgggctgccgggaactgttctccgctcggggtgctgaaagcggacgcgggagagcgcgcagagaaggcgaggagccgggtcggccaggctctcctgcaggcgcgggtcctgctcgcggggcgtctctagaactcactccttcttcgccgaactctttctcgcttcctgccaggttgcctcatgtctctctctctctgagctgcgaaccccctcctcccagccctgacgtgagcgcctacaccagccgccgccgcagctgccgagcggggcgcgcgccgttctcccagccgcgtgcctgccgagaggccgcgggaccgggcacgcgcgcgcgttcccaggggcctgggagcggcccgagggcggccccgggcggtgcgcgctccccgagcgcgtcctcggggctgcgcgcgcgcggcggcaaggcgaggtgccggcaggcggtggtcgcgctggtgtacaacgcccgcagcagcgcggcgttcaggtgcggcgtcggcgggcagggcgattctagcggagaggatggccggccggaagaaaggcgggaagacatgcatcgtctctccgggggccatccaccgcggctgagcctgttatcctacagacattataggctgagtgcaggggttgccgaagagtttacttcggttctgattcagctctcgaaagttacgtccgtatcacccgttaaataaagactccccgctcccctcatccccagttcatcgccgagcattctatttaaaacggcaaaccctagtccctgaggatctggcatgttttatttttttccctagcac

SEQ ID NO: 32494 - DNA, 951 bp, Homo sapiens
  chr3:181413014-181413965
  hyper
cgccgtttcgcccacggggtgcggggaacgaacccaactggacacactgtgcacccggaaaaacagacggttccaaattcatttccgcatttgagtctagagtcagcaagatcttggccgcccgcctgcgcctcggagcagcccacgagcccgtgaaggcgcgtggggaaggggggcctggaaagcccgggcttcgactcactcggccagtaccgctccgaggaggggcctcagcctccttcggagccagggccgcgcccgagccgcgctaggccagggggccggacgcgcacggaagggggctggcggacacggccgggtggtggcgcagttcctgggggcacagggcagcccagcccgccggcccgcgcctccgcttccccactccagcgaaactggacaaggccgacccacccagccgggcccgatccctcaagacactttcagcctcagcccccgtttctcctcgggtttccacagacccaggaaaggacagaggcggcgagcaggctgacaagtttattctagaggctttgaaaaatgaggtttccaggtctcttcgcacgcgcgcgcgcgcgttctcgggctaaaggttcgaagctagagtttgaatttaagccacgtcctgggacaggtcgcgttcagcgtgggcgtcggccccgccgcggccccaggcctcttcgaagtgcgcgtcaagtggggtgtcgggtcgttttgttttttctctaagtgaataattcaatcgtgttaggccagattacatgctcataatacccaggtgtatttaaaagcacccgcgtttctaaacctcccgcagaaagtgggaagcaatcgccccctcggacctggcgccgctgcgcctgctggagcctcgcttccccacagtcgggcggccagtggagggcgaggagcgcgcgcgtcacgagaggcggccccggcctcccagagccc

SEQ ID NO: 32495 - DNA, 808 bp, Homo sapiens
  chr3:182970902-182971710
  hyper
cggggcccatcaccttcacctacgcgccgggagggtggcggctggcgggcggggccgggctcgggccgtgacgccgagagtgcggggcgcgcggctgggagcctcgcgcccccgcccgggcccgcccccatcccgcccgcatacagcccgcatcccgccggggaagcgagcccagtccagcgctgcccgtccagtcctcgcccaagatttaaagcccgcaagttttgttcttgagaccagcgactttagctccgatgcgggaaggaaagccgacctccgatttggacatttaaagagctgggcttgaacttcgtgagtttcgctctaaactgcccttgaaatgaagctggacttggaggtaaagtcactgggaagctggcctggggcggggtttccccctcttctcgtattttagaaacggacagcggcagtgcagccctagtttgctgtaagtttccttactttgttactgaggcccccagagctccacgcataagtggtgtgaccagaaaccttttaacaagacccgcctgagcctgcgttagagctcccgctcggaaagtaaaagaccatcctaatccgcggcgctgcggaaccggtgtcccgtgtgggaggaaccgcggcgttccctgggcgtagggcccgcgaggccagcacagtccgcctcttggcggagcgccctgggccggtggttccgcgcggagttagtctgtggtcagttacgtggtgaaaacacggctgtgccgcggccgcatctttccgcggccgaggcctctctgggtgggagtgttggcttcctttccggatc

SEQ ID NO: 32496 - DNA, 525 bp, Homo sapiens
  chr3:190580421-190580946
  hyper
cgctgcagaaactgagcccactcaatttttcagtaaaaccagtgggagctttaaatgagactgaggggaggagctaggagaggcgagttctaatctgcgggagctcccggtgacgcccagagctcccggcgagcgccgctctgtgatttggtgagaggctgtcaaaccggtgacgtgagccaggagtcacccagcagaagacaaagtcactcgcgctctgggcggccaccgcgccgggaccagggacctgccgatctggccaccggccgtggggcagaggcaggacctccggccctctcgctccgggtgcgcggcgctgcttcacacccggccccagtgtggactcgccgcgggcggggagacgggcggggagacgggcggggagacgggcggcgaccccgcagccgggaccgaggcgagggccgggctccctcccgctccacgcgcagcgcggggcagggccgagccgggccgggcgagaagatggtccaggtgcctggacgtggggtaagaaaagcccaaacc

SEQ ID NO: 32497 - DNA, 962 bp, Homo sapiens
  chr3:192232553-192233515
  binary
cgcgtgtgtggggttggtcaactccccgcccacctgcgctagtagtccaaccaacaggcggcctgtcttcggaagccgggtcccgagtccatcgcgcgcgcccaggtggaggggagtttgcacatggagccggagggagcccgggcgccggcagggggcgggccgggacgcggaagtgccggtccgccgggggcagccctccgagagcccgaggcgctgccacccctcggtgggctcgagcacggccccttgagaccttccggaggcggtggctggtctgaggacgacgcggaggacgtcactgcgggtcggtgcttccttacaggtgccttctggaccggggtccttggcacctcccctgctcctgccctcggtgccggaccctgtgccctgggagcccgactacctcggtgtcccagccgtcccgggcttgaggcgctgagagggctgcgcggcttccagcccggaaggcagcggtcccgcgggctgcgcgcggccaagggcgactccggtgtgggaatccggcggaagggaagcacccgcagggagggctggaccccggaggctgcagagcgtcagaagcgactctagggaactagggggtggggtagggaggcggggacgtggaataaagaaagctcctgggtgccggctatgagaagtcaggtgtgcgtaggcgtggacagagtgccgatgtgggagtctggacacctggattttctggtcggggctctgtgtccttgggtaagtcacttaccaccctgggcgtctccccgtcaatctgggtggggaagagggtgtgagatagaggattggcagcggcgtgcttgtttgtccccgtgcctttcaggctcctagaaaagcttagcataggtgcagtgggaagtggagctagaagggacagagggagaggaggcaggtgaggcgagaaatctgaagacaaaagagcgcttcgctttggc

SEQ ID NO: 32498 - DNA, 997 bp, Homo sapiens
  chr3:192634348-192635345
  hyper
cggaatgttgaccgccggccacgcaccgcttgacagccacggatccgctggcggagccgcaagttacaacccaggcgcctggcaaactcacactacacctcagtagcaataatcccaacggcaggacacctggggagggtgggctcggtctcccgggcctggctcaattatgttcctttacacagcattcaatcatgtttcaggagccgtaggtgaggggctggaggtgggagtgggggacacattttctagcccccgacgtctccgcggttggaaactctgggcacctctttcggccagcgctaagacaatacacaaagagcagggaaccggcgctcctctgcggccagagctccgcgcctagtcacggaagagctgggaattaagaattccgagctcagcgagagccctgaagaagcaccggaaatgcttccgatcgcttcataagagaagtcaatttgcaaatcaaagttgcaggaactccggacgcctagactacttcagcgggttactcgggaacacccaacaagtttggccaccgggggctcggcatgacagcgccgcgccgcgagacgacagaagcaacttgtcgctcgggcgccaagccagagccctgagccgtctccgctcccaagctcgggagagcacccaagagccggcgtcgggaaagcggaggtccctgcctccggcagccaaatccctcaactgaaggcacctcaggggctcacctggactgcactcgcttccaggggcttcccccaacagtgcaacgcttcaccgcgaacgcctcacctgcctgccagccccaggtggcggagaaattaacaaaagagcaagcgaacagggggaaagggagacccggcgtaaagtatagtaaggaggggagggcaggcagctcggctttcggcggagaaagaagagagaggcggaacagagatggcttatacccaaggcaccggctcgggaaggcaacccagaagggaagaggtcgagaagc

SEQ ID NO: 32499 - DNA, 993 bp, Homo sapiens
  chr3:24870601-24871594
  hyper
cggtgaaggcggcaggggcagcaaccagagcagcagcagtggcagcagtagcaggcgcggccgccgccgcctccggctcagctcacgcggaaaccccactgggccgtcgtggctccgcgcggttgcgggccagcgtggagaggcgggacgtggcgcccgggggcggggcctggcgccagggggcggggcgcagcgagccgggctcccgctgtctgctctcagcggcggcggcaggggctgagggcacagccagcgggcggcgcgccgcggactccaaggcagcccgccaaaaggtaaagccaggagagcgcgctggcgggtcttcctgttgggtggctgctgtccaagcccctagcgtccccggagccccaagctgggtctggaagaccagggcatttgcatggcatccagggaccggctgcctagcagggattttgcgtgtaccgcggcggggccgggggctgggggttggggggtctgcagcgggagcccgcgaccgatcccaggacatctggactcgcggacaactttgcgcagcagtcctcttccaagttccctttattgctattgtcttagcgcctgtctgacagtctccccggactccagctttgttctcattaggccaaacccgccctccccaggggcgtgaacccaggagtcgctggcaagttgcacctgccagccggatccgccccggctcccttcgcgtccctgccgggtccagcgctgtcctgcgcaccttagggctgggcacggcgaaacctggcgcccttgggagcagaggttctcgctccattcccctgtggggatctaagctccaggccggggtgtcggacctctgggttgcagcatgctttggggccgaagaaagggcgagaaaaagtttgagcattggctgggcctagggagcgggtagcgccaggctgcacatggcaggagttggagaagagtactaggggcttggcgccggacacagggacgcggccagggacc

SEQ ID NO: 32500 - DNA, 818 bp, Homo sapiens
  chr3:32859579-32860397
  hyper
cgttccccgagaccgatttccagatctgcttgctgtgcaaggagatgtgcggctcgccggcgccgctctcctccaactcgtccgcgtcgtcgtcctcctcgcagacgtccacgtcgtcggggggcggcggcgggggccctggggcggcggcgcgccgcctacacgtcctgccctgcctgcacgccttctgccgcccctgcctcgaggcgcaccggctgccggcggcgggcggcggcgcggcgggagagccgctcaagctgcgctgccccgtgtgcgaccagaaagtagtgctagccgaggcggcgggtatggacgcgctgccttcgtccgccttcctgcttagcaacctgctcgacgcggtggtggccactgccgacgagccgccgcccaagaacgggcgcgccggcgctccggcgggagcgggcggccacagcaaccaccggcaccacgctcaccacgcgcacccgcgcgcgtccgcctccgcgccgccactcccgcaggcgccgcagccgcccgcgccttcccgctcggcacccggcggccctgccgcttccccgtcggcgctgctgctccgccgtcctcacggctgcagctcgtgcgatgagggcaacgcagcttcttcgcgctgcctcgactgccaggagcacctgtgcgacaactgcgtccgagcgcaccagcgcgtgcgcctcaccaaggaccactacatcgagcgcggcccgccgggtcccggtgccgcagcagcggcgcagcagctcgggctcgggccgccctttcccggcccgcccttctccatcctctcagtgtttcccgagcgcctc

SEQ ID NO: 32501 - DNA, 784 bp, Homo sapiens
  chr3:33259711-33260495
  binary
cgctgattcccactcatctttcacgtcttcccggaccaagccaaaatatccgagggagttttctaaccatcggcggtgtcctcaggggcacattaatagacgttgagaaactgagggacggcggaaaatcaccccttagcagaggaggttctagggcaccttagaggtgatttcattcgagctttcttggagaccttaggaaagccagcggcgggactgcgggacctacgcgctcggcgctaagggagggtccaggcaccaggcgggcgtttgggcgcacgggcacgcggagacttggtgggccaggagagggatgctgggtcgcaggaccgcggctcgttcgttcctctcaggcttgcgcttgccgcttgccgggccggtcagagggagcagccccggcgagctacgccctccctgcccggaccccacgctccaccccccgccccgccgcctcccgcacactcaccatccgcccgcaccgaaaggcgcggcagaccgagcaggagcagcgccgccgcccagagcccggggaggcgtctgtgccaacgggcaggcgggctgggtccctcggcagtcatggtccgggagtgcgcgggccagcggactcgggtgagggctctggctgcgtttggggttgcccaggccactgcccagcgtgcgccactcggctctgcgctctgcgctcggctcacgaatcgcaggcttcgcgccgggcgcgccgagagggaggagcgcggagagccgggggaggctcgggacgcagagccggagcgcctgggccgcc

SEQ ID NO: 32502 - DNA, 901 bp, Homo sapiens
  chr3:37901938-37902839
  hyper
cgcaaggcctgaagtgcgcgcgcaacctagcaggcggaggcaagcagctcttcgcctcaggccgcccactgaaccctgcccaccgacgtcgcgccctgtaggccctcccaggccctcctgattcgtggagagcgcgcgcgagcgctcctgccccacccccgagcccgccctcctgcggcactaccccgcccccccggcttacggggctgcagagtgtggcctgcaagttggaagcgcaggacgcgggcgtccaaaggccccgacgctcccaggctgaggaggcactttgtcgtctctcccacgctctggccgtcgtcctaggcctgacagtggccagctgccttgcacaagcacagtccctgccagacttggtctgccaccagcgccttccgctcttctgccctcgacggactcccccggtccccttgctgcacagcacccgaaaatgcccactgcccaggcccctctcagtcacgacaccctcacgtgcaggaggttggtccttcaggacccgccgcccctcacgcgggctctggggccgaatgctgacgcgagtcccgccagcatccgaacaacctgagcctctggcccggtccgcagactccctctctgcacagatcactcccgatcccgctcactcctgggacccctcaagctggggagcgcagccctgggcctctccgaaccttccccacgctccccggtctccatcacagcagcgccgcgcccgggcccctctgcgggccgtctgggtgtcactaccgctcctgggcagcccccacttctgcacaccgcttccctccgcactcacgtcccaggcccctcggttccctcgcctggacgcccctcgcccagcaccttcccgagacaccctcacagcacctccgccagcacttcccgc

SEQ ID NO: 32503 - DNA, 935 bp, Homo sapiens
  chr3:38070629-38071564
  hyper
cgttcttggatgctgtttccttccttcgccgcccctccgtgcgagcgggatcgtggagcccagactttcatgaccaggacaagggggtccgcgaggcggagggaagtctttagacccgtaccgcccgcccacccaccccccgggctagatctcggacaagcctggaaacgcccagggtcgtgcccggcagtcccacccagggagccgcgggctgagattttcccagtccggagaaggggcagagaggcgggcccggggtggtgtggaggcggccgaaggagctgggggctccctgtccagggcccggaacagctttccaggggtccacccctgcagggtctcccgctcgcgcgggccaggcactcaccgtgcagggtcaggaagtcccggcccgagtccatgcccgacgggcggcgcggcgggaggggcaccgcgggactcacttgagtagcgacagcaccggcggcctggggtccgagcggagtgcggtgcagggacctgaatggaccgcggtgggaggaggccgggggtggtcccgggacaccgccccgcccccgctgccctgcgcccccgccccctgagcccgccaaccctcgtctctccccgcccccttctggggacgcgagagggagggcagagctgggggcccggaggactggccaaccctggcccgggccagcgggcgcgccccgaccagaaatagccagattcctccagcttcctccgccgccgccacccacgggccgcgggccctgtcattaccgcgggcggccgggccccacgccctgttgtgggcgcctcgctggggtcggggtgatgctggaaagaatccggcgtcatcccggggaagggatcgtgtaaggtccgacgcccagccgggctgctgcgctagggagacgcggcgtccaggcttccagccgcagctcccagcgttc

SEQ ID NO: 32504 - DNA, 1280 bp, Homo sapiens
  chr3:39850742-39852022
  hyper
cggggaaggacctggagtcgcacatgggggctcccgaaccgcggccccaatactgcactgcgccgcagggaagagccccgggaggggcgcgggtccccgccccgggcgcgcgcagccctgccccgcctcctcccggtgcgccccgcccctcccggcgcgtgccgcccgcgcgcccgaggtgctctggaggaaccggcccggcgggcaccccctgccccggcgcaggcgcgatcgcgggccgcccctcccgccgggcgccctgcacgcgcccccgccccgcctccgcaggctcccccgctccgggcgcctctgattggctctcggccgggccagcaggtgtcggcggtggctgcggccaggctggccctggctgcctgcggcgcgggcgcctccctcgcagccgctgctgccgacgccgctgcgctcccgcctcctgtcggttcccgggttcccgctgcggctgcggttctggcagccgagcccccgcggtgctgcagcccagctttagcgcgcagaccgacccgcgccccttcttcgccgccggcagcctctaatccacgcggcgcgttgcggcaggtgccctgggcgtactgaggcgcggtggcctgagcccggccgccatcgatgaccccggtcgcggacttgcttcaggctggccaccccccgtgagtaccgtccgcctccctcttctcccctctggcagctttgcgccactctcccctcaacgttgccgcaacttcgggggtgggtgtgtgaaggtgtggaggtgtctctcacgctcccccgcaccctgtgcgcgtccggagccaggaaccctaggcgcggccagtcagcctctgcggaggggcgaggggcgcgggtacttgaacttgctcagggatcatcgcggagccagaatcgcctctttctctcgctgctggggtgggagctcgcctctgcgtttccctcgcgttttccgatcccggatggccacgtagtgcttgggctgcggttcaccgcgtacctactgtgctgcgggcgcaccggcgggacgcctcaaaccatccgttaagcgccccgcaagcagcccagcgcgacggacctgactcaaactcttaattctgtaaaacgggggtaatcagggactctctcaaggtcacagctggtgctcagagttagaacacaggtggattgcgtctggccctcgcccgcgggctgcctggggaggggagagctgttggcggggcggtcacttcagcttcatcccgggttcctcctcatactccctttccgccacagcc

SEQ ID NO: 32505 - DNA, 674 bp, Homo sapiens
  chr3:43147038-43147712
  binary
cgttgcccaggtccccggcccccggcccccgacccccaatccccggcccccgaccctgagggtccacccccgccccgcccacctcccgcgcctccctcagctcgcttcacacgtcacccctcagttctgcaaactctcctggatcccgaaggcgtcctagaacctccccctcaccccggggcccagcaccgcgtcgtcccctccagggggccgagggttcgacacctccacttcaagtcccaggcgggtgtcggagtccgctccagccccaagcgcgcgcgcgtcttacctgaagcctggactccgcgggacgaagccacctccgccgacgcgtccaggaggccccacggcggcgccgctttcccaccccgccgccgcccccagcgccagcttctggcccaggaggcccagaaggcccaggcagccagcacaggtttggccgcgccgccgggttcgcagcgaccgccacctccaggctcgcaggtgtccgccgtgcgcctgcccggcgggcgagcccggcgcggagcctgtgcgcctgcgcagagccgcgagttcggttgccctggccccggccacaaccttggctcgcggaatcctgggaggtgtagttttgcgtacgaggacagcccgcgccgccaccagcctgcggaatgttgggagtgataatttgcgcc

SEQ ID NO: 32506 - DNA, 1217 bp, Homo sapiens
  chr3:45186931-45188148
  binary
cgtgttggtcccttcccccaaccgaaacaactcgaaattcacacatatccccggaacaacagcctcctgccctcaaagtccactgccaaaaagtgcgaggggcgcgggaatgtccagtctctgcggtggcgcagatgcctggcggctttctctgggaccccctaaaagaaatccgggcgctttcatttttgcaccaacgctcttcaactttaggagagggggaatgcagcgtgcggacgggaaaaaggggatctagtgggaaatgcggacgtgaaagcactttttttgcaccttctctctggaccaggcgaggaggtagagggcgagcctggagaggaaagatctcttcccacaccctgcctgggtgctttcaagaatcccggcaaagaccctggggcgcacggcgcgccaccttggacatgtcgcctgggatcggctaccgggagctccttttcccgccttctcggccagcaccgggctcatcctcccggaccgggaggctccccgatcggggacactctcacgtgccgagggcaaggttgactccaggagggcaaggcccacgcgcccgacgcggcgcgcgcaggaaccgaacagtccgggggtcccggagccacccgcgcattttgactacgccgtccccgccctctctccgcaccctccgcaccctccgcaccctgcgtccctcggccgcatctccgccgggcgtccgctggctggctagctcaccactccacgccatccgcctccaaagcccggcactcacctgccccgcgcggcaggcgcgccgcacccagcagcagaacccctagcagtgcgatagagaccccgcagttcaggccggccatgactccgggacgcctcggcctcggtggggaaaacgacggtggggagcggcggccccaggcgcccaagcccggcgcagctgcgctccgccctggctcactcacctgcgcgcgggcggaccggcccgagccccgccctgcgcagcaggatcgcgagctgacccggtgcgtccctcctctctctcctcctcctcttcctgcctcagcgaccgcctctccctcccagggtgcagggctcccggcaccgggttgctgggtccctactactccccattgcggcgttggagcggacttgtccccacctttccgggcttagtcttccttcccaagtctgagaatgatgaggtctttttctccagagtcgcgaaggtc

SEQ ID NO: 32507 - DNA, 1467 bp, Homo sapiens
  chr3:62363439-62364906
  hyper
cgcaaaaagctcacacatttgcaccacggaagaaaaaggcaagcatttccactccaaaaagtgttccaatttcagcccctgtggcatgcatatcttggttctggatgacaaggggcactattattttaaaaaccgttattattttttcatctggttgcaatacataacacagcgccctatgtatgccatctccccagggagccgagcagcttgggaggagaaggcttgcttgcggctcccgagtttggggaaacacgggcactggggaccccgctccttcctgactttttttttttgggggggggggaggaaccaatcctgaaacaaacaaactttatggtttaaggaatgtcttttcttattccctccctccttccctccctccctccctccttcttccctccagctctccttccttcctcctttcctttcttttcttccttctttccaaaggaacatttagaatctgatttacttggtgccgcgcttaaccgctgctgaaaatagattaacttctgaagagaaattcttttgctatcctctcttttttccccaggaagcattttattgaaaacattcgaactggcttgcccgtggcgggcttgtccaaagcacaggggcctccgccttcggtgcgcgttgttctcaggattagtgctgttgggagacaaagagccccagatacccgaggctgggagcgccggagagctcccaggtttcgggtaccctcccggagcacgcaagcacagtcccaggcctttagggacagatgggccagagccgtctgcatctgcccgcatcctttgggaggctgcgatgatcgcagccagggtggccgagcgcccggcccactgcacccggcggctgttttgcagcgcccctggcattcagggaatggtttgcaaatctcaatgcaccacagactagttttcaccgtggagcaggaaaggcgcctattagccaggggcaaccggctttgcagacctgggcgggggcgtagggggaggggcggtggtgcaaacctatcgtgatttccaggatcctcccaactccctccgctatcacatcagaggacattcgctgactcttcggaaatctgggcagcgaatacacttctaggccagaagaattctcctaaaagagcagatctgcagtctatccgtgcaagcttagtactctcctctctgccctggatgcatatatattcacaaacatatatatgcatatcatatatatgcatattgtttatatgtatgtatgtatatacttatatactatcggcaacccatcactagaaatgctatttaattaggaatctgatccaatacccgcgtgcagcaatttgccagcagacgtgtcattttgtaaggcgcagtgagggaaggaagtcgtctcgcctacctgggttttccacttgctacgcgattttggtgtgcaacccaaaggaaataatcgtttatagagaac

SEQ ID NO: 32508 - DNA, 709 bp, Homo sapiens
  chr3:64430585-64431294
  hyper
cgcaagaagcgagcatcgggcgcccgccctagaccgggctggtgctcccggaaagggggcagcagaggacaccccaaaagacggccctaaagtccccgctagagctccaagtggctggacgctggagctttggtgctgggattccgatttgcccggagggagggggctttccagggatcccccagactgtgaccctgagggccacggttcgggtctcactgtcgcccagccggggggtcggaacttaacccctcccgcgccttggagcgctctctcgcgccctggacgcgccccgcccgcggggccggcttacctggggccacaggtgcgcagccgcggggcgcagtggggctgcgcgcgggcgctcgcggccggctggaggtgcccggcgatcggccccgctcgagcgggggacactcaccgagcggctggagagtcttttccgggagctccggctgaacatggccggacgcctcctgctcgcagcgccgtccgtcggtccgtccgcgccgcggccgggagggcgggtagcctgggcgggcaccctcggcggccgctggcctggctgtctccgccttgcagtccccggctcgctccggagcgcacgcctacccctcctcccttccctctgcctctccctccacgcccgcaggtccctccctctctcccggcatccccccgccctcccgggttcgccccgcggtccacc

SEQ ID NO: 32509 - DNA, 906 bp, Homo sapiens
  chr3:64671715-64672621
  hyper
cgcgtgaataaaggccctgagagaaagcggggactctagattacgcaccgccctccacaacacacactgaaggaactcccagtgccttgggcaggggatcctcagccccacatccccgatgcaaggcgcaccaataaggagtctggtccgccctgcgctcagcggctccgctcccgggtggccaagtttgctgcagggaaccgcaactccagtaactttctccgagtttggaaactgacttccaggccgcctcgcagcgttgggcaacgcgccgctgaaccgagtccaaactccagaaagctctgaaacatccagaagcccctgggggcgggtgtgtgcgctccacgccagtgtactcgcacgcacagagctagctacccaaaccatacgagtttctagctgatatttaacgccggagaggagcggagcctcgccacagtgagggtctctaggcttagaggacaattaagtcttctagaagcgggcgaggaggcggaaggggagaggaggtggcgcgcgcccacttaccattcctgagcagaggctgatgacggccgtgtgctcggagttggtattgacatagcctttgtagaaacagtgcttgagttccgcttcctcttcggaataaaacttggtctgattcaccccgggcgtcccgaggagggtgacagtgaacagtggagcgataaatccggcattggcggtgagattaaatagaaactgctggccgaaggcagagaggcggtaatgcgcctgggaggaggtagaggaggaagaggaggaggcgaaggcaggccaggggtcagtggcagagttaatgctccgtcgcgttcttttgaagtggacgttcgtgggaaagggttctccgagagcgttcactcggatgggagacacgatttcgtattc

SEQ ID NO: 32510 - DNA, 792 bp, Homo sapiens
  chr3:64673134-64673926
  binary
cgctgcggggtgcccctgcccaggagcgaggaccgggaggcggcgtcggggccggcggggtcccgggggccggagcctggttaccttgcctcgggtgcagcctgtccttgcgcacggccgccgcggcgtctgggctccccatctcggccaggtcccgcaccaggagcgttagcagtgtggcccaggatacaaactgcatggtgcttcccacccctccctccgctgcccccacccccctccctcctgccctccttggctgcggcggcgacgcgaggcagcggccgtggagagcgcgcggagcccggcgcccgccgccaacttttgactttaggagtcgctgaggtctcgctgcgagggtcccgtctgcgctcggctgagcaacgccgccgcctgccgagagctgagccgctcgggccgcaggaggagccggaggagcaggaggaggaggaggactggggctcggctgcttggccgcataatgcccagcgagcgggcaggagaaggcgaggaacttgcgctccgaggcgcgccgggcgccctgtgctggccgggatagctgagcggcttcttgaatggggggctgggggggcggaggcgggggggccgcgggtccacagcctctcaaatgcccccggtgcacgcctctaagaggaggagaggggaggagaaagcgagacgaacggggaccgcctccttccagaccatgtcccctcctcggccggcccgtgcgggactcgcagccggaggccctgccggctgcaagaggcggaggccagaggcgtcaccagcgcc

SEQ ID NO: 32511 - DNA, 1440 bp, Homo sapiens
  chr3:66024122-66025562
  binary
cgctcccctgcacacgctcgcgcactcaagccatcataaaacaaactttctgggcttccccgcgagccccgcacaggcgcccgcgagctttgtttgcattccggtgcctctgggtccacgttccggcgcccgcccgtgctctcccggaccagagtccactctgcgccgctcgggttatttttttttccttccttcctttctctcttgccttttacaaatgcggtgcctcctctttgcctcccgcccggctcgcctctcctcgctggcaggctgttactgagggtgagggaagcccttccagccagttgccgggagccctgaagacgcggtggcggggcggcggggagcagggcgggaggtaagtgctcgcggcccctttaagcagatacaaaggctcggcttgttttgttacagttcattctattccgcgccgcggagcgcagcggccggcgacaggagacgcgcgcgcatgcgccccgcggccgccagccggccggcccacccctcccctcctccccgaagggagagattccaacgtgcttcccgatgggtcctaaaaccgacctgccgggagaaggcaactcccccccaacccttcctgaacccctatcctctctccttttctttcagtgccctggactccgcggattcctttggggctggagggccgcacacgtgttttactccaactgtttgcaacttttgaaacccgggcaatctggctttggcatttgaaaaccatttcaaacaggtgggggttggggaggctgccacactcaccctggcgctcacactcacgcacacgcgcacgcactcgcgccggccctaagcctcctaaccgccctcggccagtggctggccaggctgtcggtcacccagcccggctggttcgccgccccccttgccgcaggtcccactgaaacccccgagacccgccccggggcgctcgccgcctccctgcctgccctgcgcttgcgggttcgggtcctggcgcggggtctgccagggtctctgcgacccgggggagggggacggtgggatcctccggttccccaactgggatccctgtgcgggtcacacgcgctcttacacacacccgcatccttaaactttgggaccaactttttaggacacgggaaactacaggcaagagagagaagccatggtgctagtgtgggttcaggtattcaaccaaaaaagagatccctctagcttttcaactgccctgccagcagagactgctggacccagtcaatcatctgccccggcctcaagttcctggcagggccgagaagcctgcggacctactccggggccaggagataaggatccccgccgggcgcggacatgccctgcgtcctggcgcccgcgggggcgtgagagaactcggaattcgcagcccgggggtagctgcggcctccggaggtcgcccgggggtgc

SEQ ID NO: 32512 - DNA, 1291 bp, Homo sapiens
  chr3:69590903-69592194
  binary
cgaaacccttagtgtcctctgctaactccagggatttcccccccctcttttcgctgccttttagaagtatctctgggggccagatctgggcttcatcagcttttctcccgacctcccacgaacgcgcggcaaccgaagcacgcggtccccggcggcgcgtttgcaaaccccaccaacgccaacgcctcgaaaccgccaaacttcctgtctccataccaccaaagcgaccaaagcgccgtgccaagtgccccagggactccagcggaggctgcactagacctcgagccccagggcggggttttccgctctcccaaactcctgggacccgcacctccgctgggggtctccaaacgtgcgcgctgcgcccggggcgcaccgggcgcgcccgtggccgcgtcttgcggcctcgccctggcagcacgcttggggagcccggggcggtcgcccacctacctgctccgccacctcctccctgcggcgctccggggctgtagacggctactttattgtctcggctgcgcaccgcgcgggacctggggacccggctctgcgccagtcctgcaagtccactctgcgctgtgccttccccggcggcggctgccttcctcttcttcctcttcctctctgtccaagctccagctcagcacgtgagctacgcagcccgactcccgggctctctgggcagccagcgcctgccgcatcccccggcccgggtctgcaggtcgcccccgccaccgccgctcgccgtgcgtcctcgctttgctccacacttacagctgtgccccgggccgcctttctcgcgtccttccgtcctgcctgcctcctctcgctgtcagccggggctttcggctccctctctccccagcagcccccgcccgccgcctctccgggggctggggcggccgctgccaatgaggctcggctgatgcgctgttccggcccagtcattgtatcgggagggaaggaaggggagggggagagggaggaagggagggggcgccctcggcccccgccgcacggggctgcgggctgggctagccttccccggcagagaaagggcgccggtgccaggaggcgcggagcggtgcctgccaggaggaggggaaagagggggtcaccagcccgcgcctctccatcgctccctccgactcctccaagctctgggcggaacttgattctgcctcaccggcttcaggcatcccaggacctgagtgctgttagaataaagggtatgaggcaccggtggcagagggaggcgcagaatgcacccagccacccaagaggggctggc

SEQ ID NO: 32513 - DNA, 778 bp, Homo sapiens; identical to SEQ ID NO: 29128
  chr3:69788429-69789207
  binary

SEQ ID NO: 32514 - DNA, 976 bp, Homo sapiens
  chr3:71802532-71803508
  hyper
cgaccctgccagcccaggcaacctcccccgcgcacggccaccgtgaccccagcgcgggcgccgccgccggacccccgttacctggggccaaacgcgacttgtcgccaccttgcgtcctgggccctgcctccctcccggccgcctcccgaccccgcggctgctgcggaggcgcccccagcccagccgggcccaggcggtgcgggatgcctcggcggggctggcggcggcggccgcgctgcgcgctccggcggaggggagggggctccgcggcggcggcggcggcggcggcagcggcggcagcggcggcggcgggcccggcggggggcagagccaagaggcgcggcggcagcagcggaggagtaggaggagacggaggaggatgcggggggctgcggacggtggcgaggccctgtccgcagtgaagcccgcggcgcctagggcgcagggagtggccgcctcctcctgcgcgcaccattcctgagatggcggcggcggcacagcggcggctcggggagcccaggaggggccggccgggagcgggctgagccccgcaggacggggagctcgcccagggccggcggagcggcggagctcgggccgggcggcctgcgggagcggcgaggcaggggacggccccggggcggagcgcacggcctggtgaggccgcgatggcgaacgcgagcgagccgggtggcagcggcggcggcgaggcggccgccctgggcctcaagctggccacgctcagcctgctgctgtgcgtgagcctagcgggcaacgtgctgttcgcgctgctgatcgtgcgggagcgcagcctgcaccgcgccccgtactacctgctgctcgacctgtgcctggccgacgggctgcgcgcgctcgcctgcctcccggccgtcatgctggcggcgcggcgtgcggcggccgcggcgggggcgccgccgggcgcgctgggctgcaagctgctcgccttcctggccgc

SEQ ID NO: 32515 - DNA, 900 bp, Homo sapiens
  chr3:87841814-87842714
  hyper
cgccccggacccgcaagggcggcgcaagacttccccagcgcgcagtcagcgtcgcggccccgaaagctggcgacaggcgctgctgtcttcccgccccgtggggtcgcccctgccctcccgcgccccggggctgggggcgccaccttgccagctccgactgctgcagggagcgccaggggtgagtgtgcggatcagcgctgagcccgggagtgcgggtcacgcccgcagctggcgcgcaggtggggaaggggtgtggggacgtggggagtgggaggctggacagcgcttgctctcggcggaaacgctgggaagccggcgccaagtcctttcccacactactttgatctaacagcgcaggaattcaagaattgccctttcccttttctgcccacaacctctgctccctgggggcgaagttctgtggtgctaggcggagatagtggtcaaggctgggaggaagggaggggtctgacccgggcccaagggcgaggggtggcggtccaagccggcgagaccccacttagggcgcaggctcctggcgctcctacctcgggaagccgctggggtggagagagacggggcacgggccagaatccagcagcggaaggaggggagagtcttcgaatccatctctcggtgggatcttgagaggattcgcgggggggacggtaagataaatctgaggagctggaagaagccgtagatcggaaatcgcttgcagttttccaactttatttcccgcgggtacgaaccattaaggtaaaagggtcagagagagcttctacctcgcggctgcagcttgcctagttgccgcaggtctgactcaaggtagggttgttggcgccttcctgtttggaggggcaatcaagcaaaagagaaagggggatccgagagaccggc

SEQ ID NO: 32516 - DNA, 985 bp, Homo sapiens
  chr3:96532674-96533659
  hyper
cgccactttccagcctcatgtaaccccccctctgctgcttcctcccggcgctttgcttttctacaactggaagccgcgaaggcggctactgcgctgagccgctcgctctgctggtcaagtttgggcgacccgcgcggaggagggtcgggctgactgccgccgctgagctgtccccggacgggagcgcctgtccacggcactcaccccctccagcggtggaaatgtggagaagtaagtgggaggcggtgtcgggaactgactcctcttaaaacggtcggcgccgctgctctgaaatgggcggctaagtgcttgtgggactaagggcggcctcagagatgcccggaaaatcgctgccacggccagagtgcggcgcagacgcggcagagttggaggtgtccgcggtgcaggctgctgcccacgccgctcaggccaggtgctgagggctcagcccgcgcctcggccgaaccactctcagccccgttgagccacctcgtccgcccggctttcatcgcaccggccagaggaaagttcccgcggcccccacgcctcttcacagctgcagcgcctcccctgcttttggctccgcaagtgcccacttgagtcgggagaggtcctcgggccgccccaactgcccgccccacctggcagtccgtccccgcccccgtcctcgcggtgaggcgctccccgccccctcgctcccctcccccaaaccacagcccgagctcgctcttgcgcgcgcgcgctctctccggcccaagtgaatagtcctcgcgcaagcgggacactgtggtggatgcaattcccctcgcctccagccgcgaggagctccccggcgccgcaggcagcgtcctcctccgaagcagctgcacctgcaactgggcagcctggaccctcgtgccctgttcccgggacctcgcgcagggggcgccccgggacaccccctgcgggccgggtggaggaggaagaggaggaggaggaagaagac

SEQ ID NO: 32517 - DNA, 1410 bp, Homo sapiens
  chr3:98619774-98621184
  binary
cgcgccaacttgggggacagacgggcaagaccttgcctttgcaactcaaccccgtgagtacccagccaggtccggccacgcacgaaagcgcaccgcgcctccctgcagcgtctgcagatttgttcaggggccaagagacccgcagccccgacggaggttcccccgccgctcactcccctgggaccactcaccttgctgggctccagcgtcctcgagcagcaggagcaggacaagtaagagcaggaggaacagaggcatggagaaggaggaggagttggagcagggagggagggagcgggagagggggagcgcggcccaggcgggggcggcggccgcggcccggacttggggacactgcgggcagcgcctggctctcaccaccgcccggctcgccatcgcggcggccggcagtctgcctgcatagtgcgggtgcctcggcagccccgcgcgcctctggccgcggcacccgaccaggagacggcggcagcggcgggagaacaagaggcagccctcgcctcaccccgcgccgggacccttccgcccctcaccccgctttcacctactcctccttcgtcccttccctccgctccccgcgccgagaccccaggccggagcgcaggggaggggagggaaggaagcggagtcctcgagccgcggaggacggccgcggcggagctaaggaacgtgcctcccgcgccgcgctcctcaccagggtcgccgctcgccgcgctcacccgcggctccggctagctggcaggcaggcccgcagccagctccctcgcgctccctctcgcgcgcgccggccacgccccctaggcaccgcggccaatcctcggccagctctggtccgtctccttccgcgaaacccaatcagcatgctcgctcctcgctcgacccgctagttctccggcccattcctcgagctccaccgccccttacctccctcttccaatccccttcggcctttggaggcgtcccacccgcctcctccaatccaggtcccgccctccagcttcggatccccgcggcccccgcccggcccgggcgcctgttattgttgggccctcagcccaaactgatcccgcagaggcggcagccagctcgtcagtgacttccgggacgtcccccatcccgcgctccctgctcctcaggcccagcttgctccttgctcctttctcctcgctcctccgacgcacatcagaccactggaagggggtgggaaacctggatcctgggttgttttagctgggagctgagtctaagggactttttttttttttttaatggcagagcgtggcttgttttgttaaaactgccgccagttgttgcaacagctccgagttagaataatagatgcagtgttcagtttttaatatatgtgttccctgttttctctgctctttttatggc

SEQ ID NO: 32518 - DNA, 821 bp, Homo sapiens
  chr4:118954385-118955206
  hyper
cgaacagaggaaactcttgcagcctcgcagccgccctggtccagtgccaacggcaggagcaccacaggaagggaccgcgcgggtgcgccccacccttccagcgtcgcctcggggactcgcacccctttccctggccgcacaagacgtttcatccttggcggccgccgccaacccgccgggaggggcggtcggaactggcaggccggggcggaacccccggggtctccttgtcgaggcccgggcagccagatcctcagggccggtccgggcgggagcccggtcgatggaggcggctcccgtcctcagctcccgctccctccccttccccggggcgggcgcgcgcgggccgggagctgggaggcggcggctcccgcccgggaggcggtggcgagggcggcggaggcgcggccgggcgggtcccagggccgtggttctccagcgcaggagtccccggcgcacccgctgcgctcgccccgcagccgcagcctgagcggccgaagtcgccaccagctgtgtccgcgcagatcccgggcgcggaggggagaggtcgcccgcttgtcgcccccgccggaccccgggcaccgcgtagcacccaagcgccacccggacgaggggccctggggagcggctgaggccgaagacccgagggaaggaggagcccgcggacggctgcagccccaggtaatctccatggaggacggggccggtctcctcgcccagaaacccgatccgggcgccttggaatgcggactccagaggcggcatctcgaccagacaagtttctcgcggcttggaatgagggagtcctgaaaccgacactc

SEQ ID NO: 32519 - DNA, 1121 bp, Homo sapiens
  chr4:119273336-119274457
  hyper
cgtccggagtttccgcggccgccccgaggccactaaccgtgtctgcagtcgcagtagccccagtccaccttgccacgggcgtctccgtagaaacaccagggtctgcccgcgccgtcggggctccgacaaaagttgtggcgctgtcctcgcagctgagcccagctcgctgggggcgaccgctccaggaagggtggcacctccgcccaccgcagacacggggcgccgaagtccgtcacgctgacccatggctcgccggcggggcagccccaggggtgcggccggggcgtgtgcccggcctggagggcgtgcgggcgctgggcagggagcgcccgcggggggcgcgggaagcgcgggagaggcggcggcggacgcgtcctcgggggccgctgctgggtgggaaggtaataggggtagtgcggacccgcagggggcgaatggcggtggctgtggtggagggaatcattgaggacagaatcaaagccgaccacttcggggagcgcccctaacatcagggctagcacgaagcgggcgagcgtcatggtgccagcgctgcggggtctggtccatgctccccagcttctcgggcttggagcggagaagaggagggggcgggggcggggctgccgcgtccctcgaatcccccagccccctcccgcccccgcacgcggaccgccctcgcctccccaaccttgcctcccgccgctggtgccctgccgcgcctcggctcctgtcccctggcggcggccgcgggtggggaaatctggagctcagccgagccccggccggcggagaggaccggaaaagagaaggcgcggacgcagcggggagcggttgggcctgagccccaggtagcggcgcaggcacgagcccgggaactctgccccctgggggcgggcgccggccgcgcaagctgctccggacctacgctcggcccctgccaggcccaccgcagtccgcccgcacggcactgccagctgctgggaccgagcccgagggtgcccgcgcggagcacggtcttggctgccccttgccagcatgcagcaccagcacagcccggcgttggcggctcccaaatctggcaccggcccctgccgtcatctctcctccaacctcgtcgcccc

SEQ ID NO: 32520 - DNA, 1246 bp, Homo sapiens
  chr4:121843130-121844376
  binary
cgtatgaatgagattctacggcctgcgtggagcggcgctctgggctgctcctcccatccccgcatggaaagttaggcgtttctagccacattaattcatcctaaaggaaaagaggcgacagcggagcagcgtgcgcgcgggggaaaacacccgcccacgcgtgccttcgccaacgcaaagacgcagctcacacccgtaaccgaggaagagggaggctcccgccgcgctcacttcctgcgggagagaggaaagacatcttgcggcagggaggccggtggcagttccgcccctggaccggccggcagcggagcgcaccccgccgccacctacgtggcgctgcctgctcgggtggcgcagcgagtaaaggccacccccgccgtgccccgcggtccccggccttcccacggacgcctggcccggcccgggcgaggggcgaccggggtgaagcccgccgcgccccgggccctgcggcagggcgactccgggaggcacagggcgcgcgaggtgcaggggcgcgcaggccgccgccgggtcacccacctttcgcactctgcgggccgtgtagagccccatgccgtcctgaacccgggaggacttcagggagaacctgtccggcacgtacatgcccagcattttcccgggcgcggcggccgccgcctctctcaacaccggcgcttagcgcccggcaggcggcacatcgaaatttggggtgccagggtagaggggagaaaccggcagggaaggaggaaatggagttttcctcccagaatccccacctccctgccgattccaggatcccccgcggctcagcccctcctcgtcccgggtcgggctcggcccggatccgttcctgccattcctgctgcgggggcgcggggggcgcgggcctgggcgctgcgggcgccgggacgccgctcgctgattggcccgaagttggcggctctgacccgcgcccgggcgcgaagcccggagcagggctgaccccagggcctcaaacccggaggcccgcgagctgcgcgggccgtcagcacccctagccccggcgcggcggcgtgcgttcccgcctttgtccagctctgggttttcaaaccttgccccgctgaaccattactccctgtaggggagtctcgcttgcttctcttcagatgcaaaacgaaatggaccttcacacagctggggcatcctccaaaacaactttatcaagttcctgactctgaaagccagcttattgccgactactgagaac

SEQ ID NO: 32521 - DNA, 872 bp, Homo sapiens
  chr4:121992978-121993850
  hyper
cggatagggcgcccttgagaagcttcttgggccttgaagatttgggggcgcgtgcctcgagcccccatctcggatgacccttcgggcgtgaacgctccttgtgctaggtctcagggtggcgggctaaggcgtcgggtctctggggcattgctttcctctccccacttaccttaaaaagatctgtttttcgtagggaaaatagaaaaaaatccctccccgtggtgtggtgtgcgaaatagtccacgtccccggaccctgccaagatgctaagcaccaatatccaggaacgagaagcctggagggcggggacggaggcagataaaagagaaaaattcaatccgctgaagtgtcccaactttgcggtcggcacagcaaacttcaaaggcgggcgagggcgggcggcgcgcggtcgccgaagttgctgcgaagtggagtagggagccgcgcggggctggggaatcccggggcagcgccgagaagcggcgggaggtccttttaaactgcagggagcgtgcgggggctgggcggcgggaggatgccgcagcgacccgcggggctggcgcgggcttcgccggccgccgctagtcgcacaggcgcctggctggagcgccgcgcggggtgctgggagagccgggcgcacggggcggcagcggccgtggcgggtgcgctgctcagttagctccactctctcgcggctggaagtggggagtgtgtgttcgctcccgagtgtcactgctgaagcccggagtctcttcccctcccagccctaacccctcccgcctcaccgctgcccgcccgccccctccctcctctgcccgttgcctccccctccgtccctccttctctccctcccgctgcgcgccagcgcgcac

SEQ ID NO: 32522 - DNA, 824 bp, Homo sapiens
  chr4:128544031-128544855
  hyper
cggcgcctggacgcgggtgtccctggccaaggcggcctcgctgtcctggaagggagggtgaagagctgcatcccgcactaggcggcgaaagagggcagcgccaagcggcggggtccggaggcgctcgacggctcgcgcccagcgccggagacgggctgtgtgttgggccagtggaagacaccggagaaacccagacgtggaagaccgggcagcctggacttcgcgagccctggtggggctggcggcccacagagcccccacctgccccgagctcccacagcgaggagtggccgcgccgcccgccagtgcgccgggctccgagaccggcaggggagcacgcgggcgaaggaggggccgccgtcgctgacaccaccgccttcagcccttggcttccgcgcgtcggaggctggcacctccaggttcaccgcggcggccggagctgtgcgggggccagacggttcggcgggagccggggctgggacctgggtgacctgtcgtccgcccctgtagcgagtctccagtgggcatgtttcaggtgggcaggtccagcatccccaaacctgccccccgcagcctggaggacctggactcagtgcagcgtgtcctgttacacaggtcagtgcagggccccgggacgcggggcgagaccgtcctcttgccccggaaatgttggcgagggaggggccgcttttctttctggggtctttctggaagcatctgacttgggattcgccttagtgcggcgctggccgcgaagggccgttgggacctgcaccccaccctttccagaatcgggtgccagcgatccaccctgtcccgctgcc

SEQ ID NO: 32523 - DNA, 989 bp, Homo sapiens
  chr4:13545599-13546588
  binary
cgctccggcccgcggcttcctcctctaggtctttggaagcggccagctcacagaccggctggccgaggctcaaggatccccccgcaaggccggccccgctggccccccgcgcgtccgcgcagcgccgcctgctctcgttctcctcgctgagcgcggagtccgagtcccagccttccgggctctccgcagtccgccccgcagctgttctggtaccggcaggagacgccagcagagagtcctcggcgccccccaacgcgcccgcgtccctctccccaaagagccgccaacagcagacagcgggagccgcggccaccgatgccgctgtgcccccgggcgccgggcgcccctctggcgcggccagcccgccgcgctcctctttcttgttgaggatcgcctggatggagaaggacgtcaaggtgttggcgccgcgcacagccatctgcgccgcgggcaggagcggccggcggggcgggcagctggggcgccgagcagctccgagcgggacagagagcgccggcggccgcagcgcgagtgagctgggtgtgcgaggccgccgccgcccactgctgcgcggcccagcagctcccgccccactccgtcccaggatcagcgccgaccctcgcccccaccttagaggcccaccccgcccggagaccccctccccccgaatccagagccagacgctctcctttcgcagctcagctggattatctcatcgcttctcgcccttaggggcgggctggggtctgccccctcgggggacgtgaaggaggattggcgggggcccctccgtggcagcagtcccctcccgagcgccgccggggcgcacagcccgagtcactttttctttgcgcgtctgtcccttcctcgcctgcaggatttcgctcctggcccgtcctccccttccctgctgggcaggctcttccggagcccacccccggcggcggcggcggtagccgcggccgcggccgctggattccgagaggcgc

SEQ ID NO: 32524 - DNA, 983 bp, Homo sapiens
  chr4:1399981-1400964
  binary
cgagaaggaggtggggcgcaggggcgctgcgggccgggccgctccagccccctcgggcgccgcaggcacagtgtcgctggccgcgagcggcggggctccagcgcggggaaaggccggcagctcggcgcgcccgtccatagcttcctgggcagcggcggcgggagcgggcggtgcgggccccgaacctggctggggaggcggcggtagcgcgggaatgtccccaggagcctcggggccgctagcgctcatgccggcctcccgccgctccggcggctcgggccccgccacctactgggctcccatccctggcggcccccgcacctccacacgaccccgcgcaggcggccgctgctccgctcgctctcggcgccgcgccctgcgcttggccggtgctgccttcgccgccgccttaggcgcccgcggcgcccggtccgcgcatttatggcagccccgccggaggcgcccacgcgcccacacgccgaacacacgtgcgcccgcaggcggccgcggggctccgccgccctcgttagcgcgcgcgcctaattggctgcgaacggtcccgggccgaggaggcggaccccgcacaggacacacggacggagccgccgggcgggacgaacagacacgcagcccggagcccagagcggtccgcaggcggctgtggtggtcagcggcgcgtcgctgcgcctccgctcgtccggaaacggcgcgccagcctccttggctaagggggaggagacagccccggcttttaaataattgcgggatcaatctgcggcggggccgcagcgaccccagggcgcgcgggccagcgagcgccaagagttggctgggacatcccggcgcaggatgcggtgactggcctggcctctcctccgggcccccagcgcgcagggccctgagctccgaaggctcccacagctctggcgcccctcggcagttggggtggggatggggggagaggttctcacgcgcgattctcc

SEQ ID NO: 32525 - DNA, 824 bp, Homo sapiens; identical to SEQ ID NO: 29148
  chr4:142557243-142558067
  binary

SEQ ID NO: 32526 - DNA, 208 bp, Homo sapiens
  chr4:1514858-1515066
  hyper
cggccgcagggcacgcggcgctgtggagcgcatgagcggggtgcgccctagggtgcggcccgcgctggcagccccagcccgactgccgaccgccgctgccgtagaaactgggcccatccgcggtgccggtgcaaggtgcggccgtggggaggcggcggggccgggccgccgggagctgggagccgcggccacatcggtggagcagggc

SEQ ID NO: 32527 - DNA, 992 bp, Homo sapiens
  chr4:152246019-152247011
  hyper
cggcgcaggcaaacccctcggaaggtgtcgttgtccaccgagacggccattgacctctgactcatccagagataagtcatcaaccaggccacaagtcccaagccagcagctcctggatttagtgtgcacggaaaatttgagtttcagctgtacgaccactagcagttaaagacgggtctgaatttcctcgggctcggccggaaagtgaggatggcgatggaaatgccaccctccccgagtctggcctctgagagttaaagaagccggtcccatcccggcgcgtgaaggagctgccgctgtgtggggcaggacccgagcggccccagagcgcgcagctctgggtccccgccgccccgtcccccgcgcctctcacctgcggccgagtggcccgagagcgcacggccccgggcgcggcgctggccaccaagttcgcggcgctcgcgtagctcttcctcctcgtcctcccgccgccggccctcagccatgggcgaggcgcggggcgcagccgcgggatggccagcgagctgcggccccggcgccccagaacgcctgcacccggcgccccacgccaccgccctcgggccggggggaaggcggctcccggagaggaggcgtcggcggcggctgtggaaatggccacctccgcgaactccacctgcagccggccgggcagcggcagggcgcgggccgagccgattccccgcctccttgcggcgtcccggcggcctcttaatccctggcctttcccactcccactcccgctctcttcccccttcctctttgccttccccgccccgtagagctccaccgcggatcgggcgggttcggggctggcctcgcctcctcagggaggggttatcggcccctaaggccgccccacagccacacacgctggaaacaccagctcgacccaaacaaacgtgtgcaaaataaataaacgggataggaagaggggaaagaggaggtggcctggcctcttcctgccttttcac

SEQ ID NO: 32528 - DNA, 1048 bp, Homo sapiens; identical to SEQ ID NO: 29152
  chr4:152329824-152330872
  binary

SEQ ID NO: 32529 - DNA, 796 bp, Homo sapiens
  chr4:155664665-155665461
  hyper
cgaaagattcggtcaggaaagaatctgcaggcattcgaggcgctcgcactttgcaaagtaaatgcaatctctttattaagccgaagtccctcatatctatccttttagaggaaggtggtccaactcagaaatctctcccaagaggactttccaccgaagactaccgcgaagtgccaggaactcgccccagtcccgacaggtgcaggacctttcgtgccgccacaccttgggactctacctccctaaataggccacttaaaagccagtagtgcaaccgggatcccgcggcgataaagaatcactgtgcagaaccctggagctgggagtcggcccgcccccctcccaaagaaaccgggatcccgcgtcctccccgccgctagcgcagcgcgccagcggcgcccaatcagtgagctttccgggtctgtgacggccttcggctccgccccctcgacggccataaaaagtcgcagcgaagcctgcacctccgagcaccgcgcgcggccctgcccccggcacggcccccaggtgcgctccttctccggctgcttgtagcactggtctcactgtccccgccgtcagccaccggttccttatccgtctcattccccattgtggcttggctgagccggtcgccaggcctcgctgtcctcctttgccttcctctctcctcagcggccgtactttgcgccgtacctcacctggcctgcaggtgagcagcagcgcagcacccctgcccggcgagcttaacttgcccagcccggcccctgccggagtggcaccggcacctctccaagac

SEQ ID NO: 32530 - DNA, 726 bp, Homo sapiens; identical to SEQ ID NO: 29154
  chr4:159690014-159690740
  binary

SEQ ID NO: 32531 - DNA, 868 bp, Homo sapiens
  chr4:164253272-164254140
  hyper
cgggtgtgggataggcgaactcgggcgccttcccagtgcctcggccttttaaagagaaccggggtaaaggaaaacttggatccccatccagaaattccccgggagcaggtggtgggaaagcccgaactccgcgtagggtaccctctcctttcacccgcgtcgtccccatacccttcggcaggagcccgcgaacggtccggtgatttggagcaacctgcgacctgcctgcactggagaccccaccttggtcccccagagccagtttcggacactcgcatcgtttttcttcccctctcatccttcaccttgtcaatgagagatttcgcagaagtctctggaaaggcataaactcgcaacttaccctctttggaatttgtctttttcgctcctgcttattaaagaaggaagggtgggaatggaagggagcagagtggggaagatccgctggtatttctcctgctcagatcctaaagattgatgaagctaggaagagacgcctccttaaagccgaactccacctcatcccggatcacgtgacggcgtcccgcgagtagcgcctgaagctcccccaaccccacaaacacctcacaaaggtgcacacctcggggaagcattgcctaggaattttggaaagaaaagcaatccaacagaagccacacattattcgacacagacctcccgcgcaggggaaaggaagccctaatccccacagtcctcgactccggggaaggcagggcagtttcccgaggcttgaaaaagtcggtgccactgtgcttttctttgtttgcaggtcagtgccatcttgtggccgaagtcatacccggctggagagctcgagcgccagcccaaaccaggaatcaaagggctc

SEQ ID NO: 32532 - DNA, 767 bp, Homo sapiens
  chr4:165304258-165305025
  hyper
cgtctctctgcctcgactggtcactccacttcctggagctccagaaactccctcagcacctggataactgcgacactcacccgtgagcgcaggaccctcctggcgtcttaagtcccagctctcagtcccgctggccgcaggaacacaatgacatctctcgcccaggagggcggttgcagggaaccgaaatcggacacaacagttgcagtgaacccgactcagggttgagcgcatcagcgctaaacccaagacaaaggctgccctgtgtcttccgtactcagcgctctcctttggtaatcggtccccgtccccttcaagcccacactaggagcgcgtgagcctgtgaagtggctgtcatcgactccgcgctttccgaggggtgcggctccgtgactagtaccacgccggtgtaaacagcgcgccgcgcactggggatccgccagaaacggcgcgcgcgcagagcgggcgctgggggccaatagtagcaactaccccaggctgcgggctggagccgcctcctctcaccagagaggcgcctactgggcgagcccgccgcccgcaggttgggtggcagcacccgccgcgaaccccagccacgctccccagtggacccaccaggcaaaggcacctgctgcctgccctccagggctgatgctgtgccaagccccgctcgggatcagggacaagccgcccaggactaccagccggagagaaggggctcccagtgaggctgattgaatgaatgatgtttgcagtcacttaccggc

SEQ ID NO: 32533 - DNA, 755 bp, Homo sapiens
  chr4:166299933-166300688
  hyper
cgcagtgacgtgggtgggtcatgggtgtctcaatgacagtaacgttcccgaaccccggaccttagctgtcatttcacctgcgtcgtcccggacgccatttggctgttgacgtggttccgagccagcaaataacgccagcagccctcccagatccacgccggcccgtctctccgccggccccctcctcgcagtggtttctcctgcagctcccctgggctccgcggccagtagtgcagcccgtggagccgcggctttgcccgtctcctctgggtggccccagtgcgcgggctgacactcattcagccggggaaggtgaggcgagtagaggctggtgcggaacttgccgcccccagcagcgccggcgggctaagcccagggccgggcagacaaaagaggccgcccgcgtaggaaggcacggccggcggcggcggagcgcagcgatggccgggcgagggggcagcgcgctgctggctctgtgcggggcactggctgcctgcgggtggctcctgggcgccgaagcccaggagcccggggcgcccgcggcgggcatgaggcggcgccggcggctgcagcaagaggacggcatctccttcgagtaccaccgctaccccgagctgcgcgaggcgctcgtgtccgtgtggctgcagtgcaccgccatcagcaggatttacacggtggggcgcagcttcgagggccgggagctcctggtcatcgagctgtccgacaaccctggcgtccatgagcctggtaagggc

SEQ ID NO: 32534 - DNA, 937 bp, Homo sapiens
  chr4:166794712-166795649
  hyper
cggcagccagaaggacgacctggcaggctgcgagcgccagcgccgccagagccgagtttgcctgcgccctccccgcctccgagtgcagagttccttacctgccctccgcccacccgtgggcccctagccaacttctccctgcgactgggggtaacaggcagtgcttgccctctctactgtcccggcggcatccacatgtttccggacacctgagcaccccggtcccgccgaggagcctccgggtggggagaagagcaccggtgcccctagccccgcacatcagcgcggaccgcggctgcctaacctctgggtcccgtcccctccttttcctccgggggaggaggatggggttgggaacgctttccccgaggatgctcgtgtggctggtggcctcggggattgttttctacggggagctatgggtctgcgctggcctcgattatgattacacttttgatgggaacgaagaggataaaacagagactatagattacaaggacccgtgtaaagccggtaagtggctctccaggttgggacggtggcgcgccgggggccgctgcgctgggtttcccatgggtggcggtgggagctcacctgtttccttccctcccgcgtcagcccctccgccgcccctccttctctccccctccttttccttcccttccccacccgcaagtggcagccgctgcggccccagttgactagagttctgtgccagtgggatccactgccaagctcccatctcccagtttgggaataaggtcctagagtttctgatccctctcccctcccccagcaaaacgaaacaagtcgtaaatatagcttgctgctgtaggttttaaattccaacactcagcgggctttatgcatatggaagggacaccgtcttctttcccctctcccccagggcgcggtttcccagcgcttgttcgagagc

SEQ ID NO: 32535 - DNA, 63 bp, Homo sapiens; identical to SEQ ID NO: 29158
  chr4:169552556-169552619
  hyper

SEQ ID NO: 32536 - DNA, 1749 bp, Homo sapiens
  chr4:170947105-170948854
  hyper
cgcgctcctcgccctcggaaggttacggttcgagcccaggatgcggcagtccccaaacggccagcccccgccccgcacggatctcgaagcatcctgcgaccccctggagcccgctgcccggaccctgcggcgtctcgcagcgcagcctccgccgcagtctcagccagcccaaacacccgaaagttcggcggccccggcgccgactcggccgccgacccggtgcggggctggctcccacccgtgcccctccgccccggcccgccgggggcccccgctaacctgacaccgccgcgccactcaggtggccgccgtgcacccctcgccatggccagcccgacagcggccgctgcgccgcactctgcgccggacgcccggtagcgcctactgcgggcgagccgcctccgccggcgcctcacagcgttgcgagctgcgccgccggctgccgggagcgcggagcttcccacctacaggagcctgggccggccggggccgagcatgcccagtgcggctcgccgggcggcgcggaggcgcgggtgtagccgccgggttttcgcggcagccgcgggcgggggcagcggggcgggcggtgcggcgcgagccagtcggtgctgcggagcggccccgcggaggagccaccggaggctgtagttgccggggagtcccgcattcagtccgctcagcctctgggccgggcctcggcggcccccagagccccacacccgcaggcccagggcctccgcggcagcgcgggactctcactccgctctctctcccgcccggggcttccaccgcaacttctgtgggcgtcgcatcgcacgcgtgttcaaggacacccaggaaaaggcttcttagggtcccatcctggggcgctaaatgggaaccagtcaacccacccccaagcctaccctgtctccttgcaatcaaatgcaatcacgagcaaaccaccttgcttccgaaagcttctcaggccttcccgggcgactgcgctgtaagtcttaaacgtctcttaaagcaaagtccacagatggaagagtctggaaaaaaacccagcgggccgttccctggtgactttctgagtggtggggttccaggaatttttttttcattttctttaaaaatattatttgtaatttccacgttttttctaatgaaccataagttgattttttaattaaaaagtagagtactctaaaattattaagtacctacagaagtttcgctacacgatcctgcaatgttagtggcttcttctcctccttatctccctttttttttttttttttttaattttaaaagagaacagagactctcaatttctggggcgggaccaggctccttcccccggctttttagtgcccgccctcttggccacaccccactccggcctttttactcccgtaccgccctcttcccggtgggttgctgcgaaaacccggaaaggtggactttccacattgacgctcccggcggctccggcagccagactgggcatgttccgccgccgggtcaggcattgctgtgccaagagaggagctttagcaactctcagtctctctgctcctctctgttcctggcaaactggcaaagtagtgcctctgaccccacgccccgaggtcggacctgcagaagtgggtcaggacccgactgagcatgctccgggcagtgccaggctgccgcacgcggctgcatctggttgcccaaggttgatgtagccgcggtctctcgtcacgacatcgaagctcgggaaac

SEQ ID NO: 32537 - DNA, 991 bp, Homo sapiens
  chr4:171010636-171011627
  hyper
cgcagagcctggctcaccgcgagcgtgcacaggggtacgcatggatgcaaccaagcggtggcttgctagggaaccctccttagaggctgtgcgaggaatgccccaccccaaaggagagatggtcaccccgtttctcactcatggtccggatgggagaagggtttctggctgcgctcgctgccgtgatgaaccgtgcgtaattcatgtcttctgacagccaagcatcaagcttcttcttcagtggttgaggactagaaaaaccaaagagcctcgtcaagtcctgcctgctaactcctcactctggcaacgccaccgcgagatgtgtccccccgctgcgtctggcttcccgcgcgcggtgcccggagaacgccgccgaaactccccggctggacgctgcgttcggtctcccggtcctaaacgggtctggggctgtgtggcgagcccggcaaagtccacgccgcacgcgctcctgcggccgccagggcccaggccggttttgccccgccgcgggcctcgccgcgccccctcccgccccgcgccgtggcctatggccgcccgcggcgcgcgcctccccgtcccggatcatcgccctcagagcgcagggcgcggggtagcccaggcgcgaggcgcttgcagccccaggccaatgactcttgacctcgccgctgggaatcaccgcaacccggcgtccgcgttggccggcctaggcgccggcccagaggctagcccaggggctgaccgaggggaccggaagtgcccgtgatcctaatcctcgggaaccatctggcggcgacttgggtccactgcagggggctcccgagctgcgcccagccgggagcggccccaccctcgttcccgcgcgctccgctggcctcctctcagtcactgggactgtgcattttgcccgctcagaccatggctatgctaaatacccatctttcgttagtgaaactctgggcactctcctgggaagcatcccggcgaccaagac

SEQ ID NO: 32538 - DNA, 1480 bp, Homo sapiens
  chr4:174450407-174451887
  binary
cgggtggtggggaaaaccacctaccagactcatttcgccctccgcgcccctccacgcgccccagcgtgcgcgcagccccgccgcgccctcggcccgggcccctgcctcagcgctcggcgtcctcccccaccccccaccccccagcccccgggcgcccgggcccgcccggcagccgcagagggggctgctgcagcccgggccccgtccccccgcctggccagccgggcccgcctcagcagcgctgcggccgccggctccccatggggcgcggcgagctggtcctggcaccgtgcgcccctggccgccgccgccgccgcctccggttcccgccttgctccacggcccgcgcttcggctcctgcttcccgggctgctgcgcggaggcagaatcctctcgtgctcatacaaaggtgccggggctcccgcgaggctggtacgcggagtctcgggaatccaagcccgggccgcggtcctggcaccgaagctaacccggaatccaggggcgagtctgagccgcggctggaggagccggtccagctgtgccggggggcggcggggtcgactgctcactgcaaagctacctccgtgcgaccctccccttcccgcctcttcccctccccccaccagcccgatctgggttcttgggcgcttattgttttaatgaaatttttggttgttgttgttttggtccttaaatgtgattttagctgcgagtaacgtgtcctcgctcctctcgcgctctctcggagggttttcagagaggtctcagtgcatccattttctcagatcctctcctttcggggcaaggatctggggccctgaatgagccttggagctcgaagaccgcggctcgggctctcggagggctctgcgcggtggccgaggaagctccggggtgacggcggtggttctcctgggctggacgacgtgaggggagcaagcggattttcccagcaagatctccatgtacagctacatctttagggccgctcgggttaatatatgtcgtcagaggctcctcacgccaatcccggggcggcaggggcggcgcctcgagctctcggcaataaaactttttgatgttcacgttgctaattgccgaggtcctcttccaggattggctacctcctcataaccataagataattaaaacttggcggggggggggggcagggttaaaaaaactttttttatcagtcagaggataatgcaagtgtttaacagatgcttcactattaaaatattttccccccaagtctcaaatattgaagaatctctaaccaggtacagtatcactctgctctcttttctggttgaaaagaaagaaagaaagaaaacgcaggtattgcttttcgaagtgctttgtaggtaatcgaggtaagaaaatatacgcaggcagcctcttacaattttatgcaggggcgccgggagcctcgtgacgggcggtgggggcccccacaaaggcgcggctgggagctggc

SEQ ID NO: 32539 - DNA, 844 bp, Homo sapiens
  chr4:1796303-1797147
  binary
cgagggcgcttccccgtgggtgcgcgccgagctccaggcaagcgaggggcgcgtgtcccagcgtcgcgggccctagactgggctggcggtccaggtcccgcgggacgtcgagggtctgaagggaggtcccaaggggcgaggggaggggaaggggcgcccggccggacctgcacacgcgccgcggttcctcgtgggccgggccgagagctccggtgccgccgccgcgtacacccgcagccggctccggacgggcgaggggggcgcgcacagctcagcccggcggccgcgcggagggaggccttggcccggtgagctcgcgccccacccgggccgaggcccgaacagccgcttctttgtacctcgacgcggccacagaccgcgcattgatggcggctcggcggctcgcggggaggtgtgagcgaccgcgggcgcggcgggccggggagggcgcctggagggccgaggcagatggcgtccgccccgcccgcgcccccgcgcccctttctccgtcggcggctgcagcctcccggaacaatgtcattttttttatgaatgaaagtggcccggcgcttgaatgtgcgtgtcattcagcggcgtgacaggggccgtcgggaggtcagcgcgcgcttttagcgtctgctcgggcggccccgcttccaggggtgccggaggggcggccgcggggggagcttggctttcgcattctcattcagataaagatattactccctacggcccgggaatgtcagccagccccggggaagggcggcggccaggctgcggagcctctcctggaccccctgcgggcgcgcggggcctcccccagtcgctcctggaacgcccc

SEQ ID NO: 32540 - DNA, 2078 bp, Homo sapiens
  chr4:184019224-184021302
  binary
cgccccctctgactgaggggctggggaccctgaagcttggcgtccaggccccgccagcgctgcacccggcattgtcccgcctggggcaggcgtccggtccctcggcagtgcgggccagcacgtacgtagtagctgctgaataaataaatgcctatgcaacagggaacgtcccggcccaccccggccgggccagggcctaggaagggcgggcgtccggcgccgccgtgggtccctccggcgtggccgcccacacctcctggccacggcggggctgcggtggggggacatcctggggcgggcggctggacggaagggactagagtcggggcgcgtccacggccaaccgccccgaaccaagcaggggaggccagggaccaggagcttccggggccccgcggctggagcgcccggacgcgaaggggcggcgggtgacggggcgcggtgcgggcggctacagggccggacgggagttcctccgctttccgccgcgcggctcgcggtctcagccgaggtcatcgagggccaggagccctggcggaggccccgccgtcccggacccaccgacgcactcccagggcttggcgctttcccaccaccccggaccgcccttggggtgccggaggggctcggggcgcggcgtggggagcctttgtgccctctccgcttgttgaggttttttctccggaggagagctccccgcccgccacccctttcctctcgaaagttttgtggtttccctagaagacgaaagaggttgagaaggttgcggagacttttgcaatcttccccgtccagaaactctaaaacctctcggcgtttggcccaggggagctatctggggtcaaggggagggagctggccgcacattccttcgcccgccttcctcccacctggagccgcggccccgcggggcagtgcgtccgagctggtgcggcgacgccggcagcggcggggttaagctcaggaatgcggcgcgaggaatgcgcatgcagatgaggcgggcgggcgcatgctaatcgcatgcaaatgaggggcccgccgctgccgcggcagcgccgcagcttcccggatccgagcccagacggcggcggctccggcagcctgggcgccgcgaccctcggcggccagagggggacggggcggaggaggaggaagaggcggaggcagcggcggcgagggggaggagggttcgctcgccggctccgacgcagacatggtggactgatccgcagcggggccgcgaacagcgtttcctgaggcacctcccgcgcgtggttccgccgcgccccgcgccctgcgcccctcagcccctcgccggcgcccgcgtcgcgggttggcagcctagcccggcagccgcgttcccgccgcgtcccgcgcccggtacctatggaggcgccgctcgccggcgaggccgccgaccatgcctaggagggccgggagcggtcagctgccgctgccccggggctgggaggaggccagggactacgacggcaaggtcttctacattgaccacaacaccaggaggaccagctggatcgacccccgggacaggtgggcgccggccgcgggggcgcgggcccgttcggacacggcggctgttgtcccggagacccggccgcgcggggggctggggcggcgccggcccgcggtgccccgaggggtcccgggagggatgtggggctggctgctccggcggggccgaggagccgcccgtacccgggctcctccgcccaccggcttcccgacgcccctccggggacccggccccgaggcaaggctggagtcgctgccccgggccgacgccgcgcgccaggctaacggacccgaggggccacctgagccctgttaggaacttccctaggcttcgaggtgcccacgtggaggctgcaggacaccttcggcctctgggcggcgggggtgggctagggcctcactgccagttggggaacgagccctccgggccacctgtggcatccctcaggccgtccttggcgcgggagcctgggctgcgagctcttggcgggggcgcccagactggccggaggtcccgagctgggaaggggctcccgccccccgcc

SEQ ID NO: 32541 - DNA, 1357 bp, Homo sapiens
  chr4:184718577-184719934
  hyper
cgaagggtggcccggagctgcaggtaacgcggtccagagctcaggccggagcgggccccgcacaccgtcccttccccgcagcgacccgcgggctgcgcccagggactgcgccgggcgcccgggctgcagggacgcgggcgcgggggaggcgcggccagccctgccctgggggacggtcgcgctccccgctggtcttgcagccacgtcccggcggctgttcctgggagcggcgggaggcggcctcggtgagccaggtcggcgcggcagatgcctgggaagatggagaagtttctgcagatcgcgcctcactccctggccatcgtcctgggcccggcagaggcgccggcgggggaaaggccaggggcagcccggcccgcgcccccggcccagccccgccagctcgcccggcaccacatcggctacgagatcttcgccgacttcaaagccgagaacatgcagcacttctggaacaagaaggtcacggccgcggtggccgagaccttcttcctgggctggatcgacgagcaggtcctgctgatccagggcaaggaggaacatctggaggcgctgcgcgaaggctggacgcgccgggccctgcggccgccctcgggcttccacatccgctgcctgggtgagtgcgaccgccgcgcgcccgtcccgtcccttcccaccggatcgcgtccgtgccgtgcggtcgcgggtgccccgccctgccccagcccgccgcgggcaccgccgaggctcccctgggtgcccgcgtccctgccgggggaggagccgggggccctctgcgagcgtgggattggggaacttcctggcaccgaaaggagggagccgtcccattcccggtgcgccgcccccgcctgcccgcgggagcctccccggtggcgggcggtgcctgaggccggccaggtgggcgccgcggctcggcgggcggctcggagggcgcggcgctcggggcgcgtgagtgtccccctcccggcactgctccgcggctggagtgcgcgggccgggcggaggtgggcggggaggattccggggctcgggtcgcgcggggctcccagctggagcggcggctcaggtgcgcccgggacgcccttccctgggcggcgactgcgggggacgcgccgggaagctagggttgaggctgagtgttgcgcgcacgcatttctcaacgaggcaaggctgcagagttcgtcttaaatgtctcacctgcagcacatctctcaagtcgttttgtgtgtctgagggaaggaagagacacaaagaggccggaggaaaaaaaatctgatcctcaacaaaagagagcaaaacgtaaagaggggcagagtcgcccagaggtgaaggtcgccgccgc

SEQ ID NO: 32542 - DNA, 1311 bp, Homo sapiens
  chr4:187647047-187648358
  binary
cgggtgggtggtcagtgaagactggggtgagcaagcgcccacgtcgccgagcgccggggaggtccaggttcgcctccgcacagaaccctgcaaggagcgcgcctcgccaggtgcccggactagagggcgctgcgcccctgcaaatctcgcggccccgatgcgccctccctaggcaccattgctataataagttacattcaaaataatgcacaaacagcatcgcctctcaagttctttttaacagtgctctatatgtattttatgaactcccaaagctatgcatacgaatctttcatcgccgatccgcacaaagccagagggatgcgcagctcctggagccgagaacccgtagggcgcacacgcttccccgcactcgcttagagccacacaccccacgtaatttcattaacgtttaaacttaaatgccaaaaggcatgcacgatttgaacaaagaactcaccagtctagccgagtcctcggccctgggctctaaagtcctcggcagctccgtgatcccctcgcggtgtagatatgtgttaagagccgggtttgaagtaccaactttgcctccccgggatcttcagcatgtccctaaccagagtgccaacgtccgtgccgccgggacccaggcggccgcatctccggaggcttccgaccagggcaaacttaagcaccaaacgcaggcgaaaagagagtgcgcggggccggaacgagggcccgggagcagccaagtttgtcaggacgtgcccaggcagccagccgccgagttgaggagttgcggccgccggctgcggcgactcgctgcctctttccccactccctcccccttggaggcggtgggggaggggaggtgacgtcagcgccccgcctcgccccccgccccgggcgcggacgggattctccggctgggcgcgccaccccgacagtggcagcagcggccgtggaggctgcgggggtcccggcctctgcggtctctctggccggccgcagctgtggcgcgggtgaaacgcccgccctcctccttcggctgcgtctcccgggcgccggcgagcgcgggcgttcctcgcactcagcgcctggagccgcctggagccccgctgcgcgcacttccccggctcgcggagcccctccggcggcgtttcccacgccgcggactgcaggtgatgctcttcctcttctgcagccgaaattcgtcgcgatgtgtcgcctgccagatttttgctgggcggaagcatgaacagtctctgcagactggcctggacgacttgtactttgtggccctccaacttctggatgtgaattttttttcac

SEQ ID NO: 32543 - DNA, 614 bp, Homo sapiens
  chr4:24914262-24914876
  binary
cgaaagtgcaggaggagcggcgcacctggcggggtcgcgcgggtgcggcagccgcggccacttggagtgcgcgcccccctctcgtccctcccagctcggcctctctgggggcgcgggcccggggctggcggccgctcggcccggcccatcccgcctggccggcgccgcggcctcacctcgctcaccagcccctgccagtcgctctcagtccggtcgccgttcatggcctcctcctccatgcgctggccggcctcctggacccccgccgcctcctcctcctcgcgacgtcgcgtcgccgccgccgcccgggccccgcgcggccccgagagggcccggcgcctccgagccgctgcgccgccgcctctcgcggccgccagcgctgttgactccacgtcagcctccgccggagggaaagggaggaggggcgcggccgccggggccgcagacacagcccgggccgcagccgagccccgccgggcccgccccgcgccctcagccccgcgacctcgggctccgcgcctcctgcccggcctctaggcaaggggaagccagggtctcagcctacaggtcactccggacccctcagcgctctccgcgcgggaggcgggccccac

SEQ ID NO: 32544 - DNA, 614 bp, Homo sapiens
  chr4:25031950-25032564
  hyper
cgtcctccccgggggccaacactccacccacgtcccccacacaaaggcaaagaaggggcctggggagtgggtcagggtcgcgctggcccggcgccagaggcaactccctcgcggcggcggacgcagggtggggcgggacgggatgggggctggaggggtcccactcacagggagctgatgtcgcccggcacgatcctgggcacccaggaagagcccacgcagatgatagactccttggtacagctgcaagtggcggggcagcgcgccagccgcctcacctgcgcgctccgcggtatcaggcacgcggcgcccagcagcagcagcagcagcccgagcgctccgcagccgcctctccgcagcgccatgcccggtccccgctccccgcccgggccccgacccccaccgccgcgccgcgcgctcggacccggcgccgctgcagacgcgggcgccgctcgctgctctgccgccgccgctgctggcgaggactagggagccgcgggtgtgggaggccgagccgcagccgagcagcatgctggccgccacccccactcggcgcccccccacccgagcccgggctgctgggcggccgccgccgctgcgcccgccgcactcgc

SEQ ID NO: 32545 - DNA, 810 bp, Homo sapiens
  chr4:30720964-30721774
  hyper
cgtcgtctgagagggagggagaaggagaaacctatcctgacaccagctccgaaagctctcacgcgtgaactgggcattagtcaagggaggaggaaatttaccagcccgagggagggaaaacaagtcccccagagaagacggcggtactcgctagggagggggactgggctttggcttaaagaggactggctgggattgggcacactttgagcggcccctggagctgaggctgggctttcccgagcgcggcggctggctgacgctccctcccgcctccttatcccgggccctcctccctcgctctctcctagtgtgtagtttcggcggctcggctgctactgccgccgccgctgcagcagcagcgtcagggacaagcctgatccgtgagcgagcgagcacccagcagcaaccaccactttgggcaacttgcgggtttcctgctcgcgggtagcgaacgggagattcccactagcggttcagtgtctccgagccgctgcagcccgaggggcggcgggagcgcccgcaccagactctcccagacgcgaaaagggacgagacaactgcggaattcaccagccgtgccagggcacttccgaggccacaaccgactgacactttttctccccttggcaaactggatttttttttttaagctacttggcagctgtctctgactccacctccccctccacccccgcccgaaagcctttggcttttcttcggaaatccagacagaattgggcatctttgttaattgccgttggggacgcccggccgtgcgctttcgccggctaacgtcgcctgtgctcc

SEQ ID NO: 32546 - DNA, 798 bp, Homo sapiens
  chr4:30722023-30722821
  hyper
cgacatgcgggccgaatgcaggtgagaaaaggcacggactctgcggctgcgaacccaaacttgggcaccgcacggtgcgcactgctcagccttcgcccccgtgggcgaaaggctgctgcggtttcaggcggctgcttcgtgactaatgaccttgcgcagagttgttaagaaaaaagagaaacccgcgctctccggggtgagaagggactgactctgggcgtctctgaagatggctcgggcttctctttggcgcgccggggggaccctgacactgaccgctctgtgacgcgagtagtctcccctgcaccgtgcccgaagcgacgtgccgggggatttttcattctcgatctgttgactggctcccccgctgcatgagcagagtcggagttgagactggcttgttgctggccccagcgcctggtgcaggaagcgactcacgtttgtctgggtggccggagccggagcagagcctgggtttggagtgagtgcctggaacgtgaattggactcaactcgagtagcagcaaagaccagcgggctggcaggcgggggaggctgcaggctcattccccacctcttcccagccccactgcccgtctgccggagcggttctggccccttccgacagagcggggactagagccggggattctccgcccgctgaggggatgactctgggttgggggagcgccgaacccgcggcgcgcagtgtcccgtgaactgtgagtactgcgactgaacggcggcaggcgagcgggcgattagcacccattgcatgaattatgaaacaataactttc

SEQ ID NO: 32547 - DNA, 969 bp, Homo sapiens
  chr4:37245693-37246662
  binary
cggaggaactacccgcggagatccgctcccagaaaggttccgggaccacgcggcgaggagcacgtgaacggcgcagcttggctataaaaaccccgctcaagcgcgcgtggggagcaaccggagcggcaggacgctgccacctgcgccaggagagatagggatgaagcgatcgtccctccaggacgccagagacaatctggagacttgatgctttaaactctccgggtctggcttggggttgtgtgcgtcgaactttgaggctggattccctgcacttgggcagagacgcacagacgcccgagcgtgtggattcccgaaaattctcagggcttgtgtgacctttaggagagttggagggggcgtagtagaaatctcaggctaattgatttcttgtcctccaccacggaggcagacaggagccctcggctgtccacagaggagtccaggaggctcctgcgcacccccgaggcccccgcgcccaagccccggccgtcctctaagccgcaagttatttctgcgcccgagagaggcgggctcggataaagtcgggacgccttctggtacataaagtttcatctgctctcctcgctcgcacggtccctgccgcctggcggccccctcctcccacggcgggcgcgggcggggagatggccgccggcgcttcccggcgcaaacgggcgctgcgcgcgtagccgccgccacgctgacctcccgctccagctggctgctgctcggagccctagcagcgggcgaaggcggaggcccagaagggcaggagaccgccgcgacaggagcccgagggtccgtatggcttctcctcgccggcgggtgctgtgcgccacggagctcgccaaaggcgcttcgggctcggagcggctctgagccgcgccgcctgctgagatcgaccgcctgctgagccgttccgtggagctgcgggcaggaacccgaggagcaggaggtggcggcggc

SEQ ID NO: 32548 - DNA, 740 bp, Homo sapiens
  chr4:37246687-37247427
  binary
cgatgtggccggccggcgcgggcaccaagctgccctgtccccgagactctgcgctccggcgggcggctttctctgggaacctcacggccctgccctctcacctcgtgcccgccggccgcagcgtccgggtcttcatcagcgccaaccctgaaggtacgtccctcgctcgggtttgcccgtccgtccttctgtccgtcagcgctgcgggagctggagagtgtgtgtccgccccacagcccggtgcgccctgcgctcccttcctccagctaaagccgtggccgccctgagcgcgtgggaatttaatttgaatcactttttttctcccctcgctggccggttttgcctgcacacttctattaggacacccattctccaccccgggttattcccctgggtcaatccaagaaacatccaaggcattagccggcccttctggaagctccattctgccgccgccgccaccaccacctcctgtcccccgcccttttttttttttttaaagcggtttcttctccgagatgaccgcaaacacaaacagtagctctcctccccgaggcgggttcctgagtgcggggctacctccttggccactttttccagctgaggcgaggtgagttccttgagactctcctcctgcaggtgcgatggtgccctttgcagaggccaagcagacttttgtgaaccggaggtcgagggggacaccctctgtgggtcccggaacaggcttcgcggtggggcgc

SEQ ID NO: 32549 - DNA, 782 bp, Homo sapiens
  chr4:37455033-37455815
  hyper
cgtggtggtggcgcccccgctgtttctaggtccatgtagctcatacagggctggccatggaactcacagcaggtctaggcggcgaatgccagaaataaggaggaaactgaaaaatgccaagttctcggggtttgggagtacacaactatttgccagcgggtgcatttgttttgtgtatccccgtactccagtcccttgatcataggaagctcccttctctccagcgcaacattggagtaagcaccccggagtttcccgtgatggcaggcggttggcgcggtcgtttgtgctcagaggccaacaagcgcgtggattttctgcttcagtgcgcccgggactgccaccccggccccggggatgtcggacatcgtactccagggtttcgagccctagccccgccgcatcctcggggcgtgcaggtaaagggttacgcgtgtcgggaaggctcacccgcagcccgggccacgtgacgcgcgggcccaatgacagcgctggggcggccgctgcgagctcggcgggctcagggcagcgcggagccgctagcgtctcccggcgcggctgcccgaggccggcgaagccatgggcgccgggaccccgccgccgccgccgccgccgccgtctggccccaggtagggacaatcccccgccccgcgcgcgcaaagagggctttagtcctgcggaacttggctttggggcgagctttcccccacttctctccgagtcgcctacttttaagtttaatttcttgatttgcttttgccctgaaaaaaaaaattagagac

SEQ ID NO: 32550 - DNA, 1324 bp, Homo sapiens
  chr4:3767158-3768482
  binary
cggggagcgccgatccaggatctggtccggaccctgagctcggcaggacctgtgcgcacgcaggtagcgtcgcgtcctcccccaggctgcgagaggttgctctgccatcaggccatggaccccgagccgcccgtgctgcgcgcgcgcgtgtgcgcgcccccgcctgcgcccatgcctgcgccgggggaggcgaaggaggctccagtcttagaaagagcagcttctggaactcaccacccaggccggccgccgctcggccccgtcccgcaggctgcaggcggccctggagggggcgccctcgccgagcgcgcgccccgcgccgccgccccggactcctccccggcgccgcgcgggcaggttcgaccaggcggccgcgggctccggttcccggccagctccccagggcccgcggcccgccccgccccgcgcgcccgccccgctgcgcaactcgacccaagttggaagccgatcgcaggcggccgcactcgcgcccagcgcagggcggcggcggcggcggcggcgcagctccggcgagcgaggcggcggccgcacggccaagcgtggaccgcggggggcgcccgcgcccgggagcagccggaggactcgcggcggcgccggcgccccgcccgggaaagtaaagttggagacggagggagcgcgcgggcgcgggggcccggaggagcggcggccggcgccccggcgcgccgagccctagccggccggatgggaggcggagcgcccgggccgccgccgcctgtcgcctgcgccccggctgggctccgggaccgcggggccgctcaggcacgcccgctcgggcgccgcgtcgccgtgggctcgacgccggggcgctccccgtgagccgggccgagggcggggccgcgcgaggaccccgggacctgcccccctccccccgcagccgcgtcgccgctcgctccgggcgcctcctgctctgcacttacacgctcggcagctgcggggagcccggcagccacgctctccggcgcgccgcccgcggagccaccacggccgagggccggctgctgggcgccgcggtccccggcgggcgcgcccgagcagcaggcggcgatgcgggcgccgaccccggctggggggcgcccgagctgccgcggctgcgccccggctccaggagggacggcgtagctcgcgggaggaccatggcgtccccggcgctggcggcggcgctggcggtggcggcagcggcgggccccaatgcgagcggcgcgggcgagaggggcagcggcggggttgccaatgcctcgggggcttcctgggggccgccgcgcggccagtactcggcgggcgc

SEQ ID NO: 32551 - DNA, 1264 bp, Homo sapiens
  chr4:41362252-41363516
  binary
cggcgccgggccaggggctgccccgccttgcccctacctctgcggccaggaaggactgcaggtgctgcgcggccagtgcccgcgcgtcctactgctccggtgccgcagcgcccgctcccccgggcccgggtgcgccccactgggcgcgcgtctcccatatgatgccagacccatccgcccgcccctcagcagccggcggggcgcagggacgtgcggggcggccagcggattccctctatcgggccgggtgtgaacgggagggagacacgcagcgctcgctccgggttatttttagtccgtagctgtgctccccctccccgggggcggagcggccctcgaaggtggggaggagaagaagctcccggcgcctccgcgctcgctcccgcgggtcactcacggcgcgttggagcccgggcggcgccgggaacagctgccgcggcgtcctctagcagcgcgcggctctcccgggacctgcgccggccgggggcggggagaggcggggaggggaggccggcgggcgggaaggggcggggagcgcgctcctgcggcggcgacggcggcggccgtcctcatcccggcgcttgagaggacgcggggctgcgcaaatggcttgtcccgctctcggtctggaagctcttcagcccctgcagcccgagccgccccccgagcccgccttctccgaggcgcagaagtggattgaggtaggtgcgggtggctggcgggcggccttgcactggcgccctgagccacggacccgcgcacgctccgaccgcaggtccagccttgcctccccccaaccgcccccactttcttttgccagctgctccaggtcacccccccgggcctcggcgagccgcgaaaccttagcgctttggcattggaatcccgggcgagggtgggcgtgaaaggggacactgcagtctagctgcgcgcgtgagggcaggaagggatcccctgcgcgtccatccttcctgcccgctggcctcgcaaatctcagctagcgccgcttccaggcgctgccaagggaagcgcagtgctagcaaagcgttgcaaaggcgcaggaagcgcgagcccccagagacttcaccggtgctcgcatttcggggtatcttgcttctggtcccacatttcgccccttgtccccctaccccgcacccttccggagcagagttggcagtgtcttcacggaggcgcatacccaccggagcctcttgctgtattcctggcaccgggtcaggtgtgaggctggcacagtgcgcagggc

SEQ ID NO: 32552 - DNA, 923 bp, Homo sapiens
  chr4:41747894-41748817
  hyper
cgaagggacccccaagcgaatccgggatggaggtgatggggccggggccgggagcccagccttgtccagggcccccagccgcagccaggcctccagctgccgccgctgccgctgccgccgccgccgctgccgcggccgccgccgctgctgctgcgccgcccttgccgggttcgcctcccgggcccccgggccccgccgcccccggagctccagccgggctgggcccgccgccgccgcctccattcgccccgcagctgggggtggggttgggattgggacctgggcccccagtgctgtccgggtcagtgctcttggcctctttgctctcgtcgtccctggaagagtcagactttttgcccgaggagccgttcttggccgcggccgctgcggctgccgctgcgcgctcctgcttgcgaaacttggcgcggcggttctggaaccacacctggcccaagacggaaggagagacggtgaagcagggggagaaagaagaaaatgggaaagaaaagcaccggttagggtggcccaagttctacttcggcttgttttaacaccctcctccccatgcgctgtgatcacccccgcgcgcacatccaccaagtctaccgcttcttattgctgtgcattttcggagaaactttcttagggggagtgagcacgccagggacatgaaggcttgcggcagagtttaaaaagccgcaggtcccagaaagacccgaaaagggaaggccttattttggtgggcctctgttcagtcggcttcttgagcaagccccgagctcgccattcacccctaagcctaagttctaaagttaaactctaattggtagaaggaaaagggatcctctctgggtttgctccgctgcccatccccggcctttgagcctggaagagcgtgcgatggtgcgcaccgcttctcggtc

SEQ ID NO: 32553 - DNA, 938 bp, Homo sapiens
  chr4:41752247-41753185
  hyper
cgttcagtgtttgccaaactaagtggtttaattcgatgctagtgccggggagtggatgggctcccgctctcccctgccaccgtgttttattgcgcactaaactgccgcggacgcagtaatggattaaacggggacagcggtcccccagccttgtgcttctttgcagggtgagtttcaggctcgtttcaggtggttgcaaatcctcggggcgtgaggaagcgctaaagtcgggagtgcagggagccggacctaccgaggatcctggtgatagttttatggggagggctgatagttttattgcagttgtatgttgtacaatgcgtatttgataaagaagggcccttggtgaccagtgtgcacttttttgtgcacgggggtgaaatgaaaataaatgtatacaaggttttactgcggcgggaaacaaattgcaacgctctaaatggtttttctttatggtcaccagacaagaggagaaaagggatgcaaacatctgtcttcagtcccctaaacctaaaggccagcaaagacggatgcgaatccaagtgctattacagcggagatttgtctttatttatcccgctctcatgaatatgaatttgcatttgggccgggaggtggctgtatccctttggactccacacatggaatttcccccacgctcatccccctccccaaccacttaagggaggtgggggataggttgtcaagcacaaggctgagatcgtccaagtttcttcgttccctcggatttcgggttgggggatgtgcttgctggttttctgaacgcaactctgccgccgaggcctgcactcaggagatgtggatgtagggagcacaggccggggtgtccaccgccagcccgctcctctgctgtagggtttaagcgcgtttccctgcagaagagagtgaccaggggtggtcaggaggtgatgaatttc

SEQ ID NO: 32554 - DNA, 731 bp, Homo sapiens
  chr4:53617162-53617893
  hyper
cggccggggttgggttcctgtcgccgcacgcgtggcccgcccgaaacccgctacaaagtagcggcgtgtctgccctagggaggcaaagcgcaaacttgttaccgcgccgggacctgccccgggattctcccagcggctccgcaggacgcagcgcctgtgcctcgcgcggccctgggacgggcacggccgtccgccccctgggccgccgagggctgctttacccctccgttctggccgcgggcagcagaggagctcggggcgggcaaagctcgaggggacacggggcgagcccagaccctgcctgggagccctccccgccggagaccaaagggcagaaacgcactcacagtgcaactccgagggataaactggccgacgatcgccgccaggccagaagaccaagaagaaggctcgcggcgggaactgaagtgagcggggacacacgagggctgggaagatcctgggttggggcggagcggggctgggaagatcctgggttggggcggggcggggcaccgcagagcggacagccggattcaggcaccaggaacccaccggtcccactggccaggtgctccgagctgggtgattttctcccgctcaagactaggaacatacctgcgctttcggcgcagggaagactctgggcgagggcggggctgggaggagggccgcggggcaggcagccaatcccaggaaacttcgggacgagggcaggacgggggctggac

SEQ ID NO: 32555 - DNA, 962 bp, Homo sapiens
  chr4:53728037-53728999
  hyper
cgctccaaatcagggcgggcggcactaagccggggagcaaacaccgctcccggcccgcccagagcagacgccctaggttggggctgcagcgagtgcgcgcgtgggctgtggagccggcggaggcagcggtccggaatggctctgtggaggctgcgctctcttcctggccccgcagccacagcagctgccccatgctcgcgcggcaggacctaccaggcgcccaccctgggctgcgccgcctcggaccacccgctgctcccctccgcccgctgcctcttctccccgcgcctcacggggctccgcactgactccaggcgcctccgggggcgtcgcgcgcgcggagcggcgccgggggcggggcctcgtgtagggcgccccgggattggctgtggggagagggggcggggccggccgcggagaaaacagccggcgcgccgcgcgagtgcagtctgggtctggagcctgagccctgcggaacctcggcgctcggccccaccccgcccgtacctgcacttatttattgttgttatttcttaccgcggagccccgcagtcgggtcctcccgcccgctcccgcgcagcgctagcattctccagtccctcagtcccttcccgcgcggtgcgccgcagccgaggcgatgcgcctcattcagaacatgtgcaccatcgccgagtaccccgcgccgggcaacgccgcggcctccgactgctgtgtgggcgccgccggccgccgcctggtcaagatcgccgtggtgggcgccagcggcgtgggcaagaccggtgagtcgtcgcgcttagccctgggtctggtcttggacgacccctgacgggagttgaggctgaacaaggcgtggggagcggtgggagctgcagcccgaccgctctccgtccccgcgcagggagccgctgccccttgggagtgggcttagccgttgtctacgccacccgcctgcttccacagac

SEQ ID NO: 32556 - DNA, 2221 bp, Homo sapiens
  chr4:568266-570487
  binary
cgtctctgtctgctcttcctccgtgggaagtcgccgtcctggggcgctcgctctgtccccctcgcctcggaccaccaggcagagcagccccagggtttggacttgccaagaaaagtgcagtcgggctagccaagcccaaacatttattgtaaacttgaaaatggaatccagatatgaacgacacaaataagaagagaaacctcccagatacagaaatggtcacatcaggggccccctcctgtggtcacggagcccgcagagggggccaggccggaggctgcaaagccacgtggaagaggcggcgcccctgaggcctggccctggaccccgccccgctgcccgtcctcccttgccgcgggggtcctgagcggggcggggtgggtggaacgcaagcgcggtccgcgggatgggggtccggcccgcgggatcagcaggcccgatgggtctcccagggccgcggcgtctcgcagggcggccggcagcagtaggggtaggaggcgttgaggtcggggtccgagggcgcgtaccccggcagctccaccgacgggtgccccccgcagcgcacctccgcgcccgcctcgtccagcgcgtggaggacgcctacgttgatgtaggagaccgcgtggtgcgccgcgaagcccgcgcagtccccgggggcggccaggtccgactcctccggggacaggatggaggcctcgctcggccgctgctgcagccgccgcccccgccggccccgccggccccggcgcgcccgagaggcgggcggctgcgcgcggagcccggagccgccgcggggccgcgccagggcccggcctcccctccgcctgccgcgccgaccgcgccgggcctgcgacgacttgtagttcttgacgagcaggaggctgagcaggcccagcaggcactcaagcgagttgaagacggtggagagcaccaggccgcgctggtagtccttcagctggcggcacttggcggacgtggcgctgtccagggtgctgcgagcgcgcggggcgccgggggccgagcccggcgccgagccgggggccgagcccggggccgagccgggggttgagcccggggccgagccggggctcgaacctggcgcccgcgggggcaggcagtagtgcgagtacttgcgctccaccagggacacggtgtcgccgtcgatcacggcgcccgcgaatgcgctgaggaccccgagcatgaagaccaggacgccgagcagaagcaggttctggctgctcaccggccccggggccccggccgcggcccccgactcgcccggcgtggcctcgggagcgcctgccggcgccgcggggacccccaaacccgggcccggttccgaccccgcgaggggcgcgtcccggggtccgcagcagagcagggcggcgccgagcagtgagaggccggcggccagcagcagcccggagtagaaggcgccggcggcggcccccaggcggaacggctccccgcgcagctccgagcccaacgagaagcacttgaggccgacggcggcggcgctgagcgcgcaggcgagcaggaggcaggaggagagcgcggcgcaggccccgcggacgctccacttcatcctccgcgcccgagccggcccgcaccccgcgcgcccgccgccgcccgccgccgcccccgccgcctgcgcctcctcccggcgccgcgcggccggaccgccggcctcctcctcatcctcccgcgtcctcccgggcccgcgccgccgccgccggagcccgcatcctccgcctcccgccgccgccgccgccgccgccgccgccgcgaccccgcgccgggaaccgatgcggcgcagagaccgcagggcgcgcgccccctccccagcccgcggggcccctcccaggaggctcgttcccccccaaccccccaccccgcccgcggccccgcgcgcctcgccctggcgccgcccttccccgcccccggcagcccccgccacccccgggacgcccctccgcttcctcctcccggagcgggggcccctggccgcgtctctccgccttccctccctatccgcgcccctatccggcgcgggccgctgcggaaacgcagctctccacccccagctggctctcccggaccccctgggccccaccctcagcgctccccaccgctcggcgcccctgcgtctgcgctcccctctctcccctctctatccactgggtctgggccgcacttcccgcccacccgcctgccagcggcc

SEQ ID NO: 32557 - DNA, 903 bp, Homo sapiens
  chr4:570851-571754
  hyper
cgatcagggtctctgggaagtgctgacgtgtgcgcgtgtgcggtgtgttgcttgtgggtgcgtgtgtggtgtgtgcatgtgtgtgcgcgcgcgtgtgtgcggggtgtgccgtgagcgtgtgcccgcggttcgggggatgagtaggggcgctgacttttaggaccagccatttgagtcaagctggagacgacgtcttagaacctaggatgagtctcgtttggttttagtctgcaaagctcgtctgcatcagacaggaattttccccagacgcgggtgcacgtgaattaattcatcagaaggcggttcacggcctgagtgagggggacgagggcggcgaattcctccgcctcattcctaccctgacgattcgaggtgggtgagaggaaggcgtggggcggctgggtgcgtggggtgggggaaggtcacctcttcggcctctctgggccctccagcctcttcctgagaggagctcgcctcggccccttggttggggggatgggagcgtctccggaaggccctcggccgagcagctgggcctgcacccctggtcccttccagttcgtttctgctgcggcggcaagaggctggggagccgatgactcaccctgccggctaattgcagcgttaaataactttgcgccggattcggtggctgcagcagggaacgcgctccgggcgccgggggaggtggagggacgccctgagaacgcacctccgtccctgtcaccagccttagcaagttctggcctgtggagccgtcatccagagcgcacagcttcatgcccttgaagggcgcagtgtgtcccgtggtgcccggtgggcccggacagagaccccagaggctctgtctgaaggaagctgcacccacagactccatccaggcagcgcgggcgcggtcctgtc

SEQ ID NO: 32558 - DNA, 1620 bp, Homo sapiens
  chr4:5889131-5890751
  binary
cgcatccctcaggaacagtcaggctccacgctgatgccaggcaggaactggggcggagggccagctcctgaccgctgcgccctcagctccccaccccgagacaaagcgtaaagacggggattcctttgtttccggccacacccagggacgcagcccggctgttctgcctccaccaccgtccccaccctctcgcggcccagcgtcgggaacattaacccttcccgggccgcagccgccagcgtcgccccattaggttatttttagctgcggggaggggtggaccgagcttccatcatggcgctgtccctaggtccggacttccactccatcagtaaaggcggggagtggggagcgctggatgatctttttccctcctccagcgggggaggtaccgggctgtggggtgcatgggccggacggtgcgggggccgagccaaggaggctcagctcaccctcccacccccgcgcgaggcctgcggggagggggttcggacccctgcccctccctcttttgttcggctccgcatcctccctgtccacgccatcctctggcacatcccgtggggggagggggcggcaagcccgcggggagagggactcccggctccagccccgccccgccatgcggggctcccccacccccattgtccccagaggctgggggagggggctgaaatcccgagaccggccccgccccacccgcggcgacgcaggaggcctcggggggcgcccctgccggcgccccgtggatctggaccctgccgggcgcccactcccagcccacaaaggccagcgcggggcggcgggggcgggggccgcttaccgtgatgtgcgggatgctcttcttgccctggtacgacatggccccctctggcgccctcggcccggccgctgacctgcggggctgtctgactggaaccggcgctctcggccccgctcccagcgggcgcgctgacaaaggcccgggagggatagagacacggacggaggctcggcgcccgtggatgcccacgcgcggctgccccggctgctcggcccgcccgccgccgctccggctgccagcaccgcccggatcggcgaggagggcgggagaaggaggagggagaggcgagggcgggaggagggggctgcagacagctcctcccggcggcgcggagcgaagccggattcgcccctctcggctcgaaccaggaagcgcttcccttccgatctcccaccccgccccccgccccccacccgcccagccccgccgacccccgccctgcgcacacgcccttggcgggccctggcctcgctctcgcgatccagagagtatggttttcagggctcctttaaaagaaaaagacggcgcggtcagggcccgcgggcggcgccacaggtgtgtggccgcgcgtctggaggcctccccggaacatctgcgggggtgtggggggagggagtgtgggacgggggccaaggatcggcccaagctgctgggaacgttcttgtccctccaggatcgcgcccaaggaccgctcccctcttgcctctccttccatagcctccgtttatccttcccgagtgcctctccctgaatgcaccaagcactttttccatctcggaccccaagcctttattcac

SEQ ID NO: 32559 - DNA, 1435 bp, Homo sapiens
  chr4:6201288-6202723
  hyper
cgcgccggcccggcaggagggtgggtgccagcctttcttcccatctctcgagcctcctccccggcgcccacgtgggcggagcagcgcgagggtgtgcgtggcaggggccgcggcggcgtgtgccgtgcgtggggtggggtgcgggctgggcggcctcgccttcgggccccgcgccgccggggcgcggcccccagctccatcttctttgccacctgggcggagatctgggggactgtgacctaccctgcggaagacacggaggggacgggccggccacaccccccgcgccactccggcaggcaccgggtgggtccccctcccgctccttggcttgagggcggaatccggagaagagtggaaataggggtggcgtgaaggagagctgggggctgggggcgggaccgggagggggtgttgggggaagcgacgcagcggctgggagattttgcaagggggtctgaagaggagtgggggatgggtatggaagggtgggggaccactgaggtgggatgcgagagtggaagggggacccagagggggcgcgatggccggaggagggggagatggacgatggggcggggcggcaccggtcgccgcgtcccttgccgccaggtccgcccctcggtcgccgggtccacgggttccctctggccagcgctcgcctcccgccccccggcgcacctgtacccacctgctcggcgctcaggcccgagccgggcagcagcagcggacgtagcgagcgcagccccgcgccgcatcctccggccgccccctccccgctgcgagcttacgccgctgtcgccgccgccaccgccttaaaaaggacaaaacggaacagaaaatgaatgcatgcacaaaaaaaatcgtaaaaagcaattgaggaggatggcagtcgcgcgcgcggctcggcggggcgggagtcgagaggccgcggcactggtggccgcgatccgggcaggcggccggcgcgtgccgcacgcgggtggctgcagctccctcggtcgcccgcgcccggctcaggcacggcaccgcccctccccccggggagcccctccgattggtctgtcttcctgccagtcaggcaggagggcgcggcgcccgccccgccccgcccccgcccccgccccgggcagatgccgggagctctcctgccgccgtgggagggggagctgagctgccggagcgtgcgcactgggccagcgggcggccggggcagggctggggtcccggcgctgagcgcccccagccgcgccgggcagcctggcgcctcgctgagtcggagcaacccccggcaggagctttcaggctctggtcaagcctcgggacccgggaagctatccctgccctcgggggctcgagcctggagtggggcttgcaggtaaagcggggctggggccgtcctggccgtcagtggtcaggaagacgcagcgacccc

SEQ ID NO: 32560 - DNA, 722 bp, Homo sapiens
  chr4:6223462-6224184
  hyper
cggagagcagctgctctgaattttctaatttcgctacactggtgatgtatcatgtattcctgtgtgattcgaaaatgttaaaagtcatataataatgtagaagacgacccttcgcgagcgaggccccccacctctggccactgagggcacttacgtaactgcggggcgggcgcaggcctccactgggtgagcggcaggcgggggcggggctgcccggagcctcggccccgcccacccctctcccccgcccactgtccccgcccagccccgggctgctcggaaaggccggagtccggagcacagcaacgcgcggagcggcccggcccctctggtggtcccgcccacgcgacccgggcgcagcggcgggcgccggacagctgtcccggcgggcgaacgacatgcagcggaactgcgggaggctgcggttcggtggctggacttgcgtcccccacctcctctgtcgcgcgtgccctgctccccagtgagggcgtccctgggatgggatctgggcgcccggcgcagcgcggctgacaacagccgagcggttccggtgcgctggcacgtggctcgggcctgcccccccggcctggccgcctcccggcgcgttccccggtgcaggtgcctggcccgtgccccgccatctccgcccggcgccgcctgtgctgaaggagccacgccccgggctccggagcctgcctctgcaaagtccaggcccgcggcgc

SEQ ID NO: 32561 - DNA, 821 bp, Homo sapiens; identical to SEQ ID NO: 29192
  chr4:6271360-6272181
  binary

SEQ ID NO: 32562 - DNA, 884 bp, Homo sapiens
  chr4:6472221-6473105
  hyper
cgtcatccccaacgtagagatgagcaaacagaggcttgctccaggaagccagaccacagcgagcctgggagcagcggggcaacctgccaagatccgctctcggcccgagccaggccaccgaggcacgggccagcaacccggcggcttcctccaaccctctgtcgctgcaggctgcgagcagaaaccacatcccggacccacgctgatcccgactcagcctcgccgaagcaggcgacaaaggaccgctctcagctccccgggcctcccaaagccgcggccgggtcagagccccaccggcccggaggcccgggcagccctgcccctctctcgcacacacccggcggcgaagcgtgcgtgactcagcggttctcccgccgggagcgggcgcggcccccgcagcctccctccgcccaggtcccacgcccagcctctgcctcccgggccagggcgccccgagcccgcccgcgcccgcgctcgcgctgcgctccccgggcctccgcggggctccggctccgctcggcctcatttccggcagagccaggcttcgaggaggcggacccagccgcaggagcccggtctccgccgcctggcccactcggtctccctgacacaggcacccacgcgcacctgccccgcgggacccgtgcccagggcccctcccactggggcacccacccggggaatccgcgcacacttctgcggccgggccgccagcccgtgggttagcggctgacagtccccgcactcgggcagggctccagcacaggcggccccgagcccagacctcccggtccccatcctccatcggggtcactccgcgggccctgcctgcgcacggaagctgtccccactgttcccctagcgaggcagaccagggggccccc

SEQ ID NO: 32563 - DNA, 903 bp, Homo sapiens
  chr4:6473630-6474533
  hyper
cggagggcggcgcggaggagggcgctgccctgtgccggcgctgggcagcggaggccggtaccctcgggctccctccctcctgggccccgggcagggtgggatgggatggggtggggtggggtgggatggggtggggtggggtggggcggggggacacgacacacatcgcgcggtccaaaccttcggagggcattcggtgcgacggcatccccacgccgcggccggccggaggggtctcagacaacacgtacgttaccttcagtcacatagctgtggtcccgcaggaagctgtggttaattttccgcgtgtccgtgtcctcgcccattgaaggccgtgcccggtgctctgggcatgccccgccgccacacaccgatgcaatccgcagaggtcgcgccgggcgcgcgggccatgccgccgcagcctagcaggggcgcgggccgccggggccccgaagggagggcatcgcggcagggggacgggcgggggcggccgggggcgggcgccgcggtcaagcgagcgcgcggtgggcgggcggcggccgcgggttcgggcgggccggggcccaggcgcgcatcccggccggcccgtgcgcgctgcgtccgtgcgcccggcggcggggcctggtgccggtgcgcctggctgcggcgacggcggcgaggggacgcgcgcggcgctgcgctgcgccgaccaagccggggccgagccgggctgcgcgggctggggccgccgccgccgccgctgtcgcaggcccctccctcgcgccgcccgctctccgcccccgcggccctgcaggtggagccggcgcccaagccgaggctgcaccgccgtgctcgggccctcgcggtgggcaccttggtgctgggtgcgccacgggggagggaggaaggagaccgccagcttgc

SEQ ID NO: 32564 - DNA, 1317 bp, Homo sapiens
  chr4:7194127-7195444
  hyper
cgcgctcgggtacgccgggcttcccacgagcgcctgggcggcgggccggccggcaggtggcggtgcgcgctcggcgtcgcgggtggcgccggggccgccgagtcccctcctcccgccgctccctcccctcgccggctcctttctctgcgctctcgctcgcgctccccagcgccctcctgctctcccggccgcggtcccctcgtccgcgccgccccgccgccggctccgctgccgcccctggcgaccatggcgcaccgggggccctcgcgcgcctcgaagggccccggccccaccgcccgagccccgagccccggggctccgccgccgccgcgctcgccgcgctcgcggccgctcctgctgctgctgctgctgctgggcgcctgcggggcggcggggcgctcccctgagcccgggcgcctgggtcctcacgcccaactgacccgggtgccgcggagccctcccgcggggcgcgcggagcccggtggcggcgaggaccggcaggcgcgcggcacggagccaggcgccccgggtccgagtcccggtcccgctcctggtcccggcgaggacggcgcccccgccgcgggctaccggcgctgggagcgggcggcgccgctggccggagtggcttcgcgggcgcaggtctcgctcatcagcacgtcgttcgtgctcaagggggacgcgacgcacaaccaggcgatggtgcactggacgggcgagaacagcagcgtaagtgacctccacgcgctcgccgcggcccctacccgggacaccgcgggacacccgggcgggaccgccacggcccccaccccagatccccactatggtcatcaggggcgggttcttggcgacttgggcacttgggtcacctcggccgcgcccctactggcctctggtcactggttacttggggagaggtcctcagattcgtacgcttgtctcaccgcaggggacattcccgcagatttcgggatcctgggccacctccgatactcccccactggcctccaggtcttgggttacggaggaggaccccagaaccttcggaagcctgcaggtccttgagggtaccccagctcggcgttacctcccctgcccccagactccaccagctgagcgtcgcgttctgggattttgggctccgggatccttccctccctggtctaccagggactccgcggtggcgcctccgcaggctccgggacttccccggtcagctcgaatcctgttctgggactctgggatttctgggttacccctctccccggggtactctagtgcgacccgcggctgtcttgagctcttgctgccggtcgcccc

SEQ ID NO: 32565 - DNA, 828 bp, Homo sapiens
  chr4:74903962-74904790
  hyper
cggggaccccagcggtggcagcggaagcgcggggcgggacttacatgacttcggtttgggcgcagtggggtccgggggaccttacattcacactttggatgttcttgaggtgaattccctgcagtgtctgcaagcactggcagcgcagttcagtgaccacggacgctcctagggaagaatagactcgctgattgagcggggctgtcggcgcggggcgcccaccccagccgcgtccggcccggggaccccagggcgccgggacccacctgctgcgcgccggctggcggccaccaggagcaggagcagcagcgccacccgcaggagccggggattgctgggggcggcggagagcgtggcgtgggccatggggctcagcagacgcgtcgggaagctgtgcgagaagcgggagagctggcggggaggtgcctgcgacccgggctgtgtggctccccaagatcggcgaaccctttttatgcatggttgagactggaaagcccggagcggccgggccagggaaattcccggagctccagatcgatccggagtcccgaaggaaggcgacggccccgcccccggggtggagtcggatacgggtagggggagcccactggtgacgcctacgcctcgccctccagagtaacccccgtgcactctgggactttgggatattcattttctgccccaaattcctggagaggcagtgagtccacctcgctgaagatacagcctgtgaggggggaccttaggtccccgatgaccccccgcgtacggggtagggttggaggaaagagctggggggacccgtgagaaccaggacaggaaaggcac

SEQ ID NO: 32566 - DNA, 592 bp, Homo sapiens
  chr4:77172549-77173141
  hyper
cgctcctcctgccttcttcctttctttccttcagtaaacgttttttgaaacgatgatgagcaaaaaacgcctgatccagtctatggcgcgtttcggtgggaagatgaacacgccttcccagcagagtaaaacgtgattacaccaaggaccggtaccctctcccttccctcggccaggtccacgtccccaggcgtcggagaaggggttggaccgcgcagcggggcgtcagagttgccaggcgcccggggcaaataccggcagcggtggttgtgcggtgtcctagcaacggggcggcagcagggcacacacaccgcccaagcccggacggtggccgcgaagctagggccaccatggcggaccgcaggcggcggctccggccggggacgttggccccggtgcgcgagggcgtgaactgcaggtccaggtaaacactcagcgcccgggccgagggcgcatcccacgcgggccgcgcgggggcgcctggagacccgcgcttgctggggcgggggcgaggggagaggtccagcctgccttccctcctcaatgcttcctgtacgtacaacataatacgctgagataaccaacgcttggc

SEQ ID NO: 32567 - DNA, 862 bp, Homo sapiens
  chr4:77227668-77228530
  binary
cgggaacagaaagtgtagggacagaagagcgctggagtcttccccgggagggagcccggggctgcagcccaggggcggggagcggggcggggctgggaaagttgagtactggtcgctcagggccgggctccgccggagtgcccggcgcagaaaccgtaaaaggctggagcgggcggggtaggtgtggctctgtgtgcgtgacctgagccccggtcccagtccctgtagtctcctgcggccgcggcctctcagccatgggcgccgtctggtccgccctgctggttggagggggtctggccggagcacttttcgtttggctgctgcggggcggccctggcgacaccgggaaggacggggatgcggagcaggagaaagacgcccctcttgggggagctgcgattccgggaggccatcagagtggcagcagcggactgagccctggaccttccgggcaggagctggtcaccaaaccaggtattcttccccccgtgactccagggcacatctgccagagctttgaggttcatcgaggaagggagcaaagagacaaacccacctggagctttcctaggggcccattcctgcggacgggctctcctaaggggactgggccatccccacgcccctcggtttcccaggctggttggtacgcgcaggcaggtttcttgtctggtcctccaagggccgcgcccttgccgagtccctcagcgcccgcgcctgaggacttggtcctgcccctccggcggggatgagctcctccacttggcggcgcttggtgcagtgcgggcggctgcagtggcggcgccccttcccggcctttggaaaggggggcttaggtttaggggatcctacaagcctcttc

SEQ ID NO: 32568 - DNA, 1362 bp, Homo sapiens
  chr4:7940425-7941787
  hyper
cgctgagagctacaaagttcaatctggctttccagattttttttttcttcccattactaacggaagaaatcaagaagctccgggcagtagggccctgctccctccaatcagagcccagcccggggccagagcaggaagcgcggcggtgggacgcgcggtgacagccccgcgccccccggggcccgccggccaggggagaggacggtgcggccgctgcgcgacagctccgggcccgcgcctctcgcttccacccgccgggcaggtgagaggataaatcacggggcggggcagtgcgcccccaccaaccgcgccccccgcgcacggacccccattacactcgcgtcccaggcggggtcgacccagacgagccacggggcggcgcagagccccactcgcagggcggccgggacccacgcgcgtgggtccacgcaacaacctataggtgacaaaacactcaggaagccgtcatgcggggccaagaaagagcccccatccagagtcacggaccccctcgtccgagggtccgcgcagtcccctcggtaagtcggacgaagcagtctcgctacgggggagggcggcggagcctcccactcttggtgacccggaccccgccccacgagtgggtcttcgcagggccccctctgacgcacacggggaccagccacgccgcgggggcaccgggcaggagccagcgcccgggtccacgcagtcccctccgggcagacgcggggagctggggagcagtggggaccggcccccacccgcaggacgaccgggacccccgcgcgggcccacgcggcgtcgcagcaggcgcggagcccccggtaccacccgaggccgagacaaagcccaggcgcacggaccccggaccctgcggagccccgctcggagcttccacgcccggggcagagacccccgccgggtccggagaccctgccgccagtcgcgccgtctcacctcaggccgccacctcgcagcgctcgctcctcgccgcggcgcctgggccgactggagcgcagctgaacagccgacagagccgcagccgccttaacaatggagccccggggcggggccgccgccgccgcctcagcccgtgtaccccgctcgagatccggctcggctcgcggagctgcagccggcgtggggctgcggccgggacagacaccacgcaggcgcacacggccccgcccgccgcccgccgtcccgcccccagcggagccgggcgcccagggcccgccccccggccaatgggaagcgagctgcgcggagtgggcggggcctgagggaacaaagggaggttgggcggggcggtgctgggactgggcttgcggggtcccgcgggaggacccgcctcaaagagcc

SEQ ID NO: 32569 - DNA, 843 bp, Homo sapiens
  chr4:8159728-8160571
  binary
cgcggctgggctccagcgctgtgggatttttccagccccgcacagaggctgtcagatcccggagggtgggtgcggcgggaaaggcaggggtgcgacgcgcaggggcgaggggctggagacgcgcagagatcgggtcggggccgggtctgacacatgcgggctccgggtccccagatctgctgcggagagtcctgggcgccgagggtcggcctgacgcccccaacccaggcgctgccagagcggcgcaagggcggcgcccccagctgcaaagccccgcctatcatctcacctctgcgtgcctaggtctgctggggccccggcccttcgcccggaccccaggcccccgcgcggaccctgaccgctttctgcagcctggaacaacccggacccccgtgagaagcaaagaaggggcgccttccagacatcctggcgcagccacgccggccggcgcgctgggaaaggatccccggcccgcgccactgagctacgcgctccgggcgcagggcagagggctgcgctctggcccctcggggctgcaaaatcctggagcaaaagttgggtggagccgctgggtgattttccccggcgttgcaggtgcagcctccgaatgccacccagcccttgcggcgccgcgagccagcgcggggacccgttggtccctcggtccccagcacccacctgcactcatctcagcagccgctcggagtcggggcggcccggcgctgcgacagccagaccctcgggcccgcaggtgccgcgcccgcgctatcctccgcccgcccgccggctccgcgcccgctccttgcgcacacgccaggcagcgccgccgcagccccacggcgc

SEQ ID NO: 32570 - DNA, 289 bp, Homo sapiens; identical to SEQ ID NO: 29206
  chr4:819440-819729
  binary

SEQ ID NO: 32571 - DNA, 796 bp, Homo sapiens
  chr4:82965099-82965895
  hyper
cggaagacccccaggcccgccaggggtccctgaggggacacaccctccacctacctcaaacatgggagaggcgcccttgctcggcaacgtgcagcccaggagctcggcgagaaactttgccatatacaagcggtgaggcagggtccctcccgatgcgccgtttctgtcctttccccttgccagagcccgagcgccaggatcctgcccgcagcccgcccgccagccggggccgtggctcggggctgccccgcggctgcggcggaggggctgggccgggcggggagagctcggcggccgcccgccccgcggcgtccagcggtgcgagtgcgcgcagccccgtccgcagcccgagcctccgctctgcgggagccggggcgccgtcgccgcgctagccttttcctctgaatgtcactattaccatagtaaagggaagggccccgccgagggggtggcgggagggccaacggcgcctcaggatgggcgccaagcgtgagcaagggcagccggcgggcgcagcgccttggcgcagacaccggcccgacccacgcctgggcagggccactcttgcaacactgccgggcgggagcagacgccttaagctccgagggagagcgggcggccggggcgggggagggtctgtggatggaagccgccgggctgacccacttccccagttttcccctcggcagcactcacggaggtggaaaggcgggcgcctcgctctgctgactgacccgggagagtcgctgctgccagatgccagtggcccgcaggagctcctgcactggccggcgcc

SEQ ID NO: 32572 - DNA, 855 bp, Homo sapiens
  chr4:83482632-83483487
  hyper
cgcttctcacccgagtccacccgataacgagatgatggggcggcgggtggggacacctgtcaaaggacggggccggggccggggccggggccgcagcgggcgggctggctggcggcactgcggcggcggggaccgaggcgcgccggctcgggcgttcgcaggtcgcggggcagagccggcaccgactcctggacttgccggggagcgtgcgcccgcggagggctcgggcgggcggccccgcgcccgggacgctatgggagggggccgcagccgagcagggccccgcagccgggcggacccagccgccccagccgcgctgcagcccccgccgtccccggtctccgcctgcgggctgcgcacggggccgggccggacgccccctggctgcgcgacgggcccaggcaggggagggggcgccgcgcctacctgctctggtgcggcggggccgctgtcgcctcgaggggctgtgacctgctgcggtggcggcggcggcagcagtagcggcgggtagggcgcttccttcaggaaggggtgggatctgctcacccgcccgcccggccccctcctgccgcgccggggcccgcccccgacttattctggggtccccgctgctaggccttcggggagagttgatcccctgggtctcgggcttctgccacccccccggggcccctaatagtcacccggggcaggagccgggtgtgggcgggcgagccgcttccttccgaagcctttgtggacgcgtttgcctggcgctcctcatccaacaaaaggaaggacagaatcttggatcctccgcctggtggttatttattcctgacctgttgtaaccttctgcctggctctctttcgtcc

SEQ ID NO: 32573 - DNA, 1914 bp, Homo sapiens
  chr4:85418710-85420624
  hyper
cgaggggtacaggccaggcgtgcgtccctccagggcgggctctgcatcactccgggccagaagatgggcgtccggccaggcagctcagccagcggcttggggtaccggcccacggcggccacggccgcggcgctggggctgaagtagagcccgggcggcggcggcggcgggctcaggctgctaaagcgtggcagtccggccagcagccccgccggggatgaggcggcggctgcggccgcggcagcagccgcggcggcggcagaggcggaggaggcagaggcggacgaggaagaggaggaggaggaaccggagggcgaggcggagggcagggcggcccccgaggccacgggcatggagggccggctcaggatatcgttgatgccgtgtggggtggcggccgagagctgctgcggggggctgccgagggatgagagcccccccgtggccgggggcttcaggccgcctgggttgtgggtgcccagaggcggggagggcgacgaggaggacgacgacgaggacgaggaggagggggggccggcaggcagcgggggatacgcggcagggtacagcggggtcttcatctcggccatgctgtgcagggcggccaggggagggctgctgagcaggaatgcgctctgccgggtgccctccattgcccccaccgctaacatcccacggccacgccggagaccgtagccttgcagcgagggcgctggctggtgccccccgcggggctcagaggagccggaagcgccgagggcgcgagcggagaggcactcggcgcgcccggaggcgagctgccaactgaaccaaaaatgccgctgccgggagttgctcgcctagctgcgcagcagagatgtccaaaccctccacgcgggaggcggcagctcgccgagaaaagcaggcgtcccggcgggctaggcagtcctttcgttccgcgagtcctagattcgatccctggctattctctcttcctcacttttcctagctgttcaaagtgcgctacttctcatcttctgcccccgggaaataagcaaaacaaaacccaggctggctccggagagtttgtagcaaagttagttgccgaatctccactttgaagttggagggtgggggtggcttgctttctttggggaggttcaaaggacgccttgtgcagcccgtggcgctcctctgatcttactgggatgctctgctctttcggtcgcgcggctgattcgcattcgacgctcactgtgcccggggagaaagcgcatccagcccgcgggagatctagcctctgtgcgggcttcctccgcccacgctgccccgggctgctgcgccagaaagggcagtgccacggatccccgcggctcccaggtcctcacctccacccgccttgccctctggcccacggggcactggagttgcaatattgaaaagaaaaagggggaggaaaaacacagaaaaacaaaagactaagtgtgaaaagtctgacggctgggtttcggcgccgctcgtcagtccacttctgcaaacgggcccggcgacccccgccccacccccgctccctctctccctctcactctcagcctttgactctcctctctggcattttcttcgcggcttcccaggcttcggtcttctaagtcctgtcctctggccaaactgaccctctccgcggctcctccgctctttctctcctttcctctctccctccgggcctgacagttcagatgaagctctcaaaggtaataaaacatttgcatcactccctacccctctttagctgggggacgaaagggagggggaagtgggggaccaaaatgagaactttgagggacgtcactccgaggctgcgggggccggcgagccgggcgcaggccgggggcgtaaccaccgtgtccaatagctcgccgcctcgatccttgcgtc

SEQ ID NO: 32574 - DNA, 770 bp, Homo sapiens
  chr4:85503546-85504316
  binary
cggcgctgcggttgtgatcggaattgttggccgacgcacctctggacgcccagtgaggcaaaagcatctcctgttttcaaggtgatgacactgggctggaatgccgcggggccaaccagtccgtcctgccagacaagtttctggtccagtgagcctccgacccgccgcgcgtgtcaagctgacaaggccggggaggcgtttgaagcagcagtgttgagcgctgttaacatttagcgggcgtctttgagtagctcctccagccctcgcagcggcccagggactagcctgcaagttctcaacgctcacttccagcccgcgctggccccgcctccgcctcccagctcctcagcctcctcccgccccaccgctcccaccttttctcaggcccccacctgccagcacgcagaggcgggggcggggtcgcgggccgggctcctgacgtcacctcacggggaggcggggctgtgggaaccgcagtgcagcgcagaggggcggggcctgcggcgcgagacctggtgcgggaggcccgggcagggagaagtgtgcggggccgggacaagccggctccgagtccggctccggggggcggggcgggaggggcctgcgcggcggcgggagcccagagccgcgctaaagcgggtcaagcgtcctccttttctccccgccccttctcctcctcctacctgggcctctgcgtggagacgcgcacctggcaaccggaggccgcgtctccgccttctctgctcgcgcctggcgcccggagcctgccc

SEQ ID NO: 32575 - DNA, 766 bp, Homo sapiens
  chr4:85504324-85505090
  hyper
cgccggagccgcgctcgctgcaggcggcctcgagcgctctctcgttgatgccgttttggaggtgaccggcgcggcggccgctctatggtggggccgcgttagtggctgcggctccgcgggactccagggcgcggctgcgaggtggcggggcgccccgcctgcagaaccctgcttgcagctcaggtttcggggtgcttgaggaggccgccacggcagcgcgggagcggaagatgttggagctgaggcaccggggaagctgccccggccccagggaagcggtgtcgccgccacaccgcgagggagaggcggccggcggcgaccacgaaaccgagagcaccagcgacaaagtaagtggagccgagagaggcggacgccgcgccctggctgggtcctggttggaagcgggacacttgagagcaagggtggggcccgtccagcgtcaggtgaggctgcacgctgccggtgcaccttcctccctgcctggcactgcttcctccttctccagagggggtcgggacccgggatcccagtggcggtgaggttcccaggatgaccgcggccgctgcccgggagaaatgggccactcaacccggcttacagtttagcttcatcctcttccggtcccttcttcaggatctggggccgacgctggaatcaggagggaacctgtcctcctaggggctgcagtgcagttagtagctgccacctcacctctcttttcagtagagggaacaaagttagtaaggactagagacgtgccaccgtc

SEQ ID NO: 32576 - DNA, 1640 bp, Homo sapiens
  chr4:85886808-85888448
  binary
cgaagggcttccagcgtagggcgtagggggagaggcccgaagccctggagacagcgcccgagggatggaggccgcgctcggctgcgctcaggtccgggtggctccgggagctgagaccccgcaggatgcagcgggggggggccagggcctgatcccctacccctgcgagccagggccgcctacgcccccactgcttcccacaggtaacgtccagccctctcctcccctatcccccgaaatatcccggttccgctccgctccgctcgccgcccgtgaccccgaccccgacccgtccgcgacggcgccctccccaggaggcagcggaggactagggccaggccgcccaccctggcggcggcggcggctcccggccaaggcggaccctggggaggacagcagctgggccgcggcctgtccctagggggagcgggcgcagggccgcgagtgggcagcgcctccgccccgcacgaacaaagcggccaggcgcgccgggccgaggcagcaccgcctctccgggagcgcggggggcggggaggatggcgggggtactcacctgagggccggcggagggcgcgggcgggacaggcccaggagacgggaccgcggcgggccggggctccgcgccgagggcgcacgggctacggggaaggggcgaccggcgcgacgtccgcggcggggcccgggagccccgcgccgcgggccgggggccggggcccgagctcgattctgcggccgcgaggtatgggaaccggtccgccgggccaggcagcggtgctaggcagcaggggcagcgacgccgccgcctttcccttctcctgcccccgtccctgctccgccgcgtcctcgtcctcgctgggtccccgccgccgccgcctcagcctcggcgctcctcgggtttcttctctccatcaaggccgggccgacccgcagggaccatcccggaaagtgaggggttgttgccgtttcccgcagctgttggtggccatctttaatcctcctcctcctcctgctttctccacctcccgctggctgtctgactgactgactggatcctcctctttcccctcctgctcctcctactgagccggccgcagaaattgcagccgctcagcttctaccccctcctgcctttccttcctctttccttacttccttcccttccctcggcttcccgctcttgcctcactctcagcggctgccttcgcccctgtctgcagacagcgccgctggatgctcccagctggacttcaaccccactcctctcagtccctctccccactgccttccagacgcgcctcttccccgccccgcgcccctctctcctctcccacccctgcccctctccgcggcgctcaccctcctcagtcccagtttctgaaaggactcagctgagaaaggacaactgggttccgctttccttaaccctacaccctttagctggatgctgtcagaggcgatggagaaacgcaaaggtgcgttaattttactctagccagagtataaaagaactgcccacgccagctattgtactacgcagcttcgaaactcctgcacgctctcctgtgtggctcccgtccgtgatgggactgtagttgaggagctcggtctcaaatggtgccttccgtcagtgaccttgagtc

SEQ ID NO: 32577 - DNA, 839 bp, Homo sapiens
  chr4:87515033-87515872
  hyper
cgaagagtaagggaggagccagcacttacgcatttttcactctcctcctcactccctagggtcatagttttgattctgaagttagaagtgtgggggtcgtcggctgcattttcaacttggcctaaaagttggagttcaccacactgcaggcgctaggaactctgccgctcggtcaccaacctgagcctctggctagtccgaagaacgcgaaaagccaggcccaaggcactggttgtcatggcaaccggggcgctggtctccctggcgacctcgtccctagggaggaggtggagctggatgccaggcgggccaatgaggtcgaggggagctcggggtgggagatctgcggtcctcccagtgccggggaatggttgagtgacaggaccgggggggcggagccggcgcggctgcccgaggtggagccccagtggtgcgagtagctccagcggccacgctgaggcgagggtgacacaccatgctcacggcccctggagaccgtcgtgctggcgagccgtgctccgtagctccccggtccgcctcggcagcggtcagagtcgcctacaggagttgagccgcccgcgccagaaggttttggcgaagctcttggagaggcgtcgagcacagtagggcggcgggggtgcgttgagcgctcgggggtcaggcagtcggccgggatcgccgctggggagcgtttccgaggcgaggaggaggaggaggagatgctgctcctcttctccccctccccaggctccttctacagctccttcagcccacgcccgcagccgcttgtgggagaagtggtggtggctctcggcgcccgcggcggctgccggcggccc

SEQ ID NO: 32578 - DNA, 798 bp, Homo sapiens
  chr4:87813027-87813825
  hyper
cgctgcgccaaaatgtgtctgatcgtggcagtgctgagcgaccaaaggctctgcctgcacaggaaccacccgccccggcccgggcactttgagcagagcaatccttcccaggttttccctcattcaaaacactcagcaccactcccgcgtccccgcccttgcacgccgattcggggcgagtcccctacccttccccggacggacgcgcagggcccgggaggaactggttcccgggacgggtgggggcctcggccgcccacagagcccgcggagaagggaacggcctcagcctcggctccttcccacacctgggccccaccctgcctccgactcgccaggaatgcgctgtgtgcgcggggcttccagggtggcgggtccccgcgagccggcgccggcggcctggttacccgggctccaggggctcggagggtcgcggccggggtactgaggtaagagcgcgctgcgctaagcgcacatggccgcgcacacgcctcggggccgcgccgcaggcacacgcctccttcccgctcgccgcgggcgccgagtctggggctcctcgcgtcacacgggagcctcaacaaagggctttgtggggccctccccacccgccagggaggggacgccgggcccgggagacgcgccccgcggggtccgctctctggtaaccgggccggggcaggccgcgctctcggaatccagccaaccagccagagagggctgtaagccagacctttcctgggaaggacgctttccaatgtagggggctgcatccaagcgatctggacttcgtttgcgggc

SEQ ID NO: 32579 - DNA, 960 bp, Homo sapiens
  chr4:8861937-8862897
  binary
cgccccctggcctttcctatacccggggccaaaaccgctgggaccgatatactgcaggagtccgggcacaggctgaggggaccggcccgtgcgttgagcgcctcggaggtgctccgggtcatggtgggtgctgagcgggaacacggaaggctgtgtacacagcagcaagcaatgcacccgcgctcccgtcattacatcgcgccgccttcacccccgctacgatgaccactccgcagatgggcaagacgggctcagagagatgaagtgactttcccaaagccacacagcgggccagtgaaggcaccgcgcacggtccaggaatctaacccttcctggggagtggggagggaagggctcgacccgaaggggccaggcggcagagagccccgcgtcccccgccacgggctaagacgcaaggcggcccgccgtgtctccacctgcgcgcctcgagcttcgctccgctctagccttcgggttaacaccgcttccttccagaagcctaaggaggcccgggcggatcagacgcctcccttctccgcagccccatgccctgcccgcagcttgagctcaccgcccttctcggggtggcggtgcggagaccggacggctccactgtgcagaccccgaggggtaaggggccgggtaggggaggggagcgagaagtggcgaggtgagaactgaggggcgaggctgaaggctgagccagacttccagacgccagagagacgccaggtgagccgggcgggggcgggggcgagggcgggggagggggcggggccggaaccgcggggagggggcggggcgcccgggagggccgcgagctgggaaggtcccgggcggccggagacggtgaagaggcggggccgagtcgcgtccgcggggtcccggacacagcggagctggcgccactgtcggggttccgttccatctaggtcgggcagccccgcgggtccgggcgcc

SEQ ID NO: 32580 - DNA, 1324 bp, Homo sapiens
  chr4:8872693-8874017
  binary
cggaggagcccggcaatgggtgaagctatggcctgcaaaacctcctcgttagcggagctcctgccccagagggtgggcctccaaaccagcccaaccaggggctcctgggggccccacaaggcccagacgccgttccacagaagggagaggatggcccagaacgggcggcgacgagcccgaagtcccccagcaaatgcgcagggaggaagtcgggccccaccgcctgacccaccctccccgcgccctcactcactgtcaggactgaggccgcctccatagccaccgtgcgcccgtgggtaccagcgcgctgcgcctccgcagcccagagcgaagggcggcccgggaccggggggcggccgaggaccgaggcccagcgcgcccggcccgagcagcgcacgggcccgcgcctccccgccgggcccggtgcccgcgagcaactgtcgccgccgctgtagccgtcgccgccgcgcctgctcggcgtcctcgtcttcggggtcgtcgtcgtcctcctcctcgtcctcccggctgccgtcgccctgggtcgcgcgccctgcgcccttggcctcggccgccagcaggttctcgatgaggaaggaggaggcgcgggccggcgtggcgcgcccgggctccgtcagctcgtcaggcatcgcggccgcgggcttctcgggctcggccgggctcctcggtccccgctggggatggtggcgcgcggctcccgggcgcacgcgcgggccggccctggagctgctacccggaccgctggcgtcgggccccgcagggcaggcggcggcctccgcgccgggctgggctgggccgggccgggagcgagtgcgcgccgacagctgatcgggcagccgcctggctcgcctttcaggtcgccgttctggtcgccgccggggcggcctcactgggggcggggagggggaggggccagcaggggcggggggtcgcgggctgggccgggagggcggcccgctgagccccgaggacgctgcgccggccccgagcgcggccgctgccgggagacgctgcccagacctgagcgcgcgggcagcggcgcagccgagggcgggcggccccgggcgcaggcggggggtcgcgccgggtccgatcccgcgtgatcagttcccccgtcccgcgccacccgctccgtgggggcggggcctgggctgagcggccacccattggctgtggggccccgatgaggaacgggctggccaatcaccgtccggccagagccgtaattaccccgctgcgaggagggtgttggaccgaccgtgagtaactgtgtgtgtgcgcgcgcgtggtgtgtgcacgagtgtgc

SEQ ID NO: 32581 - DNA, 757 bp, Homo sapiens
  chr4:8894331-8895088
  hyper
cgggttcccgagagcggcggggggtccaaaggcgcgggcaccgatggcgggcggggccctcctgggtcctctgcccgccgccacccctcggcccaccccgcccgcagcatctgcgcgttttaagccggataagacgcttccttccctgtttgtctgggtttctttctcggttgctcaaggctctgatgtgacctctccaagaaaggacaccaatggccgcgcccccgccccacgacgctgcggacagcaagccgactccccccacccggccgcctgccccctccccgcgtcggtgcgcgccttggctccgggaaacgcctgcctccggtcggtctagcgcggcgtgtgcgagtgcagcccccgcggggacgtgggcaccaacagcaggcgagtgactaccgcggcgcagttcccgaggacccagcgcctctcccgaggccaccctcccgggcaggaattactgtctgccggcccgaagccgccaccccacccgccgccctgtttcaaagttggggagagtccatgccgcgacggagcgagcagacttggacatggtcgagtgcctggtgcgcacgattggtcttaagagtttagggaaaaaagcacgcggggaaaccacgcggggcccggcgcgctctcgtttcccaccactgcccccttcccgggcaccgtgggccgccgctgttgcccgtcccgctttcttctcgcctcggagcaccgggtcccccggagtgacctactgcagccgagccccggc

SEQ ID NO: 32582 - DNA, 768 bp, Homo sapiens
  chr4:94749495-94750263
  hyper
cgcctggcgggtccagaatcgcccagagccgcccgcggtcgtgcacatctgacccgagtcagcttgggcaccagccgagagccggctccgcaccgctcccgcaccccagccgccggggtggtgacacacaccggagtcgaattacagccctgcaattaacatatgaatctgacgaatttaaaagaaggaaaaaaaaaaaaaaacctgagcaggcttgggagtcctctgcacacaagaacttttctcggggtgtaaaaactctttgattggctgctcgcacgcgcctgcccgcgccctccattggctgagaagacacgcgaccggcgcgaggagggggttgggagaggagcggggggagactgagtggcgcgtgccgctttttaaaggggcgcagcgccttcagcaaccggagaagcatagttgcacgcgacctggtgtgtgatctccgagtgggtgggggagggtcgaggagggaaaaaaaaataagacgttgcagaagagacccggaaagggccttttttttggttgagctggtgtcccagtgctgcctccgatcctgagcctccgagcctttgcagtgcaatgtcccgcctgctgcatgcagaagagtgggctgaagtgaaggagttgggagaccaccatcgccagccccagccgcatcatctcccgcaaccgccgccgccgccgcagccacctgcaactttgcaggcgagagagcatcccgtctacccgcctgagctgtccctcctggacagcaccgacccacgc

SEQ ID NO: 32583 - DNA, 978 bp, Homo sapiens
  chr4:95678830-95679808
  hyper
cgggctgcctccggcccgcaccccgccgctccccaagtcggctccgcactccgcacacaggcggcggcgctggggccgctccaagtgcgttgagaagtgtaatccctccgctaagtacttggctctcagtctccaatcactagtgggagctggagagggcaagtgaaaaaaaaaaattccagaggcagccgaggagcgagagggaaaaaaaaaaaaaaaaaaaaaaaaagtcccgcggtggcggcggcggcggcggcggagcggccgcggcggccagaagttgacggcgcagccgggcgcggggcgcggagtcggcggggcctcgcgggacgccgggcagtgcggagaccgcggcgctgaggacgcgggagccgggagcgcagccgcgggtaaggcgcgcgcggcggggccccgtcccctgcgggtggccgagttcccgagcgcgcgggaggcggccgagccggcgagagccgggcagagcgaggggcggcgcgggacgggtagcggctgggtgcggagctgggcggcggtcgccctaggcaggacggagcgcgcgagggagagggcgagagcgagggcgggctgcgcggccgtggggcggtggcggcggcggggagggggtcaggcggtggccgcctcggctttgtgcgcgggcggctctgccgggaccccgaggcctcgtgcctgcgcaggcgaggagtcggggcagcggcggcggcgggcgggacacgtgcttcgggctgtagggacgccccaaggcagggagtcggacctgcgagcggagggatggggcgggagggcgagctgagggcagtcgcggaatccgggaaatgggagggagcccggcggggcgggggcccagggccagcccaggcgggacccgcaggcacccacctgccccggacgcctcccgagacccagccttgccgtgggggaaagtgcgcagcgggctggtcccggcgccttggactgggctcc

SEQ ID NO: 32584 - DNA, 210 bp, Homo sapiens; identical to SEQ ID NO: 29228
  chr5:1004778-1004988
  hyper

SEQ ID NO: 32585 - DNA, 634 bp, Homo sapiens
  chr5:1009142-1009776
  hyper
cgcggggcccggcggggcgtggcggcggcgatggggaaactgcagtcgaagcacggtgagccgcgggccggtagggcgggagggcgggcgggcgggcgtggggccgcctctcactgtcgttttcctctccccgcgtcccgccgtgccgcagccgccgccgcccgcaagcggagagagagcccggaaggtgagcgggcgagccgacgggcggggcggggggcggcgacccggcccgggaccctcagagctaggagcccgcgcgcgtcctgccctggagccagcagtggggggacggggccgcgggtctccaggagcgcgcgggacccccacgcctgcccctgcgcggtctccaggcgatggggacacagcgaaggcgcagcgcccgcggggctcacggcgcgtctctttccctcctcggtgcgggtttcccgcgcgtccgcccccggaccgcaggggacagcttcgtggcgtccgcgtacgcgagcggccgcaaaggcgcggaggaagcggagcggcgcgcgcgggacaagcaggtaggcggcggggcggaggctggggtcgcgctgcgcacccgcccgggggcggggagcggtgtcagagctgttcctggtgcccgcccgcggacaggcgagac

SEQ ID NO: 32586 - DNA, 1938 bp, Homo sapiens
  chr5:107005346-107007284
  binary
cgggcttcgggacgcctacaaatcggttccaggtaatcgcgcgcgttcctccggcagcacatcgccaggccgcgggcgaagggctcccacctcctggctcggccaactctggcagcttgttctgcacacatgacgtaacccggcattagatcaaactttctggcaccttgaacccactggggtgggtggagggatggagaagatgggagaatcctctccactgccaggcgcgccgggcccagactgactcaggggccgaatgatttcctcgcagttgaagaggaaaataaaaacctaaagcttccgcttcccagcccccctcacttcccccagcccgtgcgctctctctgcgcgcaccgggaaaagagaagggaaaattaaaattaaaaaaaaaaaaaaaaaaaaaaaaactttgggggatgtttggcgggttctctccgcagtccctgcggacccacgctccaggaaggagctcccggctgcgcacactgggggctccccgcgccgggaaccggatgccagccagatgccggggctgggaagcagagaagtccctactccccggctcccgcccttttccgagtctcccggcgccccgcagaagcagttggtctaggcagccccggggactcccaggggtacctggcctttccgcggcggcttaacaaagaggggcgcgacgcgagcgcttcccgccgacgcctcaagccatcagcgcccgggcgacgcaggctccgagggtgcgcgccgccagcggttggtgcgcgccgatccccgccgccgctccttccgcagggccccgaggcccgggtagccctggctctccgcctgttatcggcttacctggggttgctgctgttccagtagacagcgtagcggtcggcgacggccttggagcccgggtcctggctgaacacacacatccagagcaccagaaacaccagcgtcaacatctccacgtgcaacatcacgcctggccagcggcggagcccccgacgcgccactccggggagagagcggggatccggagggagggaggcaggcaaagggacagagagagagcgggcgccaaataaatatgaataaataaaaatgaaagtgggcgagaaaggaaagaggcgcccaccaagctggggaggggtaggagagcgagaagaaaagaaggcggtgggatggggggtgataaagacaaactcgcacccccactggagggttcaggaggaaaaaggaatcacaagatggagagaagcgtgcgtgtgtgtggtggcggcggcgagggcgggggaagaggtgccaagctgtgtctcgggcggcggcggcaggccggtcaccccgggagagggaggtgcgcgccgggccgggcggctgcagcgcgggtcggggcaggcggcggcgcgcgctgcacagtcaccgggagttgcgcgccgcagccgcggggagacatacaccggcccgccgggcccggctcagcgtcggcgcagcaggctacgcacggctccgccaccgcccggggccctcgcactgcgccacgcttcgctccaagttactttggcggccggtgggaaactgcaggagaagggcgacgtgctgatagagggcttcgcgcttgtggtcccgggagtctgagaacccctttcctcagcctcctctgtgccttagcggggcgacccccagaaatctcagaggagtcgtaagtgctgcggtaccgggcggtgcgccgagaagggtggggatccggagccgcaacccagccttgtcggtgtcctggaactggttaagcggcagctgcgccggctttcgaagcggtcttgcctcgaaaacctcaaagaaaagtttggctcttcgcgtcttccggcaggtcccccagcagagtcggaacgcggcggtagcggaagagggcaccccgggggctggccgagcctcggggatttctcgcgc

SEQ ID NO: 32587 - DNA, 991 bp, Homo sapiens; identical to SEQ ID NO: 29233
  chr5:1111396-1112387
  binary

SEQ ID NO: 32588 - DNA, 603 bp, Homo sapiens
  chr5:112823700-112824303
  hyper
cgcctagacaaagacagcgctgggaaaagttggaccaactggcacccccgcaaggcgaacagagcagtcccctcggccttcgtggccgagccggctacgcgctctcggagtcgcggccaacttttcccgcgagcttctgagcaacttgccgcaagttggggcgagggggcagagcaggggtcaagggcgcgcggagggactgatctcgctcctgtcggtttcctcgtacctccccgcgtacctgctgatgtatccgtccccgtcgccgtcgcacgtctggaagaggcgccgcatcctctcctcctcgccggtgctggacgtgtcgctgctgctgctgctgctgccgctgccgccgccgccgccgccgctgctggagctccccgcagccgctgccgccgcggccgccatcatgcgcccgctccctacttgggaggaggagtacgcgcgaccgcagctggaatccgcgcggcgcgcaagctgcctgcagccccgaacttgcctgacaacggagcatgcccagtggccgccggggcgctccgggcgagggattccacctctccgggttttgcccggactgggaagatgggcgctctggaatcgccc

SEQ ID NO: 32589 - DNA, 765 bp, Homo sapiens
  chr5:1155508-1156273
  hyper
cgaggtcagagggcgccccgggagctgtcggcccatccccgcggcccctgccccggctcggtgtcacctgcaggccccggacagggcgggatccccgcagggaactgccccaggtccccggagcgcgcggcgggcggcaggggcggggctccgctgggctggggggaccccaggcagggaccgacccccgggctgaccgggagccccacccccgccggcccgccaggccgccgccgcccacctgcgcccctcgaggggaccggcacctgcgcgcacctaccgtagcggccgggctcgcggcagtagagcagaatgggaagcgggtcctcgtcaggcggctcgggcgcggctgcggggtccaggccggggtcgggggcccggcgggggctcggggtggggcgctggctgtcgccttccttggccccgggccccgcaccccccgccgcgggggtcaccacgaagcgctgggacatggtgtccgcgacggctgcggggagcggggacctgagcgcggggagggcggggccggcggggcgggcgcgggaggccgggaggaagggagggaggccgggggggagagagggaccgagcgcaccgccggggatggggccgcgcggcgcggggaggggccgggagggcgaggcggactccggctgacacctcggcagcggtccctgcccgcggggggaccacggcctcggcccccgaagaacgaagagcggcctcggctctcgctgcgtgaccttggagacgccccagccgggc

SEQ ID NO: 32590 - DNA, 1340 bp, Homo sapiens
  chr5:11903295-11904635
  hyper
cggcgctttctggagcctggctgtctattgtcagcacgcagaagcccccgaaacctgtgaagccggctgcaaaggcttgctgggaagccgctaaatatagaccaagggggctcagggtctggcaagccgcgggagcctgaagacacggccatggacgcatatgactaagtctttccattttgttctagccaaacatcgtaatgacattgaacataagggcaaaagactggagggaagtcctccccacccccaccccgtctcctcccgtatattagggacgtcatgaatgcaccgagtatgttctcagggtggcggggagcagcattgtcggtgttgccctaaatacgcttcctcccggggagatgggtggcagggagggggagcacgcagggcagccacttggtaaccgctccaagaaaggcactaaccccggacccccttccaggcacagcggcttccgagggggacctggcgcgatcgcggtcctccccgaggcaggcagaaaccccgcagcagccgccgccgccgcctgccggccgggagcccaggaccacccccaccagcggcaagaggaggaggacggcgccgggaggaggctgcgcccggccccggccgcccagccccgcaactcacccaaaggcgcggcgcccggcggcttcctcgcaaacatgcaccctccgccggcgacagctcctcagtccgggaagaggcgtgcgcggcgccgcccggcttcagggcaaggtcctgaccttgcccaactgcagcatcttccgcttttgttgtctgagcgcggccgcgggacaagggatgctggcgggcggcaggggcgagcgccgcgggcgagaggcggctcccgacgcgagtgcgcagcgcccggcccggcggcccctccgagctcggcgagcgcagcgccccctgcccggctccgcgggctccacgggctcctgcgggctcctcggggctccgggcgccgccgccagccggccgggctgagagagcagccgccgcgcccgcagctccgctcagccggctgtcgccgcgggcgcgagcctggggccgccgcggcgcccggcgccgagcgctcccgagctgcgccccgcgcgcggcccgcgccacctgtgccgccgccgcctcagccgccgagggcgaggctcctcccgcggcgcgcggcagcctcagcctccacctaaacctcggcggccggcccgggcgcccggctagtgagggagcgtccgccccgccgccgaaaccggccccgggtgcggagcatgcccagtgccgccgcgagagcggcgcttcgccgcgcgcgttccacttctcctggttttcgcggcagcagc

SEQ ID NO: 32591 - DNA, 1947 bp, Homo sapiens
  chr5:127872759-127874706
  binary
cgcagcgcgagctctgcacacgctctgcgatcggcacccctggaccccctaaccacccgccgcccaacccccggagagagggctttccgcccgctgagctgcggggttgggaaggaaaagggggacgcgctcctgggggtctttggatattctggcaaagggggctgcagctctaggctccagctaaagggtctgggacggagtgggccagaaagccgccaaactgaggattcccccctcccccaagccggagccctaggtgcggagccgcttgcccacttaccctcggagcacgtcctgctgtcctcgccggcggacgcggctggccactgcggcaccctcctcgcgatactcgggcgctagaaacccgccttcagagcctgctgtagcggaccgaacctgttgcggcggcggctggggccggggcggcttgggcggaggaggctgaggctggccggccgtgccctgcgcccagagcaccacacagcccagccacaggaagtagagctggagacacagcctccgtcttctccccatcgccggcgccgaaagcgcgcggccgtagacccgcggagagggagtgatcaaagacaaaatctgcgcgcctcagaaaagagtcagggtctaataagcccttcgtcggctccggggactccctcgggctcgggctccctgctctagctggagacctcgacagagcgccggccccctgactgcccgcgaagcgagacgcggggcgccgggtctagcgcagtgagcggcgaggcgcggcggaggtgcagccggcagccccgagcggtacacgttgcataaccggcctaaagccccgagcgactccaggaccgtcagcgggcgggggaggaaattacaaaagccctggcgtaaaatttcaaaaaatgtgaacctcaaaagaaaaaagggcctgcacgcagagctcggcggattcccgtgcgctccgaagacggatattggaaagctgcaaaagtcaccagaaagaaacaggcaagcaaacaaaagtcgcccccagaagaagaggagggttccctccgggctcgctcggagtcccacagggcaacgaagcgcgggtagcggctgcggagccgggcggaggtgcgcggggccggggcgtgcggccagcaagagagagggcgggaggctgggcgctggagaagatgcggcggtggagggcgcggcgcgggggttttagaggcccggcggggcgcggggcgggccggcgggcggcggctgtcagtgggggcgcggccgtccacacgtggggctcaacccggactgagaggccggcgcagagtgggcggggacagagtaagggagagatcgggactgaggaacgaggggaaccagggttgggtgaggggaagaggaaggaagggggggagggcgaagggagggaagaggacggagattggggagaaggggggcgaacccgagaggaaggccgggctggaagagggacttggaaagagggattggcgagcccgggtgcgagaggaaatgagcgggggatgggggcgaagttagggcaaagagagaagtgggaaaggagagggagggccaaggtccgggcgccgagaggaggggcccggggggccggctggagggggcgaggcgctaggcggctttgcttcccgtccccgtcaattggccgctagctctgttttgactgcctgtacaaagcgagtagacggcgggggatggggcgattagggaccggatttgggaaaggaggcagcagccccttcccctccccctccgtcctcgcccggccgcggaccagggactagggtgcctaagcgcgccaggcttggccggacccgcagctgaactgacccgcagctgaacttccccgccggacagaggccgcaaggttgaggatgagaacgggtctttctgtagggtcccggcccctgacctgggatggggggattc

SEQ ID NO: 32592 - DNA, 1888 bp, Homo sapiens
  chr5:129239570-129241458
  binary
cgcggagtggcagcggtaagaacaacgtggaaaggacggaaaacgcgaagagtggcgccctggcggacctggggcggggcagagtggtaagggtcacgccaggacgtacccggctgtgggccgggggaggagagcacggtgggacagcaacgaacttgctgggggctcccggacccgagctccgccgatgaggtcagcggagcctaggcgccgggaggaggccagtagagcccccagacacgagtgtcgggaggccagcggaggggcgggacgggacgggaaatgggacgaagagcaagagctgggggaggagggaagagggggcgtcggcgctgcaagccggaggcggcccgacagggatcgtttccttccggagaggaggccggctctggactgaggcgcggacggggggcgtccaagggcgggtgacggggaaataccgcggcccgcgcttctctccggctggcagcggtgccgcctgcggctcctcctccgggccagctcggagcccggcggcggggggagcgggaggcgggagtgagggcgggggctcgggaaggagggaggagggagggcccaggcgcgccactgacagggtggcagcctaggagcggacgcgttgccgccgccgctgctcctcctcctcctcctgcagctcctccagctgccgctgctgccgccgctgccgccaccgccgccgccgggagaagtttcactcccgacccttgctcggagccccggcccagagctgagcgggagcccggcaggcagctgcagcccgcggcagtcgaggcgtccgcggcgcttcgacctccagccggtgtcggcgcctaggcggccggctgcggccgcggctgggggcgcaaaggcggaggaggggcgggtgtgagccggggaaaccgcgtgccgcgccgcgacagcccagcgagcgtccgcgcccgggacagccgcgatggctgtgcgctctcgccgcccgtggatgagcgtggcattagggctggtgctgggcttcaccgccgcgtcctggctcatcgcccccagggtggcggagctgagcgagaggaagagacgtggctccagcctctgctcctactacggtcgctctgctgctggcccccgcgccggcgctcagcagccgctcccccagccccagtcccgaccacggcaggagcagtcgccgccccccgcgcgccaggatctccaggggccaccgctgcccgaggcagcacccgggatcaccagttttcgaagcagcccctggcagcagccacctccgctgcagcagcggcggcgaggacgcgagcctgagggcgcgacggggcttcccggtgctccagcggccgagggggagcccgaggaggaggacgggggcgcggctgggcagcggagagacggccggccggggagtagccacaacggcagcggggacgggggcgctgccgccccgagcgcccgaccccgggacttcctgtacgtgggggtgatgaccgcgcagaagtacctgggcagccgcgcgctggccgcgcagcggacctgggcgcgtttcatcccgggccgcgtggagttcttttccagccagcagccccccaacgccggccagcccccgccacccctgcctgtcatcgcgctaccgggtgtggacgactcctatcctccccagaaaaagtccttcatgatgatcaagtacatgcacgaccactacctggacaagtatgagtggttcatgcgcgccgacgacgatgtctacatcaaaggtgacctccctgcgccggctttccagcctgccagtctccccgactcctttctctgtaaccggtcctagcccctgcccagcccctccgctgcttctctgccagcacgtgcttcgggctcccacaggccctggccc

SEQ ID NO: 32593 - DNA, 242 bp, Homo sapiens
  chr5:134824599-134824841
  hyper
cggcggagggcagaagcgtcttcttggctggctagagaagctccgccggagtggcctcctcccctcccccaggccggggaggaggccgccgagggctctccaattggagagcctttcatctctttgtttttacagtgattaacccgtccgagcgcgctccgagcgtggctccaggcagcgcagggggaggggagaggacggctgggcaagggaagggagggaggagggccctgggctttgtc

SEQ ID NO: 32594 - DNA, 1890 bp, Homo sapiens
  chr5:134870248-134872138
  hyper
cggctcaaaccgaattttcatgctcgtttttcttcattagagttctacaaattgtaaaattgacttttcacctcgtcttcaggggctgatctgtcccttttctaaatcacactgaagtggtggctggggtcagttctgagccagtcacaaaggaggttttgtggagttcagaaagtgcaaaaggaaaggccgtctaggggcgggcaggaggggcgctgggctgagggccggagaaacagaccaagagacatccgccgcgagggtgcggcgacctaacaagcggctcaggtatccccgactgctttaaagctcccgcttcctccctccgcctggagagggggtcccgaggcggcagctggggccccatctattgcctgctgactaggggagggggaaagtaacagtgtctacaaagggcctagtggtaaggaatgaaacagggcgttgtgtggagcaagtctttgggcaggcttgggaaggagaaaacagggtcgccggggcggtaggtgaagtcttcggaggcggctgggctactggggtcagagagcggggaggcggcggcggcacctgagccccaggactccgcgtcgctggcggggcttgggggaccgggcaggcaggggacgcactgcggcggcaggaggcgctcccgggcaccgcctccgggcagcccttgatccgccaggcgcagtgtctcggccagagcccagatgtagttgtaggcgaagcgcagcgtctcgattttggtgagcttggtgtcgtcggggaacgagggcagcacgctgcgcagtgcgtccagggccgcgttcaagttgtgcatgcggttgcgctcgcgatcgttggccttgacgcgccggctcctgcgcagcgagtgcagcagcgcctcggagcggacccgcgtccggccgcggcgccgccgcctctcctgctcgtcgtcctgtgcccctggaacctcagacgcccgggagatattgggcgcgcccctgcgggccggcgcgggcggccccgaagcggaggctgcctgttggagtctggcacagtcttcctcgtcggtgaggaagccggataggtcactgccgctgctgctggcgcagtcgaggtcggagatgcaggtctcaaggcgggctggcatcgttgcgctgtgcaggaccgacggacagatagaaaggcgctcagagcgctgcagcccggactgagggcagagccgccagggcgcacttacgttcccaacagcctggggttgttactctgtgccagttgcgggtgcgagagcctggaagggtgcaggggcgcacggagaacttggcctggcctcctcgcctcgcctgcaggggccacgcgcccggccggtctcctgagtgatgtcgccggcgatcagatcagctcgtgtgagcaccgagtgtggcacacgactggcctcaggaccccttaagtacccggcgcaacaatgggcgcccccctcccttgccacctccgcccccgcggcagcccgggtgaatggagcgaggcggcaggtcatccccgtgcagcgcccgggtatttgcataatttatgctcgcgggaggccgccatcgcccctcccccaacccggagtgtgcccgtaattaccgccggccaatcggcggcgtcgcgcggccccgggagtcggctcgggctaagctggccagggcgtctccaggcagtgaaacagaggcggggtcggcgggcgattagcggccgaggcacgctcctcttggggcgggctgggcgcccctcgctggggtgggacggggaggcggggcgcgagcgcgaaagtgtgagccgcccagtgagttgcggaaacctggagggtacttggagtttgggttcgcatcccctctccagctgcttagtggtcgcgtgactttggac

SEQ ID NO: 32595 - DNA, 902 bp, Homo sapiens
  chr5:134914178-134915080
  hyper
cgtcgctgtagcggatcttgggtcccttccgggagcacttgcatttggaccctgcgagcgagcgcggggcaacggcttagttgctaggcggtctcctgcccctcgaccaccttggtgcccacccagaccaccccccgcgggatcccaggatgcctagaaattggcgcttgggttccccaggacaggacaagacgagacggcgacaaggggagctccccgcactcaccgtccacacgcgcggtgtacagcgccagcagcagcaggagcagcgcggccgccaggagcctcatgctgaccggaggggcgcggcgtgggagcagggacatggggagggcgctggcccgtcggagcggcggcccggagacgccacccagctctgctcggctttctctgcccggggcgcgccttccggctctgctggctccggctgcgccgtcggtggatgcccagggctgtctgtggccgtgcgctgcgctctgcgcttgtctccgcgctctctccacagcctccctccgcccgccctggcctcttttaaatccgctcctgccctcgcagcgagcgagctcattaatatgcagaaccactcggtgactcactgagatttctcaatgtggtgaggggaggagaccttcccagcccgcccgtcgcccgccccgggaaaggacccgctatcgcagcggcgcacacccggagccacgcgcgcacacgcacacacacatccgctaccctctcgctcacacaacacgccgccttcgcacacttgcacacccataccacagcgcgcacacatttccagcgtcccgctctgcctttggggagcccagacggtggagaggctgctgaagggcactgcttttctgaatcgtgtggttctctctctggcccggcaggccagcttttcc

SEQ ID NO: 32596 - DNA, 975 bp, Homo sapiens
  chr5:135265716-135266691
  binary
cgcccttcatcgggagtaagtcccagaaaccacaagcgttggctcatgcctgtgtggagtcacaggcaggtggccacggggaattagctgaagaccagcaggcaggaagcctcccacatgccacctaaggggcgctcccggaaccgccgcccctgcgggaggagcggctggggtctcagatcgccgtgcgtgacttggtgctgcgccaggtgggcgccatcgccgcggcctgctgggggaggcggcctttgaggagcgggcgcgaggcggggccaggcggggcggggccttgggcggctgcggtctgcgcggacccccgtgcctaggcgctcctgtgcctccagtgcgcggagccggcctcgctcgggcgtgttcctgcgccgaccggacggccggactccagcaccttggcccggcccgcgaacgctgagcacgcgcggaaaccctttaaaggtagcacatttttcgggtgtcgcgggggcaccgccggcggtggcgacgtggggcggaatgggctcgctctttgggcccgggaggcgtgcgctcgcgccctgggccacgtcggggcggtctcgggcggctgagcgccccctggagcgacccctcccgcggcccgggcccggccgcccccgaagccggggtgagcggggcctggctcgggccgccagtgaggactcgcagcccccgggcgtccgctttctcgctgggctgggtttctgcagtgccgggcgcccacccggccaccccatgagccgcgcgtctggctcttcggtggagtgagcctagaaagggcggcgttcgtccagtgatcagtgctacccgaggttgctttttgcatgactgcttgcagttaagttcaccggagtttatagttgccacaaatgtcaaaaagtagccttctggcgagctgaaagcgctcacctgtgcgctttaaggtgtaccgtctttgtctttggcgagtgtgccttttaagac

SEQ ID NO: 32597 - DNA, 962 bp, Homo sapiens
  chr5:135528270-135529232
  hyper
cgcgacccggcgcctccatggcgcgcccctcccgccctgccgcgcccaactgaccgagagtcggtgccttggggccggcggggactgcaaagaccccgggacgcgtccgctcactcgcctccgcgctcagctgctttccccgccggctggcggaccccagttctcggagctggacagttctgtgcccgcgcccctcgggctcactgtttctctccgtcgccaccaggacagaggtcccagtcactgactcgcctttcggctttacaacagcccgctcagctcggaccctcagctccagtgagctccaggtgctgggcgcctctgggctgcggcggcggggagaggcactcagcaagtgcagccgcagcccggggtctctgctgagcgcccggtggcagagcgcacggagggcgggtggccagggagtcctccgcgtcctccggcgccgccgccaccgcagcgtctcggaacagtcctgcaggctctggtccctgtcgagacgcccagtgttcagcgagcttgtccccactccctccggctgctgcgctcctgttttgagcaggagactgagctttctggcggctctgagcgcgctcgtgtcccgggcgggggttcgggggaggggcgggactggcggcggctgcccgggggagcggctgcgaaccaatgagggcaagagaggacgcggctgcgactgcccccagcccggcctcacatcactcagggacagagggacagagacagggacagagagagagagagaaagagagaaaagcacagggtcacaggaagactgacgggcaaagacacagttacagacctatgaacagagccacacgccaaacagggacaaaccgttgaggtaagcaaaccaactcagagacaaagctcagctgagcgtgcacacctgcgttcattatcctccttgacaggctccctccaggcatggcctggtttgttcc

SEQ ID NO: 32598 - DNA, 1147 bp, Homo sapiens
  chr5:136833998-136835145
  binary
cgcttcaggggtcccctccgagaggctccgcgccccccagggccgggtggcgccggtactcacgtctcgaaagcggttccagtacttgtcccggtcgtactgggagacggtgctcagccactggtcattgtctaggaaattgccgtggttggggcccgcgcctccggcgagcgcgtccaggtgccggctctcgacttggaggaagcaccacgccgcggcggccgccgccaacaccgcgatcgccggcatctgcggggcagggcgcgcagggcgatgagcgaagagggcgggcggccgcgagccccgggcacccaggcgtcccagcgccccagcccggaggcggggaccccgcggcgggcacgggcagcgctcgcgcacctggggcgcctgtcgcgcctctagacccagggacccctctcacgaatgggggactcatctacgaacgaggaggctgcgtcacgaatccgaggctgccgtccaactacaggggacccgtctcgtctattctccgagtgccccacagatgccgccctcctatcaggggcttggtacccctccccagaagcggggagcccgggtccgcacgccgcactcccacagacggtgcggtgcacacggctttggggcaggagaggggagaacagggctccagcagcacccgagctccggcaagcggggtgggggctgccagcagctgggggtccccggcgacagctaagggaaaggtctcccttgagcgccctgaggtctcgggggtaagaaaggcgcgcggaggtaaccccaggccctgaccctgccagccccctaggcggccgcggggaggtcccaactactccaagttggggcgcggggttcctctgggcacgtaccttgggggccggcccgggtcccctagtccgagttgctcgagctcccgcggcacggtcgccgggaaggctgatcgccggctcgcgcccctgcgctcctgccacacgccgccgccgagcgtctggccgctttgtgagcccgcagcgatgtgctctgctcgctcgctggctcgggcgcggcgtccgcgggcggaggaggccgagcgcgcgagccaaggctctggcgccccctggtggccgcgcgctgcctgcccgacagcccggccgccccagcccggaac

SEQ ID NO: 32599 - DNA, 797 bp, Homo sapiens
  chr5:140345512-140346309
  hyper
cggaaagagggcagcatttgccatccccctccttttgccctaggagttgagcactttctgcagtacttaagagtgtccagggaagatgtgggagtcaggtgaatagttcccatcgccagtaaccccagagcgcctccccctgcgttgtttccttttaatgttagatccgccgcctgggtgcccatacttagctaaggcccctcagtttattttcctgaattgcgcttggagatcttttcctggggagctgatagccagacttctaggggcttgactgcttttcccagactaatctccttaaagacccgttaagcaggggagagacggtggagactggatgaactggacagtgggggtagggagaaagggagtggccgtgttcctgcggtccgctgggatccggcaggtccagggtgaaggagatggggctggagaggctgagcagtccgggttcgctgtccgccacttcggcgcggaatcagagcaggacttgctgagccctcctaccgctccctttccccctccccctctgtcttcccttctgtttccttttccctccccctggagctgtagcggcagcagcagcaggaagccgagccgggttgagcgactcggaggcgagcggaggagctggaatatggggagtcagcgaggacggtggggccaggagcccttgggagggcctacggagggagcggccccaggcgctttctagagcgtgagcggtgggggagcaggcgcagggtggcacgagcggaggcggggcccgggcgtggggcacggctggggaagctgcc

SEQ ID NO: 32600 - DNA, 962 bp, Homo sapiens
  chr5:145214425-145215387
  hyper
cggaaagctccacacgtcggtcatctgcaactccacggagctcacgagctgggattcccggaggctcttcctaaaaggaaagcctcttctttcagctggggcaggtgtgaacgtgatgccaagcacggccccttttcccgctccctgtaaagggagtcttcgaggaaatccctctcgacccacacatccctgaagcaaagcccgcagctggaaagagacactggcggtgccagcttccgcgtggatgaaggagaggagagaggggcaagcagcggaggcagcgcgggatacggaaggtggaagcggggcggtacctttcggagaaagctggcgaccacctgctcgaaggggtacttgtacacctggtgcacatccaccgagacccccatccccgcgcgccgcgggccccgcgcaccggccacgcctccgcgagctcagagctgcccagggctccgcagaggcccggaggcgcccacactcggacagccacatgggcgtggcctttttcctccgcttttcaaactttcgaaactttattggccactcggagaaacgcgcagtcggccacgcccacgcccctactgccagagtccggggcctggggttacagagcgcgggaggcgctggagcgctcccagagcacccggggccccgcggtctccacgctggcggcgccagagcggccctggtgccctcccgcggccgcgcctgccgagaaaagcttctctgcctgggagccatcacgccccgccccaggaaacctggaccttgggcttatgcgtttatggtatcaccgcctggagtcacagaataagccgtggttggcagcacgggaaaaaagtattaataaggaaggcctggtgtgacaaaggccagcattactcatgccaccaggcagctgcctctgaggcttgggtttgggcctcgtgtaaggtaaagattgcctcgggaataagaaccgc

SEQ ID NO: 32601 - DNA, 112 bp, Homo sapiens
  chr5:145316100-145316212
  hyper
cgatcccttgaaatgagtaagactgagtggttaaagttttcaaagcggttggcagcagcggcgcttggaggaaaggaagccggttggagggcgcagcgcacccctgctgcgc

SEQ ID NO: 32602 - DNA, 748 bp, Homo sapiens
  chr5:146888813-146889561
  hyper
cgggcatcccttccgcgcttgcacgaagatgctgcaagtggcgacacgcgcgaatccagggtctgggctaggaagtcgcgctacgctcagtggaggatgaccctttcctcctccttgtcccccagccccgtgcaaagtgagctggagaaagttgtgcccgggccatggcggccagggctggagaaaggaacgaaggcaaggagggaagtgacccggggcccccttaccttgtccttggggccgaggttctgcaacacctctttgccggtggcgctccggatctctaccccggcgggggcgggggaggcgggcgcgggctccctgctctcttcccggccttggcccctgcgcggggtgtccccctcgatcccgggccgactccccgatcctcggtcgctgccctggccgctccgaggagtcttcgcgccccgctgccccacgctgagggcatcgaaatccagcgtcttgctctcgaaggcgccctccacgttgcagaacatgccgccgtatttctgccgcgggacctggtccgtggtgcccggcctggccaggtacacgggcagatcgtcttcgtgggagctgtcccagcccctccggcccgaggccatggttcaagcacgaaagcggcccgcgggtttttcttccccagaggcggaaagggcagccgccggcagcgtgcgccgagccacagtgactgtggcgggaggaggcgcctgagccttcgcgccagaggcggcagtgctgctcc

SEQ ID NO: 32603 - DNA, 443 bp, Homo sapiens
  chr5:148520933-148521376
  hyper
cgtccatctcacaaggcctcgtccatctcccatcacaccctagggcccaggcagaagcccggcggggcggggcctcggacacgcgccggtgcgtccagcaggtggcagcagcgagcggccgcgccccctgcgctgccaacccgcgagcccgcatcatggatgtcgagctcccctatttcgcattgctagccctggaattcgagaccccagacgaggaccaggattcatgaaatcagtcgcaggggccggggcaggggcctctggctcccgacactggccgagaggtgggttccggggcgggtcgctgctccttgaagccgggcggggacgcgctgcccccgccctgcctccctgtggtccacaccccctttgggctccggagccgctgggcaggaatagtccggggtgcgcgcgagcaggcgctgccaaccccacttctgccc

SEQ ID NO: 32604 - DNA, 1202 bp, Homo sapiens
  chr5:148650971-148652173
  binary
cgcggcgaatggagaagacaagcccaaagccaggaaatgggtggcggctgcagggaagggggttttgattccctaggataaaaacgcgctccaacagtctccgcattccggcatggagccggctgaggggtgcggtggtaagaccccatcgctagcggagtgcaagcaaagccgcacacctcctgggtccgggctggggcaggccgcgcgggcgcgggaacgaacgcgtgcggacggggaaaagggtcctccaagcccaagtgggagcgccgcggagggcgagcgagcggcagggcgcggcggggcgtgtgcggcaccacgggacagcgggctgcggcccagggggcgaggcgtgctcgggtctattccgggagcggctctgaggggcgggcgcgggcgcgggcggggcgggggctgccggcgagcatcctgtctgggggaggggaccgcagagagcgccggccgctgggctggcctgagagcgcagcgcgccggccgctaccagccgcgccggagcccctgcgccctgcggcccgctccccggggaccgggccggcgccatggaccgaggccagggtaagaggggccgcgacgcccgcacttgttgcggcgccgggcgggaaagggagactggacgatctgaagccggagaggaggagggagagaggcgggcggtggggcgggggctgaggaacgctcggaggggactgggagacgcggcgcttatgcaaaggtgccttcggctgccgggacaacccggtgcgtgtcaacgcccgtgtcctggggccaactcgcctctcgtgtgtgaaatcagagttttcataggctaacgatttgtaacttcataaaagatccccctctagtttccggaggacagcgagctcctcccacctcattccactctaaaggggaaaacaaggtgtacaggttcaactcccgaaacacccgctgtgggcagcccctagggagaagctctaggggaccgaagtttgcagctgcctagggcattgcgagaaggaggagcgccgtgagcaggcgcgcgtgtgcatgcatgtgtgcgccagggagggaggaggcgggggtggttctatcccgcaccagctgtgtcctcggcccagcccttctctctggaccagcgacaaagttggactagatggtctccaaggcaccttgccgacccttttccagtgtatttggtagac

SEQ ID NO: 32605 - DNA, 489 bp, Homo sapiens
  chr5:149569500-149569989
  hyper
cgcttgcccaaggtcacgcagaaagccgagggtttccgtcgcgaacccccctccccactcgctcagggctctccaatccgcagctctgcgtgcgggggcgcgcgcatccccccgccgtccgtccgtcagctgtctgtctgggtgtctatgcgggcgcagcagtgcacccttccccagcctcgggcgctgcgcagggacagacaaggcattcgcagcgccctgcccgcgctccacgcccgcagccgccagacggcagcgcctgcgtccgtgcccgccccagccggtgcgcgggagccgcgggggcaaaggcgcagtggccagcggaccatctctcgtgccctcgctctctgcgctccggggcagctgagccccggccacccgctctccaagatgaagaagctccagggagctcacctccgcaaggtagggcacgagggcgggggcgctgggggtgcacctggaggagggttggagagacccgcccccaac

SEQ ID NO: 32606 - DNA, 763 bp, Homo sapiens
  chr5:149681827-149682590
  hyper
cgccagcctccccgggcccgtcggccacgaagctcggcttggcccagtcccaggacaggtagccgaagctgagcaggctgaccagggagaagccagtgagggtgtgcatcgccaagccggcccgcgcgtcccggcgcgccgggctcctggggcctcaccacctcgcgcgcccagggcgcaccaccggcccgccggctcggatgctgcgagggagttcagcgccccccggggacggtccagtgtctggtccgggactggctgccggacggctgggccggatctgctcggccgcagcggggcgctctggggaggtcaggcccgcgccgagctgcctcccgctgcctaagcgcaggccctgcgccgcctttgctccctcttccccagctcagcccggccagcctgagacgcggcgtggcagcttccaaaaagtgctctctaccatcctctgactcccctcttccttcttgccctggatttctcccgcctcctaatttctctctcctctgctttcccggcctctcgccccacccggagtccttaaaacagcccagctccctgcagggaggtgggcaggaccccagaggggaaggggagggaggcacaagttgggcgggtcgaggggacacggcgggagagaattcgaaaaagttgtaacatctgccgggccgggccgagccccaggtggaggggcgggacgcagagcagcggctccacctcccgggcgggaagccccggccctctcggcctgctggctccagcgccc

SEQ ID NO: 32607 - DNA, 1329 bp, Homo sapiens
  chr5:155108187-155109516
  hyper
cgcttggccggcgccggcccctattccgttggcaagtcccttgtctatcccggagggcgcacccggacgctcgagccggagcgagcgcgaagtccgaagtccgcccccagagccgccaacttccctgtgagcccctctccccgccgcagcctgcgccagacctgggagcgatgcgcccccacccgggcggcgcgccctctgccaactcgccacccatgggatcgactgccctcagctgcccggcttggagtgcgtagccttcgccgcgtggcccaggagaggagcgagacaccaaggcgtttcgcggactccgcgcgcaccagtcggcttggtggccctgcgggatagcgtttatacccaggggtgagtaggccgctaatggaggccccctttacccccagctagcggcttgcatggacggcaaagagacgggagaaagttgggtctccttgcgcttaatctggcattggcagaggaatgcaacactgtttcctccaactcgattgccgcgggggtttccccagttccctccatctctaagccaaggagggagtccccttccgcttcctaaggagaaaaggggctccctagagcagatcgctgacttcctcaccaacgtgccatttggggcttttcagccgcccgcgcgttaagctagctcccagcataagcgcttagagatccgcagccgcctgggcgcgctaagagatcgtgggcagacctagcccttagggcagcctaagcgcgcttcactaaagaaaaaagactgttggtatattaaagaagtgtgtgtgtgagagagaaagagacagagaaagagacagagagacatgggtgggggcaccaggaaaggtagcccgagtaggaggtgctagtgaaatttatcttttgctgacggatccagcctccggaatgcccgattgtcttgatccgcggtgcggtgcgggttttaggggcgcacaatacagggtgtccagacagagtccaacaggtggcctgcgcgggcatcctgtggctaggcgcgggggaggggaacggctccctccccgagccccgggctgcctctgctgcttctaggggtgcatctgaacatggataaggaaatgcgctccctgctctcaggccctatttggggtgagtgtgtgaggcatccaaatgcctcctgtcggaaaacagcggcctcattgtgtgcccgattgaggtttcaacttgcaggcaactgagaggccattcagctgggcagcacggagttggctggtcctcggacttgagccatggccttccccacgatccctggcggcagtatcccagctcctccggctgggcggc

SEQ ID NO: 32608 - DNA, 672 bp, Homo sapiens
  chr5:159399024-159399696
  hyper
cgggtgccagtgccgcggccgcggccgccgccgacgccgccgccgccgtcgcctgggcggctgcgcctacacctaccggccgtggacgcgcggcggctcgctggagcgctcgcagtcgcgcaaggactcgctggacgacagcggcagctgcctgagcggcagccagcggaccctgccctcggcctcgccgagcccgggctacctgggccgcggcgcgccaccgccagtcgagctgtgcgccttccccgagtggaaggcgcccggcgccctcctgagcctgcccgcgcctgagccccccggccgccgcggccgccacgactcgggcccgctcttcaccttcaagctcctgaccgagcccgagagccccgggaccgacggcggcgccagcaacggaggctgcgaggccgcggccgacgtggccaacgggcagccgggcttcaaaagcaacatgcccctggcgcccgggcagttttagggcccccgtgcgcagctttctttccctggggaggaaaacatcgtgggggggaggggagggcggggcggaggggggaggggagcgtccacgccgggtagacgcgcgccccaaggggaaccggggggagggccggggagaggggcagctgcttttctggcaggggcatgggtgccaggtaccacgcggaaagccgggcc

SEQ ID NO: 32609 - DNA, 988 bp, Homo sapiens
  chr5:16179393-16180381
  binary
cgccacttcctggccggcgggctgcaggggcaggggcggaggcggcagctcgtccgctcccctgcaccgcggggccacctcccctagcggctcgcttggccccgcggcgcgctcgggggtctcgggggacgcgggcagcggcggcaggtagcgcggggccgcggggaccggggccggctctcccggcggcggcgtcggcggcggcggcgggggaggttgcgggggaggctcggcgtccccgctctccgccccgcgacaccgactgccgccgtggccgccctcaaagctcatggttgtgccgccgccgccctcctgccggcccggctggcgggccgggctctggctgcagggaaagagagcgcggagggggcgggagggagaggggaaaaggagggagggggcccggacgcctggggctagggggcgggacggggaggggatgcggaaggttctgcagctgcggcggcggcaggcgcggccgttcggtggagccgccggctcggctctgatggaggcggcgccgaattcggctgcgcgtgagagccgcgccgcggaagggggggccggagaagcgagggggcgggagggaggagcggcgcggcgggggtgacggggcgcgggcgcggggtgggctgggggcgcggatcagtgggacggagttcggggttcggctccgagcgggcgggctggaagtgggggatccctcagccgcctccacgggccggccccgcgctcacgtcggttccggggcggatgacccctctccaaacggcgcagcgctgcggctctcgtgagctgggaagtagggggcaggggagaggccgcgggtccagaaaccgttactggatgggccggtgggatgtggcgcgggccgggtggggcgcgacagtctgagccgagacccgcgtgggcttaagggtgcgcgaggcgggtgccctgggcgcgcccgaactggctgagcagtggagcgggaaagggcgcgggaccc

SEQ ID NO: 32610 - DNA, 1080 bp, Homo sapiens
  chr5:168727259-168728339
  hyper
cgggccctgcgtctggaaccctcacccctggagaggcactgctctttgcccatcgctgggggtttcgagacctctctttccagatctgaccaagcctacagacccccagctcggagagtgagggatcgtatccaggaagggatgagaatagagactgcatccagggaggccgaggggaaaggacggatctggcgcctggggccccctcggtgggacccaggtgggtggcccgcgtggggtggggcaggggtactcacaggcgctcagcgttgcgggggatgccccgaggaaccgcgcggaggcccagcccgtggcagtccacgctggcagcggagcaggtacacttggtggggcaggcgacggctggaggcccactcaggacgctcgccagcgccaaggccagcgccaggcgggcgcgcacggcggcgccgacccctgcccacccgggggccatggtgtgcagggccccgctcctggaggaggctgcctctgcggggcaagacgcgtggagcccgaggaggcgcgcggggagcgcgggcggcctggggagcgggcggcggagttagcgcggaggaggggcgagctcggtgctcaggcgcacggggcgcgggcggagcggggcgctccgggcggcggcggcggcagcaacagcagctccatcggcggggccggcgctgccccgctgcgcatcgctgggagtgcccaggtgcggagcgccccctggccccgctggcccgcgggccgggttggggacctggggcgagcgcaatggggcgtggcgcccggggaggtccggcttggggctgggctggggagcgcggcggctgcggctggggcacggggcggccgggtgagctggccggcgctcgctctctccattcagtgagcacggcagacaccggagacgcggggcccacccctccggcccccccccgaccaagaaacgccaactccgcctcccattggctgcgccgcgcgtcatgtcgactaagttgggaactttgctggagcgaccgagagcctggagggaggaggcagtagaggagggagagagaaggaaccagggaaggaaaggggctc

SEQ ID NO: 32611 - DNA, 1600 bp, Homo sapiens
  chr5:16935468-16937068
  binary
cgcacgttttgcaaaggaaataccagacaagacctttcttggagaaaggcaggtccccgctgaacattttattgggcttcctgcacccgggcagtcgagcgggcggatcgccccgcccgcgccccggcgcgcgccgcctcacctggcgcgggtgtcccagggcgccccgagagccagccacccacgcaaacggaaacgcaccttcgctacctcccggagcaaaatgcgagcgcgggacaggacgaaacaaaacctgcccgggcttactcatcagagactccgcggggggatggggggtgatttcaggagactcccagaaagttgcgccttccagggcttaggaaaaagtacccagggcgcgcggcgtggtgggcagacgcctctctccctgggctccggaggccaggtcggactgggagcgcacttacctcggtgaagaagttatccattgttccagcgcagtcccggactcgccgagtgccgctccgactcgcggaagtcagcgccgccgcgggtccggggaaaccatgcgtgtcacggcgccactcccgaggacgcgcgcccgcggggctcccctgctgccatcgcccggtcccttcttgtccttctcaccttttgttcgcccaaacccaagtccctaactcgcccgtcccgacggcagcctttgtctcttcttcctccaagttcctcactactgggcgcagcgctcgcaagcggagaacagctggtggcacattcttcccccaggcgggggaaggcggcggggtgctggcgagcgcggccccctccctctgcgctccggccgggggccctcggggcgggcaggaggacagcgggccgcaaagtgagcaggagccgcgatccccgcgcgagcgcttggaggtgagcagtcccgcgccgcggctcagccagctctcgcccgcgggactacagcccagcgacctcgccccgccctcccgcagccggccccgccctcccgcagccggccccgccctcccgctcgcggccccgcccccaggagcttggccctccgccaaccacaccgtctggccccgcccgggcggagcgccccgcccccttcccgaccaggccccgcccactctaagcccgaagcagccgcaggctcgttagcggacccgggagggggccgcgtgtttccccaggtcttcccacgtaggcgtggggaggggatttaactcttccctctgcagagagagactaaacaatcacttagaggggaggagaagggactgggggcttctgtgcctttcatgtttagcagacccgggaaccggctcaacacggatctcattaatgcagcccggtagactagcaatctcgggaaggaagcgcggtcagcggagctgccggggctgcggggccagatcaaagcggaagacggaggctaatcagaatttctggaagctgcattcccgtgttgactttctgtcctgcagtcgggtttgcttaagacgtttgcgtaacagcggggaaatgtagttttgaaactggaaggggacgtggccaatatcacctttaaaaatgtaacccttttctagacctcaaggaagcagagatggcagatggcactgagatggac

SEQ ID NO: 32612 - DNA, 637 bp, Homo sapiens
  chr5:169930869-169931506
  binary
cggggctcccgcacataccccggcagatgagggtgcgcaggggtgagggcgcagggctgggcgtcccccgcccccaccgtgcagccctcgcccccgccccgcccctccgtagttgcccgcccgccgccccctccgccgccccctccgccgctccgactctcgccccgagcgctggcagcaggcagcaggcagcaggcgggcgcgctgtggctccgcgccgcgcggtccgggctctgttcattcatgattggtactcggccctccgagacccagcccgagcgcagggaggggagccgagtgtgcggcaggaggggcgggcggacggcggctcccgcaccgcacgcggcgctggctcggcagcctcggccgggcggccgctctggccccgtgtccagtgccaggcaggcttcagggcaccgtcctcggccctgggcgagggaaccgccgggccgggtcctcgcgcggggaagcggttccgaaggctcgcggggagcggctagccctgagtccctgcatgtgcggggctgaagaaggaagccagaagcctcctagcctcgcctccacgcttgctgaataccaagctgcaggcgagctgccgggcgcttttctctcctccaattcagagtagacaaaccac

SEQ ID NO: 32613 - DNA, 978 bp, Homo sapiens
  chr5:170738045-170739023
  hyper
cgaccccggttcccgcagggccaagtcagttacacataggccctgcccttgctatctggcgaaaggaacaatctttattgttggtgaagccacaatacccgggcgtgcaggtgggcggcgggcagagtcccctcctggagaccctctggcacacaacaaaaacaaatgatcctaaccggctccctggatataagagcctcgggcgtaaagcgcgggctgggaggcagacgggttctgcgcctcgaggctcccggatggcctcggctcccgggagggccggggccccgccggcggccccgcggtgccgggtgcatgacggtactgtccctctccctcccccggtgcaggcggcagacggcggaggagcgggaggcggagcggcagcaggcgagccggctcatgctgcagctgcaacacgacgccttccaaaagagcctcaacgactccatccagcctgacccgctctgtctgcacaactcgtcactctttgctctgcagaatctgcagccctgggaggaggatagttccaaggttcccgctgtcacctccctggtgtgagcccaccagcgcgcaccgtcgccacggatcgccgcccccacccagccgggcgccccggaccccccaggcgggctgcgggggaaccggcgccgagaggggaaggggccgcctagcccgagtaggccccagggcgcggccacagactggcgggccgcggaagggggtagggcccgagctccgcgcggccgcacaatccgagcccccgccccgcgccccgtcccgccccaggcccgggcctgacaagaaagcgccttacgtttctccgccccccgcccgcaccccccgggccgggcgcctgtattatactttgtacttttgcccaaacgtgtaaataataaaaaagttttggcttttttctttagaaaccggccacctgcttcccccgcgggggccgctggaggaagggcagccgacccggcc

SEQ ID NO: 32614 - DNA, 1053 bp, Homo sapiens
  chr5:172670770-172671823
  hyper
cgaatttgtcctggattagtggatatgatccgctttcaaactagtgttagggtttgcctcggattccgaggatccgagggagtcgctttcagacttccggtgtcctttcgcgttaatttcgtcctcttttcttctctgggctggggctggtggctgccacatcccaccccttctgccccgacggctgcaaaccgcttcagccaaaacgggcggagaggcggagagaatcgagacgctggaatcagttcctcggagtcccgtcgctggaggtcacagctgggaaaatcaggtgacattcgagtcagatggacaacgactcagatacagtgaagaggaaaatggttgtcctggggctggttcgcgcctgcccggcgggtgtgaagcccggggaaccgcgactttggaagaaccttcggcttggcggttcaggtttgggaaaagagagctggcgaactgccgcctgtttttgtgcccgcgcgggggaccagccgggccgacggcagcgctgcgggtgggttgggtcgtcggccgccgctccccggagaggtgaagagtcgcacctaccaccgggcagcctccgcggctctggccgaaaccccggctggccgcagctccgggagcccccagccctgtgctgctgcggccggctcagtgctgaattgatgctggaaacggctggccagcgggcctagggtcgccgcctttccctcctcgcctcttccttccttccgggtcgtgccctccaacctgctgtgcgttaccgcagccaagtttccaccgcccggcggagcgcattgtgaacagcagctgacaaattgttgtgttgcacacacacaccaaaaaaacccattcagtctcgtataattcggcgcaagcggtgtctgtggagagcctcccgggggcatggcacgggggacccggaggccaacaagctgcgcgataccggagcaaagtcgggatcagcagccgcctttcgcggagggcgttctgcgctccaagcaaattggcgaaatgcggggattcagacacgaaacgagcgcgctagaaagggtc

SEQ ID NO: 32615 - DNA, 2057 bp, Homo sapiens
  chr5:174150711-174152768
  hyper
cgaggcaaacactggcattcaaacacgcacgacaaacacaggctcaaacaaactcatgaatgcacacttgcactgtcttgagaaaaaggtcggatccggatcgcgctcagaaaggaggttcaggagacaagtacagagatttcaactttctaaaagtgcgctggatttgctttctagtgagagagatggggacaactgatttaaattcttcactccgaaccatttgggagagaggcactcctgaccacttctcgggctccttccggcccctcttttccaggggaaagagttgtaataataacagtgggcgcttttgagcgctggctagtggcgagttactcttctaagtgcatacatttctttcacagggatactggcctgtgagtttcagcaccgactttctggaactgtaaagtaagccaattttgacgcatagtaggggcttcgtaaatgtttctgcaatgctgtttgcgaatcttgaacttattctggcggtagagggagagtgggatgggcgcagggtcccttttaaagaagggtcaaaagagagaagaaatgggactcggcgaacttccgctttaaataatcgctcttaattaggtctcgggcttttcagtttcggcgtgattataacccttcagggatcgcctaataacaactctgctgactgctcctgtaattaactcctaatttatttcaaacaggaaaaaaaaaaaaaaaaaaaaaaaggagggggggcagccccttcgggaagagccaatcaggggcgagcgtctctggcgtcagcgccaggcccggcgcggattggcggcgcgcgtctcccacttcccctcggaggaaaggctcagctcccagcgcgcccctcccgtctccgcagcaaaaaagtttgagtcgccgctgccgggttgccagcggagtcgcgcgtcgggagctacgtagggcagagaagtcatggcttctccgtccaaaggcaatgacttgttttcgcccgacgaggagggcccagcagtggtggccggaccaggcccggggcctgggggcgccgagggggccgcggaggagcgccgcgtcaaggtctccagcctgcccttcagcgtggaggcgctcatgtccgacaagaagccgcccaaggaggcgtccccgctgccggccgaaagcgcctcggccggggccaccctgcggccactgctgctgtcggggcacggcgctcgggaagcgcacagccccgggccgctggtgaagcccttcgagaccgcctcggtcaagtcggaaaattcagaagatggagcggcgtggatgcaggaacccggccgatattcgccgccgccaagtgagtgcgcgccggggcaggagtaggaggtagcgcggggtactggagggagcggggggcgggtgttccagggctgagggtaccgagacccttctgcgtgcgctacactcccgggaaagcaagcccagggcctctggactcctgggtgcccggggcgttcggcgcgcccagtgcgccgtccgcatccaagacaccctctgggtaataaccgcgctgtgtgtgtctgagactccctcgacatacagattgttttttcaagagcgaaccccagctgggtttacggggtcgctcggtggtccgtttctacagccctcggccctgcgctctggccacttggcttgtttttgtttcactgttccccggagtctctgcctggggagtgaaggagttggatccatgttcagtgagcacttggatgtaccaggaacgagacaggttcaaaactcaaccctgagagttgtgcccccattttaaagatgagctaactgggcttagccagacattgaggagaaaccattttctttcgtgagtcccgcgggtgtcgaagccggatcccacgaagggatggtggcaccagggatggtggcatcagagtctggtgcggggaggaaatgtctctctgtggtctccgcagccagcacctccccggcaaggttctgagcttcgccgggagcgggctggggccagaagcgcacgggctcttcttggctcacagtaataattaacc

SEQ ID NO: 32616 - DNA, 589 bp, Homo sapiens
  chr5:174162402-174162991
  hyper
cgccaggagcggtgcgcccagcgcagggggctcctagtcacctcgacccttccggcgcccttccctccttagctgcacctggcaagccagcaagggagtgacccttgcgcaggaagggggcgcgtcacccggtttccccatagaaccgtgggcgtcgcaggcgagaagggaagcgtccaggcgctcggccccttccgccccgcccgctgccggccgcccgtttgatgtcgcgggcccggcaggaatgcggccgggttatcaatcacccagctggatcccgaaggtctctgcctaatcacatttaattgctcgtggaggcccactctcgccccgggccggccgccgcgctcaattactccccaaatacctgccatcaataaatacgcactgacaccggcccggcccgctccaccggcacggaagatcgcagccgaccaggcgccctcctccctgccccttgtcccccatcattaaacttacacctcgacgcccaaagaagcaagccgagcagataataacagccccctgtaactgagcgcttcccaagtgccagacactgttgctcggcgatttacaccaatcaactcac

SEQ ID NO: 32617 - DNA, 808 bp, Homo sapiens
  chr5:174178103-174178911
  hyper
cgaatcacagactccccgcagtcagagatggcgaagcctccaccgggtcacctcggccggcccccgggctcccccgaccccgccctggcagcgccccccgccgcgagctcccggggcggaggagccggctcggctttgattagcaacacttgcgggggccgcggcgcaccctgacagcccggcagctccgcgccaaaatggatgggtctcgggcggcgagggcacggatacaaatgcgccgccgcgttctcaggtacacaaatgcggcctcgggcgggcgctggttcccaggcgcacggaggcggcggccccttcaactcggggcgcgggcgggagcggaacccgcgttaattactgtacgtttccactgtaaagagtgtcagccggggagcggggccgccgcgcctgcccggccccggcgcacaaaagcttcatatattctgaatgaaggcgaatcgcagcctcggcctccttgaaaagagccgtgagggagacttaattctctccctttcagctgtgctcagactgtgaaatccacacaatcgcgcccttctctttaaagggagggagaagaggggccgcggccgcgcgccccgccatcagctgcgcgcacagagggagagttcactccggggacaagggcggcgcgaccggcccggggctcttgggcggccgcgtttcccctcccaccggctgcagcccccttctcccgcggcactttccggcgtcttttgtggggcgagtcctggcgagggtgtccgccgtcaggtgcacaggccccgtgctcccctctgttcggcaggagatc

SEQ ID NO: 32618 - DNA, 762 bp, Homo sapiens
  chr5:175084709-175085471
  binary
cggttgcccggtcaagggcgggctcacaatctgcggggcggggagagggaaggagccagggagaaaagggagagaaagagggggcagtgtggcagaaaggaagaggaaggggcaagtgtcagagtcggcgagatgaggagggagggtgtaggagaaaggaaaatagaaagtgggtgagaccgtgggagagggagactgggggagaaaatgtgggcgtgtgcgcgctgagagagagagagagagagagagacttggagagggaaggaagggaaggagcgttgagagcaaggaggagcgagttgggggcggagacgaggaagtgggtgcgaggcgcggggcgcaggccgtgcgcgcgccgcccgctgcatccctgcccggagcgcagccggcgcgggcgcgggaccgaggcgaaccgggtgcggagccaatacccgcggcagcagcaccaggtaacgcggccgccgcctccccgcggggcctcggctcggggtggggtcccaggcgggcttggggacccggcgtgggctggcggagccgcccgaggggctgctcgggatccccggcggccgtcgtggccccgaacccgggttcgagcctcggccccaccgctccctggctgtgcctgaccttgggcaggtgcctccgcctggcctgcgagcctcagtttccttgtctgtgaccgcgggggtcgtgccttccccaagggggcgttgagagctcgggatgcagccccggtgcacagcagtgctcgggacgcgggtc

SEQ ID NO: 32619 - DNA, 996 bp, Homo sapiens
  chr5:175223496-175224492
  hyper
cgtcctctctcatctccgccgccagcccccgcctcctttctcgggaagcttgggtctccctgggagcgggtctgcccttagggggaggcctctgggctctgtgccctgcagctcggcaggcattcgaggcggacagaaacggggcttggcgccccccgcgtgcacgtgtgctagcccaggcaggagggagcgcctcggcggaggagtcaaggaagagggggagggagaaacgcgccagaacctcggcccgggcgccctcgtcggccgcggaggagctgcagcctccaacaggttcgtagaacgcgcgctcgctccctgtggctgagccgccctcctccgcgggagcggttggcggagagaccccggccacaggccccgcgctcgagagcttcctagaggcggcttcctccggcctctccccctccctggagctctcagccgccggcggctcttccggggcgaggcagagggcgcctcgggcttctcgctccagcaccatctcggggacagctcccgcgccgcaccgggtccctatcgggtcagcactgcagcggcggacagcggcggccgggcgggctcctccgcaccctccgccctggttccgcgcggctgctaaggaccgtccctcgcccccgcgggccgctcccaacgctagcaccgcggcggcggacagctctctccggcggcaccgcgaaccgcgaacaaagccgcgggtctggggcccccagcgcgcctaggggtggcgtgaggccgcatcgatcgggggatttcagcttctcccagagaggtgtcaccggcgagctaggcgggggcctagcacagccgcgcgtctccggcttgggtccgccgcccgccgaggcctggccgtgcaatggcggggcccagctaagagtgggcaagaggtagaggggaaacaggcacagaacggtcccggctccgctaggcgggctgggcctaggctgaggtcccggcggggaggaaggagtgcgccgcccc

SEQ ID NO: 32620 - DNA, 991 bp, Homo sapiens
  chr5:178016958-178017949
  hyper
cggccccgcgcgccgcagcagctcccgctcctcctcgagcgccgccacccggccctgcagcgcggccgcctggacacccagcagcaggcaggcagccgccgagcccacggagagcagcaggcacagcgcgctcaccgcccgggacccggccgtcgtcgccgagcgccctccgccgccgccgcccgccgcattgcccttccccgcgtcgccgccgccaccggcgcgctcgcctgggcccatggcgcgttcgtcgcgcgtggactctccgagggggcggtgctgctggggcagaggctgggtgcgagaggagcaggcgggacagcccgaggcacgaggtccgccgggcgcgggggttagcctccgggtagcagcggatcgccgcgcacgcccccttcgccgcagccagctcctccacagcggccactttgggcagtttcctctatgcaaatagaccctgccagaaaaggagcagggacccacccaggggaggagcggccgggctggccccgcgcggcgagggggcgggggcgaggaaggagcgagctcctcggagccacccgtcggcgccgggctgatcccacgcgcagcgcgcacctctgccctcacctagcccgggcgccggcacccgcccccgcacgcacctctgaggcttccccagcccaagcccgcactgtggaccccagaggtcggaggggagcccggcgacaccgcgccccttctgcagcccacccctggctggagcacccaccactcgtgccttagcacattcctctaaacttgtgaattacctttctgacacttgtaaaagttcaaaacttcaaatcctgcaaaaaactgagtgggtctgtcctcggtggtggattagcgccgcttcgtggcggaaagcgacctctgcgcactcacatttagagaggcagggtcgagattgcgccaaacagaaatacgccccttagaatcttctcacgagttcttagctgccggacttcggtgc

SEQ ID NO: 32621 - DNA, 931 bp, Homo sapiens
  chr5:178771891-178772822
  binary
cgctggggctgactctgcgctcttggccgcggggcttttcccggccctccgtccccaccctccgcgactcaggagccgccagtgctccgaggctcccccggcccaaggcgctcgggggcggtgcggggcgccccctgcgcgaccaacccggccccgaagttggccaacttggccccgggcggggcgcgcggagtttgcccaagtcaggctggacgacgcctggggagggggcggcggggcacgcgggacagggccaggccggcgggggtcccggggagtaggggccgggccgcacctacctggggggtcggcggcggcggcgagcctggcgttcgcgggcggcggcggcggcggcaggagcggcggcggcagcagcagcagcagcagcagcagcgcggggcagagcaggcggcgagcggctcccgccggcggatccatggcagccggactgcagccggggccccgcactcgcagccggcgcgaaagttccccgcgagccgcccagcccacatctgggggcagctggagccgcccgcagctgcagcaccgcagggcgcggggcggaggaggcgaggcgcggaggggcgggcgggggagcgcggagggaaggcggggagagggaaggagcgagcgagcgagggaggcaggcgggagggagggaggcgagcgagggggagggcggggacggcgggcgcctcagcctgcggtgacccggcgcatcttggcgcggccgccgccgccgcccgcttccctcttcgcgccgccgtcgccgcggtgccgggctcgcagcgaagcagagacaccccgaggcggcggcagagaagcgccgcgggccgggccgggggagccccgccgccagccaccccaggggcacaacctccgaggagcggcgccggccgaacgtccccacctagagagcccttggggtgcc

SEQ ID NO: 32622 - DNA, 1326 bp, Homo sapiens
  chr5:179498011-179499337
  binary
cggcacgtttttatattagaaaagggccgcatccttccagatctagcgcagccttaagtccgtgatttgaggaacctgccgcttccaaaatacaggctgagacgtcctccccatgaagtagttttgcgctcttgcaccacctcctttgtctacgctgtccctgcaaactcctagctcaatgccctccagcaaacgagctgcctgaacgcaaagatgaccgttccaagtcttttttaaaagaagggaaaaacccagtcacgctcctggagcctggttcccacgggagcaggccgggctgtccacgacggaagcctcgaccctggctggggctgtcggccgggcagcgcgggagagccagggccagagccggggccgggaaccctagtcccgccgcctacgcgggatgcagcgaccaccgcccgccgcccccgggccggcactcacctccgtggaggggcagcggcgccagcacctggccgcggacctcggccttgggggagtcaagcccgtagcgcccgcggtcgatgcgaaacgtgagcggggcgccgcggccgggctcctgcaccgtcacgttgatgagcgccgtgtagtactcctggctcgcgttgtctgcccgtgccggccacaggctgcaggtcagcagggcgagcgcggcgagccgggcagggcccgcccgccccgcgcagctcatcgtccctccggcagccgccgctgctcgcggaccgggctccggggccggcgcctagaggcggggcgggcgcggcccgggcggcggcgggagcgcgcgcgcgcggcctgcgcggggccgagcccgagcgcggccctcctggacgccgcggccccgccgctcgccgccctcacgtccactgcccgcctgtggggacgcgcccatgggccctcggcgagggcggcgtctcaggtcgcacgcgggcgtctcttcggggtcccaggagggttgtagaagcgtgccccctccatccccccgggtcggtcccaccgaatgggaggcgcctcgcaaggacgcggcgggggaggggaagggcggcacgggaggaagcgccccgaggagggtcagcggaacacaaagtccctctcgcgcggctgccgcctgaggcgcgtgtccgccgccgccccgcccccccgctggtctagcggcaacgcgcaggcctaaggcgcagtcccgccccgagcgcatgcgtgccagggcctgtccgctcccgcccgcctgcacgagggcccgggcagccgggtcagccgctggtgctggttgtttctctgtcaggcgtgatagccgcagggcgtggagcccgggagatttgcgaggac

SEQ ID NO: 32623 - DNA, 973 bp, Homo sapiens
  chr5:179779452-179780425
  binary
cgctccgggccgcggccgccctccccacggtcccgcagccacgcgggacagcgcgggagcgccgcgggaatcggacgcccggccccgctccccgccccggactccctctcgtggcttcgggccgaggttcgggcagtgactgcctcttccccgcgcaaagaggcggtaacgcggcagcgacccttctagggaccagacgttcctttggggtcgcgaggaggacgcgcaggccctgcctgaggcactgacgcagcgggggcgaccgggcgggctgcggggacggcggggcggggtcgcctctcctctcctcggtgggcgcggcgggctgagtcgggatgggcgccccgcactcgggatgcgccggcctgcgcgtggccgcctttgtgggcgactgggagacgtggaggagagcgacctcggtcggcatggggtggggacccctctgttacggggtccaggccggaccggaccaggtccctcccctccgtggggaccgggcctcggtccccctcactgtgtccgagaccaggagtcgggttgggcatcccccacccacacctccgagacggccactcggggaacgcgggtgaggggcagccaggcccggccgacgacagcccctcggtaggggcccggggcagatcggcgcccccagccaggtcctcggcgcctgcttgcgggcggaggcgcggagaggctgcggcgccgggacccgcggacggcgtggaggaggcggctcgggcgggcgcggcactcaccgcacatcgtggctgcttctcgggctccttcgcggctcgagggggtctgcccgttcggacgctggggctcctccgtgggctcctccgtgggctccgtgggctccgtgggctccgcgggctccagctcccgtccgctcggcctccagcccttataacccggagccctccgagagggcggggaagggggcggggaaggggcggggcttcccccgccc

SEQ ID NO: 32624 - DNA, 995 bp, Homo sapiens
  chr5:180017458-180018453
  binary
cgggcttctcccagggacagggcttggaggggcaggacgggaaacagccctgacgtagggccgggacacctctggtgcagttttgaggctggccgggaagggatgcccgcgcaggaagggcacccggggtgcccactttaccagcagggccttcagggccttcacggcccccacggcctggggacccagctcagccacacacttctgggagccctctatgaggtggttcacggggatgcccaggctgctcagcaggagcttcagcgggttgagggtgccgagggggttggccagggtcccggccccggcctccgccgccgactccagcgcagcgacaggctgggccacaggcttggccgagcccactaagaaagcagcagctgcaagcgaacagggaggggtcaccgcctgcgcgccggggtccccagaaggcaggtccaggacgcgcccccgcgggaggcgcccaggaaccgtcgcgccctgcccggctccccgaccgcccctccctcctgcgccgaggcctgccaggtgcgagcccccgggacacaggcgggtctggggaggcggccccgccaggagacgctgcagggtcaccggagtggcctgagggtggcggaaggaccggtgaactctgtgcagggtccgggacaggcccccaagggaggggacactcgcgctgcgccttgcaggatgaggagccggtctccagacggggggcagacgggtgtccccaggccaggggcggcctccatcccggcacgaggctggagacagccctgagagggggaggccgcgggctgcaggcgcggggccccggggtggcggagccctctgggcgccgggcgaggctggaaggacctgggatccacgatcggcgcaggcagcggcgggggcgcagcgggcgccgaggcctcaggccccaccgtgcgcgccaggagcccggggcgctcaccggagctgcaggacagggccacgcagagccccaggagggcggc

SEQ ID NO: 32625 - DNA, 881 bp, Homo sapiens
  chr5:180076198-180077079
  binary
cgcggagccaccgacggagacgcggattcaggggccgggagagctacccctgcgccgaggcgcggcccggccgccctggccctgacccggctgcggtccccgcccgccccttcctcatcccgaggtcccgcgccccaagcgccgtgctcccctcaggcgtccgcgcaccagggccaccgtgtcccccgcccgtacccggcggagcggtctcagcgcccgccccaggtgcgcggtaccccctccccggccagccccacgctcgggcgggtggcccgttcgccgcgctcaccgtccaggagtcccaggcagagccacagtcgcaggcacagcgcggcgccccgctgcatctccggccgctgcgcgtgggtccgacccgagcggccgcggctcggggctgaaagtgtccgcgcgggcgccggctggcctggggcggggcggggcggggcgggggccggaggcgggcccgggattcaggccgctccccgcgcccccctccccccgtccctcccagcccgccgcggggcgtccggtgcacccgagcagtgcgcgctccgcaccacagggtccgggccccctcctgggcggctccgggcgcggggacgcgggtaacgcagacggtctcgcgatgcgctccggaggtgatggagcctggtgggcaaaggggagcaaaatgcggcacgcgctcttttccgtcctttctttccatcggtaaaatctagactaaacaagaaagcaatccttgtaaaaatagtatgttacatctttgaaaatagtggcaccagccggcgtaacatagggagacccagtctcaaaaataaacaagcaaataaataaaataatacgccgagcttggttgtgcgcgcctgtaatcccagcttctc

SEQ ID NO: 32626 - DNA, 1317 bp, Homo sapiens
  chr5:1875992-1877309
  binary
cgtctgggcagccaccctcggccacattaaaattcctggcgccccagcctcgggcctcaacgctgtcccccgagacgccactttcgctattactgtcaagtacccttgactctttatttttgcccttttatctattacaactaattcgagttcttttgcccttttcagtctaagacgtgggctttctgcaaagcctccccctgccagcgagctctcggagcgcggagcctttagaaattgaggggtttactgtcaaaatgaaaatttcacttcaaattaccttggctgatgctcgctcgccaggccgggggctcccgccgcagccttttgacaggcacatgagccgcgagcttccgaacctcgataatatcatctcgagcgcgaaagtcaatacggtgacagcgcgcggccggatacaatccaattacgctcggctgcccgggcgctcctggggctcggggtccggcggccgagggtccccctcagggcccggtccaggccctgtcgccagggttcagggcaggccccaccacgcgggggactttggtggcccaggggtccccacgaggccgcagtccgggtccgcccagccccaggctcctagaggaaagccgagcctagtgagtccctccaaggccgcccgcccgcaagacagtcctgcgtctccggctatcctgtcccaggcaagggcctgtggtcgcctcctcgccgcccccgggccgctcccgtagtccttgggacacctgggcctttgatgagcccagcagggcttcgggcggagggctcggggtggggggtggggggcgagaggagaggcctcaagtccgccaggcgcctgcgggggatgcggaaccgcctccgccgcggggatggggaggggagcccggatttctgagcgtagccacggcttggccgggccccccgagccccggatcgctccgcgggttccttccacacgcccttcccgccctgccccgaggcctttcctcccagtcccgcctccggtcggcggcctgtgaagctctgagcatttccccccgcggagccgcggctcgccggctttccgagcagagctgattgcggagcggcgggtccccggaaataggagagccgaggttaggaggtggctgagacggcagaggcgtcgaggccgccctaactcctgcctaggatgggcagaggccgctaacagagaaaagcaacgatgggctcccacgcccccccccgggacacggctctgggaatttagaaagtttaaaatctaatcaaagaaatccctattttttcaaacttctagagttgggtgatgggaagtac

SEQ ID NO: 32627 - DNA, 1980 bp, Homo sapiens
  chr5:1882899-1884879
  binary
cgcgctccgcaaacttttctaaccgggtaacaaagtgagcagcggtggccgccgcgattcctttaacttcgcattccggaggctcgagggggctctgggaccgagcggcctcgcagcggcgacagaaatacatattttacgaaaaagaaaaaaaaaaaaacgagtcgcgcgaacccgtcaagtcagatgtgcgcggcttgaagcggaggaggctctgacgtcagccccacctcgcgcagcccggcctggccgcagactcgccggtcactcgccggcggctcaggccgggaggggccaggacagtcccggccgcgcggtggacggaggggccattcctccgggcgttagcaaataaattccatccgagtcaatatcgcccagcgaacggtgtttctctttagtcacccgagaacgagaggcacttttaattagaaattaattaatgagcagctgctccttcccgccccactgtaatcattcgtctcaattacaaatgagacctatgaaaggacacgctgaagatgtaatcaacagttaaaattagcccggcgctgcgcaggcggccggcccggcctcgcgctggcgcgctctgctccgagtggcaggaaggggctcgcaggcgccccgcacgcgtctcgtcactattgtttaatcgagaatcagcaacgcctcccgccggtttccaccctacgccggaatggactttcagaacccactgcggccgcaagacagcccgcaagagctggtcaaaatgccctcaggtgcgtgggggcttcggggccttagttggagcccgacaccctgagactggcggcccgagggctgtagggccgccccgggcgtgcgcccaccggctttgcacctctgggcagccgagtgtcgcggagaacgccccatcttctccaccgcggtcttttaagttcccgctcagcccaccgcccccacctcgcctccccgactttcctccccgatcccctttccgccggccgtgctccgccggcttccccctgcccctcgcggctaagccggggactgccgggcggccctgcgcgctcggaagagcaggttcctcaacccaggccccggcccctcccgctaagctcgtccctcccggcgccccgcagggctggctgcgagggagggggcgttgggtgcctggcggaggcgccctcccctgtccattttgcccagctttctgtctggggcgcacggagcaatcggaagaggggaccgagcgcccaccccaggactccctcggccagtaccctccctgggaccttgcccaagttcaaagcggaggccagtgagcaggcggcaagggggcggcaagggggcgcccgggccatcccgaacccgttccccgccttctgcgccatcgccctccgggaccgggactcgccccggttgccctcgccccctgggccggcctcccgtggtaagttgggaaggaagccgtgcaaggcagcgttgtgcagacttgctcagaaagattcctgggttcagacctgtgaatcgccccagggtcaccctctaattaatgatgacgtcctcgccctctccccagctgcaagcctgcctcccagaaacgaaatctgcctgctcttttgacagctcggttgaaggtgattgatgactatctggagaccacagtacacatcatataatatctgctgcgtaattgctttaatttacagatgaaaatacgagttctccgatcgcgttggaccggagcgggccacgtccgagctgcttgcagagggaaaccatcggaaataatgaatagccgctccatgcaaattattcagacagtttagcgtcggtagccgcgagaaatatataaagaacacgagtcaaatgacattaataattgtttctgaattctgtattgatttcgcggcaggccgcgtttctttctttctcacctgaatcgctaatatcaccttcctgtaaataataagaaactagccaccggggtttctc

SEQ ID NO: 32628 - DNA, 841 bp, Homo sapiens
  chr5:1931173-1932014
  binary
cggcggtgcctggaggcgggctcgccccggctgctccacgcccaggccggtccctggcatttcagccagtgggagggcgtccccgccgcccccgtgcctctccgcaggggctgcgccgcgtccccgggcctctccctccgccgtggcctggtctgcctgctccagggcgcagctgcgcccgcttcagcgcctcccgggtctgcgtggcctgctcggctcagaggcctccaccacggtccgctccctgccggacgccgcgctgctgtggccgcggtggttctgtggctgtgagggccgtttctgtccgtccacaccgccttccctctgcaggtgaggaatggggtctgcttcgtttggaatgtgcctttgccgggtcctgcctgacctccaccttccagccgggacgcgcgagcttttccgtttggctgagtcaaaaagggatcgcgcgcatcccgccgcccctcaccacgaagcgcagacacaggaggttgcagggtcagtgctgcggagaatcccagacggccccacagccgccgccacccgcggggcactcgcccgggctctgccgaggatgtgggggctttggtctccgcagagctgggactcccgaaggccttaccagaaactcaggagcagccccagccctgcagagcccgcgagggtggagacgggagacccgctgtggggcctgaggctgagatgccggcctgcggtgaagccggcgggacgttccaacccgctcagacccgcccactccgcagggcccgggcccaccccccggcctgtggcctgtgctgggctgcgcagccggcggtggagggacctgggaaaccaggtgctc

SEQ ID NO: 32629 - DNA, 971 bp, Homo sapiens
  chr5:2751307-2752278
  hyper
cggcggcgtcggccgagtactgcagcgggctcccgaagccggtggccgcctgcgccgtgaaggccgccgagcccgggtaggggctgaacgccgagcccgacgccgagcgcgccagctcctcgctgcgcggagccgccaaagccgacgcgccgtaggccgggcacgagtagagcgccagcgagccgggcgcctggtacaggtagccctgcgggtaggacatggtgggcgcggggcgcggggcccgcgtcacgccgagcagcgggcagggcgcgcggcgccctccatccacgcccggccggggcgcggcgcggcggcgggcacccggacggccggcggaggcaggccggcccgggtactagcctgggcggcccgcgggccggggcggcggcggggtggcggtggcggcggcagcagcgcggagccggtgggcgcagccgcgcgccaggccggcggtcggggtttgggggagtctggagtcgggagtgaggagttgaggaaggagcgctcgagtttccgagggacattggaacgcgcagctgtccatcacgcgctcatctgcatattcgggggcccgcccctcccctgctccgcccgctgcagcctccgggccgcggccgggggaggggcagagagacgggagggaggcgggggagggcggaggcgacggaggcgggcggcgggagggaccggcaggcttttgtggcgcagccgcctctctagcagctccggccccagcccgcggctcgcggacctgcagcccagcccggccgcgctgcgtgccccggcgcgcacccctcccactcccatccactcggagccacgtcccctgcccggctccggccggctcccaccgtccccggccaccgtcttcgcccctgcccggcccccgccccttccagccactaccccgcccccacccccttctccaccctcacggactaggcagaggccgcccgcggtcaggccaggcc

SEQ ID NO: 32630 - DNA, 1285 bp, Homo sapiens
  chr5:32711030-32712315
  binary
cgtgcgcgcgcgcatttctctactttaaagcacgtttccttttttgaagccaggagctggagagcgtggaaagggagaggcggtgatcgcacaggcacgcggcgtggtgggggctcttgccggtgcagacgtgggcgatttcagctttaaggaaaaggcagagggcctgcggggagtggtggttagggacaggggcgcgatgggtagtgaaggggtgcagggaggagccctgatgtaagaatgttaatgagagactcccccagcccagcccccacatctccccacccccacccaccccacccgctggaaacacaagcccggcctcggcgcgccatgtgtggtaacacgctcagccgctgccacgctatttaaacgcgggctatggatccaggaaccggcgcgaatcaatgagatcaaatgcgagggagatgcaccgtcaattacaaacacttggacaagtctaactttttttttcttctacaaaaacgctttcaaaagcaaccttagcaacgcccaaataagaagccacctctaagcaaaatagtatatgtataaacggagggcgaatatatacaagtatatatatatgtatattacagacgcacaggtttacacccggtgaactttttctttttctttttcttttttttttaagaaaaactagtgacattgcagagaaggacgcttcctctctatcttttggcgcattagtgaagggggtattctattttgttaaagcgcccaagggggcgcagggaccttggagagaagagtggggaggaaagaggaagggtgggtggggggcagagggcgagtcggcggcggcgagggcaagctctttcttgcggcacgatgccgtctctgctggtgctcactttctccccgtgcgtactactcggctgggcgttgctggccggcggcaccggtggcggtggcgttggcggcggcggcggtggcgcgggcataggcggcggacgccaggagagagaggcgctgccgccacagaagatcgaggtgctggtgttactgccccaggatgactcgtacttgttttcactcacccgggtgcggccggccatcgagtatgctctgcgcagcgtggagggcaacgggactgggaggcggcttctgccgccgggcactcgcttccaggtggcttacgaggattcagactgtgggaaccgtgcgctcttcagcttggtggaccgcgtggcggcggcgcggggcgccaagccagaccttatcctggggccagtgtgcgagtatgcagcagcgccagtggccc

SEQ ID NO: 32631 - DNA, 1679 bp, Homo sapiens
  chr5:34655742-34657421
  hyper
cgttcccatgcgcaatctcgcctgtcagttcaggctgtaggtttctcctttctaactcctgagcagaacaacactgaacggtggtagtcttgccttgccacccaatgagtgctagaaaacagtcacttcaaccaattggttcagtccggagaacgtgagcacattctactttactttctgttcaatgattttggaaaacaaccttttagattctggtcagaaggggcttggatccgtgactttgaaacactcgccactaccacaaacgactttggaagttaatcagaaataaacagtatctgggatctcatccgtcctaaacccaggggtcagagcgtggggggcttccactaacttcaggttaagaggatgaaacagatccgcggagaagggtcccacgatccctggagactaaaagcaagccacgaacagccgggacgcgcgggccggggagatgcgccgggggctggagggcggagagcaccccccgcaggtcccggccagagcccggggccgggtcacctgactcgcggaatttggggccgcgaggggtggaatgggaggggaatggttagcgcctcccttcccgctcccactggatccaggtcggcgggggccggcgcccggcggccacgtggtggtgctgccgctgcccccgccccgccggcctagcccgggagctcggcgcccactgacccccgcagcgggggaggaggagggactgcggcgcaggaagccgagcaggaagcgagcccggcggccgcgttttcctggggaagcggcgggcggggtggagcagccagctgggtccggggagcgccgccgccgcctcgatggggtgagtgcgcggcacggagttgggaggctcccggcgcggggtcccgggctcgtgtccccgcctttgtgtctggagctcgggcgcgggaggcgctggggacggcgcccgggcggagcggctgagcgggctgcagccggggtcccgccacctctccctggtccaccgccggcagcccactgtctgcggagagcagatctggggacaagaggaaggagaggaaggtggagatgagggtagagcgggaagacccggccaagttaggagaagggttcttcccgggtcctccgcgactcgcaggccggctggggcggggcgcggggcaggggccgcggcggagggagcgcgggtgggaatgaatgagcagacccggagatgcaccctggagtctgcgccgggtcccacctgtttcgccccgcgcggcgcctcgctgcccccgcgtcggtgctgctgagcccaatccgcctcccggctgaacttggaggaggtggggagggaggtgcgagcgggagactccgggtggctcccaggacgcggggtccgctattgttcctcctctgactccagggagcccctcggccggcccaagggcgggggcgagacccctctgggcctgcccctgccccctaccttgttttccccgccgcagctcggggagaacggatgctggagttggggcagactcggggccgccgggacttcgggagtaaggaggacgtggagccaccagaaaggcgcccgccatctcccgcgacccctgcctggtggggggtggggggtggggtgtcgtcctcaaccaccttcgctgccttcttgggcaggttggtgtcggtttagtttctgc

SEQ ID NO: 32632 - DNA, 758 bp, Homo sapiens
  chr5:35229708-35230466
  hyper
cgggctgcaattcctctgcctaggtgcctccgtccagctccggcttctggcccggaggctgctcatctgcccctacccccgctgacttttgggaggagcaacacctttcaggtcagcattgctaaccctaaactttccccgccggatgcccgcgaggctgctgcggcggcggctgctgctgatgggagagtctcgagtccggctttcatcacatcacctgtctgcgccccttccccctccccgctctttttttcttttctttttattttgacgcaaataatttgcattctgagaatcccacaatcaacgccgaaactcatgctcaaggatacaggtgaagatgcctttgacaaaggcgaatgcgagccgagtgcagtttgtaaaagctggggttgggggcagtggtggaggcaaagcaccttaagagtattttttagcccctctgagaagggacatccgggcgggaggcgggcggatcccgggcttccccgccggctgccgactctggctcctggctggcgttctctccaggagcccgcgccggtggccccgctctccccttcagcacgcgggcctcgaacccgcatcccggagagcggccgcccgcgcagcccctgccgcgcgccgtcggaggcggcctcagctcgccatgggtactcacttttgccagggagcaaagtctgccacatcagtcgatgagtacttcctgcacgaggacatgaagctccattgtgtggaaagctgtttcgcgaacggtc

SEQ ID NO: 32633 - DNA, 887 bp, Homo sapiens
  chr5:38257421-38258308
  hyper
cgcgctcccaaacataggctaactgtgaagagccaggacgcccaccgagtcctggcagcgttgcaaggtggggagggggcgggcgcggtcctgtcgctagtgactgcagatttcctctgcggggcacttcctacggcctttgatctttccccaggaactgccgagggccgcgtttgcctctaagtttattccctcttggtttatttattgtatctgctttctcttctcgctggtttggaggtcagaacgccagtatgcaacgggacttgtgtcccaggcagggtctcccctctccaggcactaccgcgaaatctggcaaaaggtacattttactgagtcctagggcagcaaattcagcggcggagaaagagtctttctccattcaggagacaacccaggaagcccgatcccgggatcagaggccaggaccccgccccggccccctgccccaggcccagctgggcgccgcccaggggcttttctcggtccgcctgggggctcgagctcgcgtccctccctaagacgccaggcttaacttggagtttcatctcctccccaggagggtctcaagttgccttcctctgccgggaagggcccccactcccccgctccaggccctaatctccacccggcgtcccagtctgagcggcctggcctcagctctccatctgcgagccttaaatcccatttatcttcttagcgcctcagacccggacggtcccgcctctcttcctctcacccccaccccacttgcaaatcacagacccccgtctacccctcgcatcccccaagtgcgctggaccaactacagcaacctttgaggtgttagaaaaagtcgcctagaggggcgcggcaggaggagggcccaggtggggtggagggggggc

SEQ ID NO: 32634 - DNA, 978 bp, Homo sapiens
  chr5:38556107-38557085
  hyper
cgaaatcacctggcaggtcacctctccgaaggaaaaacatttcaagctccctcccatcccccaggtaacctctggcctcagaactcactgccctgcgtggggcagaagttctgggcgctggagtccgcgtcccccaggacacgagggtgacccaagggcgcgcggagagcggcgggacccggagcggcgctctccggggtcactcccctaggacgctccgcagagctgggagcgctgccccaccccgcccgggccgcccctggggaccccgctcggggctccgcggctcccctgctccgcgccgcgcccacccgcccccaggactcacggtacgctcccgcgccgctatcttgccatcccctgccgccggctctgtagcctcggccgccgccccggggctgcccagatcccacagccgcccgggggcaggagccgccaaggagggggccgggcacaatgcgccgccgcctccgcagccgccgtctcgcctcccctgtgtcggcgcgaggctgcttgaggcggccacgggcgaagggcggcccgctgcgctccgcgaaccccgcgggccgccgccgccgccagagcctcccagaggcaacggtaacggccaccgccacggccgagtcgctccagccgggactgcggcgcgcgggggcggcgcctgcacgccgctcggctgggggcgcagcgggcccggccccgcccctgacccgcccctgcccccggccccggccccgccccaacccgcgcgcccccgccgatccccggccgcgcgcccgcgcgcgcgggtgctccaaggagtcggaggaacgcggccgcgcgacgggccccggacgccgagggtggtgcttcctccgagcctccggtggtgaggccgctctcagaaggtcatggaagcgcaggggagagcgaggcggccgagcccaggcaaatcctcgagaaaggccgagtgcgcgacggctctgcggggaggaccgc

SEQ ID NO: 32635 - DNA, 858 bp, Homo sapiens
  chr5:38845617-38846475
  hyper
cgccaaatggaaacacggccaaaatttagttaaaggacttctcttgcctgaagattttcggacggggatctcacgggtttggcctctgggttgggatgacaagtgcccctgtgggatacacagccccaggcctcatcggtcactcggcttacctctggttccgccggctggcccgtgcgtccttggccggggcaggagcagcgctgcgcgcggggcacggagcctcggccgccgagttttcggtttccaagtttccttcccaggcctctcccacttcctcttctcaccagtgcccgcccgcccgcaaagtccgggttgtgaggctgcgcctcccccaggatcgcggccgcctccccccgggactgaagggagggaattcctgtgggtcccaggagtgccaagagtgcgcagcaagacgggaaattgcaaaagacctcacccctctgccctcccccgcggttttccagtaactcccgcccctccgcgcttgccccgcagctgattcatagccccggcccgggccgcctctgcacgtccgccccggagcccgcacccgcgccccacgcgccgccgaggactcggcccggctcgtggagcccttcgcccgcggcgtgagtacccccgacccgcccgtccccgctctgctcgcgccctgccgctgcgccgccctcggtggcttttccgacgggcgagccccgtgctgtgcgggaaagaatccgacaacttcgcagcccatcccggctggacgcgaccgggagtgcagcagcccgttcccctcctcggtgccgcctctgcccagcgtttgcttggctgggctaccacctgcgctcggacggcgctcggagggtcctcgccccc

SEQ ID NO: 32636 - DNA, 657 bp, Homo sapiens
  chr5:39424892-39425549
  hyper
cgaagctactcaccggctagctattgcctccgtgaagcgagcatgacttccccgcgcccggagcctccaggctacagcgcagcggatgcggcgggcctcgcttaaatagccgccggccgggagcttcggagccgcgcggccactcccggcgagagatatggttctaatcagatgctggcagctgaggactccccaggaatgtgccaggatgtttttgctgcctgggcttggtaactccccctcaacgtgtctgcagagtcttccaaacttaactgtttattaactcgcgctgcagcggcgcagaggaccccgctcccctgagctccgcgagccccaccagctgggggcgatcgcagggacccagcgacgggaggggaaatgtgttcggggagaagtcaaaagccccagaccgacgcgggcggggggcgggtgcaaataaggacaggaaagggaagctctggaggaaaggggtgggatccaccgagcttcgtttcacagatccgttccctggattgccactgcgagtgatgtggcacacggagtcatcctaaccaacccgttggggccctttgaacaaaggactgcctttactcctgacttttctgacaagggacaacggttcctgcgcagatctgcagtttctaaagttgatcgcgc

SEQ ID NO: 32637 - DNA, 807 bp, Homo sapiens
  chr5:42424338-42425145
  binary
cggcagggagttgcgggcgacagacgaaccatcacactctggcgtctgctctggcccgcgagtagtgtacgtggaggggtttactccggagacagttttgttaaagtcataaaagttttgctagtgtgtttctgtttgccatcatctgcctggctgcggcaggaactgccgaggctgctgctgttgcgcggggaagaatccccggcagcgcgactggagagactggggaggtcgagctgtgcgcgtggacacagcgcgcagagcgcgcggtcttttgcgcgtttgtgcgggccgcagccgcacgttggcaccgatggaactggggtcagtagagtgacagccaccagtccgcatgaactggggtaagtggaaattgtggcgagccgacctcccccagcttttgacacactagtggttgtaaaatcaaccaggcttaaagttttgacagaactgccagaggctgcgggtcaatggggtggccgcgtgtctagggagagggcgctggcggcgcagagggtgcggggcagggcacttgcgagtgcgtggggaagtctatttggggcgagtgctttatatatagcccgaggggatgcctgctgagaccgagctgcgggggctctcggtctggcgcggactgtgtgtcctgaatgagtgtacgtgtgcgctgtgtgtgcgcgcgcgagtgtgcgcctggggaggcgtgtcggcgcctgagccagtagggtgtgcagggtggaagaggccacagaggtgccgcctgtctgtttgtgccgccaggagaccttggaagggacagagaaaggtaac

SEQ ID NO: 32638 - DNA, 1334 bp, Homo sapiens
  chr5:50264532-50265866
  hyper
cgggaaaagatcaaggacaaggagagttaagaaactgaccgtgggccagggaagaccggagagagagaaagtaaagtgtccaggactggaactcacgtccctgaggcaggggacagtaagtttgcttgtaacacagacagttttccttgactgcaggaaacaagaaaaatagtaatcataaaacaagcacaaatcccccaaacatcaggggggtaaaacccccattattagccatcacaaaccaaaacccaaaccgagtcttttctgctgaattgctgcaagatcacaagagaccaagagatccggagtcaggctgtgaacttgggaaagataagttgcccggcgaggttggaggtagactgaggaacgcctttttttgtgaaggacacaaatatttgcagagtttaaagctgcaggaatacaaaagcaggagtgagattatctgattacggatacaggatgtccgagttgttgcctcccaaaaacgactgcgtaaaaaaaaataaataaaaggccagttcgaaaagtgaaattttaatatcagtgaaagcatcggagggactcggattgaacgcggcagctccggaactggacaacagctgcgtggtgcagccaatcccggggcctgtgggaacgagcgaccgatctcaggaccacgcgggcgagagcaaggagcctcccggccacacagccacaggcgctgcggaacccagcccggactctccccggctggagtgtgcgaagggcttcccgcccaggggcccagggtggtcttagtgaaaaagggatggcgctgcagcactgaccacgttgccctggtttctccatttctccttcccaagtctctgcctctgtttccccatgacccggaggacgcgcctacggaagagacgtctggtcgagggggtgccggggagcggaagggggaggggaaggtctcatccctgggacgctgacacccccctccccgcggcactccagctccgaagagcgagcttcggttccgcccgccctccagaccatttgcttattctcactattgttttaatttattgtgcagcctgttgcgccgcgggcccggctgagccatttggggccctctagatgccctgcagggcgcctgtctccggacgaccaccacgcaggagcagcgggggcacgcgcgtgttttcttgtggataactgcctcggacttggcggggccggtccccacctgaagctcacctcaggcagtcgctagaagttccaatccaatcgtgagctttcctctgggagggacaggatccccttcaactcctgaggctgctcctctgggcgaatcccacagtaattgc

SEQ ID NO: 32639 - DNA, 1178 bp, Homo sapiens
  chr5:523704-524882
  binary
cgaccgggattttctaaaaaaaaaaaaaaaaaaggaggcccgccaatgggaacgctgcgcctgtagggaggattctgctgggtttcatgcgggtagcaccgcttttcttttctgcccttgtaactcacgaaaaaacgccatcactccaaggacgtttctctaaaaagcctgagaaccccgaaggaaacccggccccggggactccctgggcgcgagcagcctgcagtctgcggggctcggagcggaggcggggcggagaccccacagggacccgggagccgggagtccggggctccgaggctgtgcccccgccggggaggggagacctcgggacccgcaggggcggcttagcgcggccagagtcgctcccgagtctcgctctgctggacccgagagccggactctcccgggcggccgccgcgcggctccgacctgatgcgcgcggccacaacgaagcccccaggcccagcagaggcggccgcacaccccgcgggcagatccggagaccccggggccacttaccgatcttggccaagctggccacgaggatccagagcgcgatgacgtagggatcctgcacgtgggcccactcgaaggtgaccacctggaagcccccgctctcgccgtgcgcgccgccgggctccacctcgacgcccccggcccgcgccagcccgcccagcgccagcgccagcagcagcccccggtcggggccccgggccccgagtccccacattgccgcctgctcagcgcagggctgggacgcgcatgtcgcggggggtcccggctgggctgggccgacgcgcggggctgggacccggcgaggacccggcgcgctccggtgccggtaccggctacagtccgatccccgcccgccggggtggcctttaatcccgcggccccctcccgccccggggcggagcctgcccgcccccgccgcgcactcgcgagcgcagacaccgccgcagctcccggcacgcccgccccgcccgcgcacgcccaccccgcgctccctggtgcccaccctcccccggagcccgcggcctggaggtccgggaggtcgcggcaagagcgagcccgggactgcgcggccgccttcctggggcgtggggagcacagcgcggggcagcgggacaggcggttccgcgcagctcctgggatgcccgggcagctgtgggtgc

SEQ ID NO: 32640 - DNA, 906 bp, Homo sapiens
  chr5:53162-54068
  hyper
cgggaccgccgggtggagacaaggacgcgggaacaaaacgtatgtgtgtgttggggggtgttgctgcgagagcgggcaagggcggggacgccgcgctgacccggtcctggatcccacccgcgctgggctcagggccgcgggttcgggtcctgccgggcgtcccacgcaccggggacgggcacgaaaccgtccacctgcctcagacctcggctgacctctgggccgcgggagggcccgagggtcttttccgcctctgctcgctgttgtgtctccaaggtcagaatccctgcggccggggctgcgcaaaacgccccccacccccgcctcactgccgcccccgagtccccttctcaggcaggctgtgggggttggggttgggcttcgcgagcccaagcggacgccgcaaagagaatgagaacctcggagcgctcggggcgggcgggcccagcccaggctcttcctacccctgcgggggtccgagggccagcggcatcggcggcgggaggagggggcgggggcggggaattagggggaggcgggtgttaaagaggagaagggcgggggcggagggggaggaggagacggggcggggaggacccccaggtttccgagtctccgcccgggctttcgttcccggctgtgtggccccgcgcggttcccgagcagctccaggaactgaaacgtgaaggggacctcggtgcccggagctgctgcccaggtaaccgcgctgcgcccggcgagcagatggggggtagtcgccccagtcctggactccgcgagggggcgcggggagtccacgctgcggccgcgcagacgggcggggcggttcgttcctgcgagcgccggaaccggggaggaggctggggaagagaaaggggcagaggggcgggcccgggggccggggcc

SEQ ID NO: 32641 - DNA, 1295 bp, Homo sapiens
  chr5:72732470-72733765
  binary
cggtctttgaccccccgcgcctcccgcccacagccggagcccggcagctggaagcacccgctaccccggggagcgtctccaggccgcggtctccggccttcgccgagcgaggcgggcgggaaggtagggccgcggtggagcgggcacggcctcccgccccagcccggagcctctccgccccgccgggccccgcggccgccccttcctcacccggaaaatcgtggggaggcgcggcgtagcggccggacccctggcctccgcgtcgggctgcgccacgtggcagctcccagcgccctcccgtcccggcctcgcatgctgtcgggggagcgcctcgtcccactcaggccgaaaccccaggaaggaaatcactctgggctggggacgcggcctttctgctcgcggctgttgggtgatgtgcccgaggtttctctgcccttctccgggcgcaggccgttcattcgcgccgccgctcctgagggtcgctgggcgcagaaccgcctcggccgcggcccggccttaggcgcggcctcgcgcattcctgcgctcgccacagccggcgggaggcggggaagggagcagcccgggtggcttggagaacactgaacctttaattgggctataaatcagacaggggagtgcggtggagtttatgcaggtgtaaaaacagaggggaaagcccgggccgagcagccaaagcgcccgggcaggtcagaacctccagcaaactaacatcttgataagtccgctgacaacaaaataaacagtggagaaggctggagggcggggggcgccgtggcccgcggctggttcgcagcagctcggcggccttctgcgaggggaaggcgggccgctctcggctttgtgcttggggctttaggaggggggcggttggaggagagagagaagccgaattatctccctttccgcgtctcattcccgtggatggagggccccgggagcgtttgacgatggcagtttggggcgtgcgcgctgcctcgtcggcccctacgacgtcaggcgccggagctgccggggccccgggcgagcgggcagcggcccccgcgtccctcccggacacagcgccaccgagaggccgagcctcccgctcctgttgccatttcaagggctgacgcctggaaaacaccgccaggcccctggccgaaggaggtaactaaccgagtcgaaacggcgatcagaaattaattcagtgccctgctcaggagcaaaaccgtcaaaaccccatcgagatgttggcgcaagcggattcacacacaaaggaaaacaataaaagtctc

SEQ ID NO: 32642 - DNA, 865 bp, Homo sapiens
  chr5:74349128-74349993
  binary
cggggttcagcccggttccccgcgcggctccgagagggcgcccccgcctgccgcctggagatggacgcggcgccgaagttttccccggcgggaaaacgaaagtcgtgaggagcagagggtcggggcgtcccggcggagacgaggctgagaccgggttaacatctccagccccgggcgaccctcgctcccccgcgtggccaagtcgacttacgagagggagcgggccagccccgaacgcggggtccgtgcggctgcggaggccgccccggcgggggccgagggttgcgctctgggttcccaggctctccgcggcggctcgctctcgccgcgctcctccgtcgccctgctggggagccgctctcgcccggcccggggtgggagagcgctgagcggcccccgtgacgtgcggagaaagtaggagcgcctccgcgctcccgcagagggagctccctgccctgcgctcccagtccccgggccgcgcttcggacaaagttctcaggcgcgcgcggtgatctcggctctccgccgctgcccggagcgtcatccacgttcggttccctcccacattagacaagaaatctgaggtcaggagagctaagtaacttgcccaaagtcgctcacaaggcagtgacgaagcaaactcacatccgcggctccttttttctccttgaacgccgggctctgcggaggctcaggccctgcaggaatcgcccaaccagacagaaggcagctcgctctcatgggtgagacgaggagtgtcccacgcagccgcgagaaatattatcagcagcgtgggaaggtggagctttttgccgaataactagagtgcaaagttgtttttcaaacagtgcctacatgccaaatc

SEQ ID NO: 32643 - DNA, 955 bp, Homo sapiens
  chr5:75380048-75381003
  binary
cgcctgctgtgcgccaggccaggcgaagcagacccgaggctgtgaagctcagaggggagagggaccaatcgcagtaaataagctaccgaggtaatcttagatggcgatgagggcagcaaaagccatcagccgaccctctgaccctttctcttagtgggcttttccccttccgcctgggttctagaactgggaagacttttctccagagcgtcgcggggagcgccccgggctgggcccacggggactgcggaatacggggatgaacttggcttggggcagccagcaccccacggcagatgaacaatcgggagcagatctgtgggcgtgcggggaccttaggcggcgcgcgggggcggggggaggggctgagccacgggggctagaggtgccgcctggacggcctgagctgggggcgctcgcgtcaccttctacgtgtgcgagtgatgcaaatgcagacccgcgaggggcgggcgggggtggcgggcgggggcaggcgacggagtctccgtctgggagcgcgcgtgtgtgcgtcaaaagctctgggttgatggatgccccgcggcgcgcctggcgcggagagcggcgacccggcggggcagaggggggcgggaggactgcggcggcgcggggcggcgaggaaagccccgcacggcctgggctggcgggcaggcggctccgcagtgcgccgcagtgccgggaaggagccgcagctaccgggcgctccccgggggaccgaggagatgaggcgtcttttaaggctcatgagagccttaaggagatgagaccgggatgccgtgatggtctcctctcccgctgaacctaatcccttcatacttagctgactgctagcgcggtagcttccgtttaattcttatccttaattctgaagaatgtggcattaatctctcaggcgttcactcattttccatggcaagttccgaaaggcctcgtgctc

SEQ ID NO: 32644 - DNA, 1291 bp, Homo sapiens
  chr5:76114396-76115687
  hyper
cgctttcgtgatgtccgcagttgcccacctgcctctacaataaaaaacgcatccctcctcctgcagggtccaccgcaccgggaagccctgtctgtatcagttaccaaccacaattgcagtgagtacgaatcgtggctttcccacagtcaggaaaggcaagggagaccgacgacccgcttctctaggagtaagtaaagattaaaggtagttcgcggtatagcctaggcagggattaacccgtggtcccagcgctcctgctatttgcattccaaagcagacacctcatgcgctcaaccccgcccgcaggcggctcccgcagtctaagggacctggcgcgagtccgggaagcggagggcgcagctgcgcagggaagggggccgggggcgggaccagggcgcgcgttccggtcccggggcgtggcctcccgcaggtgagtacgctgctccttcggtttccctgaaacctaacccgccctggggaggcgcgcagcagaggctccgattcggggcaggtgagaggctgactttctctcggtgcgtccagtggagctctgagtttcgaatcggcggcggcggattccccgcgcgcccggcgtcggggcttccaggaggatgcggagccccagcgcggcgtggctgctgggggccgccatcctgctagcagcctctctctcctgcagtggcaccatccaaggtgagaaacctggccaaggagggctcttatctctgaggagctggggtcctgggcacgctgggcagacggtgggatccgggcaggtgtgcgaaggctgttctgctgccggcacccatctctacgaatcccttagcctccccttggtggctttgatgtgaggtctctgcgccaaggaggcacccaggtgggacatgcgggagcagctgaagtcagcggagccgggcagaggcagagatttccccaaagaccccacttcccgtagaggctgtcatgctgggcacctccaggccccagcgtgggttcggggaaagggagggaaggaaggagtagctgtgtctaaagggtacgcagaggacctagtcccctccccgggcttggttgctttgtaaacactaagtcattaagagctttttgccaactccggagacttcctccgctggccccgcggggccggtggggttagcgagctgattgcgcagggcagggcggagtgggtgggaacccgcggcccgggagccttctaggttgttttttgcgtccctctccaactgctggaagcctttcttcgggttctggcccctgcgttcgagacccaccc

SEQ ID NO: 32645 - DNA, 835 bp, Homo sapiens
  chr5:76934460-76935295
  hyper
cgatatagatatatatagatcacctaaatgaaagaaaattcggtttgtggttaaaaagggggcttcttgcattataatgtcctttagagagacggggaggtgcttaacagttgaatgaacccgtgagcagctcggcgaggggaccaatcaggagggcagcctgcaaatgtcagcgcccggagagtcccccactccgcccgcccgctcgcctgcgcccgcctgaaggaggcggcggcggcagccctggcagctccagcccggagcaggagctaaagcagcctcagccgcctcggcctcgccctgagcttctgggcccggctccctctagttcttccctgcgattttctccaggctcccctttccttccccttggccggcgctgcgcgcttcgaaggcgtagctctgtgcctctgagctaacatcttcctagggcaggggcagagcaggggtcagagcgggccatgaccctggcgtgacctgagggtcgcccccacctgcgctctctgggcctgccgctcatattggcccgccagcccagggcgcgacgagggcacaccgcggccttcagacaacgcctggacttcgccgcggctcagtaggcctgcgcctagggtccaggcgccctggctgtgccctggggtctatacgagccccaaccccacagtgggcctagagcgcaaagaggagtcggcttccctggcaccgccagcgcccgctgtctgctttggggaccctcgcggagtgtgggttcgagcgctctgcactcttctcaccgggcttcttcccggctcctgctcttccgcttggcccacgcccgcatcctcgcccctaactc

SEQ ID NO: 32646 - DNA, 991 bp, Homo sapiens
  chr5:79865177-79866168
  binary
cggagcaggcgcacctctgcacccggctctctgctaagggggtccggtatcctggtgccaaggctgtgcgcacctgagaagggcgggaaccggctgcccgcccctgtgtggctcctggaagcaggagctcctggaagctgcaaagggctccgcagtccccagcccgcccccagcgcccagccggcacctcctgctgcccagctgccgaggcacctgcggagacgcgcccaagtcagcccctccggagacgcgcccaagtcagcccctccgacccgcgcgctcttgcggcccagcgcgcgccgctcccgctgctgcgccgaccttcgcccatcaggccccccgccccgcatcctcctcgacaccccgcggccgggcagccctcgccggttcccgccgctcggcgaggctgagaaggaggcggaacccgcatccccgcggagtccaagccccagcggccgcaaaactggaaccgagaaccagtgggaaaggcaggaggcgcgagggtgagctcgcgtggagcgcgccccggggtggcggggcagagtctctcgggaggcccctgcagcccggcggccctcggctggccctgggtctctcatcctgctcggggcactgcaatgtcagggtgagcgggaggtgcgggcttcaggggcttgcgcgcaccgggcagggagcactgaggccgtgcgggccgctgggttccacgctgcgccctcgatgtcctcctcccggcagccgccactgcaagccaaagtttcccaagtgcagccggcagggacggcgcctcacactgacctgggacgcgctgtcgagttggcggcggcgctttcaaacctctctccggcactgcccgaccctctgtgcggccctagggcgccgtctgagctgagctgtggtcttcggctcctcggcgcctcgaatcgcagatctcggtagatgccgcccagtccccgccctgcttgcggaaagaggcgggcgactgccgcgaagc

SEQ ID NO: 32647 - DNA, 869 bp, Homo sapiens
  chr5:80255766-80256635
  hyper
cgcgtgtgtttttgtgcatatgtgcgcgcattgtgtttgtgtgcatttgtgagtgtatttttgtgcgtctgagtgtgtgcattgtggatctgggtgaatgtactggtctgcgtgtgtgtgggtgtgcgtgtgtgtgtgcgcgcgttgtgcgcgagtgtgcgagcgcgtgtgagcgggtgtgtggtgcggccgggcgcctccacctccctgatccgccccatcccggcgggcgcccgagcagaggcagcggcccgggccggggcgggcgagggagggacgcgagccggggcaagcgggctgcgccaccgccggcgccgcgccgactttgccctttaaatcggtctccaagccgattacagctgagctcccacgtgacgttttaccttctgtctcccggagcgcgttgcccgaggacagtccttccccggctgccgccccagcccgccgcgggggctcggctcccgcaactttgggcgaagcggcggccggctcgggcgccctcgcggggccgcgctccacgcgggcgttgggggcttggggggctccgggggctcggccgggagggtggtggttagggcggagagcgtgcctcggccccagcccgcgcccctgccaccgcgcgccgcggcctcccgaaagcgggcggggtgccctgcgcgcggcgtggggaaagggggcgcccttcgccggccgggacctgagcggtcgcgccctcgagggagccagctgggccatggccgcgaggcaggggtgagaccggcggccacccgtgagccctccgcacccgcaccatgcagaagagcgtgcgctacaacgaggggcacgccctgtacctggcctttctggcgcgcaaggagggcaccaagcgc

SEQ ID NO: 32648 - DNA, 662 bp, Homo sapiens
  chr5:80689558-80690220
  hyper
cgcagaagctctctgggctcctcacttgtttaatggaatgaaggagtcccgagagccacacatttgggaaccaccggtctcggccatgcccagcgcgggcgcactgttgcaacacccctatccctggctgcgcagggttcagctctccgcaagtaccttcctcgccttcctaccccccccagcccccagccgccgccgctcccgcagccccggtcccgcgcctccccgcagccccggcgcccgcctacccgccaggcaggcggtggtgtcgatccacttgagcagctgccccgcgctcagctcgccgcgcgcagtggcgtgcgccggctggatggcttggctcatgaccacctcgccgggcgccggccgctccatggccagggcgagagcgctacgcctgcggcccccgacaccccaccatgcccgctccgcccgccccgccctccccgcccagctccagagggcactggcgccgcccgcccgggccgcgaacccctggccgccaggtggtgggagctgcgagtgagggggcccgcactgtcatcccaggactatcgcgagtgggggaaaaccagcgctctcgggtctcaggagaagtctgggaagtgcgcggggagggggctcccgggtagacaggtctggaaggcggctccccgagagcc

SEQ ID NO: 32649 - DNA, 955 bp, Homo sapiens
  chr5:87436549-87437504
  binary
cggatcttgttttttcttttcttttcatgggtccccgtttgcgctcttagtcggcttacccgtcctgttccaggagccgacagggaacagcccacctggagcaggtcttgggccaccactcgccccgccccccgtctctactcctcactcgctctccccgctcctattaagcagccaacgctgggtgatctcctctccagttcttcgtggtttcattgtagccttgatatacaagacaaatgcacactttactctgggcttaaaaaaccatctatcatcatcctttgggcatgacaaatacattgtgtgtttcagagaaattaatctggtatttagggggagaaaggcatttccaaccagtctccgtgcagaaccttcccgcaaaccctgtagcggcatttttcgacacttttctcctcctttcggcaagcctcaaacttgaccttcgagaggattttaagggtagagccttcctccctttccctcgtctgctccaagagctcacgtaggccttcttctgggaaacagcggctcaggaccagagctcggagaactgcgcgtccaggagcgcgggcgcggccggggaaaagggaggaggcggcaggagggggcaggaggtggagggaggaggaggatcggtctgaatatgcatgaggcacccagcactgccctcttccccggcagctgctcgggcgggggcgaaggagggaaggggaggggaggggaggaaatgaggctggggcggggtggccagagcagccgcagaggctgacgcgggtttggagaacggaagagatgatttgcatggcgcctggtgattggctgatggccgggggctgggtctgagaggcggcccctgaatggtttaacggaggaaattacaagattcattcgactaaagaaagccggggcgggcctggtcggcgcaatatgcagcctgtccgcaagggggcgc

SEQ ID NO: 32650 - DNA, 1408 bp, Homo sapiens
  chr5:94619403-94620811
  hyper
cgagatgttttctttcgactgtttcatctacttagaattaatagcatttctcctcccgcctcccggcccccgccccccgctccccgggtggtgaacgcctgaagagggaggcgtggtcccgcgcaccttgtctccggccgcgccaccggcactcacctggctgctgccgtgctcctcgcccgtctccggggcccgagactccgcgggactccgcgccggctctgcgggaggaggcggcggctccagcagctgctccaggcaggcggtgcccggcagagaggagctcttctggtggcacaagtgcgccccggggccctgacgccgtgcaccctcatctcgggcgcggtcccccctcgggggaggctggggcgaggaggacagggaggatgaggcggaggaagaggaaggagctgagtcgggggagcgtccgccaggaggcgtccctcccgctgctcccgaggccgccgcgggcccctttacggcggggagcaaatgctcgcggatccggcggcgtagcgtggacccctgctcggctctgccggcgccgccgggctccaggggctccggcgacgagcagcacaggttgggctgcgaggaggagaagactcggtccagcacttgcttccgcttcttgaagccgctccacctgctgcctgcaccactccccctggccggtgcattccctgtgcccaccgggggtggcggggagggcgacggggtgtccgcagtgcggcgctctggacccccagcgcgcccgcccccgccgcccttgctcctgcccacccccagctgcaggttcttccagagccgggcctggaaggaggaggacgccgccggcggctctggctcgcccgccgcggcagcccggggctccatcctccaccccctgctcctcctctcccctcctcctcctcctcctcctcctgcttctcctccctcttcggctgcacctcctcccgggtccccgcggcgctggcggtggcggcggcggcggcggcgggcgcagcagcagaaaccgggagtgcccagcgacttcaggccagctcgggggaaagaagcggccgccgccgccgaggctctctggcctcgggactccggcgctgcctcttcctcccgcacctgctggggtgggctggagccgtaaccgaatcccggccgcggcgcctgcaaagtttttccctcgaagctccgcggctccagtccactggcgtcccccaggccgcgccctggctccctcttctctctgaccgagctcgggaagctgcacgcaccggggcgtgcgcgtccagctgcgccagggaccgcacccggcgccctctgggcagcacctgtcagcggcgggggcggctgcctccaaattgggcgcgcacgcggctcacacaacaaggcgcgtctggctggagactcc

SEQ ID NO: 32651 - DNA, 994 bp, Homo sapiens
  chr5:9545445-9546439
  hyper
cggcacaggcgggtacacaaacttccagcccgtgcactagctcaactgtgggcgcccccggactgacggtcgtcctaatcctgtacgcgcaacccccgcccaggtgcctgctgatggatcccacccgagatcggcaccacccaccagccgaccgctgcagtccccgggtcccggccagcggcgcggcgcggcgcggcgcggtcaggggctcctgccaaggccacgcaggaatcgggcgggggtcgctcaccaggtgcgaggagcgctggtgccagtcatccagcgcctgggggccagagcggctccgaggatcctcttcagcacctggctagggaagtggaggcagcagctgcagccgccccctgccacttccccagagccgccccctactcgctgagttccagaatgggggcaccggcttgggggccacgagcacggtccccgagcgcgcggccaaccggtgggtgggcaggttcgcgcccagcagagacgaccctcgaggtggcaaagttgggtgtccaagccagctccgcggggcagtcctgggtgggagaagggagcgtcccgggatgagcgacactggccgggccgcccctgcacggggaaggtggagggccggggctgcagcgggccaagggccgcggctggcctgaggctgcgaagcccacccgcggcgggaaagcagcgctcgggagcgggctcagggagagcagccgccaccggcgccgccttcccggcaagtagatcggcgcggggcgagcgggcgcggagagcgcggggcggagagcgctgggcggggagcgggggacagcctgggcccacccccgccccgccccgcccctgccccgcccccgccgccgcgccgcctcctcctcctcctcctccccgccggggtgaaactcgagcgccccacccgcgcctgacctccccgagcccctccccgggccccgccccttcccggtacaggacccccaccttcgctcctgggagcccc

SEQ ID NO: 32652 - DNA, 855 bp, Homo sapiens
  chr6:100441296-100442151
  hyper
cgtccggaggcgcgtacaggggacacggggatctacctggaggaagaactgaatttgtcttttctagttcaaaaaagccttcccgaactcttagcaaacaagccagtgatcgcctcctcgccttcgccacttcagttcagcctctttagtccccatggagagccgggatgaactagcccggcgcgctccagcggtctcggtcggggccgctgcttcccggaaagccactccctttttcttttcccacctgtgtttccattttctttgccgagtgtgaaaccagccggccacccacccgccccgctccgtctcgtaggtgcctccacagagccaaactttgtaccttctggggatggagggggatcccccagcaatcagacactaccggcgagccagccccggggaggggcgactggtggaccaggcgccagaccttcccgggcgcgcagcccacgggccctggggcgcgcccacgccagagcccggccctcgcgcggcagcccgcgggacgtcacctgggtgctcgcgtcctccccgcgcggcggacagcccgggcgcccttcctctctgcgggactgcaggtctatccgctaagcgcgcgtgaccaaaaacggctctcagcgggtcccagctgacggaaggtgggggaggagtgcgagggtctctgagacaggttgggagccagccccacctccatttccaaagcgggggtccaggcacaggaacagccaaacgcccgaaccagcggggttacctttgccacttcatccaatccgagcatcgggtgcgtcgtgctcttttctaggagcgtggggtgccttcgcgaataaaatctgaaggcatctctgctctcgc

SEQ ID NO: 32653 - DNA, 575 bp, Homo sapiens
  chr6:10383584-10384159
  hyper
cgcccgacggagcgtcccctcgcacctccccagagttgcctaactcctaggccctgaaagtgccagaacaaaggccgactcccccggcgcctccctcggggactgagcaccctgggccctgctgacgaagcaaaccccagactcagctcagctacccacgctcccagccacgtcgcgggtggatattcccgcctgggctgggcaccgcggaatcagcaccgcctgctgcgcaggccccgcccagaggctgcaccacccaggccctgcccgccgccctctgcagcctaggcggggtgtgtggcgtcgcggtcagccttaccgagggacacgccgccccgggccgggacggggtggggctgtgggggatcctgggccgaggaaagcgatccattttctctaaccgtttgctccagagctgtcaggttagcgtggcctcctcggccgcccagagaagaatgtgttaaaattctttgcacgggagcctttcccagcccaaatataccacactgtggcgttcctcgtgccgaccgtgggtctctaacctagccaccttctcccgttgaaatatgcacatc

SEQ ID NO: 32654 - DNA, 1496 bp, Homo sapiens
  chr6:10411394-10412890
  hyper
cgcgaaccctcggcggttcggccgcaggtcccgagggtagggggcacaccgcgctgcacttttcctgcagacagtttaagcatcaaatgttgagaacatctcggggacaagtgaagactcaaggaaatcaagatgaacgtggggagaaacacgccttgggaagccgcggcgaggtaggtctgcgtgctcggagaggtcgagcgggggctggggtagggggtaatgcactcgatttagggatggaaaagagcgagagaaaggcggaaggtggggtgggggatgcaaatggagagggtgtcctgaaggaaagctgggcgtgaaacccgaggtttcgggcagctccacggcaccaggtttccagaatccaattcctaaagaaacagcaacgggggtggggatgggactcaccatggctgaaaaactgtgaactaacatctgcgaagagtctggggtaacgagtcagggtggaaaaaaacaagcaagcctggagcgcccggctgccccgccgcccgagcgcgccccacacaaaaggcgccgagagccccgcgccacccaggactccagtcacggcgccgacgctccccggagcgcgggagcccggctcggatccatccgaacttgaaccaccgattcgcgcggcgccttcagctggtcgaacccacggtctctatcctgccgcgactggttatgattcaaagttctttaaaaatgaaaaaccccaaaaaaggaaaaaggaaaaagtatgtgtgagtgtgtgggtgcgtgcgtgttccttaatccgtgtctccccctcttttcttagcggcggcttcgcttgagcttctaataaccgcgctgggcagcgttcctggagcctcctaatagcagatattcatgactattaatattacacgaatacttaataagggaagaatgcctggaaatcgagcgtgaagcggagaggcaactcgcgccggagccggctctcaatgcagtccattgacgggagtctcagtgtagcaaatcggagtggggagagggagcgcgagagacaaaaagcgagcgagagagggagcgggcgagcgcgcggggggccgcggcgcggcgtctggcgaatcacagggaaggggcaacattttaaaaggttgcagggcatgcaaaagtgaaagagaaagaggcagagagggagaccgaaggagagagcgcagagagggagaatgtgtctgcgtgcgtgtgtgagaaagaaagtgtgggcgagggagaggagccccgggtggggagaggggagggagggaaggagggagagcccgagaggaggaagggagggaaagagggagggaggaagggagggagggagggggagggggcccagccggagcgcacggagggggaggccgcgggggagggggaaggggagaggaagcgagcgaggacaatcagacctaaaaggctggggcagacctcgggatgcagcgggggtcgtgcgtagcgggtaggagctgcttgggaccgcgtcc

SEQ ID NO: 32655 - DNA, 950 bp, Homo sapiens
  chr6:10415184-10416134
  hyper
cgtacttgatattatccgtcaatttccaaagcattttcatggatcggcgtgaacggatatgcccctctcggtctcgcacccaagtggagctactctctgggtgagcgcaaagtgctggctgccggcggtgagcgcaggaggaggaggaggagggagaggaggtggaggaggagaaggaggagggagaggaggagggcaaggaggaggaggaggaagaggagggcgaggaggaggaggagggcgaggagaagggcgaggaggaggagagaagggaaagagctcccgtgtgcgctcggagatctccctctaatggtagaaacttttcccttttccagctctttaccaacagcctaatcgcctcattagcatatcaacaatagtccaattgctcgccagtaccacaatctgccgccggccgctccgacacaggtataaaggcctctctacgccgcgaacttgcttctagagcgcactccagcctgcgaactgataaaaccttcctcgagctccgccgcgaggccctgccccaacaccccctctcttaccccaattccgccacattccccttcctttctttctccgcttccttttctccagagatgccttctgcaaagcccggcactgctcaaggtccaagcgccacgcctggggcccagcttctagcacttctcccttaaccctgctaccacgatccgagctgcccttttggccccgtgcaattttattagaaatcattatccctttcgcaattaaacataaccaccaaaccaagaccggcgaagtcactccaggattttttcccaacaagggatcgcctccgctcgaggcagccaccccctcgggccgcagcgccttgggagttttattggctttgagctttcccccaggttggagattctgccaagcggctccggtggctctgctggggtttgcaatcccttaattgcagc

SEQ ID NO: 32656 - DNA, 964 bp, Homo sapiens
  chr6:117586022-117586986
  hyper
cgaactttagaggggcagaagggcacggcccaagagagcagaattggggtgtgggacaggcggcgggaggaccaggttagagggagcgaaaggaagtggattagaggacagcggttacaggtttcagccactgccatttccccgcagaggtagctcttctgcgccctggaggggtacccggactcccacatcctgtctgccacgacccggactccctaggggattccaagggacagcaccgtcctccccatacatcatcaggaaccgaaagcagagaatttgccccacctcggcacttctggaagcacccactcaactacagtatgagacaagggctttcctaagagacctttctccaactttctttctctgcgtgtatgagcccggatcccttcgtccccgcctccttctctctctctctttctctctctctcctattttgtcctgggagattcctactcgcggtgcgaagcctcggatccgctgggaaccgcatagtctccggcacccttggccgcatgcttgtcagaggtgggccccgggaaacacactcgctgcccctccaacaagcgtccctcgctccccattggccccccggtccccgccccccaccgccccctcccgctccgcagcccccgagtggcgtcagcacgcccgccgggcatgggctttaaatgcccactagcgggagctcaggcgcttctgccctggagcgcggtcgggagtaaaatcgcaggagtgggagggtagcgagccagctggattccgagccgcggagcgcgctggctttgctccgcctgatgactccagagcgcgggtccaagcgccgcccatgcagcacccctgagctccggggaaggagagttaatgaaaaaacacttaaccgtctccgctgcggagagtcatgagctgtctggatgttatgtaccaagtctatggtcctccgcagccctacttcgcagcc

SEQ ID NO: 32657 - DNA, 620 bp, Homo sapiens
  chr6:12749835-12750455
  hyper
cgcctctctccctctccctccgtctccttctccctctcagctcgccgggcgaccctgctcctgcctcccacattaatggcggcatcctcggaggatgatatagaccggcggcccatccggagagtgcgctccaagagcgacacgccgtacctcgcagaggccaggatctcctttaacctgggggcaggtaagaacgcccctggcgccgcgcccccgcccccgccctgctccctccctccccggctgttgagcccccgcccctcccgggcgtcctccccgccgccccccgcagtcgggcgctcagcactcgcgctctttgtgtctccggtgcgcagagggcgtgtgtgcgagctacggggtgggggagggcggcgcgtgcagccccacatccgcccgagtcccacgcgggcttccccggcacggggaggaggaagtgctgtcagtgaccacagtgatcccgggaataacccggagcccgggccgcgcgcccatgcgcaggctgcgggcgcggggtctggcgaggctccccgggcgaggttggctggcgcggctactacggggtggaacttgttggtgacattcagactctgttggctttgacgggttgacgccgccgctgc

SEQ ID NO: 32658 - DNA, 1353 bp, Homo sapiens
  chr6:128841052-128842405
  hyper
cgcaccacaagcaacagagtgccgtcacgggagtcgtaactactttttctttctctcttccccactagcccggcgcaggccacgcgagacgccgaagccagcaggtccccacactctccggctagaccgtgccagcctgagccccgagcaagcttcggagaggaacaatgggtgccccgcgtcccacctggcacgaactctggggacagccctccctctaccctgtgttccccacccccggacagagagagctccccacgatccttgtccccagccctagcggggacctggctcacccctcgtgagcccaggactccaggcgttcgtcggggacgccccccggccactcacctgcggagaactggccttgggccgatcccaggagaggccaaggagagaggagcaagagcgccacaaaagcaggcagcgccgccgccgcagtcgtatccatgccgagtttgggagaagtttcaagcagctttgcaaagagctgccggggggatcgccgcgaaatccacgacggaggagcgggccgggcctcgcggggtgaggacggtgagaggacagccgcccgcccgccctttttccttcttcgcggtcgccaaactacctcaggggcgaaagcgtcgccagcgtcgccggccggccgcggcggcagctctccatgctcggcggaggctgctcctgttagtcaagagttactttgctcggggagggacgggggcggagccgggggtgacgtcgccccgcgggctccgggcgcttctgaggaatgcgggctcgggcgcggcgccgccaccgcctcctgccggagagacgcgcgccagccccggccgcgcgccccgcgccgcctttgttcgcagcctgggccccgccgccagccgctgctcggagggagcgagcgagaaaggggagccggcgcagctcgctgccctgttccagaactcagaatttgagaggcgagagttcggtaagccgtgcgaccagacgaccgaggacgcgcgcagagaaacccccgccgtccgaggagaggcgtcctggggttccgtcccaaggtggaggtccccccgagcggttgctgattgaaaggggagtgtggaagcgccctgaggaaacacccgcctgccttgaaaactccccgttccttattcttgtaataaggaataagacaccccacccccatcgaaaacttgtcccttattcatagaataaataaaacttgaaccagaataaacgatcagtaactttccagcgtgaacagctggcgtgtctcctttctggtttatttgtcattggccaagtatttggatttactctgcttcactgactttgcttgttgctctgaaaccctcc

SEQ ID NO: 32659 - DNA, 963 bp, Homo sapiens
  chr6:13013504-13014467
  hyper
cgggtcggagaatttctatgggaggtgaaaacatcaattatgttgtaacaggttgtctgctccagtgaaagtcaagggctacgggttggacccgccggagagggtaatttgctgtggccctggaggggagcttgcacccgaggtttcccagtgcagcgctttccgtgtgaaacattttgctttcattcggcagctttaggcgtgaagaaaagggggagggggttggcgttccgccctggagctcttgagagtgaaggtagcttcaaacccagcaggctctcagtagctggtgctgagatttccggaggggtggggctgccagaggaggatgtgcacgtgagaccccgagagaggtgggagtggagcttctcaggtaggacccaggagcgccctgcctaccccctcctccggcttcgggatccggattggctggggcagcgaggtcggcgaggtcaagaccctttcggcgccctccccgacccgccccgccgcggcggtgcttatatagagcggccggcgcgggcggggcgggggcatgctggcgaggccgaggggcgcgagtggcagcgcgcgggggccggagcagcgcccggccccgggcgcccgggggccggatggcggagcccacgcgctcagcgaagccggggaggtttgcgctccgttcgccgcgctgcagggagggcgcggtgccaggcgcgagcgccgagaaacccaaaaagaaagctttttatttgctgaggatgaagcccctgaaggagcccgcccccaacaacaacaacaacgtgtcctttgtgatccactgtcaactaggcaaggagatcaaacacatttgcagcaactgcagtcggggggaggacgcccgggacggtgagtgccggggcccgtcggggcggcggcggcgagcgcgggaggcggggaggtggctcgggctgtctcagtttgggggcaccgccggcgtctgtc

SEQ ID NO: 32660 - DNA, 747 bp, Homo sapiens
  chr6:130686392-130687139
  binary
cgttggctttgatgtttggagtcgaacatccgcactgctcatcgaagacccccgtgcttcagttccctctgtcttccatttcccccgcccatggttctcgcccccccaagccgttctccggaaccccttgccgggccggcgggaagcgtggaccgagcgggccttggccgcgtcttttccggccaggtttggtttagctcgcgcagcgcccgcgcagcccgccagggggaccccggcccgccgggcggcatctgaggagaaagcgtccgaggggcgtggagccagggtcctgcggtgcctgctccgggaatactgcgagtcggctggagctccccagccgctccggagaactgggggagccgggtccctggctcggtaaccggtggtcccgcggtagctagaggcgggccccacgggtgggtgtgtccgtttccgcacgccagccttccagcccgggaagagcgcctgcaagcgggtactttgttcccaaagatgggttttgtctgcgggtgatttgggctctcgaagtgcaactttgtggccgggacgcggatcggccggcctgggctcctgcagagcagatcctgtctgcgtcctccaggaggagtgggtggcaggactggggtttcccacaggttttggggcggcggcgagattggcacggtccggggtcgcaggcgcgcagccacgcccctggaagtccgccccggcccccgcccccaacccgcctcttcggggctttatggc

SEQ ID NO: 32661 - DNA, 3151 bp, Homo sapiens
  chr6:1311068-1314219
  hyper
cggctccgtcgctttttgtgcaacaaaggcaggaaaaaggaggaaactcggcgtggcagggcagcgggctggaagtgcaccttcccggggccgaggcgcccgctccctggactaatgacgccgcgtggggatcacgccccgggcgccctggggtgaggaacggtcccccctttcgagattgtccgacactggtgccagtgaggtcacagcaaaagtcccaaaggaatattggaaagaaatggccgtgaaccggtttgttcttgcccccgcccccgggaacacgccctctccgtcgttcctgttgactgtcagatcccgggaaccaagcggcggagctcggcggcatctgaggcttccgcagggacacaagtgcaggcacagcccagcaccctgcgccagacacagccgccccaggggaagaggaggacgctgctgtcctcccgcaggagtcaccagccaggtaaagaaaaaggtaaagtaagacaaagaaaagtgaaagtcggagcccatttagtgagcaagagtaaaggtcatccaaaaaggcgcatacaatttcaagcccaggagtgcattcattaaaacaagaggaaaagacaagatggtccttgaaaggagctcataggaaggggcacagcacaaggctcccgaaagaggtcactgcaagtgtcctgcgcaatttctgttcagcacctctgcagtgacgacaggggtttgctttcgtaagcagcatcgttttcactactacagaagcacatacgccgcgtgcagcttaggcccgagcaaagtccctgctcccctagacccagtcccttcaggtgtccccctaggggaactgtggcgtgtccccccaaccaggcgcactcgcctaaactgcgtccccgaactccagggcgcagggagccctcgcgggctgcccggggctggggcccacacctgaacggaggagccggctggcggagcggccccgcgcgcgcacacacgcacactcacagacacgcgcaaacccacagcggcgcgcgcgctccccattggcgggaggaggaaggcggggccggccgacccaaaacaaacaacctgcgccagcgactttgccgccgcgctgcagtgtggcctccgcctggtgcgcgcccgttggggagctggggaactggggagccgccaccacctcggccacctcgttcccccaccccttgccgtccgcgctcaggccccgcccccgcggagccgccgcagggttatattgggccggcccgaaggtggaggcgagacgcagccgcggcaggccagcggggagatgctgccccggaggctgggagcgggaaggcggctgcgggcgcagcggcctcggggactcgcctccgcgggtgctcaaggctgaaggcgccggaccttcccccacggtggcacgcacatcatccggcaccatttccgtgccccgaagacgcccgcgcgggacctgggaccgccagtgaagaacccctcctgggctctttaacgagcagcagatgcgcatgctgcttctctccggcaggaaagccttctaagcccggcgtgctcgggcacccgagggtggaaccgcggcccctgcacacactcaccccaaagtctcaacgtcgaaccgaaggcgacacccacccaactcctccctctccgccccatagtccacccaacacttgcagcccctccagagaaaaagcccagcggaagaggactccggaaaagtgactatctcggaagaccagggtagagctcccgggagaaaaaggcgaagatccccggccccggatcgccatccccttccctggcaccagcttctctaggctgcgcgaaggaagagggtacgacgccggggagggactgggtgcgcgggcatgaagttggaggtgttcgtccctcgcgcggcccacggggacaagcagggcagtgacctggagggcgcgggcggcagcgacgcgccgtccccgctgtcggcggcgggagacgactccctgggctcagatggggactgcgcggccaacagcccggccgcgggcggcggcgccagagatacgcagggcgacggcgaacagagtgcgggaggcgggccgggcgcggaggaggcgatcccggcagcagctgctgcagcggtggtggcggagggcgcggaggccggggcggcggggccaggcgcgggcggcgcggggagcggcgagggtgcacgcagcaagccatatacgcggcggcccaagcccccctactcgtacatcgcgctcatcgccatggccatccgcgactcggcgggcgggcgcttgacgctggcggagatcaacgagtacctcatgggcaagttcccctttttccgcggcagctacacgggctggcgcaactccgtgcgccacaacctttcgctcaacgactgcttcgtcaaggtgctgcgcgacccctcgcggccctggggcaaggacaactactggatgctcaaccccaacagcgagtacaccttcgccgacggggtcttccgccgccgccgcaagcgcctcagccaccgcgcgccggtccccgcgcccgggctgcggcccgaggaggccccgggcctccccgccgccccgccgcccgcgcccgccgccccggcctcgccccgcatgcgctcgcccgcccgccaggaggagcgcgccagccccgcgggcaagttctccagctccttcgccatcgacagcatcctgcgcaagcccttccgcagccgccgcctcagggacacggcccccgggacgacgcttcagtggggcgccgcgccctgcccgccgctgcccgcgttccccgcgctcctccccgcggcgccctgcagggccctgctgccgctctgcgcgtacggcgcgggcgagccggcgcggctgggcgcgcgcgaggccgaggtgccaccgaccgcgccgcccctcctgcttgcacctctcccggcggcggcccccgccaagccactccgaggcccggcggccggcggcgcgcacctgtactgccccctgcggctgcccgcagccctgcaggcggcctcagtccgccgccctggcccgcacctgccgtacccggtggagacgctcctagcctgagtagcgccgcggggcccgggaacgccgagtgcgcgccgtcggggaggcgggaacgcgggcccgcgcgc

SEQ ID NO: 32662 - DNA, 931 bp, Homo sapiens
  chr6:1381781-1382712
  hyper
cgggcgggtgggatgatttgttgatttgcttgttttccaccaaaccgcagggcacctccaggagctccgggacaacttacaaatgaagacacagagcccccgtcccttgcttcagagaaccaaataacggaactgaatgatcgtttcttcagcaaagcctaaagacgcttgcgtcccgcggagaggtgcccacgcgcgactcggctgccccctcttcttgcgggtccgggtagggtagggcgggaacgcgggacgtgccctaagcgggccagccgagcgcgagacaggcgatgctgcagaagcctgcccgcctgcgggtcacacaccggccggcctcggctgcaggggttgcggggccacgggtcgcggggcgccgggagccgcgagcaggtgacggccgcgccgggcagccccgcgggccgcgattcccgagagcctggcgccaccccgcggaagccggaggaactgcggcttcttcccgctcccgcgcggaggggagagggaggcgcagcgcggaggggagagggaggcgcagcgcggaggggagagggaggcgcagcgcggaggggagagggaggcgcagcccgcaccgcgcaatcccggggctctggcgggagggaaggtgacttgcgtgggacgactccaagaggccaggcccggccttcgcagttcacccacgaggataccgcgaccaagccaccaaagcactctctggccaggccgagaccccttttcccccgggccccaagagaaaaaagcactttctcctaaaacacgaactccccgcggaggggcccggggctgcctggcacggggcagggtgtgcggctgccgtgcgggcgcgggccagagtcacgtggaggcaggcggagagggcgagggggcccccgtaaatcatcctgagggatttttggcccaagtccctgtttcc

SEQ ID NO: 32663 - DNA, 985 bp, Homo sapiens
  chr6:1389802-1390787
  binary
cgagagacagagcgaggagcgctcctgaagggagacgtcgggctcgtccccggggtccaggccgcggtcccactcgcgggcgcagtcgcccggcgccggccgctcggccccgcggcctgggaggccgttgcgcaaggcagggcccgcggctcggggagggatgcgccgggcgttgcctcccgcccgccgccgccgccgccgccagaagccccagaggagctgagggaggcgacgccgaagcgctggcccggagtggccacggctgcagcccgggcggcgggctagggcgctcgcagggcttctgggccgaccccgctccggcgcctccgcttcccgcccggggcccgccctcgcggcccggcctcgctcccgggtcccagatgaccaccgagggcgggccgccgccggccccgctccgccgcgcgtgcagcccggtccccggcgcgctccaggccgccctgatgagcccgccgcccgccgccgccgccgccgccgccgccgccccggagaccacctcctcctcctcgtcgtcgtcctccgcctcctgcgcctcgtcctcgtcctcctccaattcggccagcgccccctcggctgcctgcaagagcgcgggcggcggcggcgcgggcgccgggagcgggggcgccaagaaggcgagctcggggctgcggcggcccgagaagccgccctactcgtacatcgcgctcatcgtcatggccatccagagctcgcccagcaagcgcctgacgctcagcgagatctaccagttcctgcaggcgcgcttccccttcttccgcggcgcctaccagggctggaagaactcggtgcgccacaatctctcgctcaacgagtgcttcatcaagctgcctaagggcctcgggcggcccggcaagggccactactggaccatcgacccggccagcgagttcatgttcgaggagggctcgttccgccgccggccgcgcggcttcaggcggaagtgccaggc

SEQ ID NO: 32664 - DNA, 324 bp, Homo sapiens
  chr6:146349455-146349779
  hyper
cgggtcagggaattgcaactcactggtcaaagcgtcccttgcaggccctgccagggaatgtctggctggaccgagcactgtccagggtcctgaaggcggcagggctcaggctgccgcggcgagagcaacccggaagctcccctccgttccctttctagcaactatgcaaaccccaaagcaagcgcaggaccccccctaacccgtccacccaccgcgggaaacaagttaccttatctgcaccccttcttcttgaacatacacagcaagcctgacttcttacgggggaaacataccaaactcctccatacggagactttaccaggc

SEQ ID NO: 32665 - DNA, 992 bp, Homo sapiens
  chr6:148663352-148664344
  hyper
cgtgcccaagctttcacacttgttttgcagagaagtcttggctggcagaggcaggatttgtaattccttgggtcgcttgacttcacgaggggcgaggtatgcattgtagcgacacggactacttgtgaagcctttgggcgggagtcgcttaaagattaactttctcgggtttccgttaccaaaagcgtttccgtgaatagcgtgattggaaacttgtgcgggccggagaccgcggcgcggctgctctttcaacaggcgatttgttctcctgtccgaggctcatttccatgcaaagagcctgacatcagagcaccttttgttgctaaacgctttctttagcctcgagggagagagtcatgtggagctggaagagctcattttgaagagaggggtcccggggagctccctccaagatctagaggctccgcggccacccctgccgggtcctgccaagacttgctagaaggaacgagtcgcgtgccttagttagttggttcccgtcacaggaagaaacgcctttgcagtgggtttaattgcttctgggccgagcgaattccccgccgtacaactcagtggtgcggactttgcctcctgctaccctgttgctgcgccgagcggggtgggaaagtttctggagttgtcagtcgcgcagcccgtggccacctagacccgaggtgcgggcgcctgcgaagggcccccgcggggtggccggggccgccggggcatgcagcgcgggggcgcggctcggtgacgccgcgggcggggacccggcatccgggcaggctgcgcgcgggtgcggggcgagggcgccgcggggactgggacgcacggcccgcgcgcgggacacggccatggaggacgcgggagcagctggcccggggccggagcctgagcccgagcccgagccggagcccgagcccgcgccggagccggaaccggagcccaagccgggtgctggcacatccgaggcgttctcccgactctggaccgac

SEQ ID NO: 32666 - DNA, 1056 bp, Homo sapiens
  chr6:152957433-152958489
  binary
cgaccatcacaataagaggctggctgccttttgcttctgcaccattggagcccaggagatgtgccacaagcggaaatgacaactcagagagggggatattaatagggacatctacgtacgagatgcaaagaggctccccaacctcctagtctccttatctatgagtatcgcacacgtacacacatcactgccaccaccccctcccatcaagcacgcagagccccagcgtgcaggcacaaacttgctgacaatttgtctgcaatgtgttcgtcttgcacctctctctcctctccctgtctctgtctctccctgtctcccagtctctgtctttccttttaccttctctctcggcctcgttcagtttcccagcagcaaggcgaagcgagcgaacgcttcctcccggctctctgcgcccaggctcggcgggaccccggggatgcgcggctgtccgcccgccctgtcgccgggatcgggcgcggtctgcaggactgcgggagcccagccgccctggtgacagaggacaacaatctcagcccgctgcggccggcggccgcggcccggcgcccgcgctcaccctggctggctcgcccacactcactcccgcgccgggctgctcagccgcgctccccgccctccgcgaccggttcctcctcccggctgctcgctggggggtgaggcctcccccttcgccctcccccacgcatctactgctcctgtcgggaaggaaggtcgcccaggccggttcagcctctgggcagggtccctgcaccgccctggcccgccacaccccctccccggctccgtgccccgcgccccgcgcccggctccgggatgcgccggtgcctggaagagctgggggcggggacccggaggctcgcaggcttccctacctcctggagatgcacggccttgggcgtttctccgcagctgcaaagctgtgctgtgacccacccgctcagcgagcctttataccgggaccacctcccgggggtcgaggtgggaaggaaatgtccctgagagccgggacgcgctgcctccgctgcctggaggagctgc

SEQ ID NO: 32667 - DNA, 1187 bp, Homo sapiens
  chr6:153451682-153452869
  hyper
cgcaacctcttcttcgaacaccttccccacctgagcagtgcattttcccaaaggtaaagagagataagggaggaaacacagcacccaaggtgatcagtcgattggacactgttgatggcacattctcctcgttcccaaccaaccgcacaaaacccgcaacacctcgcgtccccgcggggtctcccgcgcccctggcccggccctcccggccgcccccagcaggcgccccgctctccgcgggaactctgggacctggccgagcgttccccggcgggcaggacactcgcccggttccctgcagcagctgagggcggcgagcggaccgcgtccaggcagcgacgcgggattcaacttcccggacccgcggcgcggcccccgctcccgctcagggcgccgcggccacagctgagaccccagcgccgcgcagccgcccccgccggggcatgggcggtcgcgctctccgccccctccttccttcacctcccccctaccttgaaaaaaatccatccattggtgcaaagcagacattttgatgtcatttacttagcaccgcttgttttggaggcagcgtcttacccggtcgcctggaggtgtgggcagcgcgccgatgggtccgggggagcggggctgggcggctcggtcctctagcggagccggtttgctgccatccgcccaacttcagcacccagcgggcgaggagagagggagagcggcgaggatgcagaggagggggagggggaggagggagcggtgggcggggagggagcgagagccgctcggcagcgcgcatgcgcctcgcgggccggcgcagcccctcgcccggcgcggccggaggggcagcttcccagcccctgcgcgcggccgcgagagtcccggccccgccccctccccgggcggcccccggccccgcccgacctcgcgcgctcgcctgggcgcggcgcccaccgtgcggaggggctcggccgggactctcggcttcggtgacgcccgtccggagcttcgcgggaggcccggagtcccgagagcttccctgggtgacagcggctctccgcccgggcccctgcaactccactcgcccgtagcccgcgcgctgctgtcctgggctgcgcgggagccttgcacccaggagccggcctgccaggcacagcagcctgcctgctccgggtcccggaggaagcattccctgc

SEQ ID NO: 32668 - DNA, 924 bp, Homo sapiens
  chr6:166076007-166076931
  hyper
cgcgggccgcgacccagccgcagccgccgccgcgcgcagagagggcgccggggcccccagcggggctggggcggcctgcggaggagaggggcgggcgcgggggcgcggcgcgctccgcccggccacggccaggccactcgggggccgggcccgggcccgccgcgctccccccgccggccgcgctgagccggggttccgggcggagtttgccggggccgcagcccggctcgtccccggccgctggcaggggaccctgggggcggggagcaagaggctcctcgaggctggccatggttcctccccgggccgcggaggggcaggccgcgggcgggaggggcgcggcgggccggggctcggtgggctccgcccccgcaggacctgcccacccctgccggccgcccgaaccgctgcctggtcctcctctccggtcttcggcttccctcccagtctagtcttcacattgtgctcggcttgggttgcgggaggacccgggcctgggggccaggccccggcgacggcgcctggctaccctcaggcgcgcacaatcggcgtcctcccgggccggggctagggacggcggagaccctccctgcaggcgtggcgtggtgtgtgcgcgctccggcggctgagcctcggcggcttctcgaaagcagcggagaaaagcgccgcagtgccgctgcccgtggaggcggtggtggcggcggcggcagaagacgcccactggcggagcaggcgctccccacgccgccgccgccgccgccgccttccgcgcccacgtagcgcgccccgcgggactcggcccctgcgccaggctcccgcacccgagtgatcctctgtgcgccgcctgcacccggggccggggcgggcggacagagcaaccgctgcgtctctgccctgccttgtcacatctgggtccggtgtttc

SEQ ID NO: 32669 - DNA, 989 bp, Homo sapiens
  chr6:166076970-166077959
  hyper
cgctgctgggcgagccacgtcggcctgcccgttgcccgagccagggaatcctcctggtagcgggccagcagctccgacccagctgtgctcagtcagagttcccgggagagagttccaactcggacctttggttggagtttaaatcaactcgcagtgtttcccataaactagggtttgaaatacggttcctccccaggactccctttcgcatactcactttaaaacgaacttcgtgtgcacaagcccagtttgccttggttggggttagagaacggaaagggcaaactgtggccaaaaatgagcaagactgtgcgatcattgccccaaaccctgagaccgccttgccatatgcggctctcttggacacccccacccccttccgtagccatgaatccaggcagttgccactgaagggaaatgagccgcccaatgggcgctcagaactaggagccgccagaagtttggggaagttggagcgcaagagcgcacacagatgcacaggtgtccgcgttcgggcaggcacgcgcggcggggccaccatggcgcgctgggtccgaggaggggcggtggctgtgctgttccacggtggcacgggctgtccggactgcctggacgaggtcaccttccccggagtggagcacacgcgccaaagctcagctttcacgaagggcaaaacggtcacccaagcgccaggcgtgcgctacagtgcagcaactgggttgacccagggccctgggctcccggtgtgccccgggtcccggggccatttctcgccctccacgttttcttctttctatccagtttcacatgtttattttgaagcgtgctccagattcctcactagtcgatgctttccccgactcccatccaaactccccccaatggaaaataacacttttgtatttgcaccaagctgagcagttgggatgcaaaggacatgctggggctcccctcccccagtaaagtccacagacgtctccgcgattgcc

SEQ ID NO: 32670 - DNA, 711 bp, Homo sapiens
  chr6:17101827-17102538
  hyper
cgtgttggtttctgttcgtgcgaccgtctttctgaggtcgcttttgtgccactgccttctggtgctgtcggggccgcctccacaccgtcctccggccctcaacagccgtctctgcgactggacacctgcctcgcatgccacacgatcaccttcactacagacagtgtctaaaaacaaggatgtggtccaggcaccaggggtaggggcgtgtcacacacaccgtgtcttacaaagaggaaaaataagaggttcccgcaagatgcttgcgactctggtacttttcaaagtaacgcagccaggcagcgggctttcccccggcccctcgctctggatagggctgccatttgcatcctagctgtgatttagacacctccaaccttctagttttcagttacaagagtcccatctccgcccaggtcccaggtctgcatgacgtaatttattgtggcaaccattcctggcgactgcccagaaactcagtgcgtcctgcccggggtttaagcgcgggaagtgggagaggcgggtggcgcccgagcgcagtagcaggggcgtagggcgcagggcgcaggagcgcgggaccaccggcgccggagcgcggcagggagcgctcgcgggggcgcacagcagccaagcccgcggaggaggagcgcgcgcgcgcagcatgggctgtggaccttcccaacctgctgaagaccggagacgtgtacgcgc

SEQ ID NO: 32671 - DNA, 1364 bp, Homo sapiens
  chr6:17281034-17282398
  binary
cgccggctacagagcgggagccccgagccccagcgccgcgccgcgcggggagagaagcagctgttcccaacagctggggggcggcggcgcccggcgccccaggtgctgccgcggccaatcgcaggcgtccggcccgcccccctccccagccgggcgtcgacccccggcccgcgggggaagggagcagagaggtggagagctgtcctcggcactcgtcttccagatcccacggcgggagggacagaccagagccgaagctgcgcggagttcctcgcccctggccccgccgccgcgccccccgcccgcttcggcgctcggacgctcttcccgcggaccctccccacaccccacccaaggcacctgattcctaaggaagaaaaatctacctctaaagcacccgcttcttcgcttgagaactaccctctcttttcatttttggcctccccgccgggtgagtggaaaccgcttgcacattctatagaacccgattctaatccagacgatccggagaatttgtacggtgaccggcagggggggcgggaggagagagcgaagtcaagtctccagggccgctggcgacttcggaagccgcgcgcccggcgctctcggccgcccccggccgctcgcccccgccgcgccgccgccctcgcccccgggctcgcccttggcccccggcggccgcgaaagggtgcgggagacgcggagccggaggaggaggcgcagccgctgcccgagccgcagccgcagccggagcccgagccgcggggcgggtgcgaagatgcacacgacccagaaggacacgacgtacaccaagatcttcgtcggggggctgccctaccacaccaccgacgccagcctgcgcaagtacttcgaggtcttcggcgagatcgaggaggcggtggtcatcaccgaccggcagacgggcaagtcccggggctatggatttgtaagttgcacggactgggggtgacggggagggacggagtggcggctgaccccggggatcgggagcttggagtgaggggctcggcgtgacccgtgaggagccccgcgggtagagcggcgctgccccttcgctccggggtgaactgaaactttgctaggggagagggtcggcgccagcctcgcggggttcggagaagacccagcgctgtgcgaggtcgggggccgggcagggcagagcaggggtgaaaggagagacctgtaatgacggcgggatttggggtgcggagggttgcgagggaggggccgcaaccctgaacaattgcattcccgggctggatgccggttgttaagcgcgctgttgctttgtaaaaatgcgtgtgttctggtgttttggctggggcagggaggggacaccccac

SEQ ID NO: 32672 - DNA, 615 bp, Homo sapiens; identical to SEQ ID NO: 29328
  chr6:19804685-19805300
  hyper

SEQ ID NO: 32673 - DNA, 1871 bp, Homo sapiens
  chr6:19837692-19839563
  hyper
cggagctccgaagggagtgactaggacacccgggtgggctacttttcttccggtgcttttgctttttttttcctttgggctcgggctgagtgtcgcccactgagcaaagattccctcgtaaaacccagagcgaccctcccgtcaattgttgggctcgggagtgtcgcggtgccccgagcgcgccgggcgcggaggcaaagggagcggagccggccgcggacggggcccggagcttgcctgcctccctcgctcgccccagcgggttcgctcgcgtagagcgcagggcgcgcgcgatgaaggcggtgagcccggtgcgcccctcgggccgcaaggcgccgtcgggctgcggcggcggggagctggcgctgcgctgcctggccgagcacggccacagcctgggtggctccgcagccgcggcggcggcggcggcggcagcgcgctgtaaggcggccgaggcggcggccgacgagccggcgctgtgcctgcagtgcgatatgaacgactgctatagccgcctgcggaggctggtgcccaccatcccgcccaacaagaaagtcagcaaagtggagatcctgcagcacgttatcgactacatcctggacctgcagctggcgctggagacgcacccggccctgctgaggcagccaccaccgcccgcgccgccacaccacccggccgggacctgtccagccgcgccgccgcggaccccgctcactgcgctcaacaccgacccggtgagaggccgggcgccggccgtgggcggacgccgcgggggatgggaggttggtggcgtggtggcgggacgcgggcgctcaccgtcctccgggcaggggcgggccaggaatgacagccccctccccctgctcctccgggctcccccgggccgccagcagccggccgggctcggcgagcgcgggtccgggagaacgcgcagggcgggactcggggctgtgggcgccctgggctgtcaagtcccgcctgagcccggaggggcccccccggctacaggctggggtgggggcgtcggcgcgccagcctgatttccgaggacaatccaggaccgtgtcgagcgcgttgtttgcgcctgctaacctttcccttggtgttcggttgctgttccaggccggcgcggtgaacaagcagggcgacagcattctgtgccgctgagccgcgctgtccaggtgagcgcgcatttcccgtctcgggtggccggtcaccagagacgcccgtccccgagggcttccggggccaggcaccgcggtgttctttgcccccagcgtttctgagagcaaactcccaaggaagtaaatcccctctctccctgccacctaagtagcaagtaaacccgtacttagccttagaactcgaggttcagtctcggtggagacgggtcagcccttgtccccgccgtccccgtgttttttctggtggtcagcgggctcttctgccttccctagttcccgagggagggcaccctcgtgggcatgggagctgccccggtgtcctcccgtgcagtctgtcacccacaaagggggacgcgggcagggcgccggagtgggtcccctctccgggcttcccgagggccgcagctgcctgctcggcgcctggcccggccgcgggcgggtgttgtctgacctggtggtttgttttgggttgttgatcaagcatgtcttgagtttggtcggtggcgccagttagtctgcagcgagaaggttcacacaccccctctattcattcctcttccacaggtgtgcggccgcctgagcccgagccaggagcactagagagggagggggaagagcagaagttagagaaaaaaagccaccggaggaaaggaaaaaacatcggccaacctagaaacgttttcattc

SEQ ID NO: 32674 - DNA, 813 bp, Homo sapiens; identical to SEQ ID NO: 29329
  chr6:20212279-20213092
  binary

SEQ ID NO: 32675 - DNA, 1406 bp, Homo sapiens
  chr6:21664624-21666030
  hyper
cggaacgggacgcgcaggaacccggcccgacgggcgcggctcacacccgtgctcttcctgcgctctcggcctcactttgcggccagagccgcggccctgcgcgtggccggcggccgcttctttatctccgaccccactgcccagtactgtacgcgtccagactaaagaaacatcattcgcttaaggggctgggaaaagcgcgtgctccgctcgccctggcaccgcgggtcgcccagctcgcagactgggacgggcggtgcaagaggtggtgctccctgtccaggaggggacgcggaagagggcatctctggtcccgggatgcgattgtcccggtttctccttctggcccactcgccgcgcgcacgaactctaggggaagttggttgtaaagtttccgagagcggcgtgggctggtgcgagtgaagcgcggggcgggggaggcgaggacagaagctctcctcgcggcgtctttgttctgctctggaggagagaccttggcaaggagtcgccgggcgggtgcagggacctaccgccaccacattccggacccagcgggagccctcctcttaatgcccctccccccgcaagccaacccaggacatagcccccaggtccccaaggttccgtctacctcatccttctacccccaaacttcaccaacccgaaaggattccaagtctgggatggggagaaaggaaagagggtggaggcaaaggtgcgcgacgggctggataccaactggagggtgggtgttcgcattgaaatgtttttttcttttgccctagaaattgcttccccatgcgggcccctactctctcccatttcccccacctccctgctttctttttcttcaattctagtggatctagaaggaaaacgagtgctgctctgagtcactcagcgagctaatgctatggcccgaagttgggatcagggtcgaggggtgggggaccatgtggatggggtcccaattctggaggttgagaatgactggaagggacctggggaagggtcgggagctgttcctggtccgagacacctgatttgtcccggacaaggcagtgggggaggggaaggaaagaggggatgctcggctgggacgtgtcgcggcagggggtggaggatgaggaggcggcctgggaccccgagtcagatctttggggtgagcacgaggacgtggtgtagggaagaggacgagtgagcagcgcctggctgtagggtcagagggcgcctggtcatcctgagagccttgccttcgcagtttgagattaggggaagttcggggcctgagaaggtgggcgcgatgctggagctgggaattcttcctcggagcccctggaccgagttgcgctgcgcctgcagcaacaggtagccccgagggatgggcggaggccccggccgaaccc

SEQ ID NO: 32676 - DNA, 373 bp, Homo sapiens
  chr6:26987779-26988152
  hyper
cggaaccagcgcagcagcgggacgctagcccgcccacacggcggccacttgaaggtcctccagggaacacctgaggcagtgggagcgtctgccctttcctaagtctccttggaaagaagtattcgctttcgtttccgcaaacaaagcatgctccgcgctttcaggaccggtggctcccgtggagaccgcagcggaacccagtccgccttcgcacgcgtccgggggagaagcggccccaggactaagggcgcgcgcccgaggaaccggtgctgtgacgaccagagcaaacacgccggatgttcctgtgtaggctgtgtaaggagtgaccggaagtagaaactgggtgctccagtggcgcaatcggttagcgcgc

SEQ ID NO: 32677 - DNA, 995 bp, Homo sapiens
  chr6:35181260-35182255
  hyper
cgccgcacggccgtcctcgcgagcgagcgcggggacgcaccctcgctccccgactctttcctaggggagcgaggacgagtcggagcccggtgctgtttggtctggagccgagcggagcttgcattgatccattgattgcgcgcggtctgcgcctgacctccctgctcccggggaagccgtctccatggagaccaggcccgctcccccatcgccggattgtaaattcctgcaggcagcggcccggcagcctggggagggggccaccgcgcccgggcgcgcagggggagcggccaccgcgccgaggccccatttgaaagaaaaaagggcacgaaaaaggaggtggtggagaaggaggaggaggaggaggaggaggagggggaggaggaagaaaacgaaaaggagcgaggagaggaggagaaagaggaggaggaggagaaaggcgaagaaaaagagcctgagagacggagaaagagcgagagaggaagaaagagaggcagaaagggcgtgtttctggcgctgcgtttcccctcccctttctcaggtccttcgctcgggctctgcgcgctctccggctgcagctctctcccggcgaagctgggaattgggtgggattacacggagcagccccgccgccgccgctggcagaggccggcttggagagggcgggggttcccctccgtcagtcgcccctggcgcccctcgcctcgtcgcactctccgcctcgctctccccgacgtccggccaggaggagccggtagcatcgggagcctcgcgccgagggcgccgcggtccgcgccccgcgactgcagcccccggcctggccccggcggggcgccccctcccctccccctcctgcgagctgggatccggccggcttccgccctcccctggccgcgagaccggccccggcggctgggccgccagtagctccagccatgggctcggggcgcgtacccgggctctgcctgcttgtcctgctggtccacgcccgcgcc

SEQ ID NO: 32678 - DNA, 661 bp, Homo sapiens
  chr6:39196876-39197537
  hyper
cggtccaccatggctcccgagcggccgcctcctagagaaagcctctcctagccccagctgctaccagtccgcccgccctccagcctctgaaaacagctgtttgaatttggagctccgcatgcgcagtgcccggtactcaccccccgcaagcaccgctccccggacagagttgcttggccaagttggcccacggagtgcggggagctgcgtggggccccactcacgcggcccggggtgggcgaacaccagcggggctgaaagggcgccctggaccgcggatgcgtaaggagcgggaagaacacaggacttgactctgggcagacacgtgggccgcttctccacgcgtcgctcctccgcgcgccactagcagtatgcgccgcgcccgcctccgcacgcctctttaaccagcgcccggcgcgctctgcccccttgctccgggctccgaccggggaggagcccaggcgggccccgccccttccccgcacaagcagcccggcgagcgcaggagtgagcgcgaggtgagcgctagaagaggcttggcgctccccgcgctcccagggtcagccgccaggggaggctgcgccgcccgcccagacctgcacgccctgcggtgcccgaggggttgcggtctcagggactcgtgtttgttattaggactggc

SEQ ID NO: 32679 - DNA, 754 bp, Homo sapiens
  chr6:39281374-39282128
  binary
cgcaaacgtgcgcccgggttccccctctggaagcggccaggtgtggcgtttagctctttgccacgggtgcgggtgcgaccaacccccaagcaggctcaaacgcgccctttcccgggtcaggccgggcggggccggttacgcgcgcgccccctgccgtagtcgtcctcgcccccaaatttggatgtgtccccaggcatctgcctcctcaccgggccagcatgccctctcgcccccaagtaggactcagcccggcttctcgcagtcctctcgctagggcgagggtcttttcctccgaggtcccccaaccctctggtccccgcgcaggaacgcccacccccgttgtgcccgcgtctgcgttcccgacgtttccctgaacaggaaacacctgaccagggcctgaataggccccctcgccctcggcccgtacaccccgcggcccgctaccccatcccgccgcgcccaggccgacgccgctcgcccctgacccggatcagcgagtccagcgccgggcggtccagacacgtgaagttctgcaacagctcccacttgtcgcgctggaagctgcggctggagtcctgcgccgcgcggccctccagcgtccagaacacgccggtgcccagcgccaggtaagccaggtaggcgagcagcaggagcacggtgctgggcaccgcgcagccccggaccctgccctcgggagccgcccgggctcgcggtcggtacatagcgggagaggcggggagccggcgccgggagc

SEQ ID NO: 32680 - DNA, 756 bp, Homo sapiens
  chr6:39759796-39760552
  hyper
cgtagcccagaggaggagccggggagaaacccgctgcccaggtggccacttttgcctctttgacccttccatgtttccaaaacagaaggggccctgagaacgctccctgccaaagtggggaacagctaccctcattgtacgcctcgccctgccggtggcgctctccccccgcctgcgttcggtctgaaagtgtgaaaattacaaatcccaagaaactgcaatcagaagtctacctagggaaaattcagagtaaccttgccataaatatcccgctccaagacgcctgacgtcagagcggggcgggcggacgggcgcgaggccgggcctggaggggcggcagccgcggcttcccggggatagcgcggagcacgcagcagcgagcggagcgcgggcggcggcgccgtacctcgggctgcgggagcgcgggcgccctggggtcctcggagtaagtgcggccggccctggcgctccccgtcttggggcccgggccgcggggagccctctccgctgggctcccacacttctctccctctgctttctttagcatgccccgcggggcttggggaggcagcagctccgcaggctggcggttttgtttctccaaagtgtttgcaggagccgccgaccccggagtgggctcccagggcctgtgtgtgtgtgagttgtgtgtgtgtatgagtgtgattgcgtgtgtctgtactggcacatctggacataggaaatgtctttggaaaactttttaaaaatgttttttgc

SEQ ID NO: 32681 - DNA, 474 bp, Homo sapiens
  chr6:39901917-39902391
  binary
cgggtccctcccagaagcggtcaagcagataggccgggagctactgggggaaaagggcagtgtgccggggccactcctgccccgggaagctgtggacgcaggcggggtgggctcacctccgaggcagctcgcgcggactccccggggcagggctgggtcaccggagcccctgagctgcagctccgggcgctggacctcagaagccgccgcagcatccgggacagtggccgcgccgccatgaagcctgatacgagcggaaccgcagcccgcttcgggagcacactggccgggcactcgcccccggggtcatcccagcaagggcggggaggggcagggggagggcgggacccgcgcagccaataggcgaggacgcagtcccgcgtggccttgtgggagctgtagtacgctccctgtgcccactttcctgggccggggtagcgctctagggcagaagggtaaactcaggtaaggaac

SEQ ID NO: 32682 - DNA, 971 bp, Homo sapiens
  chr6:41340935-41341906
  binary
cgccccagcccccgcgccggagctgcgggtggcagggtcgggccgcggtaacccgagccgccgcgccggctccccgcgcgctgccctccgcctgccccttcgcccctgaccccgcagtcggcgcgctgggcctgcgcccgccatccccagcgccccccaccgggccgggacctccgccagcggtcctcggcgcccttcctgccccctccccccagcggtctcggccccatcccgaaccgccaccctgggatccccagccctcctgcgccctcgaggccaccgggctcctgcgagcaacgcttccctgcggcgaccgcgcgctgggatcactcaacaccaagaaaaaaaaaatgcactgggaacgacagaaacctgccttagcgaactatcctctagtggatcgggcgtggggggctgcttccagataggacccctgctcaccctgcagggtgcggccgggacaactacgggcgccactgcggaaggcctgacctgatccggcacggtgtggccaccgtgggcccacagagggtgaaggggtagcttatgctgagtgggggtgtccacctggacagaccaggcgagcctcgctcctggtgcgggagctagttttccctggatcttccgcggcagagaagcctgcgtccgggaccagcagagtgagccgaccggcggatgcagttgaccccattcgcgtccaaacttcacttcgagaaaacgcagccctgcgcgcagtccacgcaggacgcgacagcgccaccctcgtttgtacggctgcgcgaatgactcgagagagtcgcggtggctgcacgtgcgtgcgcaaagcgggaaggagtcagaaacagtcccgggcgcagagcgaagaaatcctgggacctcggcaagagggcctcaccactggagatggggtagctacgccgtgtggctgggggaggggtggtagggggcgcctagccagttgcaggggcctc

SEQ ID NO: 32683 - DNA, 939 bp, Homo sapiens
  chr6:45982741-45983680
  hyper
cgaaagagagaaagagaattttaagaaatgtcattttcgctttgccaaagatcattgtgtcaataacgtttctctcccattcctccccctcctcccgttttaaaggaaaggttcacgggtccagccaggtttctgccgcatcccgacacctggagacgtctttcaggaccagcctgaatcgcgtccgggctgggctctggactcggactcgcagcggtgacagcggaggcggggacgggggtggacaaactgcggatcaactctccgagaagacggccacctgccggaacctgccttcctccattccgcccaggagcctcgcagcggggcgctggcctgcggaaaggccacgggggagcacagggctccgcgccgccctcctgggagggtccggagtccagcgcaccccgagccctggtgggtgagcccggcgggaggcgcggcaggtgcggcgggagactggaccccgacctaccttcacaaagagctcgatctcggggtccctgtcgtccccgttagctgtcgccgagtctgtcatgccgttggcgcccggggctaccgtcccgggccggggaggcgccacctctgcagcacctgggccagcactctgcgctcctgccgctgcccagcggggctcctcttcagggcggtgtttaatttttcacaaaaccatctattctccagcccgagcagcggggtctgagagatcagtgtcccagatgctcacatgaaaaggagcgaagccgggaggaggcggggggccacggggaaagccgggttaagggaatgacaacaggtcgtgggagcaacaagtgccgggctgcccggaggtgtcacaggatccgcgactgtcagcgatcccgccgccgccaacgcgcccaaaatagccggcggctgcagggcggggtcagccgggcggggacgcggcggggacacccc

SEQ ID NO: 32684 - DNA, 829 bp, Homo sapiens
  chr6:46702682-46703511
  hyper
cgggaaaaggtttggaagaactggtgtctaataccgtcatcctctccctctccccgcaaggatcctagcgctgtttccgagggctgcagggactgtgagcccaggaccggccagcagagcgggtgcgactcagcgagcccaccccggccggtcgccgctccggggtcccgacctccagcgcggcgaccgtgcccttcctcccactcccgcctcgcccccggggcccctcctcactcaggcgcggcgcggagctgctcgcgggaactggggtccctgggcgcgttccaccgcgcaccaacgcgacccaagcgctccaaacccgactgcttctcgccgacagcactgcgagcctccgaccagccgctgtccccctggctgcgggccgagcagctctggcaggcggcgggcgggtgggctgcgcgcgggctgtgtcctgggtccgcctagcgcggccttgtggccccgaccctctcctcccctggtgatgctggaggaggtaccggggaggagcgtgtgtggccccggcctctcactagcagcggcggctcccgacgctagcctgctcgagcgcacccagcaccctccccaagaccatggcccgcacctggacccgcggttaacttagcccgccgcggagagagccaggcaatgcctgggtggtgtcgtgctcaccagctcctttccgcagacctgatgccgatcagatttactccctgctgaattcaccccccagtcaggccggttttccttgtttcaccgtgttctctgaatacactgaattactccgagcatctatagttggcaatgccctgcgcattttccgcactcc

SEQ ID NO: 32685 - DNA, 807 bp, Homo sapiens
  chr6:49518471-49519278
  hyper
cgcttgctgcttgaaccggtcaaagaaggaacgaatgaatgacccttttgccaggatggagacccgggggcctcagggagctgcgaatcccatggactcctcccgcagcctgggggacctcgggccttttccgcgggaggtagggcgcggggctccgctagctccgggcgcccggaatcccgcgacggcaggggcgagccgaagccagggcggcggccacgaggacagaacggcagatcgggccctcggacctcgggccggggaggaattggaccgtgagtcctgggtcagagagaaagtgctctttctcctgcacccagagaggtggttagggactcgaggggaccctgcacgggaagaggtggccggtgcagaggaccttcctcatgcgggtggagaggaccacggcgaggagcccaactacccttctgtctttcaacgacaaaagcgaatttctggcaggcgtgtagccccgccgcgggacgcagcagacccacccaaatacgtgcttgtgcgggtggaggattatcaggtaacacaagaagtgttgcagacctcctgggccaagggtcgcatgaccacgaggactgaggagcacttcgtgaccgcgctcacttttcgcagcagtagagagggacagcctggggaacgctggggccctgctgaatcccgggctctccaggcacgaacaggggcatcccgcgtccacgccgcggggaggagggtttcaccgtctccagggacttggctcgaggaaattaaactctaatgagtagctcgagaaatgttccgggatggtggatgagc

SEQ ID NO: 32686 - DNA, 1130 bp, Homo sapiens
  chr6:72129577-72130707
  binary
cgcgccggcacccgaagagttcccacggatacggttcccaagtcagtggcatgtcagtgcccttcaagctaccgcaattttatttgttctccccgccagctccataaagtattaaaggctctctccacgacttcttcccaagcccaggtgccctaaaccacttgagcccacggcgcctaaagccgactcacccgcagcccgaggtgcgggagccctcggacggactccggcccgccccgcagtccccaccggccgcgctgcggccccggctgacgacgagtcgagaaagtcacccgcgatgaccgcggacgcgaggggcgggccgcgtcgcgccgccccgcggaggcgccgcaaacttttcccggttcgcaagttgccgggatctgcggccgcggaccgacttccttcgccggccaccggagggagggggcgcccctaccccgggagggggctgggcgagccgggagacggtcaagttggggtcgggggagcgcgggcgctccgcactctggggcacgcggggacgagcccggccgcattgtctgcgcggcctcggaacaagcacggccggcggtggcaccggcgggcgcggggaggagttgccgtcccctttcgccgccgccgcccaccgcgttctttgtgtgtctctcgccgccctccagccgcttcgccgctcgcctgacagctgatgggctcaccgcgccgggtcccgcgtcctctcggccgcagccggcggagcccggcccggcaggaggaggaggggagaagaggagcgttgacagatgctgtcttggagcgggcaccgccgggggaaaagtctggactgcctcggcgagaagcggccggtaggcaaccggccccagcctcgcattcgcctcaaagaccccaattggctaggagcccttccctccgcagcggctcgcgcagctccgctcttgcgccccgcgcccggctcagcggacggactagcgcgcccggtcaagaatcctggggaacccgctccgccccctggctccagcgccctccaatgatgtcggcgtacagagggctgttccgcccaatcaggtgtcggaaagcccagccagtccccgggagtgtagccaatagaaggcgactccggcaacacaccc

SEQ ID NO: 32687 - DNA, 947 bp, Homo sapiens
  chr6:75915498-75916445
  hyper
cggcggcaacagggagaggtagcggcggcgacagcggcttcccggcgtcggagaagctggtgctcggtgtggcccccacacgccccggcgataggcgctgcactccaggagcacctggcggccgccgaggcgtgggcagctgcggggaagtccaggaggaggaggagaatcccaggaggagaggcgggcgcggcaggaagactggagatggcctgagcctgcagctgccggcgcgcggacgcgtctggggcggttcgccttagccaagtggaaagagactccgcgccgcgggctacttaatagagggctgttcccagctctcagtttactcggttacgaaacgcctgagaaggtggacggctgccacggggtgatgtatgctcctccggcggtgaaggaggtctacttttgggaacgtgtgcatacttcgagcattccttcggcgtgaggtggcgatcgccgtagtagcagtgccccgctggggggcggggagaagggagggagcgtagagggggacagccgcagccgggttccctgccaagggaagccgcgtactccgccacttggggcggactgggatttctttaatgaagctcgggtttccctatccctgagatttctttaatgaatttttctacattaagaacaatggggaggggaccgactcccattttcggaaatgcaaggatgcgtaacccattcacccccgctcctgcggatctccatccttcatctgatatcaccacctccatcttcctccccctctgtcctgggtgcacttaaaaccgatttacaggatttccattaactaactgtctgtacacgcggcgcgccttctgtctttttcaatctccaagcgcgattggaaacccggacagccgcccgcgcggggctcagtgatgggatggctttcccagtcctttctcactcccctggtgcttcaggac

SEQ ID NO: 32688 - DNA, 1146 bp, Homo sapiens
  chr6:80656537-80657683
  binary
cggggaagagggaggcgagctcgggagatgtgggagcacagggtggggcggctcctgcgaggagctcctggctgcacaggctccatctgatatgtcagctcccgcatccgagagctgatgagagatggagggagctcagaagaaaaccctgcgagtgtcgggggaggggaggccttaacattcggatcagattaaccagtgctcaaccgcagtgcccgcgccggcccctccgctgatccgcagcatccgaaagccgcagggcgcgggggcctgtggggccgggcccgggagctgcgagaccaggggccggtgaccccccgcgggggaccgagcgaggatggggaagtcagcggctttacctgcgatggaccaggtccagcggtagaactctaccgtgtcgttgagtgccgtggacactacgtttaggacactacccggctccgagtccaggagccccatcgcggcgatgagcgggcgctggcggcaggagaaagcggagacccagagagagggctgaccccggaggcggtggcggccgacggggcgagcggcggccgggaacccctctaacggcggcggcccggctgcgtcttctcctgctcctcaaggcgccgcggcggcggggatgcggcagaaggcagggccaagcggaaggcgtcgtcaaggttcccgggagaaagacgaggaggtggaggaggcccagccgccagcacagtgcgctgcaccagtctgcagcctcgcgcagccgcccctccaatctcctcagccggcgtcacgtggccgcgcgcgggggcggggggccggccgcccctcctccctccctccctccctagtattgggactcgctggcgtagggatgctgcgctcaagggtgcgacgccaactgggctcgcgcaggcgcgcgccgtcgagcgggagcgggacacctgggctcctccttggcccctccccgcacaagtcgcctcattagccttccccgcccctgtcccgggcatcggcccctgcggaggagttcaccgcctccccacgggtgatttcttatccgccccggatacgtcctgggaaacaggacacgggaagaatgggtgttctgtgggcaaagatgaggtaggcgtggtgctttggtccttacctgacactcacctc

SEQ ID NO: 32689 - DNA, 1851 bp, Homo sapiens
  chr6:83073044-83074895
  hyper
cggcctcaagtaccactttgatggggagagcttctgaagcttccatacaacctgccgtgcctttgctgctgccgcagtagattttcagctcatttctttctgctgctgcttcgcgctgctctgtcatgcctaaatctatctcgtcactgccaaaggtgcctgaatcagggtgaattccacgagattcaccagcggttttgctccagtccaaggtaaatacagtatgcaaaatgaggaaccacccaaggatgtcggggaggggggagagaaagggattccctcaccttttccggcacattcctcgttaatttccaccaggaggaggcgcgcagcccagctcccctagtctctcttcttaaatccccctacctacggctgccgaggttggccgcgcgtcgggaatctccccgacagtcctggccctcccccgccccccgggttggtttttcccagctgcggaggttgggaggttgggccaggggctggggtgcgaagagagtcggcgcccgcaacgcggagccgggaagtcgtcgctactctggtggaactcagagttggttctggaggcggcggacgcggaggtgagcagtgggagcccgcggcctgggagagacccgggaggcgtcgttggggcccctccccatcctcgggtggagagtagggttggttcgggttgccactgtaccccgagtcccactgctgctttgttcccagactctcccctcctctttggagatgacttgaacccctttgagatccgaggggctggcggggcgcgggctggggggcgacagttgtagctccacttcctgctaatgcgagaaggtacaaaaagagatcaaaaagtcctgtaacctgaaacttccctcgcatcctaaccgggacctggtggagaggtctgggcgggggcggagacacccggaggccgaccttccgccgaggcggtgcaggaaggaacgggagagggagaagtttggtagggaaggaattggggattaagcggtaagttagacgcgggagacgagtctcctcgggaaaggcggagggcgggaggccggtcgggtttatttagtgtgggccagggaagaaggaagactttgcggtctgggtgtcggatgcgcgtccccctccggagtaaaagtgaccggaggggttggggaggcgaggccggggcgggcttttggaaggaggtctctgggacagactggagacgactagactcgaaaaggccggtttttgcactccggaagccgcggcagccaccgctgttcacgcctctctcctgcttgtcccaggtccctcagaggatccagcgaggggcgccaacaagaggcgaagaggtggcaccagggcggcggcaggaagaggagcgggagcaggagcgcggagcggagcgtcccgacccgccgtgcgtactttctggagggaaggggcgggggaatcggcccctgagggaagcgcccggtggcgagggggttagccaagttccggctgcggcgccactccctcggttccacgagaggaaagttttttttttccagacgcttccgccggctcgcgccctccgggcccagcctcccgagccttcggagcgggcgccgtcccagcccagctccggggaaacgcgagccgcgatgcctggggggtgctcccggggccccgccgccggggacgggcgtctgcggctggcgcgactagcgctggtactcctgggctgggtctcctcgtcttctcccacctcctcggcatcctccttctcctcctcggcgccgttcctggcttccgccgtgtccgcccagcccccgctgccggaccagtgccccgcgctgtgcgagtgctccgaggcagcgc

SEQ ID NO: 32690 - DNA, 988 bp, Homo sapiens
  chr6:84417712-84418700
  binary
cgcagaccctaccctccaagcacccaggccttgcctcctccagccgcgcggcggctctctcctcctccatccccaccctggcaccacctctcggagccagcaacgcgccaagccccgctcctgcgatgcggtccagggagtcttggccgtgagtagggccgtcacggaaccccagcgtgggctccagtcgcagcatcgtgacaccgtccccattctcccccggcccccacatagggccagactcaccccctggggacccccctgtcaatcagcactttccccgcaacctgacccgcgggtgctggactagccacaacgtgcgttggggttattccctgggcgccgcacccaccggtgcccatctcccacctcagcagactttcctcctagcagcccgcaggcttcggggaatgcatcggatacccaagccctggctgcctccctcctcctcctcgcgctgctgcagcaaagggctcgtcctccctcagtcgcgaaggagattatcctagcgttgcgccatgttatgccctcgcctccccttccttcctcgccgccggctccaaagcctcgccgaggcccatcgcccgggccccttccccccggttccaaatccctgccgcaggggccgcccgggagctctgcggaggcgccggagtcttggggcgcctcacccttcctggctttggagaggagccgggctgacagcgaagcccagtcccccgcccgccctggagcgctccgcggagctgtcactcggccgctgcccttctccgcaccctgggattatcctctgcggatccccgcgagaccctggcgcggggagggggccgagtacggccgcgggtactcaccccgcccctgagcggcgccgcccgccgcaggatgagcggagcccgggccgccgagggaagccgcgccggtggatgtgtgcgaccgcgcgtagccccggtgcccccgggcgcaaagtctccagccctggccgggcccc

SEQ ID NO: 32691 - DNA, 1251 bp, Homo sapiens
  chr6:85482913-85484164
  hyper
cgaaacaattcccaacttatctggatcccagacgagtccctctgattgcttaagtcactagaaaaggagattcgtctcagcgattaacaatgataccctttttaagagagatcaaagaaggcgcctagggaagctctacaacgcggcttcttggagttctgaggccgcctgcgcattcactttccagtgtaagcccccgctccggaatcccggctccagcccagcccgcgcccccttccctggaaagacctggccggccgcgcccccgaacccccgaggcgtgggtgtcaggctaagcggggctggtccgaccggtcgcttccagctctctccacctgttggaaagcccaggcccaagaaccgcgccagcggcggcagcacgtcactcggcggccacggggagtcagggagcgcggaacgcgggtttctgttgataagtgcaaagtacggccctctcggtgctaagtgcacagtaagtgcgaagaataaatacatcatctcccggggcggctgtctcgaaaacgcctctcagctgcctgcgtttcagagcccgtcaagggttatagcttagtgtgggcgtccgcgccgcgcctgcgcctccgagcgccggccgagaagggcgcgcagccacagccaccacatgccactagccccgcaaggcgcctgactcctctaaggggaactcgtaatgctcaccaaaagcctcagaaaccctggaacctataagaccgcaccaccgcgcaaacggtgtcccgggctgcgctcccgcactgcaccggcagcctatgaggcgaggccaacccggagactgcgcgcgacgggcgtgcgtgcgtgcgcccgcagattcgcttcaggcggtaggtgtggagtacctgggcagctccggcgggaatggtgttggggagaaggagctgtcattcatagtcttctacatatctgaataaagaattgctttttaaaaataggttcagagcctagtgagtgaaaacttaaaagtccccgcgaggagctctagttcccgggcggcgcggccccgactttctcgtcggtagcgctctggccttgggcgcccgccgctttggctatggaggtacagtggccgcgtcccggggagcctgggcctccttgcggctccgagcctccgcggcgcccgcgccccgactctccggtcccggctctctccaggcccggctgtctccggtccctcactgacttcgccagccgcaccacccacctctttctcccgcagac

SEQ ID NO: 32692 - DNA, 1299 bp, Homo sapiens
  chr6:86159095-86160394
  hyper
cgcgcgtcgcctctgttttatcactaaggttttaattgtgaataaacaaggaactggattcgaatgatttcttagtttctgagatttttttgtctaagcatcgtagacttcgtgcgttctcaacccaacaggaagcgtcacatctcagtgagcttcggctctcacagcccgaaactgcaaggagctcctctgcccggcctctctttactcctcctctctgcccctcagctcgctcatctttcttcccgccccctctcttttccttctttggttctttgaagtgatgagctagcgcaaccacaaaccatacattccttttgtagaaaaacccgtgcctcgaatgaggcgagactcagagaggacccaggcgcggggcggacccctccaattccttcctcgcgcccccgaaagagcggcgcaccagcagccgaactgccggcgcccaggctccctggtccggccgggatgcggccggtacccgctccccgccgggaacaacctctccactcttcctgcagggagctggtgccagccgacagccgcgccagggccgctccgggtaccagggtcggatcgggtgacgtcgcgaacttgcgcctggccgccaagccggcctccaggctgaagaaggacccgccccggccttgacccgggccccgcccctccagccggggcaccgagccccggccctagctgctcgcccctactcgccggcactcgcccggctcgcccgctttcgcacccagttcacgcgccacagctatgtgtccccgagccgcgcgggcgcccgcgacgctactcctcgccctgggcgcggtgctgtggcctgcggctggcgcctgggagcttacgattttgcacaccaacgacgtgcacagccggctggagcagaccagcgaggactccagcaagtgcgtcaacgccagccgctgcatgggtggcgtggctcggctcttcaccaaggttcagcagatccgccgcgccgaacccaacgtgctgctgctggacgccggcgaccagtaccagggcactatctggttcaccgtgtacaagggcgccgaggtggcgcacttcatgaacgccctgcgctacgatgccatggtaagacccgagcccgcgcccgggatagtagtcccggactgagagaggagccgggctggaaaagcagcggatggcagagtgtggcaagcctaggtccagggcgcggagagatgtggggataaagtgagactccggccagtgtgccagctggatgcatagaagtcccttggacgattcgtcttaaacggacgttattgc

SEQ ID NO: 32693 - DNA, 547 bp, Homo sapiens
  chr7:100815484-100816031
  hyper
cgttgaggccaacgaggcgcggggcctggcgctgcaggtgccacagcagctggctctgcacctgcgcgccgtcgctaccgaaggcgtcgatgttgagatagcgccaagtgccgtcccctccgtgcgggatggggaaggggcgcgtgcacagcgtgagcacgcgcgggcgcgcgcggctgtccacgcgccactccaggcccttggccgccagcaggcgcaggttgctttcgctaggccggtagggctgccagtcctggatgatggtcccgcctggaagcacgtcgcgctgcacggagggtgacagcaggaggcgtgccacgtcgccgcctgcctcggacacggcctcggtgggcagcggcgagaaggtgccagaggtccgcagcgccgccagccgcgcgcccagcccggccagcagcgcggacgcgttgaatcggaccaaaaggatgccctgcggggggcacgagtgagcgcggggagggggggcgcagcagggctggcgagcccggcgcctctcggcaggcatcttcactcccacgttcacgcccac

SEQ ID NO: 32694 - DNA, 302 bp, Homo sapiens
  chr7:100816610-100816912
  hyper
cgggggcccagctggtcgtcccgggtgagccgtgccaccttgacccccgggtgctgtctcttgaccagctgcgagcagaagcgctgcagcagcccggccacgcccttcccgcgctcccagggcgccacgcgcagcccctccaccagcaccgtctccccggcgtcgatcacgttcaccgactccagcgcgatctgcggaccgaggccgttagcgcggggccctccccgcctgcgcccctgccagggctgtcggttcactgggctctcctcttcccacacgctgagcactccgcgtcaccaccc

SEQ ID NO: 32695 - DNA, 975 bp, Homo sapiens
  chr7:103629365-103630340
  binary
cgttcggggagtggggacatggagaatgaatcccaacttgtgactccattctccactaactttattctcgctccctggaccaagcgcatcgctggggccagggttgtcatggttcttgtttccaaggccccttggaagaaggaaagggatgagaaaggtgcgctggcgggcgcacccggcggcggcgagcgcggaggtgctgcggtacctaccatggtattcttgtcccggaacgtagtaggtggggttgcccgcaatatgcagggaaatgagcacctcgccctgctccccatccccttccagctccccgtggtgggtgcacaggaaaaagaagggcgaaaagcgggggtaatagccagccgccgcgcgcgccctcagcgtcgcccccagcaacagcgctaggaggaaagtctgccgggcccagccactgcgctccatgccgccgccgccgccgccgccgccgcgcgccctacgcgccgctcgctcattcagttttggagacgccgggacggaggagccacgcggagagaaggcgagaagaaggcggacgggagcggaacgggctcgggagcgggcctgggagcgggcccccgccgagaagttccgcgggagacggcggctcccaaagttactttgggccgcgggagcgcgggaccggggctgcgggcgccgagagcgcgtcgtctgccgcctccgtgcgccgccgccgcctctgcgcgacgcccctcggccaggcctgggaaagcgcccgccccgctccacaccttcttaaagccccgggcgccgcgtcccccccgccgccgccacacgtgtcccggccgctcccccgcccccgcgcgccgccccgcccgccccccgccctctcgggctggctcggcggcacctcgcgcggcgaggggcgcacgcgtccccggagtccccggccagcgcccggttcgcacccgggaggacagggaggggcgcccgccggggagc

SEQ ID NO: 32696 - DNA, 932 bp, Homo sapiens
  chr7:107642811-107643743
  hyper
cgccaggtcctgctgtttctggtgccatccggagacaaacagagatggttaattaaagccacatggcccccatctgttcccagaatgaagcctccgctcagctcaggcactctcctgggcaatggatttttggagagccctcctcggtcagcaccgccaaccccagggaacctgccctctgcggtggggaaacccagggtgaaccggccgagggtgcaaaaccctgagcgggggccgcgggaggccgcaggggccggggcttgggcgcagagcccgggggatgagggtccgcggcgctccgcgtgcgctgtctccagccaccaccgaagcaagggcggtggcgtttaatcccaggggcgtcatttccatccagtccctctcccaagcccccaggatcccacgaaggtgagcaagcagcttttgggttttccttccccatgcccaagtccgtccgcctccccgcaccgtttccacggaattacctaagaaactgaaagctagcaactggagaagccccatgccggctccctgcagccacggggacgcggcagaggagtggagaagacgcccgccgagccgcctgccctttcttcccgtcttcctttctggagaggtggaaaggaggggaaaaaaggcaaatgttcaaagagagaagaggcgcccttccatttcctgtcgctcccacggaagcggggggtgggctggaaagtggggaaaatcgtgcagccactttgttctcctcacccggcgacgcgagctctcgccctgctccgggagcccccgagcccaaagaagggaattagaaagtttagccttgggaggaacagagggaggcgcctctgctcatgcgcatacggagagccggggctgaaggggcgggcggccgcaactctgcgaggaccgggtgaggtcccggtcccaccccccggggc

SEQ ID NO: 32697 - DNA, 1348 bp, Homo sapiens
  chr7:113726446-113727794
  binary
cgcgccacccgcagcccgcccgcgaacgcccgccccggttatttatgcggcggccgcgtccgctggctgcggcttcctcggccccccccctccccgggcgcgccccccactcgcggcagcagctgcccggactcgcgcgtgggtgtgttgtttgggggcttctgcctcgccgccgcgggtgccacctcccgggacgctgcccacggcgtccccggtcgcggtaagtttcttggccctcactctggcgcgctacacctccgcaccccaccctgtcccagccacctccacgctgggccgagctgcgactttactctgctccgcgctcctcccgcggtggcgacaaagtttcgccccaaaggcagcgccctgcttgccggggcgagtgtgacatgtgtcaaatttgggctcggcgttggggtcgcattccggacccagcatcaccacttgttgttctctttcattttgctttgtgatgggggaaaaaggggtggagaggggagatttgctgttggctcacggatgatttttagtttggataatgcaaaatgttgcttcgtccggagagacctcggctggaggagaatgtgtgtcgaaacaccagatgtgtgtttgtttactctcttctttttaattgtttgttgtcttttccccttcctccccgcacccccacccccaacctcgggaggagaaacaacagtaaaaacatctggcggttagaagcacacactttattgatccaactgctgacctttatttactcagttgggcaagtgcacgcttctcgcgtctaagttgggcacttcagcgttcatctcagaagtacttctccaggaaggagagagatggaaaggggacactcctgtttctggagtcaagaaactcctgggccctactgacgcttcgggataaccgtgcacagggatgactgctgccttgatcgcgttcctttccctgtccacgcgttagcacgaccggcttcccccggtgtctggcctggttttacttttattccgctttagagaggtcgcctggctgtttgtgggtgggtttggggtgaaatcgcacctcgcggcacttggtgaggggacgtgggaggagcgcagacacctttcggtgatagggagggcttctcacttggctgttacctggaagtccacagtggccccggcgggcaggcgggcgggcagagcgcgggtccgaacgcccttcgcgctcgcggcggcgcacgtgcggcggcggcggcggcgccggcggcgcgggcgggacccactgggtggccgcgcgcgccacccgcgcgttttctgcgcgcctctgcccacccgcgaggccgcaacgcgccctgacaccc

SEQ ID NO: 32698 - DNA, 854 bp, Homo sapiens
  chr7:117512802-117513656
  hyper
cgctggcctcagcggcagcagcgcccacatctggacacggccctctcccagtgggcctcccgaaggcacaggaccagatgcacacaatgggcatccccacacctgctgggcgatggcccacctcccccaagctgctctcccgggtccgctgagcggtaccaggcacccccgagacacgcgctggcaaccacgcgcgcagcgagaggtgaacaatggggggtcaaattcgccaggaaacacgtcccagccttctcccccggccagaagcgaccgcagcggagggagtgggcataggggtcgcactggacgcagacagggagctgggagaaccgggcgacccggggccgcttcccgtggggcgcggaagggacaggagggatccccagccagggtggccgctccgctcccccccgcggcctccgccgtgtgggcatcccgaggaaggggggccccgatgaaggggcaccggagagtcccgggcttacggaacgccccgggggtgcgaagtcgggtccggctgggaccccggcgccgcccccggcccgcgtctacactagccccgcgcccgccccgggaactcggttaccgccgcctccgccgcggcccccgccgcgtcctccggggcccgggacaagtcgggctcgcagctcgcgccgtccgtcgccatcttcctgctctagcggatccgaatgcgagctcggagccgcggctccggactcagccgtctccgcgcgggcggcacttaacccgctgctgtccgggacgcgggcgcctggagccgggagccgggagccgcggcactccctccgcccctcgccaccgccctcgccgcttaacccgctgcgcgccggagc

SEQ ID NO: 32699 - DNA, 562 bp, Homo sapiens
  chr7:121512771-121513333
  hyper
cgcccccaccgcattctgattggacccacttaagcatctgcagaaaacaataaaatgaaaaaaactcttagaggtgaaactcaaaggtcaacctctggctgtgcgggacaatgggtgtccggccttcccttcccttcccttccgaagtgatgaaggagttccaatgttctgcgaacactggaaaccccagcggatccctctaactccagggcagcgaaaccactggcagcggacagagggaggattgtcggtgtgtgaattgctaccctgggatccggacccagagcggcagccgcgcccctccgccccccgcgcgaccccgggtccgaggcacgctcccagcggagcggtcctgcgcccccgccccctccaggagccgcggcgcgcacagccgggctggagcgcgcacccggcactgaggcttcgctgctctcggagcgctcagaccgcggccgccgcagccggcgaaagaggcaaagtcccgcacgccggaggacatgcgcctcggctagcggccccgggccccaccaccgtgcggctttctccagattattcctctctc

SEQ ID NO: 32700 - DNA, 889 bp, Homo sapiens
  chr7:121945147-121946036
  hyper
cggagtctaattcaggggcaaacgccaggctatatttatcaaacgccaagctccagaaagcctcggctaggaagcctcggcagtgaaatccgaggtttcgctgcttggttccactgggcctgggtgggccgggctgggccgggctgggccgggtcagatctgtgccacctccgcagacctatttcttcctccagggctcggggttgcccgctcccggaatcccggagtctccgcggcccgaaccgagtctggaccatttagaagacgccggcaggtaactggcctccccaaacgccccgaaaattaaaagccttaggaggcttgttctgtgtttgtggttttgtaaaggcaatgcccgcggcaataggcctgggaaagtcgcactttcatccacaaagttgaggagttgcaaggaataattgggtgtcacaccacaagcaaccttgactcgatcggaccccacccaggatacacacagacgcgcgcgcgcgcacgcttccgagtttccattgagagtctggaaagagcatttctttcttaagtacctgcgctcagctagagctctcccggagcattttaaatactgaatgccgagcggagaagggaaacagagtgtattaatccccactccggttgccggtgtctgcaagcctcctctaagcagcgcaggcggcagcctggatgtctgtgcgcatcaaggagacttgccggcgccagagttgtgtccacaggtgcacttgtgcctcccaaagagcgcgcgtagagaccatttcccctgcaacgccccccagccgaacacccgccgggtgtggcacctcggccgaaactcctggggcggcgcggtggagcgtgtggaggtttccgggaagacgcctacggctgcggctcc

SEQ ID NO: 32701 - DNA, 938 bp, Homo sapiens
  chr7:122526214-122527152
  hyper
cgggctcacagatctggccgcgccgccgccgcccgcgcgccccggcgcgtcccgccgcccttcccgagtcggggctggaggagctcgctgcgagctgccggctgccaccagcacatcgcggctttcctcttccagcccctcgtccgactcctcttcgctggaagacgggtccagcatggtgctcggggatccccgccgctcggcccgcggtccccaagcgcctcacccccggcggctgcgcccgcgggtctgagggagccgcggggctggctgcagcggccgcagaacgaaaggaaaactggccagggctttccggacacgtcgagttagattcaggagtgtttcctaccaccagggcgaaaggggcgggcaggagccgggaggaggattgggaggggggagagggggagccgccgggactgaataggcggagttagcgttgggggtgagcttgggcgcctcaggaattgctccgccagccccgggcgcgccgacccagcggttccccagagcccgccggcagaggcggagccgcccgagcgcccggacgcaggtggggaacctgtggcgcctacaacaagcaacacgtggaattgaatgttgaagagccgcgcggggccgcggagtgcgcgtgcgcgcgccgccgctgctgcccgggcccgcctggagccctagcacacagtttgcaaaggcggggagcggccgagcgcgatggcccgtgtaagcgtccaccggggctgctccgactaccctcaccctaccacctgtgatcttttctccagcaggtggaggtggaatggggagcggggagggactgttccctagcaagaggttagggggagcggccgagacatctccccaacccgaatcggctgcctaggattgaaccccagcgcggaaaagcgggactggagcccttcaccacgaagtatctttgc

SEQ ID NO: 32702 - DNA, 1648 bp, Homo sapiens
  chr7:123672031-123673679
  hyper
cgggtagtgagaatagtcccaggaacaagccccgcacgtgcggagtcccagaccccaggacagctcccacacgtagatgaagatcacgtagatgggcacccgcttccaagtgccccaaccgcggctgtagtggaggtggaagtagagcttttccaccacgaaactgcagctgccgtacataaagaaggaccagagcgacgtgtggccgctggttgtcccgtccccctgccccagtacgttgaagaagaaggtgaagaagatctcatccagaaagccgtgcattccgaagaaaagaaagcggggtaggtcgggcagcccctggctgggggctcccccggcgcccctggggccacggggtcgtcgccgccgggctccggccgcagtagggacccgggcgccgggagggacggggagcgcgcccctccgctgctgctgctgctgctgctgctgctgttgctgctgccgccgcctctgtcgcccgtaccgcaagcgcaggaagcgcttcaggaacacttggcagtggtagagcgccagcacgtactgcagcgccaggtccagcgcccctggcgccaccgcgacccccgccccgccgcccaggctgagtagtagcgcctggcccgctagggtctgcagccccacgtgggccgaggggtagaggaggaaattgaagacgaaggcgttgggacagcgccgctgctgcaggtacaccttctccagggcgaaatgggtgagcgagtgcagcaggcagcggtagggcgaggagaagcctagcatccgcaggtccgggctgcgggcgaagcgccgggccgaggacaccagcacgtccagggtgatcccgtgcatcccgtagaagtagaggcgcatccaggcgggcagcgtggcgctctcagccggcgcttcagcagtggacagcggctccgggcagccggctgccgcctcgcttcctggcccgccaggggcccccggacgccgcgccgcgccgcccctccgtgcggggccctcgctgtccacgtcgctccccgccatgggctcggaggctgtccgaacgcccgaggctgcaccgccgccgctgccgggtgcgcggagctgcagggccgagcggccgagccccgcgccgcctcctggccgctgccggcccccggggggcgcgcagggagctccgtcccggccgcggtcccgcggcagcgggggctgatgcactcaggggactcgcgggccgcccggctagcggaatccccccgccgtggccccgctgcgccctcccttccagtcccgggcgaggtgccgcccgcccgcgcccgctctagctctcaccctgcgcggcctaacgggcaccgcggcccagccaggggaggcggcgccggggctgtgaggggaaatgcagaagcttgtggaagccccatcccctccgctgcttagccccgcgcctccgctgcaggctctgggaacgtaacgcgagcagcggcggccctgcccccgccctgccaatgcccctctccgcctgcctcgacctctcccgccttctcaggccgcccccacgcgcccgcccgccgcaccgagtcccacagggtctgctcgggaaggcccggccctgcttcttcctcccggtgcgcccactcaacacaggggctccggtcgtgcggggggc

SEQ ID NO: 32703 - DNA, 899 bp, Homo sapiens
  chr7:12442871-12443770
  hyper
cggttggaggtggaattcgtgcagtatggaattcaactctgttctgagaattcaggtccacttgcggctagcataccttgcagatccggcgaaagtttcttacagtaaattacaatgacctcaaagagcaggataacagcaggaaacaaccaaaaacagaaccaagggtcgtagagtaagaggaggcaacaaccgcatgtgcgcaaaagaaaagtgtagagttttcaagctggaaattgaccttttcaaagacagcagagggacagagaggaggcgggtgaggaacaaacatcgcttgctgccttaaaacgcacagggacgctccccaagtcgtccaaaaagtctagcctagtccctctaccgcccacgcggcgccactgcgcgcccacccccgcgcgccctacctcgcttaccttccccccaggccaggaacatcagcgcgatcaccagcacgcaggctccgccaggcatcgctgcttccgcaggtggggcgaaaggcgtcgcagagcccgggccgcgggtgccaggaggatggggccacagcagcccctcgggcctcctttcttggattttctcagtctgttgctgcttggaacagggaagctccgcgtcctcgttctggggtgcacccagtcctttcgtgggatagagccttcgcgtaatccgtctgcgactcctcccttcccattttggctgctggctgacctgaaagccacgcccaacctgtccccatagcccagcgtgtaccggcagtggctccgccgccttggatgtcaccgtgcagtcgcacagccaggagtcaagctacagggatgtagctctccgcccgctgcgtcttgctgttctaacagaggctgtatgaaaacttggtaatcctagaaactgctcagatggacctc

SEQ ID NO: 32704 - DNA, 332 bp, Homo sapiens
  chr7:1270815-1271147
  hyper
cgcctctcggtctcctggattggctgggcctggtcctcaaccctgcgccgtcccctcctctcccgcaaggagagacaagagggtcattgaagtcggagtcagcgtggatcggcccgtccacgaccttcagttaggaacagggccagactgtgggtccagtcgcagggacaggcagtcgtgtggcaggacggggtggccttgcgcccgccaacccaagcattcccctcctgagcgtttccggcaccccccaccctccccggcccaggcacgggcacctgacccggagggacgcagagatgcgcacggtcccggcctgcccttccctctcacgc

SEQ ID NO: 32705 - DNA, 968 bp, Homo sapiens
  chr7:1276994-1277962
  hyper
cgcccagccccgccgcccttcccacctttccacgcctctctccgcgggtggggcccggagggggccccgcacttcccgggggtctgcgcttaatgcgtccttttgtgtgcgtgtgtgtctgtgttttctgattcaacacatttatgcatctgcggctcccggtccccgcccgccccggcgctccccctcctaccccgcgccgcacacgcacgctcacatccgccgcgcgcccccgcgcgcactggcacacgccggggcgcgcggcgcggggtgacggagccgggggctgcgagggccgggccgctgggctcctgcagagttttgatatgaaagtaattattttccggtggctgctgcggggactgggtttcttgcccaaagggttattatacattaccgatttctagtgatatggaatcacataaacttcctacaataatagaattagcatgaaaggctggggtgtcaaattgaaattggagaataatagcgccggcagctgggggagtgcgtgcgcatattggagcggagatggggaatcgtggggcggaattttcatgagctgcactctttgtcagcgctcttgtagccggctatattaagatagatgcccaatgatatccctcattgttctgtcgcttatattgatgttgctgcgttatcagcctattgatcatgtgtcgcctgtaataggacaggcgccgccaacgcgactctttacaaaagccgtgcacatttgttctaatagggtccgggtccccaggggacccttcggggacttcaggacatctgcagcgaagaaatattagcaaacttggctggagcctgcagccagccccgcgcccccgcccctgcccgcagccgccccatcccaaagtgaaccgccacccgtcctccatctccccccacccccccaaaaaccccaacccactggcctcaattttcctgggccctgggtcctcgttgcc

SEQ ID NO: 32706 - DNA, 923 bp, Homo sapiens
  chr7:1280235-1281158
  hyper
cggttagatgcagactggtttaattttgttgataaatcggttcgttgggggtggggacggggcgggggctgtggggagtggggagtgaggagagaagggtgttgtttctttgctgatttatttttaacccgaggttgtacaagcccctgacagtttggataaattagccaggcctcgcagtctcctaatgagagggtattatttcggcacctcggaaggagcgtgaaaaatgagagagactccatccggaggtgtcggatcgattcaggatcagggtgtaaattatatacaactaaatatccagccgcccataccgctgcttaatacggagcttagaaatgcaacattaaacaaagattatgagagatcgacgcctctggaccgagcccaattcactgctcagccgggtcagcccctgccccgcgggccgaggatggggagggggcgcgcaaggagtgaaaacggcgagtttgggatgagagccagggccaggaggggagcctcgccctcgctactccttccctttcttctaaagccagggagctccccgcccagcattgcccgttccttcctccccgccagggcccagagaaatccgggctccagcaccgggcctcagtttcccggaagcggacttgggccccgatcccgggccctctccgcccttcccaggtctcaggcgtcgctgcgtggaggaggcgcgcgtggctcccggcgccgatgtcccggcccggaaccctgcccgccgctgcgactccggggcgggggtgggtcagcctcgggggcggccggggtgggcgtggaggtggacgcggggccgcatattgggcgcttggttctgtttatctcacttagcggtggagggactggagggaaggggcggcccgaagggaggccttggtggggcccagcggctccctggc

SEQ ID NO: 32707 - DNA, 816 bp, Homo sapiens
  chr7:1286841-1287657
  hyper
cgcgtgggagcagcgcgcggtccctccccaggaggcggtggaggccgaagggagtcgccgggtacccggctcaggccgtgtctgagcgccagggatgcgcagaaatgggagcctggccgcgcctctgcagcggccttggaggagcctctggagcgggccccgcgggcgcgtggggtgggacctgctggagacccgcaggcggcggcggccaagcagggtcaggcggttggcaccacaggtcgcgccctcggctgcagtcggggcagctccagggggccgcgtacctcccgcttcacggctacgcgtgggggcggctccgtcctggcctcaccagcctccccggagcccctgccggtccccagcctgggggctcaggggtcccgttgggcgtgtgtcccgcccgggccccggtgtggggggcgcgcagtcctcagggccgcctccctcccgcccccagcacagcgccccccagctctcagccggtccttgcggccgcgggatcccagccccagcagcgggaaactgaggcccgcagcaccgatgcgcgtaaggcagctcggatggggtcagaggggcgggaaggcggaaggcgggccgcaccccccggaccctcaggacctggagcgcgtggagggcgtggaccaccccggatcccccaccaccgggcgtgtctgccaagggtgtcattgggcgccgcgcagaaggggcttccgaggacccgcccctcccccgcagccgtcagggcgctgacggaggcagctgcgcctgtttaactgggagccggttgcttggcaacccgaggcggctcattaccgc

SEQ ID NO: 32708 - DNA, 987 bp, Homo sapiens
  chr7:132261071-132262058
  binary
cgcgggctggctccgggacactgaggactcccgggtcggcccaggtctgtccgaccttgctgccctcgccgcccgcccggccccactccccggcgggccggctccttacctggacgcgccgcgtttccctccttcagcgggagcgccgcattgacactgcagatggagcctatgccgctgcctctcgccctcctctgaacgtgtgcgtgtgcgcgcgtgtggctgcctcctccagccccagccccgaacgcaaatactccaccgaggcacagggaagccgggagcagccgaggaacgcggagggcgccgaatcagagcctgcggggcttgacagcttctcttgcggcgtccaaggtgggcgtaatgtccaacaaaaaggtcggaaaatggggatcgattccgaacacccctttcctccacccagccccggagcccgagcagcggcggcggctctcgggggctgcggtggcgacgccgggctgccccccttcgtccccacccccgcgggctgaatgtccttgatgccaagcgggcacagcggcgtcactccgcgccgcccatgctcgcccggtcgggccgctgcccgggcgcggcgagtgcgcgggggacccgccggggagcgctctcggcgcctctgcgcgcctctctgggtagcggcggccgccccccggcagcccgcggccggccgcgccgcggcagcccccacccttgccgagacactcgccgggcagtgccctggggccggggctggggggccgcgggagccgccggctgctccccggggaggcgcggggctgcggcggtggtggctgcggcggctggcgctgcggcggcggagagctcggccgcgggccgagccgggcctcccgggcgcgcccccggccccccgggcgggctgctcgcaaagtttgcagggggcagggagcggggccgccgctggctcggccgccgccggagctcccgggctgcctgctgccgccgcggctc

SEQ ID NO: 32709 - DNA, 607 bp, Homo sapiens
  chr7:139208222-139208829
  binary
cggctggggagatggagctgagttagaaccaggtctcccggctccaagactgcgctcccagctcgacagcatccagcctccagcccaggtggcggggtcggggagccggctgtccccgctcctccgcgcctcctccctctccgcccctgccccgccccgcccgggtccacggctcccggctcccgcgcgccgcctcgcgctcctccccagcccggctgtgcgtggaggctgcggctcggcggggcaggcgctgagcgcaccgcggcggcacccggcgcagaggctccagcgcggggagccgggctcagccccggcctgccagcgccgcggtcctagcccacccgaggccggcctggggggcccgcagggcgcgcggagcgccgagtgcgcgtcgggctgggccccgcaccccggtgcaggagcgcgggcgcggcgcggcggagcgccccgcatggagccggcccgggagcccccctcgcgggcccggccgccgccgcccctcgccgcgcgccccgcgcccgcccccgccgcccccaggccgcgttcgcccgcagaggctgaggcccgcggccccgaggggctgctgcggcgatccgggtcgggctac

SEQ ID NO: 32710 - DNA, 1005 bp, Homo sapiens; identical to SEQ ID NO: 29375
  chr7:1498587-1499592
  binary

SEQ ID NO: 32711 - DNA, 968 bp, Homo sapiens; identical to SEQ ID NO: 29376
  chr7:151572574-151573542
  binary

SEQ ID NO: 32712 - DNA, 169 bp, Homo sapiens
  chr7:151574936-151575105
  hyper
cgcagtggatccgcggtaagtgcgtgtccccacgccgcgggaaacgtggggctcctgagactgcggaaagaattgggagaaggggagggctcgaagacccgggcgagggttcccggtgcggcccaggtcctttagagccccgggtgggcatccagtaccgcctgctgcc

SEQ ID NO: 32713 - DNA, 793 bp, Homo sapiens
  chr7:151722447-151723240
  binary
cggaacacagatgcgtgtcgccgcgcaatgggcacagcgcatacagcgcagagctcccgggctcaagcgctgctcccgcctcagcctccggagtagccggggccacaggcagggcatttgtcattaatggggtcttttgagaccgcgggtgacagacaacaggagccaggccacgcgcggcgcctctgcgcgaacgctagggaggactcagcgcgcggcggccggtgacgtcagggcagcgagaggtttcgtcaccgcggcgcgggggcggggccgcctgtcacgcggcgccggcggacgcgcggcgctgggcggaggcagcggctcggggactgggcgagggccctgggcctgaggaggcgcggccgccactgcgcccagcgcctgcgcgacgcctggctgctgggccccggggcagttcagcccgcgccgctcctgcgggtcggactggggctgtggcgggagagaagatgccgcagcccgagtcccagaaggcggcgatcctgggctgcgggcaaggcggtgagtaccctctaggcggcggcctcccggcgtccctcagcacctcgagagctgcggcggcggcggcgcgcggggcctgggcaggctgggggcggcggcggggcagcgcctggctccccgcgggtcctgggctcccgcacgccccctgggcgaggctcgtgtctccgggagacgccgctgcccccgcgcctcccccagcgtctcctgaggcttgttcgcgggcgtgggggcgaggaccagggcgctggcctcgttttcgcgtatttaggac

SEQ ID NO: 32714 - DNA, 967 bp, Homo sapiens
  chr7:155165412-155166379
  hyper
cggggggcaactccacctcccctggggaggcctcgtccccgctgcagggagactaaagcgtgggtccgcgaccagccggtttaggaacgaaaactctggaactaaaaacaaaaaataaaactggtgagtgcgcagcgtggtcagtgtttccctctgggtaatgcttggccaagggggaagatcgagtactcccgcccacatccgcctcccccaggagggaggattccctctctgctcacccaccctgacccacgcctcccgccaggtccactgctcagacaaatctgtaggtttctgagtatccgtatctcgaaaagcttcaatgcacaaacgaggttttaagcccatcgcggcttcgcaaggggaaggggctgcttccctaaaaacaaaacacaacaaaaaaggcaagggggtactcttgcagatggactggaattagtaatttagccagggtctcttccaaactcactgcaaaattcgccagcgtctcattcttcacacacggggcaccacacgagaatcaccccctccccagaattttgcaaagcacgtttgctgagttttctcgcctttccttccgacaagctcgaactggaaccagcgctctcccctctagacctgcctccgcgccccacccttcttcccccacacagtccctccgcagggagaattcaggtgctaaaaatgctcgggcctcgcagcttcctccctcctcctcggttcctcgaatgacccaagctgcctctttccgggcccttggaagacggtgcgaattccgcggcggcccgctctcgccagcgccacagccctgactcccacccggaggcctgagttcaaccgctttcgcttccttgcgggccgttcaaccctctgaatacgcagattcatttatttatgttttttaatgtagtaagtgggcagctaaatgaattgcaatttgtcatttttatggttaatttgaaatctc

SEQ ID NO: 32715 - DNA, 1470 bp, Homo sapiens
  chr7:155166425-155167895
  binary
cgcgtgtttcggcagcagtgattctaacaggcgttttatgttaaattacagcagaacccagaacaaaagcaggcggcggacttgcagtcccagcggcctcggccggtccgcgctgccggtgtgagccccgaaggaaagcaccccaagctggctgaccccgcgcacccccggccacacccgcccatcctggcttcgagattaagaagcccagtttggcaccccaattatgtttggcaatgtccccggtgccccagacccgcactccgctgcctcctggcttctcatgcccgcgaagcacggcctcgccctgggcgcggggcatcaccggcgcggaggcccgagggcgggtcacttcggatccctttcttcccttcctcgtctctgcctcttttcctttcttttctccctccgcctctctgtcagctcttcccgtcgtttcctcggcacccagctccagtccaggcgctgtcccagggtaggaagaagggcgatgccccttcttccccttctctggtcccctccccagcctccggctccccaaggtgcagggctccggcgggggctgggccgggcgggtgggtttctgagccgcagcgcttggagctgggggagcgggagcaggggcggcccggcgggcgggccgggacccggcttttccggctacccgtgggccaggtgcgggtttcagcacgcggggcgcgtgtgggcggaggcgccggggcccgcggctccgcttgttcgcgcgttgtcgctggcgaggcgtttcttgtccccggcgcccgctcggtgccgtctcagtgagtttgattgaaacgcggctgcgggaaggggtcgacagaggcaagctgcgagcaaggcgggggtgggggcgaggaaggggacccggagagctcccggagggcttggccggccaccgccgcgcggcgctgctcggggactgctactttgcaaggcggcggctgcccctgcggggttcgggttgcagggtcaagtgtcacgtcctccgcaatctccaatattcctgtaatgtatttaaatggacgaattcattacgcggggccgtgtgaatggggcgaggccgcgagcgcggcgcgatcagtagcgcccactaacagttcgttctgcacggcggagcgcgagaccgcggacccacggaagccccctcaatggtgtttgcgtcctcgccgccaccggcttggtagggtcctttagggaaggaggaagagttcaggcacccggacagatcctaatggtctttctgatttttctttcccttcggtccgctttccccgcgacctcctccaccctcagtccgcctttcaaacgtcgtccgcggggatggctgcgcgatggagaaattggtctcgtccagagacgcgcgcacagccgtccccgcgcacacgcgacacgcccagggccggcgtccacgtgagggcagcaccctaggtcgggtcagtcaaaccccacagc

SEQ ID NO: 32716 - DNA, 853 bp, Homo sapiens
  chr7:155174253-155175106
  hyper
cgggtcagacaaaagccaacttgcatcttccgctccgaggggatctgggcagagcccgggtacagccctgcgcggccccagggagaggggggagagggcgcgtgtccccagccctgccaagtggcgtggggagcgcgaggccctcctcggtcagagccaccaactctggtctccgtggacatcccccttcccccgcccgctcccgaggctctagggcggcctcctggccgctgccttctcgcacccagggtcttcggcctgggctccacacctcaggcccctcaagtaatcggcctcttggtggccgggcactgcctttccggctgctctctgcacccgtctgcccctccggcctcccctggcggctacaggcgtccggggccctcgctccccagctccaggcgtcccgggagccaggcgcgcagcggggcgagttctcgtgtccgtgtgagcgcgggcgtgtgtatgcgtgcgcgtgcacgagcgtgagtgtgcgtgagcgtgagtttgagtgtgcatgcgggtgtgaatgtgtacatgtacacgaatgtgagtgtgagtgtgcatgagcgtgagcgtgcgtgtgcgtgcgagtgtgcacgagcgtgactgtgagtgtgcgtgcgtggaagcgcggcggggagcctggctgaaggcctgctgcctgcatggctgtcagagaaaaacagaagtgggagcctgctgcgggctccgagaggacttgatgggagccctggcgcgcgctgggcaccgcgcggtgagtgtcgggggtgggggccgcgggtctccagcagcccctgccctgtgcggaccgccgccccgagggtccctgcttgcgggtccggggctgggc

SEQ ID NO: 32717 - DNA, 995 bp, Homo sapiens
  chr7:155242121-155243116
  hyper
cggagagcggagagcgacagggaggcagccgaagacttgaattttgaaaggggagctggcggcgaatggtgaatgagacagctacttaggaagcgagtccagccagcccgggaggcggtggagacccacgcccggaagtaaccggattaggtctcagaatgtgatcgccccccgggtcccgggggagacgccaaggacgcgcaagcggagggcgcggagacaactgggagtcagagtctccatcacttgggctgggaacgcctctgggcgttccgacggggtggcggtgggggtcgggggaggcccttgagaaccgtgcggcccggggagagcccacccattgctgagccccgacacaggctttgaagttgctgcagtggctcagcccctcccccgtccggccctgcgcagcgcggtgccgcagagtccaggccgtgcctccgtttcgtcgctcagagcttattgcggcggctcattggaccacgtcggtggggcgatcgcagcctctgatctgtgagctgcaaagagctccgaggttcattcacaaatctgcgcccccagccgtccctccacgcacccgagccacgtcccgggacccggagagcccggggcgttgggcgctgcggaggaggcccggcttctgtcgctcccttcacctcccagcccgcgagggacttgggggaagggggagcaagctttcgctccggaagaaacgttcggaaccaaggagtctgactcctggatccgggtgcctgttggatccaggctcccactcccgggccctccggtcgaaccaagggtcccgacagggcccgaggcacccgcattcctaggagacaggagctcggccagggcgcatcaccgggtcctgctccgagccagaggatgtagtgtagacacccacccccacaccgcccctccacagagctcctctccccttggggcgtcgctgggcacagggcaggtcgctaggaatccccagtaaaaccacgctc

SEQ ID NO: 32718 - DNA, 974 bp, Homo sapiens
  chr7:155243127-155244101
  hyper
cgcggcttcctcagagggcgctggggaaagagaggggacctgatttcttcgaccctcggaggaaaagtgctcggggcctcctagggacacagccctggaagctcacctcatcttagcttaggccgcggcgaggtggggaggagagttaggagagggggagaggggctctgcgccctgcagaggcctttaattctggaggaaaaagactgggacacacccaagcgagccaaggcccgagccccacgcacctccacccacccggggcggcgcacagccagctcctgccgggcgtgagcactcgatcaagggagcaagtggaatgaaaatccagctgggggggtccccatcgacacaactgtcccgcagtcgagcttctggattcctgggagatgtggagagcctggggccggctcccgctccgcagagcagactggactgccctaggtgcctggaatgcgcctgcaccctgtccctcggacccgcgggagacccgtgttccgcaagtcccccttctcaccctagtctgcccctacctacatcccgccggcgagtgtgccaccgcgaggcgcctccttccccgggaagggagctcccttccgcgcagacccgcattgcccttcttttcgctcggttttgttttccaggggtagtttctgcagaaaggagattctcctccgggccgaagggctaccagcctgcagtcagttcagccccggaccctgggagatgctcaccactctgcggatcttgatccgaaatcctttctggccgcccactgcggagagtgtcctcgtagagaggttttcaatcgaaggagcctgggctccacattttgtcttcaagcctgagctttcagggctgctttgcacgaggtgcagatgaacttgtgtctgcaaacaagacagaaaaccctaagtgccgcccgaccttcctcttttggggaacccgcactttgtcctgggagcgtgcccagc

SEQ ID NO: 32719 - DNA, 957 bp, Homo sapiens
  chr7:155246271-155247228
  hyper
cgcccccctccccgggcgagcctgggctaagtatcaagtcaggacagaagggcggtccccagtcggctcctggcccactctgcttccccaacacctagggagcttgggctcagcacaggcgcttctccagcgatcggggcagaaccaggacgtgcaatgcgactgcccccccctccccgctccccggcagagcttctgtccgcgccaacccacccaccaggctctgcccgcgccacgcgcgcccctggcaggcctggggcggggaaaggcgaagcgctgggcacgcgagggcctgtgcaccccagttcctacgacgctcctggcccttttcaggcccgccgctgccgcatttaaccccctccttccgggggttattctgaagaagtctcagaccctagacccagcctcccagaccccgtccccgagctcgcccggtgggcctgtaggccggtcctccttcgcccagaggagagcgcagacacgcaatgtccgcccgttggccccgcccgccccacccctgctccccgcgccccttcgtttcggcctttgtctacaggccgggtcggaacgtcagccccaggagccgacggtggctctctgctcgccccggggaaggtgttgctctcctatcggccccaattccccgcccggcgcctggggcttggctgcggggctcggctcccagccgagggcgcagggctggccaggcctgctttggctgaggtggagatctcgctctcagggattgttgggcgtctctgccccgcgagtaacgagaccgccgcgagcgaacggctttcattgagtccatttttccaagtgtcaccacgtcaagctagagaagcgaggcgagtggaggggacgcagaggggccggaaaagtcacccttctctggcctcgttttcagataaaaacgggagcctggctcggcatccgggcgcccggtgtctccggggc

SEQ ID NO: 32720 - DNA, 996 bp, Homo sapiens
  chr7:155249624-155250620
  binary
cgggtggaatgcggccgtatgcacgcgcctccctgcacacgcacacacacgcacacttacaataagtgtctgcaggaggagtgtcctgcgcgccagctctgcgtttaagacaggaagctgccgggttaccgagtcaaatgggagtgacactattcctctccatcagcaaggaaagcggaccacaaaagtccctttgtatctcggcagctcatttaatattatttatgcattttgtgcaaggaattgtgggatttcgccccacggtaaacaatatggaaatcttaaaaatagcgatcttcctgtgcgtgtccacctacgcgccccggggtgacctggcggggctgtcgccgggtgactcacacccctgaaccgcgaagcgacagggaaagcgcgggcgagcgcaggagacgcggtcgggggtctctccgggttcctgggctcccgcacccggagcgggggacgcggccgctttaaggggaggaggggcggcgggctgctcctgtcacccagcggcggccggagcgtcacgtgggcgcgcggcgccgcggccattggcccgaggcacgtgtccaggagaccggcctgcgacgtcactcgagggggctctgttaaaaataagaacaaaaatccagagtgaaagtgtctcaggttgcgccgagtggcctggaaatttccgagcccgcgcggaggccgaggcggcgagggcggcggacggccggggagcgcgggcggcccagcccggcccggccgggccctggcctcgcgtctctcacccatgcgactcgggccgcggagctctgcggggctcggcgggggcgcggccgcacgccggtggggcgccccggcccgcagcggggcggcggccgcgaggagggggcctccatgtgcgtgcgggcggtggcgggcgcgctgaccgcgggcgcccggcaccctcgagggccggctagggcgtgcgggcggggacggccgggcggcggcggcggccggagccggccc

SEQ ID NO: 32721 - DNA, 943 bp, Homo sapiens
  chr7:155259210-155260153
  binary
cgccctgcaggcctgcccaagcaggcgcccccgcgagagtgcgggacagagagggcctggcggggctccttggcgctgagagccctccttctccgctgcacccagctctgccaacggggctggatgagtgggggctggagtcagaatcccagggtctacacccgccgacagcagcaatgccgacccgccctgcctttctcctaaggagcggagggaaggagccatgtgaatgaccccagcctgaccaccaagagggcgccagcatttctgttttcctagagtgaaaaggtcaaatcgatgggggctcctacaccgctggacacaggtgcgcccgggcgtccagtgcgcgcaacacacgcccagacactctatatgcaaatatgcctgccgccgcggagccggccgggaggcagcgtttgttcgctggggttctgctagaagtcattctgtctcccgctggtttaatatccgccctctgcggtctccgctcgcctcggcggctcccgaagcgcccccgggagggtcccggctccgccgaaaactgcagcctgccaggctgagccgccgcgcgctgggaggttaatagcgactgacgacaaagggccaaggtgcaattcctaaagcggggattcgccgggtgaggcagaaatcagcctccggggagatgggtccccccttcccgacgcgcccctgcacacactgctgccccggcgccgggcctccgggcggggacccctcttccgggcatcgcggccccattcggcggagagctaggccctctccaggcctccaagtagggagcggacgtgggtggtggggaagggaagccgccggcgggacggagagtggggtcccccggaccctgggtcgggcaggcctggcgctggcagctctgttgcacagatttgtgagcgatgctggtggccgcattgccgcgcggcgc

SEQ ID NO: 32722 - DNA, 762 bp, Homo sapiens
  chr7:155302587-155303349
  hyper
cggagacaaaacgttcggggccgtctagacaggtcaaggtgcaggatgcggcgtccccgcggctccttccggaagggggcgtggagccgccaagggcgccggaccgcgccgcagcccgggcctttgcgggctttttccctctccaccctctgctgatcaaagtaggaagtttgcatgacaaccgcagtgaaaggggctgaatcacaaatgaactcgatttctgcagtgttgatctatccagcctccattgtcccctttcaggcgcagtatgaacccttccggtgccagcggccgcgctacattcacaggcgcgctcggggcgcacaaagggtctccgcgcttcaccgccatctggccacaaatctcatcagcggcgcggcggcgtccccttgaaagcgcgggcggagggtgcgcttgtgttcttgagacccaggttccattacaaaccacccagcatcgccaccggcgccccccgtttcaataaggaagccactttgtcaaaacattctaaaagaaacttgggaagaggacgcgtcagagaaataccgccgccgattaactatcagctgcgcctcccctgtgcacaggtaacatccctccttctcccccacgactcggctggagcttgattttgagctgctctcaaggcccaggcactcgaatcggaagttaaatagcttatggactatttaatagaatataccaccacacgtatctaatcactcaaataccacgcttttaaaactcatgaatgttttaatc

SEQ ID NO: 32723 - DNA, 560 bp, Homo sapiens
  chr7:155604534-155605094
  hyper
cgctccggtgttttcttcatccttaaatatgatgtcggggttgtaattgggggtgagttccttaaatcgctcggagtttctggagatcttcccttcataccttccgctggcgcctagggtcttctcggccacattggggataaactgcttgtaggctaaaggggtcagctttttggggtgcctcctcttcccgaaccccctgcccggtccgcacgccagtcccgagcataccagcagcgaggagacgaggactagcagcagacatctcgccagcagcagcatctcgcccatggaactgatgacttccgagctgtccccgtgcgggtccgtgcgcgagtgcgcgcggcgggtgtgtgcgtgtgcgctctctcttgcgctttcccttcctcgctccggctcgcccgctcgctctctccctcgctggctgcctcgctctttctcttcctatataaccttgcccgccgcggctgcgggggactctccaccgctccccacccagacaggggctggaatggcaggctgccggccgctgataacggaacacatcggagttgggtcgc

SEQ ID NO: 32724 - DNA, 1370 bp, Homo sapiens
  chr7:156810052-156811422
  hyper
cgccctctgcctcaccgaggggcaaaccggctgaggacccaggcacgaagagtgtcaccagctctgaccacaagccccgtagaccagggctgcgtccataatcggggttgatggcattagttattatattataacctccttgttgcgtgattctagtaatttattttcccacttggcctttgactgggctgggctcctcccagtggaacaacagggggtgtcgtgtttgcagcagaaacgcacactgggatcctttcttgcaacagctgggccggctgggtcttttctcttgtcttctgtacacaggcccctctccgctgtttctgcagagaccgaggtgggagggagaaagaccctccagccctctgctcccaccctccccgcagtctccggggccctgtgctgcaggcaagataatttggctaatgaactcgttaaagggcccctggtgacccgccccggcttcccctcggcccatctgggaaattccattgaaaggctggagaaggttcctcagccccgccgccttctgtcgctgctagaggcgcgaacccggtgactctgggccccttacattaaaataattacccggcggaacaggtggcccactcccggcgcctgggtgcatctgggcccccggagccgcagcccgggaggaggggagcggcacgcccaggggagggaaggtcaggcccgctgagccgggagccgggagggtagagaggggctttcctagggacagacggtcccggggcacccaggcctccgcggccgagcgggctgaggcctaagcagggaggccgtcgccttcaggcacaggtaagcgcagcccgcgcaccgcttgggacgcacctggccacctgcgctgccacccaagcttggggtatgcgggtgcccgagcagaaccccgaactcgcaccgggctccgaggttggagcaactcctaacactgggctcggagctaggggcttgctggaggggcgcttgccgcgccggccctcggggctcacagccgggcacgccggactgcggcgagcgcgtgggcgagcgtgtcaggagcgtgcgccctgggtgcgcgcgtgcgagagcgcacgtgtagggtggcttccagtcctcccttcccgcctgagaagcgtccacgcggagttccaggccgggcgctggggaaggaggtcccggggacgctgctgaaaagagagcggccagcccaggcgcggggccaagcctattgccaaaaacatattaccctgcgacattctgtaaatgagataatgatccataaacccggatgatagatgtggcgtgcctgcgatgtcttctctaaatgagctgctcgcatcgactgctaataatggtgagtttatggaagc

SEQ ID NO: 32725 - DNA, 949 bp, Homo sapiens
  chr7:156813700-156814649
  binary
cgtgccgctccgcggttcccctccccgggcggatccgcgcagggagagcccggcgggcctgggcttgggcctgggcctggttcgggggtgcaggccaagaggggcgccaggccgggctcccctacccgagcacgtcagttccaccccctcccttcttgctgccctacaaaactttaaaatcactttttaaaagaccgtgtctcctctcggcagcccccctcgacctcttcgcaggcgcctgagcagccccgcaccgaggggcgcacctttgcttttgcgagctgcgcggcgcggacacccgggctgcgctcagcccccacccccacaggcttcccagccgtctgcccgagttcggcttcaacgggagcggggctccacttttccttaattgacgaagtcacggattcctcccgggcggatttatggggctgcgcgttgtgccggcgcccgctgcttcgcatctgcgcgcccgcccggtgccgggccccgccctccgcctcagccccaagctcggcccgcgggcccggccacaggtgccccggcggccccgcctggcccgagggaagagggcagctgggaggggccccggccgccgcccgttcctgctgcgggtgagcaccaggtccccgcgggccttgcgcggtgccccccagctcagcgtggcgctcggcggcccaaggtctggggcgtggagggcgtcagcacctggccgactcgccggttcccataggctgcctcgccccgcgttttcctagcgggggatggcggctccccgtgtccgcatcgctgccgggccctgccaccccaaccccggccgcagtggctggaagccgtggccttttccgggctccgagagccggcggggcggttttcctccgggtttcctcccgccggggtcttgggagcccctcagcctcgccctccctgcagggagaaacctgtctactgc

SEQ ID NO: 32726 - DNA, 851 bp, Homo sapiens
  chr7:157476570-157477421
  binary
cgcccggccttggtcctggctgctacaagatgagaacaattagcaaacccctttccaccacctaatttcgcgtggtaacaaaatggatttttccccatgaatgcctggccggcctattcattatctctcttctattagtaattttctgctccgtattcagcctcccaactcttcatttcctcccgtctcccagcgtacacagtgcctcttatgtcaggccgggcccgtttttatcttgtaatcataaaggccaccaaagcaattatcgccggtcttgactggaaaagctggtcattaattagcctccttttgccttcggtgcagcggattagctggtgccgggactgagttaatggaaacgcgggttaaatgagaaaagacgcccggattttcctgcctggatgcgcggctcggaggaggaccgcgaggttctccagcggcgggaggcggtggagccgccgcggagagggagggaggctttggagagggagggaaggaaagggggagggagagggaaaggggggagagggagaggaggcgcggggtgggggaggggagtgagcagggagccgggagagggaggaggggcgggaaccaggggagcggcccgaaccccgtttggtccggaccccgcagccaccgctgggtctcgccgccgggtcgcccttcgcgtggagatccggtccgcgccccctccccggtctcctcccctcccctcccctccgcccccctccctccggcccacacagcctcttccagaaagaagtcactctagagccgcgcgacccagccccagagtccgccggggtccgcccaccgggtctcctgcgcgcccctccccgcccctcccc

SEQ ID NO: 32727 - DNA, 513 bp, Homo sapiens
  chr7:158379293-158379806
  binary
cggggactggaggttttatgggtttaaaacaggggcgtccgcctgggaaagcagcggcttccactccctcgctgccgtgaagctgccgccctccctttcctcccgcggctgccacggaggaaaaatgtcctctgatttcggcggcgctgcccgcgggggggtgcgggggacgcaggtagaagcgggtgcagcgggacatccgaggcccggcccctcgcggcacacgcggcggaacacgagcggggggcgcacccacgccggaccagggccgcgcgctccagggccaggggagtgccgagtggcggggctcggggcgtgaggcccaggagccggggtagaggcaggaggcggcgccggggaggaaactgaggcaggggcgcgagacctgctccgagcccccagtgaggacagagaggcgcgcgacccgtggccgggggcttgagacccagagcctgggggtgtcgcgctggaaccccgagacccccggagcccccgacccgctcgccaaggcgc

SEQ ID NO: 32728 - DNA, 377 bp, Homo sapiens
  chr7:158380259-158380636
  hyper
cgggagctgccggccgcgggggacggacgaaggggcggcaggcaggacgcgtggcggcagcagcagcagtagcagcagcagcagcgggagcggcggccccatccccgcggcctggccggcggcgctcagtccatggccgcgcgggaggcggcgggaggcggccgagtccgggcccagggaggcgcgcgccgccggctcctcccgccgcgcctctcgcgctcttgcggcgacgccgggccgagcttcagcaccggacagcgcccggccccgccccggccccgcccccggcggcagggccccgcccccggacgcgcgtccgccctcaggccacgcccccggccagccccgctcgccccggccacgccccccgcccgccc

SEQ ID NO: 32729 - DNA, 389 bp, Homo sapiens
  chr7:158380811-158381200
  hyper
cgcctgccgccgctccccgcccggcccggtgctgggggtcgcactgtccctggggacggcgggggcctaagccgcgcccttggcccggacgggaaggcccgaacctactctgctggggacctgggcaggcggcctctacccgcggggccccgcgcgcgtcgaattaacgccttccaaccgtttctttaatttaaacgtaacgggccacttgcgcatcggggcgcgcggaggtggacccagtcgacctcccctgcagcgcgggcggcgcccaggctcggtcccaggaaagctcccggagggcccagggcgtgggctggggccaggcgggctctggggcagagcagggtgaggcctgttgcgggcctggtctcctcgccgccgtcccgccc

SEQ ID NO: 32730 - DNA, 504 bp, Homo sapiens
  chr7:158823238-158823742
  hyper
cggcgtctcagccccgcagaagccccgaaccgtgggcctcccgccgcgtccgacaggcaggggtggggctagatgaccgaggtctccgtttgcaggaaggactgggcgcgggagccgcggtggaactgcagggcgccctccgagccgttgcgggagaaggaggaaccgcagaccctgtaatcccggctcgcggacggggtcgggcaccggcttcgccattttcgcttcagctcgcactgcacctgggaggtgagggcagcgggaacgcccgtgagcctgggcaggtgcgggcggctgctatgggaagcgcggcccgcgagcctccagctctccctcccgcctgctcccgtatctgtgttgccagcagatggacagaaacagaaacggccttgggggcagaggctggagggagcgggaactggacggccacaggagggcgggggacgctgccagactctaagactgtgcgtgggtggttcggggatcgccactgccgcggtaagc

SEQ ID NO: 32731 - DNA, 1464 bp, Homo sapiens
  chr7:158936507-158937971
  binary
cgtgataaaacccgttactttccaaggacccgctccgcaaagcgcccaccctcgagggaggaaagccgagctgcgcctccgcgcaaggccagggagtgtggctcgagccccgctgcagaccgggcgtcgccggttaatcaatgacactgtcgggtcagcagcgcagcctcccagctgcggaggggccgcggatcgatccagacctgcctcggctgcgacgcgcacgaaaaccgcgcgcaccgcaaacccgcttcagtctccaagaggaaagcaagaaacaaggctcgggtttttttctttcttttttctttcctttttttttaaggttcacagagggaataattcagaactccatgtgcgaaggcacttaatcaacaaacttatgagcagttagttcctccagtgcccttgggaaaaagcaactatttccaaaaggaaactttatttaaccgacgccacgtccccccgacactaaaactaaccagtaagtacagggagggaccgagaggcatctgcggccaacgccaaccccgatctccccgtgaaacgcgcagcccgcgcaggcgcccgcagctcccagctcccgggacggccccgaacgagctcatcgttgacgcgtccaggaagaaacgatcccgtttccagcaaaccccggacggtggggcgcggggaagggcgcaggcagcctcccaacccgagtcccgcaacccggcgggaccggagctcagcgcttcacgctctccgggaggaagctccggaccccgggcgaccccgctccctctcccggaccccgcccgcgctccagcacccgggaggaaggcgaagaccggcgggaggagcgctcttctcggaaggggagaaccgggtccgaggcgccgtggggcgggggtcgcgggcgcactcacgggggcgagcagccagcaggtcagcagcgcgggaggcagcagcgtccgcatcccgagctcagcgtgccgggggccgcccagcgcccgccgcctccgtcctaggtccccgcggttccgccgcctccagcatgggccgggagcgagtgcgcggagacctcgggccccgcagctgtagccgagcgcccgagcgcgggggccgccccctccgtcccggcagctggagcgcgctcaatgcacgcccgtcccccacgcgccccgccgctccgccccccgcccctgtccccgccccgcgctgccccaatcctcgtctccctcctcccccgagaacccccgctccgcgcccctcctcaccgccccccacttccccttccgctgcgccccgcgccctctcctcgcccctgggctctctgtccccgccgcgcgcgctccctctggtctcctcgacccccccagcctctctctccgttctcctcccctcttccctggcccacgcccccctcccggccgcgcctccccgatctgtgggcggaggggctgggaagcggggtgctcagtgcgc

SEQ ID NO: 32732 - DNA, 1161 bp, Homo sapiens
  chr7:18125868-18127029
  binary
cgttccaggtaccgccccacaatgctacctcctctttaaaagaagtcgttcagctggggcgggctggcgctgcgtggcgcgcacctgagcggccggggctccccgagccacggggggcgcgagagggcgaggcagcggcctggcttctccccagcaccgttctctgtcacggccgccgcctgaccatcaccccgcgcctcgcgtgggcatgtctcgcttcagaaatcccaagtcgtcttaggttccctggtccttcccctgggggggaaaaaaaacgctggtgcagcccagagcccttttccgctccaccccgggatgtcctcgctgccctcccgcctcccgcgcgtccttcccagcgcgtcggccgcgcgcccaggtgttcccgcgtccgtaatcccctccggcccgcgcctcccggcccgccctgcgggtctccagcgcctgggcccgcgctctcgccgcgggtccttcctcctatccccacccagccccgcccagcctccgcggcgctggggctcccggccgagcctctcctcccacctccgtcccctacttccctccccaagaagtgctatttttagcaaattctccgcgcgccgccgcccgctcagctcgcagctcgcagccgcccgctgccgccctcccgagccccccccgcgcggcggcggcggcggcggcggcggcggcgcgtcccgcacatcgcgcagcgcgcaccgagccggccgcgccgcgcccgccgctctcgccgctttcgccgcggtctcctcctctagcgcccgccgcggccggtaaatctcggctggaggagcagcggcggcccccgagtcaactttcattccctttttgcttctgcctcaccattctcttctcctcctcgaaagatggctgtttggagaagggggagaagttaagaggtcgccagcgcggagcgaaggagggcgcgatagcctcagcaggagcgggcggaggtgagtggcaccacggcagagtccccggctggtgcttgaggaaagccctgggaattgggggccaccggtcctcaggatgcgccgcggtattcccttctcgggttccgcaggttaacagcatctcagtccggactctgatgccacttgccttgcatctcgcagcccggagaccggtgggtttaagggaaccttc

SEQ ID NO: 32733 - DNA, 2016 bp, Homo sapiens
  chr7:191993-194009
  binary
cgggaccggtgccgggagctccgctgccctggcgtcccctgggtccaggcccagtcgctccttgggcctctctcgcggggccgcctccgcctcctccttgccgagacgggcgtggggcacggggtcgccgcccggcggggagctcatccggcggcgcagacgccccgcggctccggggagggacttggcctgggccccggccccgcgctcctctggggaggagccgagaggctgcagctggcggcggcggccccgggcgggagggggtcccaggaagcggccaggccggagccccccactcggccgcagctgctggcctggccagaaccgagcgcgccctcccggtctccgccgcttccctctgcaaaccgcgggcaggaggagccctctccttagcgggcccggagctcagaggcgtcgcggggcgcggccgaggggaggaggaaggagagcgggagcgcagccggcccgggcccagccgtgactcgtggggcggcggctccgccaatctgtgggcgctgacgcggggggcggctccgcggcgctcgatatctgcccgcccgggacgcggggcgccgagaggctcggccaggcgggagctgcgctcggggcggccgctgcacctgcccgggaccccgccggccgctccccgcgcccaccccttccgcccttcgccccccccttccccccagccccggtctcccgggcgcggcgtgagagcagagcccggcccggaggagccgccccttccccgcccgcccgcccggcgcctggagaggagcgcgctgaggatcgggacgcctgcggccgccgccaccgcccaggcccgtcgcgccccggccgggatggacccacacgcccgatgagccccgcgccggcggctgcgagcgccgagcctccccctgctgcggccccagccgccccccgcgcgcccggctccgcggaccaggacccctgggctccccggctgagggcgcggccgctccggagaggccgagcggggacgggcccgagatggcgcggggacccagcgctccggcggcgggcgccctgcacgcggcccgggcccggggacagccccggagctggtagccgcccggcaccgatggaccttgacccgcgaggcggcgccgcgctcgtgcccagctgcagctagaggggcgcgcgggcagaacgcgctccaggcccgggccggcccgcgcggccatgaagatgatgctggtgcgccggttccgcgtgctcatcctgatggtgttcctggtggcctgcgcgctgcacatcgccctggacctgctgcccaggctggagcgacgcggcgcgcggccctcgggggagcccggctgttcgtgcgcgcagcccgccgccgaggtggccgcgcccggctgggcccaggttcggggccgccccggggagcccccggccgcctcctccgccgccggcgacgcgggctggcccaacaagcacacgctccgcatcctgcaggacttcagctccgacccctcctccaacctctcgtcccactcgctggagaaactgccgcccgcggccgagccggccgagcgcgccttgcgggggcgggatcccggcgccctaagaccccacgaccccgcgcaccggccgctgctgcgagaccccggcccgcgtcggtccgagtcgccccccggccccggcggagacgcctccctcctggccaggctgttcgagcacccgctttaccgggtggcggttccgccgctcacggaggaggacgtcctgttcaatgtgaacagcgacaccaggctcagccccaaagcggcggagaacccggactggtgagtgggggctggcaggtgcccacccccaagggagccgtgagcccaaggcatggtgtagagaggttcaggggccccagagggccgccccccatggaagaggccgggcagggagtgtggtgcgggaggaggcagccgcctacctcagggcgctgcctttgtctccagaataacctcctccttgggaggggctgccggctggtcc

SEQ ID NO: 32734 - DNA, 981 bp, Homo sapiens
  chr7:20824537-20825518
  hyper
cgtccatgaggtgctgcccggcggggctgagcaggtgcgaggaggcgccgctgctgaaggccgagtgactcaggcccgagtaatccgagttgtagcctccgagcggcgagtgcagcgaggtttggagccccccggcggcagggtgcagcgagccgggcagcgcagccgcgctgttcgggttctgcacgtcgatccagccggcccccacgtcccaccagctggaggcgccggccgagcccacctcgcccgcagcacccaggcccgggtgcgagggcttaaaccacgactcgtacgggtgcgccatgcccacccgcgggtagatgccctgcagcccgtccacagaggtgtgcaccttggagatgaacaccggctggtgggagccgtcctgcgagtgcgcggaggagccgccgccgccgcccccgccgccgccgccgctgcccccggaaactccgggggcctggaaaacagagtagtcgttggcgaagggcgagctggaggcggcggctgcggcggcggcggcggcggctgcggcgctgctggaggtgagggagaaggcgctggagccaggcgagccgccgcagctgaacgagtcggacaccagggccgcggcagccgcggctgctgccgcggccgccgcagccgccgaggacgagccgccgttcctggaggccccggacacgccgaagcttgagagactggaacccactacgttgcagctggcggaagaagaggacgaggagcgtttccaggggtggaagcctttgccgaaggaagaagagctgtccgagagggaggagggagacgggctggggctgcctatcttattacaggtagcggcaagcatggccagaggagtcgatcccaacctcggttcttcctgcgaggaggagaggagaaggagtgggggaggggaggtgggcaaagggccggtgggggaggaaaggaagaaatgtgcatcagtccttcggtagcctccaaagc

SEQ ID NO: 32735 - DNA, 751 bp, Homo sapiens
  chr7:20826098-20826849
  binary
cgaaatcggtgcctgtaaaatgggctggacgcaggtctcccgggcagggagcagcgaggcgctgcgcggtggcttgtctaaatgcccttcgaaccttttcctgcgctgaaaaaaagtgactctgcccccttctccccctttttcttttctccaaactcacttgtatttaaagaaaaaaaaaaaaagctctcaatagagagactgatagcccgtggcctggccggggcgactttaaccccctccaatcggcaataaaaggaaactaattaaaccagcaagagaaaatcctgagactcacccctagaagtgaagttgccatcacacaaaagtgccctcctcctctcagaggatcttttttatattgataaatcagaggcagtgttttttttagaggtgtgcaatacaatgatcagttccgcccattccaccacaattgtagctccctctccggctttgaagtgccgcggaggcgcggccagccaatctgcggcctcgccgggccgcgcggcgcgcgcgccgtgaggtcatcggcgccgccgcctgccgccgtggtggaagggggagtgggagcggagggggcgggggcggctgcgtgtgttacaaagcgcaaagcgcgcgctcgcgtgtatgagtgtgtgtgtaacaatgtaactgtgtgcgagtgtgaccaggcgtaggagaggacagtgcggagactggagggaggggggatgggggtgtgacaccgtaacagtgacagtgtggtaaaggc

SEQ ID NO: 32736 - DNA, 392 bp, Homo sapiens; identical to SEQ ID NO: 29396
  chr7:2298049-2298441
  hypo

SEQ ID NO: 32737 - DNA, 945 bp, Homo sapiens
  chr7:27208953-27209898
  hyper
cggccggctggcaaagcgctgcggagaaagacacgaggctcctgagcagggaaagccgaggttgccaccgcaggcctggcacgaccagggccgtgatgccccgcccggcccgacccccgcgcgcagaggtacctggagacgatttcaactgaagtaatgaaggcagtgtcgtgctgtcgagagaaaggtggatcccaacaacaggaaactacctaaatcaccgaccagttctggtgctgcccgcgaagggctgcctcgcccgccgccgccgccgcctccgccgctgccgccgccgccaaggagagaaccctgccatcgcgcctggcccggcccagcccagcccctaggcaacctgcgcccgccagtgcaacagagtgccccaggcggccgcaaatgcgtcaaggaaggggaagccacaggccccagtaaggtattcctgggagggagagggaggaaaagagagggaggaaaggcagggagagaggaataaaggcggggagcaggcgagacgagagcagctccgagaagcagtgtgcgcgccgctttcccaaatcttgcagcccagcgagccggcgccaagaggcggtagccgtggaaggctcgaaagcgccagggacggtacagatcccggctccctgtctggccccggcctcccgcctctcgctctccccctctccctcctagctgcccgcccgccggggcgcgcgctcctgcgccccctccccttagcccccgccccccccactctggcaagcaggaaacgcgtggccctaaggagtgccgccaggtgggggaggccgtactgggggagggggaggcccccatgcagtccagcccgggtccacctaaccgctgcctccagcggctagagatgcgctgtgggccaggcctgctccccgattcagattgagggtcatctgtgacccagacacccgcaaaataacc

SEQ ID NO: 32738 - DNA, 765 bp, Homo sapiens
  chr7:27213630-27214395
  binary
cgccaccgctgcccggcgacgctgcctcattgcgcttgccgcccagcgtggggaagagcccgcagctctgcagcccgtagggcaggtcggcggcgggcggcaggtagaccccgccgtgggcgtagtaaccgccaccgccgccgccccccgcgccaccaccaccgccgcctgcctcgcctctgcccgagctgatgagcgagtcgaccaaaaaagagttcgcggcggggctctccgagcatgacattgttgtgggataatttggcgaagggagcagatagccctttctggctgacatttcttgtgcaaaacatgctgaatacgattagcaatccccccgcaccgcggcgggcgcccgcagccaatcccgagccagagtttccgcgcgaccactcccagtttggtttcgtaggcgcggggccgctctccgagggcgccctcagagcccgcgattgatataaatatgtaatctgtattgatgggccaggagacgcaccccgacaccttggcccgaaggccgggagctgtgggggctgccccaacgtggctggtggggggcctggccattgggctcgccccgcccctacccggacgtgagccccataccggggtcccttagaagggcccttgggccccgcgcagttaacaagtggggtgtttatggtgcgcgcccagtctgccttgggtgctcaccatccctgtcgcagaagctgccactagtccccggtgtactctaaccactgaagcggccgtgtcggggactcacgc

SEQ ID NO: 32739 - DNA, 959 bp, Homo sapiens
  chr7:27238984-27239943
  hyper
cggctgcgtagccctggtggtagaaggcgaactccttagcgcgggagctgaactcctcggcagctgggccggcggtatccatgtacttgtccgcgaaggcggcggcggcggcggccgaggcgggctgcgcgcacgacttgatggcgttggggtgcgggcccatgcgggcgcacgggtagtagccgctgccgaagtagccatagggcagcgccgcgggccccgacgagctctgcgccgctgccgagcaggggctgcattgcttggcggcctctgcgcccgccgggcccgccgggccgggacctcccgaggacgacgcggcggcggcggcggcggctgcagcggcagccgcggcagcagcggcggcagccgacgggggcgcctccccgggggcgctgctgtaggcggacgcggctcctggcgccaagggcgccgggtgcgccatcaggttgcggcactggttggccgcggccgccgccgcagccgcggccgccgccgccaccgagaagttgccccctgccgccgcagccgccgggtgggggaagcccccgcccccggccccggcagccgccgccgctgcagccgctgctgcagccgccgccgccccttccatgttcttgttgagctcgtcggccaccaggccgccgccgttgtcgtagagaaacatgacggtgggctcgatccagcgggggtggaggagcacggaggctgtcatagcccgagccgcatggagaagaccccagtggcgctgttttaaaaagcccccaagaagtgaagagcgcgcggcgcggggccggggcccgagcgaggggggcggatcgcgccccgcggggtcgcgccaggcggccgcccattggcccggcccccccgctccgcccacggcgtatgcaaagcgggcggctccgactccagctctgcacggtgcacccgtcgtccccgccgcggcccgcgccgtccccagc

SEQ ID NO: 32740 - DNA, 895 bp, Homo sapiens
  chr7:27281871-27282766
  hyper
cgtagcttgtaaaaagacttttcagccagtttgaggttagctgccaggggcagacagttgtaataatgccgacagaattgaggcttgtaagccgggcttcacacttctaaaatgcagttatggattctttcatcggtgttagatcaaggcaccaagttaagaaaacaaaagtcaaaacaacaataaaagaaaaaatcaaaagcttatttaattaccgagtcccgctgcccctgcggaactcgccgcgcgcgttaagctctcttttctttctgcggaattccatttgcatcccctctgcctgggtgtctccctctctcagtgtgtgtgtctctctgtctgttttcacactctcctccccaatcgagcgaggcccacacctggcgcatcactgccgagccattagctgcgggtttcctttcatcttcgctgtggcagacgtttctatttatccacttgcgctcgccgagtggcgtcaccagcggtactgtaatgacgattgcagcaggaggatgacagcttagaaagaagagggcaatggggcttcctcccagaggcggtgcggcacagaggagcgctcgcttcacaaggtgaccctagctcccaccgccaccgccgcggtcgcggtccagaccgcgctccagcagctccgcgccctcccaggcacccggcctttctttctccctcttgcaaccaagatccgtccggccgctggagacccagggagccggggttaggaactcacttggggctttcccctcccccaccggagagccccgggatggagagccgaaaggacatggttgtgtttctggatgggggtcagcttggcactctggttggcaagagagtctcaaatttgtccgaagccgtgggcagcccgctgccggagccgccc

SEQ ID NO: 32741 - DNA, 1440 bp, Homo sapiens
  chr7:28995382-28996822
  hyper
cgagaagtcggcggacacgccggtgcccatggagcgcaggggccgtcgggtggagtacatgtgccgaacgtggaccggggccccgcccttccgcctagcccgcagtttcctacgcagccagcgagacgcccaggccgccaaggccaggagcaccagcagcgcgttgaccgtcagcagggccaaggtcagcagctggtagtcgacgccgccccggctcccggcctccggtagggtgaccagccccgcgcagtggtcccggggagccacagggcagacacggcccccaagcacgccctccacgcacaccaggtagggggtgtccccgcgcagctcgcgcagcgtggccgagtcgctgctctcaggcaggtagacgaagcggtggaacttgggctgctggccaaagcggtcaaagagcaggcggaagcgcgcgccgcccagcggccggggactgcggtgctcgcgcacggcccagcgcaccgaggcgctgtctgcgcccaccgcctccaccgtcaggttgcacagaatgaacttgttgaagtcgcatgggtcggacaccagcggcggcagcccggccccaccgtcggactgggcggcacgctcctggtgctccgtgcccagacgatgcttcgtcgcgcgctgccaggggtcgccggcgggcgatggcgcagagccaggagaggccgttggggtgggctccgcgagggcgggatctgcccgagtcggacggccccgctggggcttcttgtgcaggtctagggactgtggagccgggcccgcggcggcagcgacggaggggctgggctgctggaggcccgggccccgccgactcagccttagggcgctgcggttgcctaccagctccctggcggccccatcccaggccaccccagctagaaatcgcccctgctgctggagctgcggctgcggcggcagctcctccgcgagacctgcaggtggcgtcatctcctcccctgcggccgtgggtaggggctgccgcctgcggtcagcggtcagggaagctgagggcgagggatccgcgcaggatccattttgcagctgctggtcatccaggtaatccaggtatttgcctcgcagggccggggggtggcgacactgcacgaagacagtgaggagccggccctgcgagtgccagtcgcccatccagcgcttcaggcctcgcagccggcagtcgcaggtccagccgttgccgtctagatccagccgataaagggctgggctggcggcgaagatgtccccggatagggcgctgagcgcgttgttgcgcaggctgagctcgcgcagccggcccaggtggccgaaggtggccgggtgcagggcggacagctcattgccgctcaggtccagcgcctccaggctgtgcagaggctccagcagcgcagttggcagctggctcagccgattaccctccaggcgcagctc

SEQ ID NO: 32742 - DNA, 925 bp, Homo sapiens
  chr7:28997339-28998264
  hyper
cgcgagagcttctcgaaggtcttggggtgcagagagcggatctggttgtactgcaggtccagccgtctgagctgccccagacggtggaagtcgaaggccgtgatgttggttatgaagttgccgccgaggctgtaggtgagcacgtcgtgggggctcggccagcgagctggtcttgggcactacgcggagccccctgttggtgcacaggagatgctggggatgctggcagtcgcagcgctccgggcacacgggctcggcagcggcgggagcgcgaggcagccgcacaccacgagcaggaggcgcaaggcgcgggcagcctccatcgcctcccgccctgcgtgcagcggccggatcgtcctcttggcccgccggctctgtgtctcctctgcattccccttagcctggccagagtcgctaaatggcctctttcggacttcgcagcgccgtccagcccctcctccgtcctttgtccggaggccggcccgggtctctgcaggcgggcttcgcccggccaagtcaggcggcgcggggcgctctgcagaccccgggtactacttgttgcatttctgtataaaactgtttctccgggtgcgcgtcggcgggcgggaggagggagcaagacccggcgctttttgtttgcagctgagtccggagagctggattccctggcgcggattctcccagccgagtggattccccagctgcaggcgggagccgttccaagagcttcgcggggcgcggcttggcagcagagccccggctgctcggcccccgcagacggcaccttctcgctcgcggtcccggacggggagggcggctccagtgcaatagctcggggagcacgcgggctgcgtccggaagggacccaagtctgcgagcggagagcaaacggggcggaaattcgttcttcccacactctgcccgc

SEQ ID NO: 32743 - DNA, 1049 bp, Homo sapiens
  chr7:29233996-29235045
  binary
cgaaccaccccccgagcgaccgcgtctcctcttcttcctttgtgtgtgcgcgagcggagttggggcggagggagaagggggaggtcgctctgtctgtccgtctcccgccgcctctgcccggtctactcgaagtgcggcgggagaggcgggagcccaggagagggtgcgggagctggcggggcggctcggagctgccaggacgccctggtcccagccgcgcacaggggagcgtggacggcagaggggctcggcgggagccgagatccgcccgtcccggctgcccctcggcctccctctgctcccacctaccccctgacacccatagaaaagcgtgcaaaggcgcggagcgggacggaaaccacaaataaatagcggcggcggcagcgcgtcatctggtggagcaggaagtgcaggcagagtccggaggctggtgctttctgcgcgtccccaggactttgccatgggctgggggccgcggaggctgcgagcggccgggcgagggcagcggcggcggcgtccgcaccggggctgagcgagcagcgacgcgaggggcgcgcggagatggcagcgtccagcaactccagcctgtccggctcgtcggtgtcctccggtgagtttcagcccgtcgggcgctgctgccgcgccgggtctcgccccactgccctcgccccgcagcctgggatggacagagcctacctgtggccatcccgcccgctctctcggaatgggggcaggcgtccggggtgatacttgtttggttcgccagcacctcggtgcccagagcacctccgcgcctgacatctgacagcgcagaggtgggagagcggtggtgcccttagtgtgcggacgcgggtgttccggggcttggagtgcagcgagcgaaaagcgaaaggagcgggcaggctcgcactttctggcgcagctggagcgggggctggcggggcggagaaggttggggtgaagcagagcgccccgacctgtttgccgtgccgcgcccgctaccctggacacccaaatccggagcagaggggagcaaaccctcgctcctc

SEQ ID NO: 32744 - DNA, 1252 bp, Homo sapiens
  chr7:29603540-29604792
  hyper
cgttcctacggacgcgtaggcaagttcgatgcgccggagtgaacagccagggtcccatctctcagccggctcccgggcggtgctagcagggaagagggacgcgccggcgaatgaaacactactagcccggaaagccgccctggaccttccacccgggcagcgagtctggcggcccctcgccgccgccccctccgaccagaacagactgcgctgcgagccccgggcttccgccgcagcgcgcagcaattggaggtgccagaggagaccagcagcagcacttgatttagctgggctgcgggaattccgacctgtacactttccagaagcctgatctctccaagtccgcgcccagggactcgagccccggcttccaggttgacccgagcgcgcccccttcgtgctctcggccgcgttcaccgcgcgaggcctccgggtcctgttaagcccgagcaggtgagcgactgggggtggttcggcgtccgccgagacagagcctggccccgggggtcaccctggggtgctgcctggtacctcccaggtacccgcctcccggagccctaagagaggctgaaaaccacggacgctccaggactccgttttctgtacttttgagtaatttgccatcttttccttgcgcaattcgtacaaagcccttccgtgctcacaaagttgatgattgtgaagaagaaaatgtaggttagaggagaggaagcagcatcaggacaccttaccaccactgttagtaaatgacttgggggtacgggttgcttttccgatctgcaaagtaggagggaatgggatgtttgcagacgcagttgctaattgtgcctgagggcgtgggtgccttttgtaccgaaagaacttttggccgttttttcttgtattgttttcaagtcgctgcccgagtgtgtcctcagggcatcctggggaggagccggtgttgcggtttcggggcgcagccgaggccgccccgccgcctcccgtaggcgatcagacttcctctccctggcggttccgggaggagaacctcctacaacaaacaccgccgaagtttccctctccagcgcgatcgccaatcccaggagcgcccggcgcgtgggctgggaaggagccgagcggaaacctggaagtgagccgcggcgcaggcgaatcctgccgttgctggtggcagcgcccaagagaccccgcacagaaagtgggctgggagtctcgcttgctgtacccgcacctaagtgctcagaagcggcctttc

SEQ ID NO: 32745 - DNA, 877 bp, Homo sapiens
  chr7:32996732-32997609
  binary
cggccacgtaggagcccctcacggcaccaaacccggtgtctccagggacgggcggagaccagcgggtgggcttgggcagtacgcgcttttctcttccgactttgggccaaagccttgtccggagatcacagtgtctcgctcggggacacgccctctctaggcccagacttggtccccactggagttcccagcccccctccccgctgcggcacgcacattcccaatgccgggcggggcagggcgcagcaggcccgccctcggcgcgcggccaggctgggctcctcccctggagctgcggccgggagggcgggcggccggggagacggggtggcggctgcagcccgggtagggccaggagacccggtccacgtttgcaaacgcagccgaacgcccaggccgacccgtgccgcccgagcgccgcgctgcgtccgcgccactcttctcgccgccccgatggcgttccggggctggaggcccccgccgccaccgctgctcctgctgctgctctgggtgaccgggcaggcagcgcccgtggcgggcctgggctccgacgcggagctgcagatcgagcggcgcttcgtgcccgacgagtgcccgcgcaccgtgcgcagcggcgacttcgtgcgctaccactacgtggggacgttccccgacggccagaagttcgactccaggtaccgcgcccttggcgcccggcgcggcctcagcggatgcgcgtccctctctccggacaggcctttccctcctgccggacctcccctagctccgccccgtgcagccgcgctcctcccttcttccgctgcccagatcctcccggaccccagaccctccgccgcgggtgagcctcccggccctcacgtgccctaggctgccagcc

SEQ ID NO: 32746 - DNA, 1913 bp, Homo sapiens
  chr7:3340362-3342275
  binary
cgtgtttgcaattacggtaacttggcgcgtcacccccaagcactgagctagctggtggtagccgggcgcctctcggggcgcgccctattccgccctcggccctgggctgccgcacgatctgcgcgtcctgctgcacctgagcccttcccactcgggcgcccgcaccgctgcggggccgggcgaggatgcaccacccccgcccgcgagcccgccacgggagcgcgtgccgaatcgacgccgcctgcagtccccactacgggtccctagggggcgcagccggcgcgggaagccgcccgagccaggcgccgcggccggcacaaaattgcaggcgggcgggcgccgcgactttgaaaacaagcgagggcctggggggcgggccctgggagcgggcgccgcctccctcggccaatcaacggcgggcggcgggcggcgggcgcgggcggcgcgtgcggccgggctgtgaatggggagcggcggccgcggcagctgagggcgagcgcgaccgcgacgtgcgggcgggcgcactttcttctcagcgccgggcgggggcggcggcggcggcggctcctccgcgcccggcggacccctcggagctagcgcggcgggctcgggactgcgtgagcgccggacgcgaatttcccccgttgacaacttcttctcgcccggctcgtccccggcccgcgccgcgcccctcacgcggggacccaggacgccgcccctcagcgctgggcggccgctcacctcgggccggggggcgccgcgcctcccgcggagtggccgcgcccgctcggagccgtcccgcctgtcctgcccgcccgtccgtccggcgcggcgctcggggtggcggctgctcggcatggcccggggcgcccggccctcggcggccggtggcggcggcggcggcgcggagccccctgagcgcgcgggccccgggcggccgcggggatccccgcccggccgcgcccgcccctcgctggcgccgcgccccggcccggagccctcgcgaccccgggcggcgcccgagacctccggcggggacacggcgggcgcggggcggtgcggcgggcggcgggcggcaaagttggggccgggccgccgcggctggtgggcgctgctggcgctgcagctgcacttgctccgggcgctggcgcaaggtaggtgcgcgcggggtcgcgggccgggggcgtcgcctcggggcgcggaggcgcgaacttgagcagcgagagtgtgtccggggtccccccgcttcccggcccgggtcgggatgcgccttgctgggggctctagggagcccaggggctcctccacgccagactcggaggagagggaaacggagccccgtagagcctgcaccccgtctgctactttgcgttttattttttttataccgcagtagcacaaacaaaaatttttaagttgaggacccatttctcagctccttaaaaggatgcccgagtccccttcccattgcatggatgaaaaaggggctggtctgtacctgagtcttcgcaccgcagggtctggtttccggtgagtgacatccagaagacttggaaatatcaagtgccagtcgctgtgaaaagccttttccagcccctccccagggcctcgtcctctccccagcccccgcctgctcctgactcccccaagtcccaaagcccgaccccaagtgggtgctgcgcggccggtggagcaaaactttcagtgcccacagcttttgcacttggctttgtttttctccctctattggcttctgtttagaatacagtggtgagctctgaaatagggaaagaggatctgctgaatggaaatgaccttttgaaacgagagatgggatctcttgtgaaacgagctttccttcccaaatctgggcttccctccaccccctccccgcccccgacaaaacccgtaac

SEQ ID NO: 32747 - DNA, 883 bp, Homo sapiens
  chr7:45613422-45614305
  binary
cgcccacagggtctccgcgaccctagagcttagggaagaattgccgaggggcggggggtccctcatgcgcatggaagggacgtacgccccaggcctccaccttcctcctgaccccggggattcttggacgtcgattctccgtctcgtaggggcgagggccctgggttcgcagtcagacgcgggcccctctcaaatctagtggcctggttttattgagtgggggaaggcacatattttccaagattaactgccccgcaacagggaatttcgcaggatttcagtattttcgactccccaggtgacgccaagagggtgggttccactgtgcacggtggggaaactgaggctcggaggggacaaggaaggtactcgaggtcacgcggctcctccggcgggcgggaacgcaggacgcggagttggggcgcgggctgtgcgcgcccaggttcgcggctcccggggctcggctgtcgcagcgcggtcgccgccgaggaccacggtcggggcgcgggcgggctccagtgcgcaggcgcggcgggcgggaggggacgcgctccgggcgcgcgcgcggggcagccggcgccccaactccgcccgccccgcgccccgcgccccggcgcctcgccgcccgccgcccgcccgccccggcgccgccgcccgcgccccggcgccccgggccggcgaggggcgcgcccgcggccgcggccgctgcatggcgctgagatggcgggggcgccgcgcggcggaggcggcggcggaggcggcgcgggcgagcccgggggcgccgagcgggcggccgggacaagccgccggcgcgggctccgggcgtgcgacgaggagttcgcttgcccagagctggaggcgctgttccgcggctacacgctgc

SEQ ID NO: 32748 - DNA, 1057 bp, Homo sapiens
  chr7:48074902-48075959
  binary
cgctgcgtcccgcccggttccccgtggcatcgctgcgctgccctgccctggtccggctctgggctacgggcagttgacaggcggcgcccgcgctccgcttcctgccctgattggcccaccgctccccctcaggcttcccctattggctgacagtgctccagccgcgcccgccggttggccgttcagccgttgccctggcgacgccgatgttgtggttccgcggcgcgctgggagtttgggtttggttggctgcagccagccagccgtgtaaaaactccaacgccgggcgccgcgggcagcacccacggagacccgcggggagctggtgagcctgagcgggctggaggacaatgggggcgcccactgtggtcccgggccttgtccactgtgcggagctcgcagtgcgggcagtgcgcgccggggctggagggaggggaccaccttgtcgccgggttgggatgagcacagggcgggatctccaagcctgcccaagtcccgcggccccttggttacctgttgcttatcctctctgtacttgctgtgtccctggcgtggacgtgcctgtactggatacccggcgtgacgtgccccctctgtgtgccccgcacgcacgtgtctctgctgaataccccgcgtgaatgtgcccctgctgtgtacccggagtgcgtacgtccctgctgtgtaccctgtgtggacgtgccctgctgtctacccggcgtgcgtgtgttcctgctgtataccggcgtgatgtgctcccttctgtttacctggcgtggacatgccccctgctgtataccctgcatggaagtgccagcgctaggcgatcgtaaggcgcctgcaggcgtgtcagggcgaggcgtacagaccgacccagagcgggcgcgcggattttgcttttgcagctgcagctcctggcaactggtcaagcaggcagcgtccagcgcacccgcgaacaccaggtccggcagcatctgtcttttcccgcagcgtgcagcgcctgaccatgaggaacacaagcaaggaacttcagggcgccacgcaccgctacgctccctgc

SEQ ID NO: 32749 - DNA, 1359 bp, Homo sapiens
  chr7:4922256-4923615
  hyper
cgaagcgcagactttacacactcagctctctcccctccttccatgaatcctatctttacagccccagcccgagccacgctttcaaatgcaaacataattcaatcagatttaattctgacctgctagctgctggagaggagaccgacttgccccccagcaaaagggactttcaagactggttcctgtctggaatgcacaagaggtggcctatattaaccgcgggacacgagcaatcagattcttctgtgcaattcagattagccaaacacttgacaggcgacagggcagggcaggatggtccgcagccccgccagggccctgccaaccccaccaacaggctcctcctgcgaggccccaggagctcggctcagcatctgttatcttggatgcagtatttgtcgaggggctggaaatggtacataaatagccgggaaacaatgctttgagctggcgcacgagtggggatcgggctgcaaccgggacggggtatgtgcaggggacgtctcgccggcccaggtgggagagcgcgcggaaccctgcgccccgctcccccgctgcgccccgctcccccgctgcgcgccccggacgaagctccccctccagggcacagccgggaaaactgagggccgagagtcccctggagttgggggtccggggcccacgcggacagccaggctcaggagctctcgggggtcggcagcgcggacccccggatccccgcaggctgggccgcccttgcccgcgctagccggcctccgggtaccgccccccggtccaggccggggcccgacagccagtcggttcccatggcaactgggcaaacctgccctccgcgccccgaccagcggccgggagtgtccccgagcgcgccccgcggcctccgcgccccaggtccccggcagcggccgagcagcgccccttacgagccacccccggttccgcagtcactcctcgcgcaccccacactcacctccggcacaacccgccgcgccgccacgttcccgcgctgctcccacccgccgttggctggggccggcgcccagacccgcgcgtgccgcggcgcctcctgccggcggcgcaacgggcggggcggggcctcaaggggacggggccacaaagggtggggcgggggagaacaggtgggctggagctgggcctcggcgcccaataggcagaaagaaagcctcgaggaggcggggtctccaggagaggggcggggccaacctgctagaaaaggcgggctgtgctctggcgcctcctgccggccgcccaatggacggggatgcagcctcgagggggcggggcctcaccggagaggcggggttttgaagaaaggggtggggctggttgtggagaggc

SEQ ID NO: 32750 - DNA, 1485 bp, Homo sapiens
  chr7:50860152-50861637
  hyper
cgcacatgctccaaggcagtcgtcaggcaggcgtttggagaggcaatcagcaaaggcgaagagttgcatcagaaatttccttctgcaaacggtaccgctcttatcacatttccacggctggcgggcggctaatccgcgagccctcaacttggtgttaggccccagcggcggctaacgggtcaccaacagaaccaaaaaaaaggtcctccgtacgaggctgggccggctcgggatttgggagtgtctggcaccactgtcccggacgcccggacgcccgggcgcgcgcgccgcggccccgccgcgcagtcggagcacccggggctgcagggacgcctgggcgcccaccctcccaggcggcggcccccaggagcgcggccttgaccgcagcccccgccacagcccgcgagccgccggcgtctgacaagatggttcaagaatgcaccgcttggactccacacctccccccaggggtcgggaacgcagcgcggagagccccgcggggcgcccggctgcctccgcctccgccgcgcgcccgcagccccagtcccgcctccgagcaccgcccgctgcgggcccggggcgccggagcccccggcccggaggcgacgcccttccgcccgccgcgcctccgcggggcccggcgtccccggccgcggccgcccagcgctcagacaatgacggcgcggggacccgcctggccgtcccgggccccgcggggacgccaaccacaaagtaacttgccgccgcgctccccgcccaactccgtacctgccgcgcgcggctccccgccgcctccgcgtggctgcgggcgacactcggcgtggccggcggcgggcgcgggtccccgcggggcgaggccggcgctcaagactgtcccgggcgccccgcgccgccggcgctgccgccacccaggggctgcgcggaaactttgggctccaccgggtctccgagcgccgagcccgcccggccgcagctcgcttccctctctgcctcctcccgacctccccaccccctcgatgggctttaaactcgcccggccccgcccgccctccccgcctctgccgccgccgccgcctccgcctccgcctcctcccccggctacttttcctgctcctcctcccgccgccgccgcccggaccgctcggcggccgccagcgcgggaggagccggggcctgggcgcagggcgtggcgcgggggcgcgggccgcgggccggacggccggggggccagaagctcccggaggttcctgccccgggctgctgagcgggttcccccctcctgctgtcctcgggactcgggcgcgggaccacgaccgccgcggctcaggaggcttcgccagtgaaaggacaaattggacctgtcccgaaagacaatttataagcgaactgtttgaaacgcacaaagtattaactgcgcagtccagatcctttatcctgggcgcagcaggacgggacggaagagctggggctgccccgtactctgtc

SEQ ID NO: 32751 - DNA, 1768 bp, Homo sapiens
  chr7:51383335-51385103
  hyper
cggcgcgccgcgctgaaaactacaaagtccaccgggactgcgcgctaccccgcggcccagcctgcaccgctggccgggatgagcacggcgcacctggctcggggtctgaataatgagcagggctgctcgtcctgtttgagggaaattactctttctgagagtcaaatcctgaatgtgacgtgtaatccctgcacgcaaggtgtggggatagcaaacagaaaccgggagaggtttgggcaaaagcggaatcgcgaagacagggatgggccgccagactcgcgggtccgctacggatgtctgcgcctcaggcctggccccactaggacgccccttccactgccaggggagaccctggaataaaggcagggagggagagctgctgccatgaaaccctccgggcaatccgaacaccttccgagaacgcggggcccgggcggctgcgaagccggggagccctcccctccacgctgccgggagagccgatcctggggctgccgccgaggccgggagagggaagacttgatgggaaccggccaggggcaagcccgcagggaagaggccggagtcaaaggccgggcgtcccctcgctccccgctccacccctacggcaaacacttggggggcctgaggaaagctcggagctgagtgggggctgtgctggcggggacccccataaggacgcctgcatacaaaccaccccgcgcgaaaagtgcgctccggccccggcccgacacggttacctgggcaacgacccgggtgcccaaagtacacagcacgcaccaccacccaacaccagcacccaacaccagcaccgcaccacctgctccaccactaccaccagcacccgctggggcggcagagagggcgccctgcccgggagcgcgcggtgcggacgcgggcgtccgagcccagggaagccccctctccaccccgcccgaccgcggggccgcttacccggtcgggggcttggccgccgaggcgcgcggcgcgtccatggtgccgggggccgggacgcgggcggtgctccgggcccgccgagtcaggcgctggctaccgccgccaccgctgccgccctcattcactttttccgcgctgacccatcgtcctcccacgcgggccggcggaggacagcggcggagcgcggcggacggaaggggctggaatcgtctctagcgggcgggggcgccgggagcgcagggaggggctggcggcggcgcggggcgggggcgccgggagcaaggtgcgccgcgcccccgccccggctgctctgccgcgcccaccggagcgccgcccccgccccgccccgccccgcctgctcagagtcccgacccggcccgcggcgagcgtccggggaaggaatcctccggcacctgggccctgcaccgacacccgcgggtgcggcagagggcttctccccgtgctcctccacccctggggggagcgcgaccctctctgggcggagtgggggatcccggggccggcgcctcctggcggagttgggggaggggaaccacctggagcctggaggccgtgcgagggcgaggtgggcggaccagcccgggaggactgacgttggagggtgagaagtgagtgtccggcaccgctctctgacctttatccgtgcagcaaatgtctagtgcgtagggtcgcaaagtgggagtcccgaccgggagcgtcaggaacacctgggaacttgttagaaatgcagatttctggggcccaccaggtcccacggaatcagaaacagtgcgggctggagcgcggcctc

SEQ ID NO: 32752 - DNA, 1504 bp, Homo sapiens
  chr7:55086556-55088060
  hyper
cgcctccggcggccgctggccttgggtccccgctgctggttctcctccctcctcctcgcattctcctcctcctctgctcctcccgatccctcctccgccgcctggtccctcctcctcccgccctgcctccccgcgcctcggcccgcgcgagctagacgtccgggcagcccccggcgcagcgcggccgcagcagcctccgccccccgcacggtgtgagcgcccgacgcggccgaggcggccggagtcccgagctagccccggcggccgccgccgcccagaccggacgacaggccacctcgtcggcgtccgcccgagtccccgcctcgccgccaacgccacaaccaccgcgcacggccccctgactccgtccagtattgatcgggagagccggagcgagctcttcggggagcagcgatgcgaccctccgggacggccggggcagcgctcctggcgctgctggctgcgctctgcccggcgagtcgggctctggaggaaaagaaaggtaagggcgtgtctcgccggctcccgcgccgcccccggatcgcgccccggaccccgcagcccgcccaaccgcgcaccggcgcaccggctcggcgcccgcgcccccgcccgtcctttcctgtttccttgagatcagctgcgccgccgaccgggaccgcgggaggaacgggacgtttcgttcttcggccgggagagtctggggcgggcggaggaggagacgcgtgggacaccgggctgcaggccaggcggggaacggccgccgggacctccggcgccccgaaccgctcccaactttcttccctcactttccccgcccagctgcgcaggatcggcgtcagtgggcgaaagccgggtgctggtgggcgcctggggccggggtcccgcacgtgcgccccgcgctgtcttcccagggcgcgacggggtcctggcgcgcacccgaggggcgggcgctgcccacccgccgagactgcactgtttagggaagctgaggaaggaacccaaaaatacagcctcccctcggaccccgcgggacaggcggctttctgagaggacctccccgcctccgccctccgcgcaggtctcaaactgaagccggcgcccgccagcctggccccggcccctctccaggtccccgcgatcctcgttccccagtgtggagtcgcagcctcgacctgggagctgggagaactcgtctaccaccacctgcggctcccggggaggggtggtgctggcggcggttagtttcctcgttggcaaaaggcaggtggggtccgacccgccccttgggcgcagaccccggccgctcgcctcgcccggtgcgccctcgtcttgcctatccaagagtgccccccacctcccggggaccccagctccctcctgggcgcccgcgccgaaagccccaggctctccttcgatggccgcctcgcggagacgtccgggtctgctccacctgcagcccttcggtcgcgcctgggcttcgcggtggagcgggacgcggctgtcc

SEQ ID NO: 32753 - DNA, 726 bp, Homo sapiens
  chr7:556571-557297
  hyper
cgggccctgacccgggggccgcctccgcccgcccgcccgtcggaccgggagccgcgcctgcccttggggcctcgctccgcgggctgcccgcccggcgcacgggccagggctctgcgcccagggtctgggccggatcctgccgctcccccggcccgagggcaggcgcggggcccgcacacctggcggaggccgcggctgaactttgtgtgacacacgcggcgttttccttaaaggcgaaaacaatcccggggcgagcgagcagccctcggccgccgctgggagagaaagtggagactggaagagaaactcctgactcatccgcccgggcgcttatggctggggattggattctgacctttcggtgcgctcctgcgcggcgccccgcccggccccagctcggggcgcacaggccgcccgcccgcgccctccccgcgcgcggagggaaggggcgcgatttacctacggagtctatctccaggagtcgctggaggtcccggatgctgtggatctgactgcgggccagcctctcgatcacctcgcgggggatctcggcttcctgcaagcagaggccacacggtcagcgcccgcggccccgaccccgccggcacgcgcccccggccgccaggagcgccgccgccccgggcccgaggagaccccgcgagcgccggccgcagtccccgccccagcccccgcggagccctcgccccggccctggaaccagaagcc

SEQ ID NO: 32754 - DNA, 1308 bp, Homo sapiens
  chr7:79764134-79765442
  hyper
cgcgcggaggccgagctcggctgggcttggcgaggctgcggcgcggccaccggcgggagtgcagcggccactgtacccagagattcaaaaccccaaacccgggacttgggggcgctgagccgggccgggaagcagagcctggtcgtgaggaacagccgcccgttgctgtctgcccctttgcggacagcgtctccctcgactccgcttaggaagtggtgggggcggcgtggcccccgtcgggaggcgttcgaacgcccgctaggagagagaaaggattcccctgtgcttggagcccgcactcgggcgcggagggagcggcggcaggctctcgctttcggcaccatgggctgcacgctgagcgccgaggacaaggcggcggtggagcggagtaagatgatcgaccgcaacctccgtgaggacggcgagaaggcggcgcgcgaggtcaagctgctgctgctcggtaagggcggccgggtcggggcccgggggtcggcgggggaccgggtgcggcgctgcgcggccctcggcgtttggaaacccggagggaagggggaggaagcgcccgaggaggcttctgagcgggagctgggtccggcggtgcggaggcaaggcgggtccccctctcccggtgtctggtctctctccgccccggcgggcgaggactccccgcggcggggcgggcgcgtcacttcactcggatgctttcgtgcgacccagcaaagagcccaggcgcgagtccgaggcggcgggtcgcgtggaaaccctttgctttgaagtttagctcagccttgtaaagatgaaggggcattcgcggctagaaaatgaaaacacccccccccccgcgccaccaaccccctcccggaaaacccttcttcgtgtgcggtgtaggttgtgtttcgactgtggttttctcatgcccagagtgccacgtttggtgaaatcagtgcaccttttgtggggcctctgagatggggctgaagcgtctttcctgttaacttcctatggcgactccttaagtggtcaaggagcgctgattacattccccctgcgctgagaaaaggctgcgctggatgcttgatttttcttgctgtgggggcatggaagccacccaagtggggttgggaagctttgctttagtagtaggcaaggcagatactcgagtggtgaaaactgctgtgaaagagcgagagggtcacgccagacaacagggttctgtctccgctgccaccgtttctgatgaatgagatttgccaggtacacgcaaggcttttatttgttcttagcactgttctgttcgtgaaacgctac

SEQ ID NO: 32755 - DNA, 250 bp, Homo sapiens
  chr7:82073323-82073573
  hyper
cgggcggagacgggccgggagcagccctccatacaaggcagccaggaactcccaaagtcggcgccggctcgctcccgccgcccggcgtgcgcaggcggagcggaccagccccgcggggctcccgggggacggccagccgcccagcgggcatccacaggctgcagaggctccaacccaggacttggctcgcgtcttcgggggttatttttgcacatgcaggcagcgttcccccccagccctactcccaggc

SEQ ID NO: 32756 - DNA, 1458 bp, Homo sapiens
  chr7:8473577-8475035
  hyper
cgtgccaaagtaattgtccgtgtcaggaaggtaggcgtgccaagccgcggctctgcggagaaaccacgaccaccgcggccgccggaaacccaaagcgctccagagcgtccccgggtggccgggcagcaccagggacagcgcccgggactccactggggaccggctcctgggcttcccagcgtcgcgggtagaggtacagctgctccgtgtgccgcaggctccagattctcgccaccccacccctccctcagaaactcggactgctctcgtctgccgtgtggttctcttttcttccgaaaggccagtgtcttatctctccacttcaagtccagaggacttgctcagtctcctccccttaagtcatttccaccatcctcaggcagctgtgggaagccgagagtcctggactgttcgtccgggtgccagcgctggcagtcccagtccgtccggtgcagcagcccggcgcattcccctctctccctccctcttgctctccctccctttctgtcttcctctctttcctcctctactgctccctccctctcttgcctcttaagtttcctgcaccgtgaatccaactgtgccaagccttggctcccgcgaaccaatcctgagcgcgacccgggcactgggacggcgactccgccaaagctggacgaggcagccggacccgtctgcgctcgagcatggagacggagcgcctgggagggcacgtccggggcgctggagacgccaggcccgagtagcttctccatggagcctgcccagagcggtcccttctcgcaggattcgccccaagtcctgtgcggtacgtaccctttgcctccgctgttcccggagggtacacctgggagcggggtggtgggcacgaggaagggacggcagggaggggcgctggttaggaaagagaacaagcctggcaggtgaccctcacagctcggaggaggcttcttctctagaagttagcgaccggctgtaccctttggctcgaaaaaagtagtgctagagatgtgactgtgagcattcgtgggtatctctgtgtgcgccaggggttcgaatgggtaaactgatccctgctttcctgtatgcaaattgcattctctttccccacccccacttcaccgaacgtgttgaggtacctagcacctaatcgcggtcagttctacctacctcttcctctcaccgcgcccccctcgctcaatctctctctctccctttatctttcccctctatctctctctgctggtgtgtacgtgtgtgagcactgccagggctggcgaagaaccagccgccgcctttagtccgagccgccgggccacccaacacaagggcaggtctcgctgccggagaagcctgggctccgaaccagcctgcacgcggctcagtgtgctccgccgcctgggaactcgcacccgaggagcgcagggggcaaggagcccctcaccctccctctcgtcc

SEQ ID NO: 32757 - DNA, 969 bp, Homo sapiens
  chr7:87256927-87257896
  binary
cggtgggtagtgagaagctctaggaagggggcgcttccgaacacgcgcgtcgaggagggcgttccaggactctgagggagcagcccagctggaccgaggccgcgtcgttcctgggcttactattcccagacccggactcccgattccggagtcacggcccaggacgcgaaaagactctacactggcaccacgctcctccttaggcgggccgtcagtcccgggtgcgggctgcgctggaggctgaggtgggagcgacatggtgtggaggggcaagaaatgtcggcactagacgcgccaagaaggagattctacgagcaattcccccctcgggccattgtgttgctgtttattagcccctgggagggcgtcaggacaaaaggaaccctcctcccttcttagtacttaggcccaaggtcgggtgtgggagccggcgcgctgctttctaggcaggcactgaagctacggcagccacgcaaataggtatcagccgttaaagcttggctacaggcaaggggggggcaataggcccctggcgctgtggggccccgcatcccacaatccccgcggctagcctgtgtggctactggcggcagctagcgggctgcgaaagcgagcccagcgtccttgacagcagcccacgcgtcggggcggggcttgagcccgctgctttaaaaggtccgcgcggccggccccgcccctctggtgccgcgattggatccggcgggggtagcgttgatttgataggcgcagagagggtggggctgcgcacgcgaggccgggggccttgccgctgcctcccgggctggggcacgagtggctgcggagtgtgggtggttgggcgtgaggggccgacgggctcgcgcgcgcgccgtctgctgaggtccctcgggaaggaggagagcgcctgacgccgacccgcaggcgcagcccggcagtcggcggcgcgccgagggcggaggtggtgcgtgc

SEQ ID NO: 32758 - DNA, 400 bp, Homo sapiens
  chr7:87936014-87936414
  hyper
cgatgggctggggagtggggtcctagcagcagggactggaggtgagctgaagcagataagggacgggagccttgtggcgaaaagtgacccacctgagggagaggcgcttccaaggaggaagcgtccagcgccaacggtgcgcgccgcgggccgggcgggtagagggaagtttcgccgcgcctgcagctcagcgctgtggcttgtggctctcgctgctataagaagccagagaagggcgggacggtctgctggatttcgcaagagaagcggaaaagaacttgtttcctggaagagttcaagctgagaatcccagcagctggaaggaccggaacttctatactgcggtgctgctgatggtgccgctgacccccgggaagcggggattttaagggttacaccc

SEQ ID NO: 32759 - DNA, 748 bp, Homo sapiens
  chr7:89840705-89841453
  hyper
cgcgtaagaaaagcaatttctagagcggaaaggtgaccccacattacaaaaagaaatggagtagaaaaataggcttgactattctaaagctgcttcagaaagaatctccggaagaccacggaggaaccccgcaggggagccaggcggatactcagccgctcgcggtagaagggcgcgcaaagctgcggagccgcgtgtgtggagctccccagtgcactcactgctggctccccctcggtgctctgggcccttcccagctccctccacacagcccggctcccttcacacacccccgccccctccgagctccccgactcctccccgcgctccacggctcttcccgactccagtcagcgttcctcgggccctcggcgccacgagctgtccgggcacgcagcccctagcggcgcgtcgctgccaagccggcctccgcgcgcctccctccttccttctcccctggctgttcgcgatccagcttgggtaggcggggaagcagctggagtgcgaccgccgcggcagccaccctgcaaccgccagtcggaggtgcagtccgtaggccctggcccccgggtgggcccttggggagtcggcgccgctcccggggagctgcaaggctcgcccctgcccggcgtggagggcgcggggggcgcggaggtgagcgggtcggggaggagcgcgaaagaaggtagcggcggcggagttgagggtcaagatgcagtctgcgccacgcgctgcatccatcctcccc

SEQ ID NO: 32760 - DNA, 510 bp, Homo sapiens
  chr7:89950198-89950708
  hyper
cgcctctccctgtgcccccagccctgggtcaggtcacctgggcgcagaagagggaggccacgcgggagtcgaggacctctggtcgccgtccgaggagcgcgtcccggcgcggtgtcctgggtgcgctacgctcgttgggaggaggacggggcgcctcctgcccacgaggaaccagaggtttcagcggggacgacccctgcccagggcgccctctgcccagcggacccacttcccgaggcaggcgaactgggcgaggcagcgctgtgtcacccaccccgagcgctcaccgggcgcccaagctcgctcagcggaaccgtctcggccgcggtgcgcttcggcgctgggaggctctggctggcactggctcaccgcgggtggagctgccggttctgctgcggccacgcggggttcccgagacagacccgccgctgggaccgcgatccttttctagaggctgagtgagggggcagatcgtgggtggccgcgctctcgaggcccctccctgacctc

SEQ ID NO: 32761 - DNA, 945 bp, Homo sapiens
  chr7:93203842-93204787
  hyper
cgttagtctcagtcctccctctccgcccctctcctggttttctgacactttaaatctgtcttaggtggttcagacccaagtctaggttgtattatcagctaaaagacaactgttctttcccctggcttgctttctacctccccagagtccaggaggctcaccttcccggcgccttcctgcgctctcccagctgtgaagctgtgcgcaaacttctcctgacttaagagtctcaatcctagcctgcgctcccgccccacccccgcccgcctcccgacaggcggcagaggaggtggcagcagaattgatgagagccagccccccttcccggaccccgccaccccagtcagccccctcctgtcccaggagagggaggggcgagctggtgagctccgtgcgcctcgcgccagccccagtcgccccggcccgcgagtggggctgcgctcgcggctgctgtctcgctccagtcagggctggggctcaccctgcgagtccgggagactaaagcgccgcgtaaacacaggaagcaggcgagggacccgagttagaccttgagtagggagggagaggggggcgacagtctggactgggagacagctttctgggagccctgtcccctccccggagaatgcaaattccggagggaggtgagtttccacaagaaccttatcccagagacattgtgaccctggcttcttcagccgccactccggggacagcactagggagcctgtggagggagggtcggtagtgggctaggtagtgaaagtggggtgaggacgtgggaagacggctggctaagagctggggtgctaaaaggaaaaaagtgctgagaggaaggagatgagaagagacaccttgggggtcaggcaagccctgggaaagcgtccggagttgggcggctgtaggctggaggcataacttggatttggagaaagagtgccctcc

SEQ ID NO: 32762 - DNA, 1084 bp, Homo sapiens
  chr7:94536809-94537893
  hyper
cggagccaacacccgaacaggaaggggccttgccccaggccggagaggcccctcgcccacggccgagggggtggggcggcctcgcctcgggccggtgcttttcgcccttccttggccgccagaggctccctctctctccctctcccgggattttgctgccgggctccctctctctgcggccctagagttaatcccatcagccgaggtgaggcacctgttaccccggccttcctcacccccgcggcctctcctccattacaccgcggccgccgaaacggcccggcgtggcgaccgcacgtgggccaaaccccttccccggccggcacccctggccccaggccggcccgagcgtgcgggcgcgtcgctgctcgggccgccgcccgcccgcaatggcgttggggagcgcagcgcgcctcccggggccgcccgccgcgggcagggagcgcctgggggccgacgcgcgagtggaagcggccgccgcagccgccctacgcgctgcgccgtgaggagcgggttgcggtgtacccagcgggccggcgccgagccgagccgccgcgtccaccgtggggcggggggcgcctgcgaggagggggtgggagccgcggcggcccgaccctccccgcccgcggcgctcccgctcgggtaagggggaggctgagcgcggggcgaggagttggggagggtggagaggaggaaaaaatcggcttgtacaaaggctgagttgcaggctgggggtgggggtgggttgtggtggaggagcaataggttgaagatcggaggcattatcagtgggatctattgtttcctggcacattgggaggaaaaacaaagggatttattttcattaccctgtaattttttttcttttctatttttttaaatgtggccagggagctcgtctctctccgtgtcacagtgggatccgcctggcagccgccgggagctgcagccaatgtgttaggacttcaggtgcttcttggcacaaagctagactgcgacctcctaccatagcgcttggcgtcacctgctctcccggtcctgccccagggccgagggattgcgtcccgaaccgggcttgggaatc

SEQ ID NO: 32763 - DNA, 471 bp, Homo sapiens
  chr7:95225837-95226308
  hyper
cgccgccgcccgaggttttatttgtctccccgcactctccccccgagtcccaaacaggaggagtcactggaacttggaaacgcgtcctgaactccaggtcgcgccaatcagatcagagaaagaactatgggctccgcccctccagccgcggtcatcacagaatggcctggcacggtgaccacggagtgccctggcaccggtgcccgcggctgtgacggaaaaagggtgggaagaacagggaagaggaagcagaaacaggtatctggggcaacgtgggcttaagattagcctcttgggacggggctccgagtcgcgtgggctggggtcccgcccaggctcgcccttgtttacaactcggaggctgtctcaatgtcaagtactcctggccacaaactgtttccaagagtttggactccgcgtgctcattggtccttgctcagagcagggcttttacagtagccaacaagctgc

SEQ ID NO: 32764 - DNA, 825 bp, Homo sapiens
  chr7:96645632-96646457
  hyper
cgctgggggttggcgcgggggggaagagacagggctgcgtagaaaatatttaaccaatcccacatgtgccaccgctatttgggctatttttaaggcccagagttcgctgcgactgggctgaggttgaaaaaaaccaagcactgtgtgcaaagaccgcgggcaacctgggagcgcgagccgaggccgagagcaagccgcagcgccccctccccaagctctggagcggcgggagcctccaccggctactgtgggagggggtgcttaagggtggaggagctgggtgaccgcaggcggatccgccggcgtggcgagcttcccagaggtgcccgagggcgtctgccctctgggtgtgcctccgggagggctagagagctctaggttggcaagatcccagtgaccattgggaggcgcgcgatccaaggggttgcagggatggggcggagaggaggggcggttgggtagcctaaaggtccctctcccagaatacaaggaagcgctaagaaggaggatgtgggggcagtgttccagcaggcatcccaggctcttccggctggagagctcaggagactgagcggtgtcaaggctggagtgagctatagggtgcgctgggaggaggtgagcgcagcctggctttggcgcgctgtgggtgactcccaggacggcgcggccaggacgccgcgagccgtggggcgtccggtgggatcaaaggaaccagaggaggccagccgacgcgtctgggattgtgggataaggggcgggagagaggagattgacatgggcggggagatcctggcctggcctgtgtcaccggagggggttgtgtgc

SEQ ID NO: 32765 - DNA, 894 bp, Homo sapiens
  chr7:96652889-96653783
  hyper
cggacgaaaaaggaggacggaaagacaaattgtgggcgcctatggagacagaaaaaaaaatctatcctacaacgtgacccctcagcaaccctcctccacctttaaatggctttttgtttttggaaatgcctggataaaccgcaaaactctcggcgcgctcttctctggctggctacaactccttaacccccccacccccacccagcgtgctcagggcacccgcaccgtgctagcttgtggcggctctcaaactaatcctgactgagtttttgaggcagccttctattcccactcgcaccaacccagcacgcttaccaaaattcccaagtaaccttctctttgttacgcaaacgccaggagctgcttgattctttcttctctccacccctatcccctttccagcctagccggcttcctggccgggcaagctgggaattcagcgactgaagggccttggaaggtgccggaggggagagacgctagttcgaacctccacagggctctcctactaaaaatccctaaaatgctggcccgagaaactctctttgttggagggtctgagtcctactcccttctgccgcgtgcgcccccactgccgtgaaccgctgtgacccccaatctaccaccccatctcgcgcccccagcgtcctagtcgccctgtatctgcccagccttccccctgtccatgtacctggctggttggtggcgcttgggacgcggttgtaggcgccgccgtactggtggtaggagctagcgtagctatagtcggcataagctttggctgggtagctcccggcggagccgttcacgccgtgatactgatactggtaggggttgagagctttgccataggaagccgaggtaggagagcagtagccgtgcggggctcccccc

SEQ ID NO: 32766 - DNA, 751 bp, Homo sapiens
  chr7:98245805-98246556
  binary
cgcccagggggcagtcgatgaacacgcgcgcgagggctctgcgagtggcctcgtgactttgtccctaactccgggtgtcccctccttcccatcagcgtccggcgcctggtcctggtcccggtccccgaggcccccgggattcttcccgagcgttttccgagttggcgcggggggtggaggcggggccatggagcgcgtcccggggaccgttgcatccggaggcggccgtcgtgcggctccttcccgcctcgagagtgaggtggccgggccttgacgagaaggcccacgcctgccgcgggggtggctcgcgatggcagtcggggttcgagtcccgcctggggggctgctcctgctggagaaaacgcctccctgagggcggcggcaaacgcgcagcgaggccccgtgccgcgccagaagccaccctgagaaaggggcaccgggacaccgaggggttcccactttctcctcagcctgtgacgcccgcgtcctcgggtgggttcgaggggcgcctgggcacggccagccgaggctctcgagagccccagtgtcgttttccacctcaggcctcctttcctgaggcagagcccgggacctcgcgctctcgcctcaggctccggcccacgctcccgcccggccgccaggcgcgcaacggaaagcgcccccgccccgccccgctccgcccactgcgtgacgcgcacccggccgagccaatcagagctcgtggcgcgcgccccacacgccggccccctcc

SEQ ID NO: 32767 - DNA, 757 bp, Homo sapiens
  chr7:98247077-98247834
  binary
cgcgcggcgcgggggccacgggcaaggacactatgggcgacctgccgcgggaccccggccacgtcgtggagcagctcagccgctcgctgcagaccctcaaggaccgcctggagagcctcgaggtagcggcccgcggggagcgcgggggacctggaatggggacgctcccgagtcgggggcggaagactcgggaggatggggaaagggggcctggccctggggagggtgtgatcgtccgtgggggtgagctggacttgagggtgaaaggcggggatctagatcctgctcgggaactcccctgcgtggtatcccttcccacaccgctgctcttgctggaaggaaacgtttaaattccacccccgcgcgtcgggactgccagcgggatccgccgagcacttcccgaggtccgggctagcgaacccagacggccaagccgcgggcgccaaatacccggggacgcggtagcctctatcctcttgcaaatctccaaatctccgcgagccgggatgcgctcccgcaggccgtgcgggttgctgcgaggctgccgcgggaggtcagctgccccgggcatgtggtgtttctttctttaaatcaggtcaggctgagctagagggggcggaagtctgggggcggaggtcgcagggaggcgagcgcagggggtcaccggcgaccccagagcgcgcattagaggggcaacctctggttaacttcaaagactcccgtgtctgcaagttggaccattttaaggtgctcttcc
